United States Patent Application Publication US 2011/0183924 A1 - sequence listing, part 45

SEQ ID NO: 113685 - DNA, 3403 bp, Homo sapiens
gtgaccaacccccgcccctcaccccacgtggttggaggtttccagaagcgctgccgccaccgcatcgcgcagctctttgccgtcggagcgcttgtttgctgcctcgtactcctccatttatccgccatgataagtgccagccgagctgcagcagcccgtctcgtgggcgccgcagcctcccggggccctacggccgcccgccaccaggatagctggaatggccttagtcatgaggcttttagacttgtttcaaggcgggattatgcatcagaagcaatcaagggagcagttgttggtattgatttgggtactaccaactcctgcgtggcagttatggaaggtaaacaagcaaaggtgctggagaatgccgaaggtgccagaaccaccccttcagttgtggcctttacagcagatggtgagcgacttgttggaatgccggccaagcgacaggctgtcaccaacccaaacaatacattttatgctaccaagcgtctcattggccggcgatatgatgatcctgaagtacagaaagacattaaaaatgttccctttaaaattgtccgtgcctccaatggtgatgcctgggttgaggctcatgggaaattgtattctccgagtcagattggagcatttgtgttgatgaagatgaaagagactgcagaaaattacttggggcacacagcaaaaaatgctgtgatcacagtcccagcttatttcaatgactcgcagagacaggccactaaagatgctggccagatatctggactgaatgtgcttcgggtgattaatgagcccacagctgctgctcttgcctatggtctagacaaatcagaagacaaagtcattgctgtatatgatttaggtggtggaacttttgatatttctatcctggaaattcagaaaggagtatttgaggtgaaatccacaaatggggataccttcttaggtggggaagactttgaccaggccttgctacggcacattgtgaaggagttcaagagagagacaggggttgatttgactaaagacaacatggcacttcagagggtacgggaagctgctgaaaaggctaaatgtgaactctcctcatctgtgcagactgacatcaatttgccctatcttacaatggattcttctggacccaagcatttgaatatgaagttgacccgtgctcaatttgaagggattgtcactgatctaatcagaaggactatcgctccatgccaaaaagctatgcaagatgcagaagtcagcaagagtgacataggagaagtgattcttgtgggtggcatgactaggatgcccaaggttcagcagactgtacaggatctttttggcagagccccaagtaaagctgtcaatcctgatgaggctgtggccattggagctgccattcagggaggtgtgttggccggcgatgtcacggatgtgctgctccttgatgtcactcccctgtctctgggtattgaaactctaggaggtgtctttaccaaacttattaataggaataccactattccaaccaagaagagccaggtattctctactgccgctgatggtcaaacgcaagtggaaattaaagtgtgtcagggtgaaagagagatggctggagacaacaaactccttggacagtttactttgattggaattccaccagcccctcgtggagttcctcagattgaagttacatttgacattgatgccaatgggatagtacatgtttctgctaaagataaaggcacaggacgtgagcagcagattgtaatccagtcttctggtggattaagcaaagatgatattgaaaatatggttaaaaatgcagagaaatatgctgaagaagaccggcgaaagaaggtgattacttcttgtcttctgaactttaatcttagtaaagctcagtcttgacagtgggagtttggggctgggcgcagtgtctcactcctgtaatcccagcactgtaagcccactgccaaggtgggcagatcgtttgaagccgggcgtggtggtgcacgcctgcagtcccagctacttgggaggctcaggcaggagaatcgcttgaacaagaaagtgggagagtttggacatgtcataggttgtgggtaagagaaaacctaagataatctattcttccttccccgttgtttataccttatgtttgcagtgcctttattatttcttctgttttccctgtcacaattctgatgttacaaaatctagcccaaatctctctcaaagccatcccagactctttcatgccactctgatttctccctcttactctatttttatctgtaactgtatgtaacacatagcttattgtctgagtatagacattcagcaaactttggttgattggaaagtcttcgtttaaacttctaatttctctaaggaacgagttgaagcagttaatatggctgaaggaatcattcacgacacagaaaccaagatggaagaattcaaggaccaattacctgctgatgagtgcaacaagctgaaagaagagatttccaaaatgagggagctcctggctagaaaagacagcgaaacaggagaaaatattagacaggcagcatcctctcttcagcaggcatcactgaagctgttcgaaatggcatacaaaaagatggcatctgagcgagaaggctctggaagttctggcactggggaacaaaaggaagatcaaaaggaggaaaaacagtaataatagcagaaattttgaagccagaaggacaacatatgaagcttaggagtgaagagacttcctgagcagaaatgggcgaacttcagtctttttactgtgtttttgcagtattctatatataatttccttaatttgtaaatttagtgaccattagctagtgatcatttaatggacagtgattctaacagtataaagttcacaatattctatgtccctagcctgtcatttttcagctgcatgtaaaaggaggtaggatgaattgatcattataaagatttaactattttatgctgaagtgaccatattttcaaggggtgaaaccatctcgcacacagcaatgaaggtagtcatccatagacttgaaatgagaccacatatggggatgagatccttctagttagcctagtactgctgtactggcctgtatgtacatggggtccttcaactgaggccttgcaagtcaagctggctgtgccatgtttgtagatggggcagaggaatctagaacaatgggaaacttagctatttatattaggtacagctattaaaacaaggtaggaatgaggctagacctttaacttccctaaggcatacttttctagctaccttctgccctgtgtctggcacctacatccttgatgattgttctcttacccattctggaatttttttttttttaaataaatacagaaagcatcttga

SEQ ID NO: 113686 - DNA, 2917 bp, Homo sapiens
gtgaccaacccccgcccctcaccccacgtggttggaggtttccagaagcgctgccgccaccgcatcgcgcagctctttgccgtcggagcgcttgtttgctgcctcgtactcctccatttatccgccatgataagtgccagccgagctgcagcagcccgtctcgtgggcgccgcagcctcccggggccctacggccgcccgccaccaggatagctggaatggccttagtcatgaggcttttagacttgtttcaaggcgggattatgcatcagaagcaatcaagggagcagttgttggtattgatttgggtactaccaactcctgcgtggcagttatggaaggtaaacaagcaaaggtgctggagaatgccgaaggtgccagaaccaccccttcagttgtggcctttacagcagatggtgagcgacttgttggaatgccggccaagcgacaggctgtcaccaacccaaacaatacattttatgctaccaagcgtctcattggccggcgatatgatgatcctgaagtacagaaagacattaaaaatgttccctttaaaattgtccgtgcctccaatggtgatgcctgggttgaggctcatgggaaattgtattctccgagtcagattggagcatttgtgttgatgaagatgaaagagactgcagaaaattacttggggcacacagcaaaaaatgctgtgatcacagtcccagcttatttcaatgactcgcagagacaggccactaaagatgctggccagatatctggactgaatgtgcttcgggtgattaatgagcccacagctgctgctcttgcctatggtctagacaaatcagaagacaaagtcattgctgtatatgatttaggtggtggaacttttgatatttctatcctggaaattcagaaaggagtatttgaggtgaaatccacaaatggggataccttcttaggtggggaagactttgaccaggccttgctacggcacattgtgaaggagttcaagagagagacaggggttgatttgactaaagacaacatggcacttcagagggtacgggaagctgctgaaaaggctaaatgtgaactctcctcatctgtgcagactgacatcaatttgccctatcttacaatggattcttctggacccaagcatttgaatatgaagttgacccgtgctcaatttgaagggattgtcactgatctaatcagaaggactatcgctccatgccaaaaagctatgcaagatgcagaagtcagcaagagtgacataggagaagtgattcttgtgggtggcatgactaggatgcccaaggttcagcagactgtacaggatctttttggcagagccccaagtaaagctgtcaatcctgatgaggctgtggccattggagctgccattcagggaggtgtgttggccggcgatgtcacggatgtgctgctccttgatgtcactcccctgtctctgggtattgaaactctaggaggtgtctttaccaaacttattaataggaataccactattccaaccaagaagagccaggtattctctactgccgctgatggtcaaacgcaagtggaaattaaagtgtgtcagggtgaaagagagatggctggagacaacaaactccttggacagtttactttgattggaattccaccagcccctcgtggagttcctcagattgaagttacatttgacattgatgccaatgggatagtacatgtttctgctaaagataaaggcacaggacgtgagcagcagattgtaatccagtcttctggtggattaagcaaagatgatattgaaaatatggttaaaaatgcagagaaatatgctgaagaagaccggcgaaagaaggaacgagttgaagcagttaatatggctgaaggaatcattcacgacacagaaaccaagatggaagaattcaaggaccaattacctgctgatgagtgcaacaagctgaaagaagagatttccaaaatgagggagctcctggctagaaaagacagcgaaacaggagaaaatattagacaggcagcatcctctcttcagcaggcatcactgaagctgttcgaaatggcatacaaaaagatggcatctgagcgagaaggctctggaagttctggcactggggaacaaaaggaagatcaaaaggaggaaaaacagtaataatagcagaaattttgaagccagaaggacaacatatgaagcttaggagtgaagagacttcctgagcagaaatgggcgaacttcagtctttttactgtgtttttgcagtattctatatataatttccttaatttgtaaatttagtgaccattagctagtgatcatttaatggacagtgattctaacagtataaagttcacaatattcaaaaaaaaaaaaaaaaaaaaaaaaaaaaaaaaaaaaaaaaaaaaaaaaaaaaaaaaaaaaagaacaaagaaaaagaagaaaacaaaaacaacaaagaaaaaaaaagaaacaacaggaaccaccagaacatgaaaaaataatgagagaaccaagatataagcgcgacaatcaagcacgagccaataaagaaagacacacaactaagacagtgtaaggaacgagtagcaggtcagccaaaggggacaagcaaaaagagagagaaatactaagaacggggctagcggagcacacatggagaagagacaacaggtaatgacacacgacgcgagcacacagaaatgagaaagaaaaagcagacgggggtccgacgacgcccagcaaaccaaggaccagcagaggaagagctgggagaagcaaatatcgacacaggggcaaagagcacacagagacgaggaacggatcgaagaaagagaaaaacataagaacgcggagacacagcgaacagagaagcaacacatcgagagagacaaagaaacgaaagcaa

SEQ ID NO: 113687 - DNA, 2276 bp, Homo sapiens
gaaattaggctaggtacgaggctgggtttgaattcggccgagggttgatgaagatgaaagagactgcagaaaattacttggggcacacagcaaaaaatgctgtgatcacagtcccagcttatttcaatgactcgcagagacaggccactaaagatgctggccagatatctggactgaatgtgcttcgggtgattaatgagcccacagctgctgctcttgcctatggtctagacaaatcagaagacaaagtcattgctgtatatgatttaggtggtggaacttttgatatttctatcctggaaattcagaaaggagtatttgaggtgaaatccacaaatggggataccttcttaggtggggaagactttgaccaggccttgctacggcacattgtgaaggagttcaagagagagacaggggttgatttgactaaagacaacatggcacttcagagggtacgggaagctgctgaaaaggctaaatgtgaactctcctcatctgtgcagactgacatcaatttgccctatcttacaatggattcttctggacccaagcatttgaatatgaagttgacccgtgctcaatttgaagggattgtcactgatctaatcagaaggactatcgctccatgccaaaaagctatgcaagatgcagaagtcagcaagagtgacataggagaagtgattcttgtgggtggcatgactaggatgcccaaggttcagcagactgtacaggatctttttggcagagccccaagtaaagctgtcaatcctgatgaggctgtggccattggagctgccattcagggaggtgtgttggccggcgatgtcacggatgtgctgctccttgatgtcactcccctgtctctgggtattgaaactctaggaggtgtctttaccaaacttattaataggaataccactattccaaccaagaagagccaggtattctctactgccgctgatggtcaaacgcaagtggaaattaaagtgtgtcagggtgaaagagagatggctggagacaacaaactccttggacagtttactttgattggaattccaccagcccctcgtggagttcctcagattgaagttacatttgacattgatgccaatgggatagtacatgtttctgctaaagataaaggcacaggacgtgagcagcagattgtaatccagtcttctggtggattaagcaaagatgatattgaaaatatggttaaaaatgcagagaaatatgctgaagaagaccggcgaaagaaggaacgagttgaagcagttaatatggctgaaggaatcattcacgacacagaaaccaagatggaagaattcaaggaccaattacctgctgatgagtgcaacaagctgaaagaagagatttccaaaatgagggagctcctggctagaaaagacagcgaaacaggagaaaatattagacaggcagcatcctctcttcagcaggcatcactgaagctgttcgaaatggcatacaaaaagatggcatctgagcgagaaggctctggaagttctggcactggggaacaaaaggaagatcaaaaggaggaaaaacagtaataatagcagaaattttgaagccagaaggacaacatatgaagcttaggagtgaagagacttcctgagcagaaatgggcgaacttcagtctttttactgtgtttttgcagtattctatatataatttccttaatttgtaaatttagtgaccattagctagtgatcatttaatggacagtgattctaacagtataaagttcacaatattctatgtccctagcctgtcatttttcagctgcatgtaaaaggaggtaggatgaattgatcattataaagatttaactattttatgctgaagtgaccatattttcaaggggtgaaaccatctcgcacacagcaatgaaggtagtcatccatagacttgaaatgagaccacatatggggatgagatccttctagttagcctagtactgctgtactggcctgtatgtacatggggtccttcaactgaggccttgcaagtcaagctggctgtgccatgtttgtagatggggcagaggaatctagaacaatgggaaacttagctatttatattaggtacagctattaaaacaaggtaggaatgaggctagacctttaacttccctaaggcatacttttctagctaccttctgccctgtgtctggcacctacatccttgatgattgttctcttacccattctggaatttttttttttttaaataaatacagaaagcatcttga

SEQ ID NO: 113688 - DNA, 1809 bp, Homo sapiens
gtcttctgcgacgactctcttaatcttccaccgctacacactgacatcaatttgccctatcttacaatggattcttctggacccaagcatttgaatatgaagttgacccgtgctcaatttgaagggattgtcactgatctaatcagaaggactatcgctccatgccaaaaagctatgcaagatgcagaagtcagcaagagtgacataggagaagtgattcttgtgggtggcatgactaggatgcccaaggttcagcagactgtacaggatctttttggcagagccccaagtaaagctgtcaatcctgatgaggctgtggccattggagctgccattcagggaggtgtgttggccggcgatgtcacggatgtgctgctccttgatgtcactcccctgtctctgggtattgaaactctaggaggtgtctttaccaaacttattaataggaataccactattccaaccaagaagagccaggtattctctactgccgctgatggtcaaacgcaagtggaaattaaagtgtgtcagggtgaaagagagatggctggagacaacaaactccttggacagtttactttgattggaattccaccagcccctcgtggagttcctcagattgaagttacatttgacattgatgccaatgggatagtacatgtttctgctaaagataaaggcacaggacgtgagcagcagattgtaatccagtcttctggtggattaagcaaagatgatattgaaaatatggttaaaaatgcagagaaatatgctgaagaagaccggcgaaagaaggaacgagttgaagcagttaatatggctgaaggaatcattcacgacacagaaaccaagatggaagaattcaaggaccaattacctgctgatgagtgcaacaagctgaaagaagagatttccaaaatgagggagctcctggctagaaaagacagcgaaacaggagaaaatattagacaggcagcatcctctcttcagcaggcatcactgaagctgttcgaaatggcatacaaaaagatggcatctgagcgagaaggctctggaagttctggcactggggaacaaaaggaagatcaaaaggaggaaaaacagtaataatagcagaaattttgaagccagaaggacaacatatgaagcttaggagtgaagagacttcctgagcagaaatgggcgaacttcagtctttttactgtgtttttgcagtattctatatataatttccttaatttgtaaatttagtgaccattagctagtgatcatttaatggacagtgattctaacagtataaagttcacaatattctatgtccctagcctgtcatttttcagctgcatgtaaaaggaggtaggatgaattgatcattataaagatttaactattttatgctgaagtgaccatattttcaaggggtgaaaccatctcgcacacagcaatgaaggtagtcatccatagacttgaaatgagaccacatatggggatgagatccttctagttagcctagtactgctgtactggcctgtatgtacatggggtccttcaactgaggccttgcaagtcaagctggctgtgccatgtttgtagatggggcagaggaatctagaacaatgggaaacttagctatttatattaggtacagctattaaaacaaggtaggaatgaggctagacctttaacttccctaaggcatacttttctagctaccttctgccctgtgtctggcacctacatccttgatgattgttctcttacccattctggaatttttttttttttaaataaatacagaaagcatcttga

SEQ ID NO: 113689 - DNA, 1595 bp, Homo sapiens
  misc_feature (15)..(15): n is a, c, g, or t
  misc_feature (20)..(20): n is a, c, g, or t
ttatgagaatatcgnccccnccgagttattggatatcgtcgatccaggcgctcgatctttttggcagagccccaagtaaagctgtcaatcctgatgaggctgtggccattggagctgccattcagggaggtgtgttggccggcgatgtcacggatgtgctgctccttgatgtcactcccctgtctctgggtattgaaactctaggaggtgtctttaccaaacttattaataggaataccactattccaaccaagaagagccaggtattctctactgccgctgatggtcaaacgcaagtggaaattaaagtgtgtcagggtgaaagagagatggctggagacaacaaactccttggacagtttactttgattggaattccaccagcccctcgtggagttcctcagattgaagttacatttgacattgatgccaatgggatagtacatgtttctgctaaagataaaggcacaggacgtgagcagcagattgtaatccagtcttctggtggattaagcaaagatgatattgaaaatatggttaaaaatgcagagaaatatgctgaagaagaccggcgaaagaaggaacgagttgaagcagttaatatggctgaaggaatcattcacgacacagaaaccaagatggaagaattcaaggaccaattacctgctgatgagtgcaacaagctgaaagaagagatttccaaaatgagggagctcctggctagaaaagacagcgaaacaggagaaaatattagacaggcagcatcctctcttcagcaggcatcactgaagctgttcgaaatggcatacaaaaagatggcatctgagcgagaaggctctggaagttctggcactggggaacaaaaggaagatcaaaaggaggaaaaacagtaataatagcagaaattttgaagccagaaggacaacatatgaagcttaggagtgaagagacttcctgagcagaaatgggcgaacttcagtctttttactgtgtttttgcagtattctatatataatttccttaatttgtaaatttagtgaccattagctagtgatcatttaatggacagtgattctaacagtataaagttcacaatattctatgtccctagcctgtcatttttcagctgcatgtaaaaggaggtaggatgaattgatcattataaagatttaactattttatgctgaagtgaccatattttcaaggggtgaaaccatctcgcacacagcaatgaaggtagtcatccatagacttgaaatgagaccacatatggggatgagatccttctagttagcctagtactgctgtactggcctgtatgtacatggggtccttcaactgaggccttgcaagtcaagctggctgtgccatgtttgtagatggggcagaggaatctagaacaatgggaaacttagctatttatattaggtacagctattaaaacaaggtaggaatgaggctagacctttaacttccctaaggcatacttttctagctaccttctgccctgtgtctggcacctacatccttgatgattgttctcttacccattctggaatttttttttttttaaataaatacagaaagcatcttga

SEQ ID NO: 113690 - DNA, 1500 bp, Homo sapiens
  misc_feature (7)..(8): n is a, c, g, or t
cggggannaaccaaaataaaggcaggtacgggctgtgtgttggccggcgatgtcacggatgtgctgctccttgatgtcactcccctgtctctgggtattgaaactctaggaggtgtctttaccaaacttattaataggaataccactattccaaccaagaagagccaggtattctctactgccgctgatggtcaaacgcaagtggaaattaaagtgtgtcagggtgaaagagagatggctggagacaacaaactccttggacagtttactttgattggaattccaccagcccctcgtggagttcctcagattgaagttacatttgacattgatgccaatgggatagtacatgtttctgctaaagataaaggcacaggacgtgagcagcagattgtaatccagtcttctggtggattaagcaaagatgatattgaaaatatggttaaaaatgcagagaaatatgctgaagaagaccggcgaaagaaggaacgagttgaagcagttaatatggctgaaggaatcattcacgacacagaaaccaagatggaagaattcaaggaccaattacctgctgatgagtgcaacaagctgaaagaagagatttccaaaatgagggagctcctggctagaaaagacagcgaaacaggagaaaatattagacaggcagcatcctctcttcagcaggcatcactgaagctgttcgaaatggcatacaaaaagatggcatctgagcgagaaggctctggaagttctggcactggggaacaaaaggaagatcaaaaggaggaaaaacagtaataatagcagaaattttgaagccagaaggacaacatatgaagcttaggagtgaagagacttcctgagcagaaatgggcgaacttcagtctttttactgtgtttttgcagtattctatatataatttccttaatttgtaaatttagtgaccattagctagtgatcatttaatggacagtgattctaacagtataaagttcacaatattctatgtccctagcctgtcatttttcagctgcatgtaaaaggaggtaggatgaattgatcattataaagatttaactattttatgctgaagtgaccatattttcaaggggtgaaaccatctcgcacacagcaatgaaggtagtcatccatagacttgaaatgagaccacatatggggatgagatccttctagttagcctagtactgctgtactggcctgtatgtacatggggtccttcaactgaggccttgcaagtcaagctggctgtgccatgtttgtagatggggcagaggaatctagaacaatgggaaacttagctatttatattaggtacagctattaaaacaaggtaggaatgaggctagacctttaacttccctaaggcatacttttctagctaccttctgccctgtgtctggcacctacatccttgatgattgttctcttacccattctggaatttttttttttttaaataaatacagaaagcatcttga

SEQ ID NO: 113691 - DNA, 3351 bp, Homo sapiens
gtgaccaacccccgcccctcaccccacgtggttggaggtttccagaagcgctgccgccaccgcatcgcgcagctctttgccgtcggagcgcttgtttgctgcctcgtactcctccatttatccgccatgataagtgccagccgagctgcagcagcccgtctcgtgggcgccgcagcctcccggggccctacggccgcccgccaccaggatagctggaatggccttagtcatgaggcttttagacttgtttcaaggcgggattatgcatcagaagcaatcaagggagcagttgttggtattgatttgggtactaccaactcctgcgtggcagttatggaaggtaaacaagcaaaggtgctggagaatgccgaaggtgccagaaccaccccttcagttgtggcctttacagcagatggtgagcgacttgttggaatgccggccaagcgacaggctgtcaccaacccaaacaatacattttatgctaccaagcgtctcattggccggcgatatgatgatcctgaagtacagaaagacattaaaaatgttccctttaaaattgtccgtgcctccaatggtgatgcctgggttgaggctcatgggaaattgtattctccgagtcagattggagcatttgtgttgatgaagatgaaagagactgcagaaaattacttggggcacacagcaaaaaatgctgtgatcacagtcccagcttatttcaatgactcgcagagacaggccactaaagatgctggccagatatctggactgaatgtgcttcgggtgattaatgagcccacagctgctgctcttgcctatggtctagacaaatcagaagacaaagtcattgctgtatatgatttaggtggtggaacttttgatatttctatcctggaaattcagaaaggagtatttgaggtgaaatccacaaatggggataccttcttaggtggggaagactttgaccaggccttgctacggcacattgtgaaggagttcaagagagagacaggggttgatttgactaaagacaacatggcacttcagagggtacgggaagctgctgaaaaggctaaatgtgaactctcctcatctgtgcagactgacatcaatttgccctatcttacaatggattcttctggacccaagcatttgaatatgaagttgacccgtgctcaatttgaagggattgtcactgatctaatcagaaggactatcgctccatgccaaaaagctatgcaagatgcagaagtcagcaagagtgacataggagaagtgattcttgtgggtggcatgactaggatgcccaaggttcagcagactgtacaggatctttttggcagagccccaagtaaagctgtcaatcctgatgaggctgtggccattggagctgccattcagggaggtgtgttggccggcgatgtcacggatgtgctgctccttgatgtcactcccctgtctctgggtattgaaactctaggaggtgtctttaccaaacttattaataggaataccactattccaaccaagaagagccaggtaagagccatcacttcctaccttgtcacatgggttttaggttctatgacggatgtaattgcagccactttcatgagttttttctagaaaacttcatttttatctgttttacagtttagaatattaaacagttaactgtgggtggtgagaatcctgtgttttgttttttgtttttttgttaccagaaaagttcttacatgttagctggtagtgatgattataagaaggacatcagtagtctcctccacaggattaacataatttgctaaaagggatctcagtcatttgagactgaatttcctgtagtcttctgttctcaaagacagtaaaaagggtagtctggaccagacttaggggagtgttcttatcttatggatgaatgaagggggtggtatgagggtgccgagataccaagcagggctacttggacatggcttgttcttgaagtaggaattatttctggctgggcaccgtggctcatgcctgtaatcccagcactttgggaggctgtggcgagaggattacttgagctgaggagtttgagaccagcctgggtaacatggtgaagctccctctctccaaaaagttaaattagccaggcatggtgctgtgtacctgtagtcccagctactcaggaggctgaggtgggtggatcacttgagcatgggaggcagaggttgcaatgagctgaggtcatgccactgcactccagcctgggcgacagtatgaagtgaggtcttgtctcaaaaaaaaaaaaaaaattatttcctgacttacccaatcttgtgatgtttttccataaaactatggttgttggtatatttgtgccgtgatgtatttgtcaacacatcactctgaagaaaagtatgtggtgactttctgtgactgagcatgatacatcttctttctctgatcccgtttccccagatgagcatgtttcaacattttagttccttttgaggacttctgtcctaatgctgcgtctttgtacaatgcatttgcttagctgaaacagttgctattgtatgcccatttgctgtactaatcctacttctattccctataaagacatcagcctttgttctgaacataccgtaaattaggagtcttccagtcttggaatgtaaacctttggctttcattttttctatagaaatggagtaggttaatcacattgacaacccaggagggtttcttcttccctaggtattctctactgccgctgatggtcaaacgcaagtggaaattaaagtgtgtcagggtgaaagagagatggctggagacaacaaactccttggacagtttactttggtaggttattgtgaatcctgaatactatgcctccttcactgtaaagtgagataatattctaagccataaaaatattagtataaactgctggcatacacatacatactgagtagtcttgagaagaagggatgcaactagatacccatggcatcagtttttacctgaaagccttgctttttccttgtgccttaggaatttcctcagaaataaactcctgattactcatttaaaagacatttgatattgttactggtttctgatcagcattgcttattggttattggtgaggtgaataataggagatttgctatctgtcatttagtgtgtccacaggtacatacagccattatggttacttgctatagctaaacttcactggtataaaaccagttgatttcaggcagcgaactactactgttgcttataaactttgtgttttgtacattaaatcacttgtttctcccaggaaccaagtgacttgtttactagaaaaccatatagatt

SEQ ID NO: 113692 - DNA, 932 bp, Homo sapiens
ctactactactaaattcggcggcgtcgacgagatttccaaaatgagggagctcctggctagaaaagacagcgaaacaggagaaaatattagacaggcagcatcctctcttcagcaggcatcactgaagctgttcgaaatggcatacaaaaagatggcatctgagcgagaaggctctggaagttctggcactggggaacaaaaggaagatcaaaaggaggaaaaacagtaataatagcagaaattttgaagccagaaggacaacatatgaagcttaggagtgaagagacttcctgagcagaaatgggcgaacttcagtctttttactgtgtttttgcagtattctatatataatttccttaatttgtaaatttagtgaccattagctagtgatcatttaatggacagtgattctaacagtataaagttcacaatattctatgtccctagcctgtcatttttcagctgcatgtaaaaggaggtaggatgaattgatcattataaagatttaactattttatgctgaagtgaccatattttcaaggggtgaaaccatctcgcacacagcaatgaaggtagtcatccatagacttgaaatgagaccacatatggggatgagatccttctagttagcctagtactgctgtactggcctgtatgtacatggggtccttcaactgaggccttgcaagtcaagctggctgtgccatgtttgtagatggggcagaggaatctagaacaatgggaaacttagctatttatattaggtacagctattaaaacaaggtaggaatgaggctagacctttaacttccctaaggcatacttttctagctaccttctgccctgtgtctggcacctacatccttgatgattgttctcttacccattctggaatttttttttttttaaataaatacagaaagcatcttga

SEQ ID NO: 113693 - DNA, 566 bp, Homo sapiens
cgagagccaccagcagctgtgctgccaacgcttcgagcgcctctccgactccgccaagcaagagctcatggacttcaagtcccgccgggtctcctcttttcgaaagaatctcattgagctggcagagctggagctcaaacacgccaaggccagcaccctgattctccggaacacccttgttgccctaaagggggagccttagagtagccagagctcagccagaccctaatctgggatctccagtgaccagggtatcccagacccctctctccggcaagatgtctccttccctagcagtgccactagccacaccctcactctgccccacatcctctcagggaaagcccaaaccccctatcaccaccaccacaggtgccaggccctgcaagacacagggcagcatgggcatcataactggccacagtcagcagagccccagggaccctgacacctctccccaggaagctgaggaacagcctctaccctcacccatagccctgaaggaatcatagctcacttgatcccggcctgttctccttcgcaaataaaaaccctggttttgtagc

SEQ ID NO: 113694 - DNA, 786 bp, Homo sapiens
gggcaaatgatatgtagaaatatttcaacagaaacgcacatagcaatcaaatgtatgaaaagatgttcaattttattagtaatcagagaaatgcaaatgaagaccataataagttaccattcttcactcacaagattggcaaagattaagaaaaccaacaatgccaagttatctttgtggatatggatcaacaagaatgtttgtgcactgcttctaagagtataactgattcatcaccaagttggagaaaaacttagtattagaaagttggagcttacattctccacaacctagcacatcctcccactcccacctcagtatttacctagagatacctttgcatttgtgcaaggtaatattgaacaagtgttcatagcaactcagattcccatcagcaagaaaatggatctataaattgtggcacatttatgcaatggaatattttatagcattaaaataaataagtataacaacatggaacaatatagttgaatcttagtaaaagtgaaggaaagaaactgcagaatactgcatacaatatgatactttataaagctcgaaaagaagcaaaactatacaatatataagtggtaaaactggaaaaaatgtttgtcacaaaattcaagagagtagttattttttgcacaggttacctgttgcataagtaaatgcaacggtattattaatgtcctattttataagttgaagggtggatttaatttgtcctcactacatatatatagttatatccatttgcagatatcaggttacacataaaaatttaac

SEQ ID NO: 113695 - DNA, 355 bp, Homo sapiens
tcatattctataattaggatgcagactaaaactctgcatttgagtataagcaagcttgtttgaatcttagaagctatggattgtctttgattatcctttgctgtatcagacatgtagcacacttttgagcagcttttactcaactcactagtattaggttgtgccagtttagagtactttctgagacatatctaaaagcaaaaatggtgacatggaaagattctcgctgtaatggggattaagaaaaatcctctttctctttctctatctcttagatagtcttagcatattcaataccttagggcaggaattgataatctagcaatgggaatgggtttaggggatctgtagatcc

SEQ ID NO: 113696 - DNA, 639 bp, Homo sapiens
ctggtggattttaatatttcacagcatgttctgtgaccttgaagtagacgccttaagatttagcagttagttcactgtggaaagatgctcccatgagtccccccaaagacactgatttgccctgggttatgcttctgagccactaattcttgggattagtttgacctaaagcatggctgtctgtcagagtatacctttgtgcatttccttccctcaccaaagtgccggcttgacagagggcttcttaattggtgtggacaaaaagtaatatccctgccatagtagtctacacatttcacaattcacgttcgatttcagcatatggattgctgttcaggtcaagtcaaatacatagctgtttaaaagcaagcaaggttaagtcacttaaattgccttctctttggacttggaatgaaagttaccaaactcgatgataaagtttgtcacaaaggaagtatatatagatgtggcacattgtttattttattattaaatattgtggaagtatttaaatttaatgctaatgttaccttccttccctgaacatggctattgctttttaaaggaaattttatatctgaatcacttctgactattctaagtccagtagttatcattctttggggagagccttttttt

SEQ ID NO: 113697 - DNA, 435 bp, Homo sapiens
gtgcacaatgatggtgggagtataatttgaaagggaatttcagacaactggatactacatatcaaaagctttagaatttatattaatttatcctgagaaaagaaatgtacccccaaaacatagttattaggatgattaaagccctgttgtttacaataagaaacatttagaaattatctaagtgtctggtaataaggaatagttaaacaaattagagtacaaccacatattggaattgaatgtagtgtacatataaaagctagcttttcataatatttaaggaactagatgagattaaaatgtaggactagtgatcaaagaatattttgaaacttatctcccaggggatctttattttggggtcatgggtgtgctaggaatgttgatgctgcttaagtcaactctaaatagaaagttcagtggcagcagtgcgtg

SEQ ID NO: 113698 - DNA, 784 bp, Homo sapiens
gattacaggcgcctaccataacgcctggctaatttttgtatttttagtagagacagggttttgccatgttggccaggctggtctccgactcctgacctcaggtgatccgtccaccttggcctcaaaaagtgctgggattacaggcgtgaaccaccgcgcccagctgtaagtttctttgatcaatcgaatgtggcagagggacatggtgctagttcctggcctaggcctcaagaggtcttgtctatttcttattgttctcttagaaggccactgctaccatgtgaacggctcacctgctgggggatgagcgatcacatggctccttcaaccctgtccccagagccgccagccagccgactgggagatatgggaatgaggacatcctagaccagcctcctcacctcctccccagtgcccgaatagacctgaccactgactgatggaaacactcaagtgaactagccaagatcagcaggtcctggcccagatcagcagaaccacccggctggcccatagactctgagcaataatagacagatacttcgtgttttaagccactgagttagaggtggtttattgttcagcaacaactaactgatatggatgcctaggaaaatctggcataaaaaggctgccactgcagtaaatagaagcagttcatttttctgtttgtttgtttgcttgtttagagatggggtcttgccctgttgcccaggctggagtacagtgtcaccattatagctcactgcagattcaaactcatgggctcaaaagatcctcccac

SEQ ID NO: 113699 - DNA, 217 bp, Homo sapiens
ccagatgcattagaaaatcgttatgaaaagagactttgagtcttcccatgctgatgttccccatgtgtgaaaggattgcctggtgctttcaccagtgactaatagagcctctgggcccaggcttctgcatggacattacctcaatggctctcagaccaccccagcgcgccgggccagggcttcgtgaggctggaagctggctccgagtcctgcagag

SEQ ID NO: 113700 - DNA, 378 bp, Homo sapiens
accggatggtgtgagtcggtgtctcatattagaatttagtgcatcttctcttcagatgagcaactacaggcgaagaccggatggtgtgagtcggtgtctcatattagcatttagcgcgtcttctcatgtcttctcctcaggggtggaacagtattttctttttcacagactttatttttagagcagttttacttttagagaaaaaaattatgcagaaagcgcagagtttccaggtacctccagagcacccacacctccaccacttttcctggaatgaacatcatgcattagtgtggtgcatttgttataattgctgaacaaatattgatacattattattaaccagcttccagagtttacattaaggttcactcctga

SEQ ID NO: 113701 - DNA, 235 bp, Homo sapiens
tcacctctgtgtgtcagtttcctcactgacggcagggtctcggggatgttcgtggcaaaggcctcacagccaccccagcttcgtgcctctgtgcgtctgcttgtgctggggctctcgcaggaactaggaggccttcctggagggatgcagtggacaagatcttttctctcgtcccttcgtgagtccctccccagggactgccattgtcggcgcattgccgcagtacacgcagcac

SEQ ID NO: 113702 - DNA, 757 bp, Homo sapiens
ggctgccgaggttgtagcaatctcgtcacttaaaacagtctggaaagatctagaactcaggccaaggtgaagcgagagaactcccaacgtggaaacgcccagcctctccatctttctgactactgaagtcatagcataacgtgaagacatggaatgtctgttccatcgcatcccccacatactgcatacacaagcagtacctgctaagtttctactcaggtcagtcctgttggaccaaggcgtggggcctgcccccacgaagccaggctctggcaaggagatatcttgacagaggacaaccagttagtgggaacctggactgtgcccgttttcccatagctcagggtaggctgagagtaggggacggagcaagcaaaactgggaaagaatacaaagaagagactcaatgagcaggttgtccccctctgatcatttctccatgtgtacctaagacactgcgatgtcacttggaaagacggcaggcagacaaccagttctgggtactccccccgaaccctaccctatcctgctgacccccaggccacacatgtacagggacagagtaggctgacttgtcatcagcccgttttctcagcaaaacacactggttgtgagcattcagactttccagaatttggactaagatgtgaagatgtatttgtgctgagcatgcatctttgcagagctcagggctgagtcagggcagaatgaatgaaggagggcaagggttcttctaaacctctccatgctccttgct

SEQ ID NO: 113703 - DNA, 318 bp, Homo sapiens
acccttcctcatctatcctccagccccagagctctgggaatatctacatcaagaggagagagtactaacacccactccccaacactgccagggctcaggggaagggccactggatgcttgtacgagtcaggtacatgctcctttaacccagccccatgtccctgaaacaggtgccaccagggcaaggcaggctgagggagaatgaatggatggctccccacacctccacaagtttggttctcggtctcgagatagagtcttgctctgtcgcccaggctggagtgcaacggtggaatgtcagtccattgtaacctcctc

SEQ ID NO: 113704 - DNA, 468 bp, Homo sapiens
acagcgtattaccattacttaccggtttactgggcgcgtctgtctttgatcccggcacaacaactgggacccactctggtaaggtagatggttcctcaaggctaagtaattgagttcttacatgtgctggtcagtggcacctacatcattggacgaggaaagccctagacatggcgcatccactgctccccttcctcaggcagatgtgagtttcaggactctcactacctacctacatcaggagaccaatgggattgacatctagtagaattcttctctttctgctcccccatccccttcaccaaacccttgacaaaagttctgttgttggaagaaacttggtccttatagtagcttatttcttcactcaaagaagtatttggtgactatagtcacctttaggggaaaactagaagtcagtctgagtttcccattagttgtgaaaatctctctttgggaaagatgatt

SEQ ID NO: 113705 - DNA, 219 bp, Homo sapiens
ttccatacacctaacctactgaacatcatagctttgtcttctctaccttaaagaagctcaaaacacttatattagcctacatttggacaaactcatctaacacaaagctaattttataatagtattgaatatctcgtggaattcattgaataccataccaaatgtgaaaaaacagaaaggtttcacgtcattcataatgtcaaaaaaaaaaaaaaaaaa

SEQ ID NO: 113706 - DNA, 363 bp, Homo sapiens
agtctttatatataatgaaaattagaaaagatacagaccaattgtccaaatttcaactgtaaacaagataatagaaataaataacaacaggaaaataaaagcaaatggtcctgaataaaagttagacacttttaaaatttttccaaatgacaatatgcttttctgttcagtctctgaaaatgctatctgtaaatcttccccaactcttatgatcccacagactacatttctagcagatactaagcattaaagaagataaaagttatgtggaacaaccactatcccaaaagggcttataacgaaataaagttaaatattactccatacacattatatcattaattcttgattgcacaaggctaa

SEQ ID NO: 113707 - DNA, 728 bp, Homo sapiens
tataatttttagcagttaaatagttgttgtaaaggttctagcagtttacctctaccatctattcctgcccttacttcctctgcacttcttcttcccatggcttctctccctgtatgatgtctcactttatctggttagcctggaattccttatgtgacagtccagagtagcaagagagcaatagtggaagctgaccattctcagatagcttaagcccagaactggcacagtatcatttttatcacaatttatgggttaaagcaagtcccaagtctcagattccatgggtgaggcaatagattctatctcttgattgcatgtgcatattggatgacaggaattgctggaggtaatctttacaggcattttaccacaggaagtagtaatattggacccagtaggtgccatgaaccatatttttttaccctctccattctctccaaatctgtttcattggtgggattctctgggctttgggttcattgtagcaaaaaaaaaaaaaaaaaaaagaaaaagaaaaaaaaaagtcgtgtaaagttgaactacaacacgaaaaacaatcaatgtttttcttggtgctaggtggaagggatcaagtttctcttttccccaagccatatgttgaagaagtgcagaggaagtaagggcaggaatagatggtagaggtaaactgctagaacctttacaacaactatttaactgctaaaaattataaaaaagaaatgaaa

SEQ ID NO: 113708 - DNA, 459 bp, Homo sapiens
gtgtggtctgctaaatattaaatgaagagatttactctccccttcgcatttttgtgcatcactttctttgctcatgataggttcttagttcttaatttttgaaacatgtatttttcccatctcatgggcctggtatttcaattcctgggacacctttccccacctttgactgaaaatacctgctcattctttagtaatcagcccaaagtcacctcttcaaaattgtcccttaactaggtttccctgcgataatctcttattataatccttattgtacattcttatgaatctcttattatttatttttcactcctagaatttatattgccctgtatttgagagattgtatctctcacatctcatttcctagaaaactcaagccctgaagtttctctctcactcactctagcttttgttttctcctttcctaatgctagatacatagaatagtgctctgaa

SEQ ID NO: 113709 - DNA, 713 bp, Homo sapiens
tgtcttttaagccctcacataagctgactggatctcattcatttttgctcctcatcaatgatttagtagccaagaaatttgggcaaaaagttctcataatattgattatttaaaaatcttattataatgtattccttgtcaactgtgtttaaagatatgttcatgggagtctgtgagttctccttgagcaattttagatgtattaaatttttttatgagaatcttaaaaaaatgtgcatattttgaatcagttgagtgataatcttttcaaatgaacgttgccatgaagttttggttctcatgtttggacttaggattatgtggtcattaagtaatactagtttaattgcctatggacaatgaatgaagtcttgacaactggcagatatataaatctgtatgaaaagattagtatatattcatcagttaggctattctgtcagccagttaacaaaacccctttttccctgcttctgagtttctgtgaattctgcagtaatggccccccactcaaccttgcttactgtttcaagccctcacagacaatgagcattagagcttataactgtgtgattatactgttgcactcttataagtgtttataataaaagtaaagtcagaatggaatgcttggccatttggtaaagaacatgaaaagagatggaaacaaaaagaagtattgatgtaagtaataaagatagctcattgagatg

SEQ ID NO: 113710 - DNA, 235 bp, Homo sapiens
tagatgatgatattgctacgcccgtcgtcgacaacggctccggcatgtggaaggctggcttcgcaggtgacgatgacccccggccgtcttccccttcatcgtgtggcaccccaagcaccagggcatgatggtgggcatgggtcggaaggactcccatgtgggcgacgaggcctagagcaagagaggcatcctgaccctgaagtgcctcatcgagcatggcatcattaccaactgg

SEQ ID NO: 113711 - DNA, 276 bp, Homo sapiens
gccctgcctggtcccctctgggaaaccgatagcctaagggatgcgtgatgatggagaacaacccacagaccttagtttaatttataattatagctccttgtcctccacaaggtggggcactgaggtccaatttccaggggagagcaggctcctgaaacgcccctcagacaggttacagcctctgctttctcaggtgctcagcaccaccttgtatcatcagtaccccactcttatcctgatgcctaaggtcccgctagacacgcgggacacacttct

SEQ ID NO: 113712 - DNA, 365 bp, Homo sapiens
ttatgactttgtactcagggaatatggaataaccttataaacttaattatatttaattagtccttacttccttctacgtctacagtagtaggctgtgaattgtgaagaaataaatgacacaaggattatcttttctgcaggtgattagttgataatcctccctgggtagtctccagtctcacagattatcccctaggccaactcatgctatcctgcatgaccacattactcttccaaatacagaatttccttcccttaaactagatatgggtattttggcactcactgcttttagtaattgaccctaatgtctatacacatcctgcgtcaccttactctgtctatactcatcctgtatcactttg

SEQ ID NO: 113713 - DNA, 574 bp, Homo sapiens
aaaggcacctttaggggagtcaagcatatcatttcatctgtggccacatgtgaatgctagctatgtatatgttctaaaaagcaaagagtagacaaagaggagcgccgcccagcctcccaacaccagagtctcacttcctctcctcagctggcgctctggggccggactccagtaataacagcctcctggggagattaaagccctggcaagcacagtttatcttggtgaatgtatactttagctttgtgtgtatctacacatatacatacactgcagtatttatagctggtatacatgtgaggtagcgctggagacaaggcctggaatgggtgtacaacacctatgaggttggaaccaagatcttttaaacgcaaacctggtttccctgaactgtcctccacccgtgtggtccaaacacacactcaggtgtttcgggaagaacatcctccctccctgcaaataggggcagcagtctttcttctgtttccagaaagagttgagtattttgtggtggcttctttcatctctggggactttgcttattagaaaaatacacagaatcaccgctctcccg

SEQ ID NO: 113714 - DNA, 386 bp, Homo sapiens
ctattaattaattagcttagtaagcacttaatgaacacttactatagaccaaatgttagaaatatgaagactaataagacatgatccctttcattgaaagatttgctgtttactcagagatggaatgaaatgatgaaaacaaagaattataataatataaggtaatgtgctttacactctgggagaccaacctggccaacatggtaaaaccccatctctactaaaaatacaaaaaatttagctgggcatggtggcatgtgcctgtaattccagctacttgggaagctgaggcatgagaatcacttaaacccaggaggtggaggttgcagtgagtcgagattgtgccactgcactccaacctgggcaacagagtgagactctgtctt

SEQ ID NO: 113715 - DNA, 557 bp, Homo sapiens
ggatccctgaaggaggaggtataaaggtgggagtcattaacatacagacagtacttgatgtcataagagatgatcagataattactaagaggcaaaatatagatgagaaaaggattgagccgtgagcactcccaccctgaaagtctggggagttgagaatgacccaacaaagaatattgagaagtaaatattgaggaaggaaggaaatcaagtaatcagggaggcaaataaacaacgtgttttccaggaggaaggagcagtcgagtgtgccaagtagtactttaggtcaagaaagatgaagactgagaattggtcattggatttagcaacatgactatcgctggtgatcattgagcagttttggtagagtgttgggggtgaaagcctgaatggagtgggttcaggagataacaggaggagtggagctggagatatcaagtagaaggggttctttcaaggaatttcaaagatatggggtaatggctggagggagacgcgaagctgagaggagatatttttaaggtgggagaaataatggtttgtttgattgcaggtag

SEQ ID NO: 113716 - DNA, 199 bp, Homo sapiens
tggggccatcctctagggggaaatgagcaagtggtgacaggattctcacccagaaaataaatgatcaacagcagcaacttcttccacagcagagaaccacacaaggctggaaacttctaacctgacaacaaggctggaaattccctaaaattcacccccatgttttggttacccggtgataatctttaagaatgggttc

SEQ ID NO: 113717 - DNA, 694 bp, Homo sapiens
tggaagggaaacttccaggccagtgtggcaggctcaaatgctgcccgtcagtgacaacccagctgcctttttgtttgtttctgtttttttgagatgaagtttcactctgtcgcccaggctggagtgcagtggcaccatcttggctcattgcaacctccacctgccaggttcaagcaattctcctgcctcagccacctgagtagctgggattataggcacatgccaccatgcccagctaacttttgtatttttttttttttagtagagatggggtttcaccacattggccaggctggtcttgaactcccaaccttgtgatctgcccaccttggcctcccaaagtgctgggattacaagcgtgagccactgtgcctagcctgtactgcagattttctaaaatagtatagcctatgttaaaacttgtcctaatagacattataagattacttagacattgttttactttaaagactgtgtatggctttctcacaaccccagggccattactagtaagataagattttcatggaagacattaaaaatcatgttacactttaatagtgatattgtttcaatctttcatcacattaggtcatttccatttagaaaatttgatattcatatggaacctttttgtatcaaaaattatccacatgtgcttcaattttagaacttaactactttcatgcaagta

SEQ ID NO: 113718 - DNA, 235 bp, Homo sapiens
tttttttttttaagagacagagtcttgctctgttgccgaggctggagtgcggctgctggatcatagctcactgcagccccaacgttcaggctcaagtgatcctctcacccgcatagctgggactaataggtgcatgccagcacacccagacaattatttaattttcagtaaagggaggtctcaaactcatcctcccgcctcagcctcccaaattgctgggattacaagtgtgagc

SEQ ID NO: 113719 - DNA, 131 bp, Homo sapiens
ttacagtagttaggaacagctaatctgatgagtaaaactcagaatagctattacaaacaattgaagaaatttgacaagaaaaagtacctcaaagaggataacaacacagaaataaaatgattcagtgtatg

SEQ ID NO: 113720 - DNA, 380 bp, Homo sapiens
tgtttcatagatacctctatgttttgttttcaattttttttcttcaaattgctttgtatttaatttactcctttttctacctccttaaggtggaggcttaaattattgattcaagaccttacttgttttgtaatgtaagcatttcatgctgtaagtttctaaaaactactttagtagtatccctgattttttgtttgtttgtttttgttttttgttgtgttttttgttttttcaggagcagaggtttaataggcaagagaaagagaaaggaaaacagctctctctctaatgagagagaggggacttcggagaggaaaagaggacaggagatacggcaatcgtggataggaaaggaggaaattacgatagaaaagttggag

SEQ ID NO: 113721 - DNA, 304 bp, Homo sapiens
ctatgtacctgaacttataatcatgtaagcgaaaagaagatggatagtgatgagcacactgttgtgtctaccccattctctcatcaacttttcagttactatctgccacaacaaagataaatgtgcaactgggctggtgtgagctgtacttttctcagccctttcactgatttatcctataaagaaactatcttcagcttgggtttattcctgttgtattagaaattaaccatatatatcgctgtagtcaccttctgaggtccatttcagagagcttccccaactccccagcatctttgcatgt

SEQ ID NO: 113722 - DNA, 356 bp, Homo sapiens
tatcttctggagttataaatcagaccagcctctttccaaactgaagtgatggtacaatacctcatttttgagccactagcacctgcagttgcttttttactccaattttatgagaaactatggcagaagttgtgctgtcgaagcccccaacaagcaggtcaaatggcattagtagatctccatttgacagcctggcttttgttgggatttccatgggacaagaaaatgcagtgcccttcccttttcctctcaacaccgctgagaatatctgctgtcaaatgatgcaaataaaataatatggacatgcaatacttaaatatcctggatctctgagctcttggaaatgtacatgaagc

SEQ ID NO: 113723 - DNA, 401 bp, Homo sapiens
ttagcagtgagggcaatcccatcttattggtgaggaaacaggttcagagagtttaagtatcttgcccaaggtaacagtcactgagtggcacagttagtgatgaattctgttctctttgataggaatagaggcccactgatacctgtgagcttagcagtgtatcattctttattttgtcagaaatgagtacagtgtttggcacatcataggtgctccaggttttagagaatacattttttgccgagtcgcagaaggaatcagtactttcctttaggaagattagtctggtaattacgtgtattggcctagttagtaaatgttttttgtgggcatgaatcaattgaatccttgtttttgatgctggctatgtgccaggcactggtgtaggtgctggggaccta

SEQ ID NO: 113724 - DNA, 400 bp, Homo sapiens
caggggtgctggggaaggccccacactggtgtttcatgacggtgccctgtggtggggcagtgatggccagctgccagggtggcctgcacgtggcaggctaagagtgaccagcctgaggggcccaggctctcacctgggagactgagaagccgtgctggcactcaggagggacttccagctcctagtcgtgtgggttgcaggccgtcctgtcccagggctgggggacttccttcaggcccattgctgcctgtggaagctggcctggtgtcttgtgggtgtgctgcctggatggtccctaggtggtggcgagggtcacacgctgtctgggccaggactcggtgacttccctgggtcggctggttctgctggcctttcctggggctggatccccaggcctgtg

SEQ ID NO: 113725 - DNA, 537 bp, Homo sapiens
cagggcccagagccattaaatactgccttccgggcatttcagagcccgctgcttctatttttctattctcagtctgtcagagagaccagtaagtaccagaattttgacttcccagagcctaggagagtgtatggcatatgacaggtgtttattaatgtgtgttcgtgggaagaacaaattgtgtcgctttcattgtctttcaatacaatgaagatcagttcctctcctgggccccacttcatagaaatatgcattcctgacttcacaaatggaactgcccaagaatccccactcatgttttctccccggagcttcccctgcacccacattctctgcattggttaggaatatcctcataggcgcaacactcctgaatagcagaccttacacttgtaccccgacaggcctccttgttccctgaagctaaccctgggcctggctttggggtttgcagccggatttgtcatcttctgtctgccagtttcactgacttggttattccaaggaattcctgggacttccctttgttaaaaaata

SEQ ID NO: 113726 - DNA, 653 bp, Homo sapiens
ctggagaattgggacggggggcggtcattacagtacacattctgtcctgggcccatgccaaatgccagggggtcagttgttcccagaattggctaggaaaaggtatagccatttgaaggaatgatatgaaagtattaaaaatggtgttgtaaagaagctatcgatatgggaaaacgcacatagtaagtatattgctgagaggaaaaaaagcaggctacaaaggtgtataatataatcccctttgtataaaacatatataaaatgttggaaggcaaaacaatcaaaagttaactctgttgccaggcacgggagctcacacctgtaattccagcactttgggaggcagaggcaggaggatcacctgagcccaggagttcgagactccatctctccaaaaaaaaaataaataaataaaaaataaaaataaaaagttaactgtggtttttatctccgggtaatggaattgaagataatgtgtttaacaaatgtgtattaagtacctaatctgtatctgtgccaggcactggatcactgaagctaaagggatgaatgggacaaacagggtgattttaaaaattctcttatacttctgcctttcccaagttttctacattaagcatgcattactttgtagttagaaaaaaaaagttatt

SEQ ID NO: 113727 - DNA, 586 bp, Homo sapiens
ctgggtctccttatgttgcccaggctgctcttgaactcctgggctcaagcaatcctcccacccacctcagcctctcaaagtgctggaattacaggctgattatacttttaaataaatcaaggcattgttctggtccttcttgattcattttacaatgaaaactggaacaccaacctggtttcacataaatgtcatactgtgttagactggaccgctttaatagctaaaaataaataaataaagctaccactcactaaacccttacaacctaccaggatccatgctaaaaatctgtaaatatgtcatctcttccaagccctacactaactccaacttacaaacaaggcaactaaagcctagagaagtcaaggtcaatttagtaaacaatgaagccaggatctgaacccaaagcctgactaactcaaaagcctgagatctttattacaaaaacaaactgcctcccctataccattctcagtggtataaacttggaggttcaaaacccataaatgtttctcaattcaaagctagctatacctgagggatttcttgctatatttgcctttatcataaaaggtgaataaag

SEQ ID NO: 113728 - DNA, 271 bp, Homo sapiens
ggaaggccaatgtggggaacggtgggcttgcctccccctcttcctggaccgagcgcgcagccatcacttgggccatggagaccaagagagcttccctgtcccacacaggtatggaagcccagagctccaggatcaccacacctgcccaatcatccagaaagaggtgtggagagggaaacgatcacgacacggacgcccacggggtttctccctgatggactgggaagtcttctttgttgaagacgttgagccagactaagaagccgccagg

SEQ ID NO: 113729 - DNA, 614 bp, Homo sapiens
  misc_feature (136)..(136): n is a, c, g, or t
tgtggtagtatgagccagtaatctcagctactcgggagattgaggtgggaaggttgcttgagctggggaggtcaaggctacatacagtaagccatgactgtgccactgcacattggcctcgggaacagagcaaganccctgtctcaaaaagtaaaaaaaagaaaaaatactttcagttcattttgccaaaggaagagtgattatatttggaagattaagataaatagctaccatcaacgcaacagattggtactttggccaagtgcactaaagttcagttctcaaaacaaaactattttcttgattcatatcagctcattctaatactgctctgctaatgtggctataacaagttcttttgaataaaaggcatcttgtaaacaagataggttcacaatatagacaaaggtgaatagtatatagctagggaaaaacgaaatactttcaagcagggaaataaaaatcacttctcatttccagaaatacacacttaaaaaaaattaggtcacttttaactggaaaaaaatttgtgacaagccaggcacggtggtggctcacgcctgtagtcccagcactttgggaggccaaggtgggagaattaatcgaacccagga

SEQ ID NO: 113730 - DNA, 308 bp, Homo sapiens
attttaataaattccccaggtgagtcatatgcacattaaagtttgagaagcactgatctatactgtctttctacacacttttttaccttactttatccttcaggattctggcgtcaagtccctccctatcagtctttaaaaactgtagccttaaatcagtagggatatagaagacatgaacaatactttcatccatcttgacctaactgccatttatagaacgttctatcccaagacatcagaatatatattctttttaaacatttaatgaaaggatttaactcccaaactccaaagcaagatgttct

SEQ ID NO: 113731 - DNA, 411 bp, Homo sapiens
ccccgaccgggtggcacagaggtgtgcagctctctcctggtttagtgggggaccatgggtggctgcctgctgaactctgcggggcccacagaagagcctctggactcatgactctctctcggaagcctctctgcctcagtcccaggggacctctccttaagaccttctgggcctcacagatcccagctaaacctcagcttggacacctagattcttggtgacctcctccgccattgccatcctgctgtgggacttctctgagagactgcggtgccctcaggagatgccaagggcagggaggccccgatctccctgaaccctccaaccaggggaatcaggaccatgaccctgatcttccgccccttcctctctccctctccctccacctcccccaccccccagcaccaggag

SEQ ID NO: 113732 - DNA, 282 bp, Homo sapiens
ccatgcagacacaacttccttgcccacatcaggcgccacggccgcccctctccatgcaaaagccctgctcaccccacttgactccgccaccccactctaggcctccctgtggttcagcatcctcaaccccgcttcagacttcactattccatgcccggcctcctctactcttcacccctgcctacatggatgcccttctgatcttgtttgggcccagtctctatgtactgagctgccacctgccacctgtaatgacattcacctcagcttcaggggccccag

SEQ ID NO: 113733 - DNA, 454 bp, Homo sapiens
ctgaattaaagtagtggcagtgggagtgaagacaacgaggggagataggccaagaactatagttagaacagacattagggacataaggaacatgggtattaaagaaaggaagatgattcctaggcttctgataatctgagaccatactgttttcagtttgtatcccatttttttttttttttggacagagtattgctctgttgcccaggctagagtgcagtggcatgatctcagctcactccacctcctgggttcgagcaatctcctgcctcagcctcccgagtggctgggattacaggcgcccaccaccgcgctcggctaatttctgtatttttagtagagacggggtttcaccatcttggccaggctggtctcgaactcctgacctcatgatccacccacctcggcctcccaaagtgctgggattacaggcatgagccaccaggcccggcca

SEQ ID NO: 113734 - DNA, 464 bp, Homo sapiens
taagtctgtgtttgctttgtcagtgtcctctctttaaagaggcagtattttggctagctgagagagagaagctaagttcatctataaaacaatctatactctcagggggaggagaagaggcacaaaaatcacaaagatctatgtggagacagcaaactttggggaggtcattttgcagaagagtgttctgcagcagctaaaggataaaaggaattggagaggaaagggaaagggtgaatgggcccctctgatattctctaacaaaagcaaataaaagatttagcttgtgaattagctttctctgtctttttcattgttctgtcccttgcatcaggcacaatgcttggcacatagatagctctcagttaatatttattcaattaattccttaaataatatttgtggctgttggaattgtatccttcaacaaatgatgctgcccagactacaagacctatagtcac

SEQ ID NO: 113735 - DNA, 454 bp, Homo sapiens
agaggttgatctgaagccagcctgtctgagagtcagcaacagagtcagccgcactgggactgttcagatcttcagcctacccaagggcagactccccaaattaaaaattaccccccatttcctgcctttgggctactttagtgcctctcagaagtgtcctcagggaaacggctctggaaggaagtaaaactgaaggcagagctggtaaaaagttctgtgcacagaggaatgtgaggctactggctaaaaacgactgggtttcaagtagtcttgcacctgccgccctaaccacacataagagaagtgactattgggacaaccaaagctccttgatgcctgcacttcctcctgctttatttcttcatctccaaagggattcatccaatgacttcttttggcaggaacattctagctcagagaaggtgagctgaaaattaagaatagctgtttgagg

SEQ ID NO: 113736 - DNA, 773 bp, Homo sapiens
ggaaaaacaaactcagtttctcctgtgataccctctcaccacacaatcaacacagaacacttctgtgacctctggtcaccaagaagtgtgtggcaatttctctctggcagcaaccagttctctgggagatctttcagcagacaccagctgggtgtcctctaattcagttcaattttgacactatctaactggagatggtgtcagatcccacaggttgagtactcagtcccataagactgcctccaatttccactgccaattccaagccccaggttattaaacctgtgcttctgatgaccagctataaatcagggttcccacaatcccttccttgggtttcatgaacttgctacagcagctcacagaactcagggaaatacttatgttccctggtttattataaaggatataccaattatcaccagatggaaaagttgcacagggcaaataatgtgggaagaggcacggagtttccatgccctgtctgagcacatcgtcctccaggaacccccatgtgttctactctctggaaactcttgaacctagtccttttggatttttatgcacacttcaatacttagacagcattgattaaatcattggccactggtgatcaacttaacctttaagcccttctccccagttcagaggttgggggtggggctaaaagtcccaaccctctaatcttgtcttggcctttcctgtgaccagccctcaccctgaagctacctaagggtggatagccatcagtcaactcattagtatacaaaaga

SEQ ID NO: 113737 - DNA, 395 bp, Homo sapiens
actcttgggatccaggtgtaaggacttcagaatattttgggatttttcttttttctggcaaggtctgttatgtgagacttttatcagggtctgagttaactctatcaaacacgttaatgtttctacattgaaacacgtgaatgtcacgctaatgggatagacgataaataacctcccagcattcacagtgggttctgttgcaaaccaatgaaaaaaattaaaatttcaaagcttttgaatttcgggactgtaggtaagcgattgtggagctgcactaaagggcttggaattcatcctgtagagtgtatcctcgacattgtggactgaaggatgttcctggagggctttcatatcaagaggataaaaggatcagatttctgatccagaaagatcac

SEQ ID NO: 113738 - DNA, 374 bp, Homo sapiens
accctgtttgttcaatatggaaaagtctagttccctatgggatatccctagtgggagcctgccagggagtaagaaccgagaattgatgagctttggtgactcaaatctggaagcacaaaaaccaccagtcccagaatttagctattataccagtgtgcattctaaaatgtttttctgaacattttggggttttttcatagggggtcgggtgggtgtggaagtagaggggagaaggacagattggcagggttttaaatgttctgatgaccaggtcagggtcaaaggatgttaccaggattccttcccttcccttccgttcccttcatttcacttaggtaaggatgatatggtatgacttgatggaattatgtagt

SEQ ID NO: 113739 - DNA, 164 bp, Homo sapiens
tcaccgtattagccaggatggtcttgatctcctgacctcgtgatccaaccgcctcggcctcccaaagtgctaggattacaggcgtgagccaccgcgcccagctcagagtgtcatatcttatctgattcttctagcacctagacactattttataatgcagtaaa

SEQ ID NO: 113740 - DNA, 1139 bp, Homo sapiens
tagtatttattgatcattcttgggtgtttctcggagagggggatgtggcagggtcataggataatagtggagagaaggtcagcagataaacacgtgaacaaagttctctggttttcctaggcagaggtccctgcagccttcccacggtgtttgtgtccctgggtacttgagattagggagtggtgatgactcttaacgagcagcagaatcaggcccagctcccaattccctctccccagtcttctccaggtgtcccctcccacgagcgcacaggaaaaggaccacatggcctggcgagccctacacccactgctactgctgctgctgctgttcccaggctctcaggcacaatccaaggctcaggtacttcaaagtgtggcagggcagacgctaaccgtgagatgccagtacccgcccacgggcagtctctacgagaagaaaggctggtgtaaggaggcttcagcacttgtgtgcatcaggttagtcaccagctccaagcccaggacgatggcttggacctctcgattcacaatctgggacgaccctgatgctggcttcttcactgtcaccatgactgatctgagagaggaagactcaggacattactggtgtagaatctaccgcccttctgacaactctgtctctaagtccgtcagattctatctggtggtatctccagcctctgcctccacacagaccccctggactccccgcgacctggtctcttcacagacccagacccagagctgtgtgcctcccactgcaggagccagacaagcccctgagtctccatctaccatccctgtcccttcacagccacagaactccacgctccgccctggccctgcagcccccattgccctggtgcctgtgttctgtggactcctcgtagccaagagcctggtgctgtcagccctgctcgtctggtggggggacatatggtggaaaaccgtgatggagctcaggagcctggatacccaaaaagccacctgccaccttcaacaggtcacggaccttccctggacctcagtttcctcacctgtagagagagaaatattatatcacactgttgcaaggactaagataagcgatgatgatgatgaacacactttgtgaataataaaattatctgaatgttt

SEQ ID NO: 113741 - DNA, 1282 bp, Homo sapiens
tagtatttattgatcattcttgggtgtttctcggagagggggatgtggcagggtcataggataatagtggagagaaggtcagcagataaacacgtgaacaaagttctctggttttcctaggcagaggtccctgcagccttcccacggtgtttgtgtccctgggtacttgagattagggagtggtgatgactcttaacgagcagcagaatcaggcccagctcccaattccctctccccagtcttctccaggtgtcccctcccacgagcgcacaggaaaaggaccacatggcctggcgagccctacacccactgctactgctgctgctgctgttcccaggctctcaggcacaatccaaggctcaggtacttcaaagtgtggcagggcagacgctaaccgtgagatgccagtacccgcccacgggcagtctctacgagaagaaaggctggtgtaaggaggcttcagcacttgtgtgcatcaggttagtcaccagctccaagcccaggacgatggcttggacctctcgattcacaatctgggacgaccctgatgctggcttcttcactgtcaccatgactgatctgagagaggaagactcaggacattactggtgtagaatctaccgcccttctgacaactctgtctctaagtccgtcagattctatctggtggtatctccagcctctgcctccacacagaccccctggactccccgcgacctggtctcttcacagacccagacccagagctgtgtgcctcccactgcaggagccagacaagcccctgagtctccatctaccatccctgtcccttcacacccgtcctctccccttcctgtccctctgccttccaggccacagaactccacgctccgccctggccctgcagcccccattgccctggtgcctgtgttctgtggactcctcgtagccaagagcctggtgctgtcagccctgctcgtctggtgggttttaaggaatcggcacatgcagcatcaagggaggtctctgctgcacccagctcagcccaggccccaggcccatagacacttcccactgagccacagggcaccaggggggacatatggtggaaaaccgtgatggagctcaggagcctggatacccaaaaagccacctgccaccttcaacaggtcacggaccttccctggacctcagtttcctcacctgtagagagagaaatattatatcacactgttgcaaggactaagataagcgatgatgatgatgaacacactttgtgaataataaaattatctgaatgttt

SEQ ID NO: 113742 - DNA, 1246 bp, Homo sapiens
tagtatttattgatcattcttgggtgtttctcggagagggggatgtggcagggtcataggataatagtggagagaaggtcagcagataaacacgtgaacaaagttctctggttttcctaggcagaggtccctgcagccttcccacggtgtttgtgtccctgggtacttgagattagggagtggtgatgactcttaacgagcagcagaatcaggcccagctcccaattccctctccccagtcttctccaggtgtcccctcccacgagcgcacaggaaaaggaccacatggcctggcgagccctacacccactgctactgctgctgctgctgttcccaggctctcaggcacaatccaaggctcaggtacttcaaagtgtggcagggcagacgctaaccgtgagatgccagtacccgcccacgggcagtctctacgagaagaaaggctggtgtaaggaggcttcagcacttgtgtgcatcaggttagtcaccagctccaagcccaggacgatggcttggacctctcgattcacaatctgggacgaccctgatgctggcttcttcactgtcaccatgactgatctgagagaggaagactcaggacattactggtgtagaatctaccgcccttctgacaactctgtctctaagtccgtcagattctatctggtggtatctccagcctctgcctccacacagaccccctggactccccgcgacctggtctcttcacagacccagacccagagctgtgtgcctcccactgcaggagccagacaagcccctgagtctccatctaccatccctgtcccttcacagccacagaactccacgctccgccctggccctgcagcccccattgccctggtgcctgtgttctgtggactcctcgtagccaagagcctggtgctgtcagccctgctcgtctggtgggttttaaggaatcggcacatgcagcatcaagggaggtctctgctgcacccagctcagcccaggccccaggcccatagacacttcccactgagccacagggcaccaggggggacatatggtggaaaaccgtgatggagctcaggagcctggatacccaaaaagccacctgccaccttcaacaggtcacggaccttccctggacctcagtttcctcacctgtagagagagaaatattatatcacactgttgcaaggactaagataagcgatgatgatgatgaacacactttgtgaataataaaattatctgaatgttt

SEQ ID NO: 113743 - DNA, 214 bp, Homo sapiens
atttcattgttttttatggccgagtagtagttcatggggtgtgtgtgtgtgtgtgtgtgtgtgtgtgtgtgtgtgtatacaccacattttaaaaatccaattatccattgatggacactgaacagttttttatataccctggatacaactttatcacatgtgcttatgtagatattttttctcagtggcttgtcattctcctaacagtgtcttt

SEQ ID NO: 113744 - DNA, 228 bp, Homo sapiens
cataattagaaattattctgacaccaagatggaaagtgaatgtgctggaggctcttcacatggcagcagattaacagttcttgataaatcatcaccgccaactagttagaacaactgctccttttcaggattttttttttattgttttgactcttctacatggccttggcagtaacgtttggaaattgatgtgtcccagagactgggatgcatccaataatgtagtct

SEQ ID NO: 113745 - DNA, 578 bp, Homo sapiens
ggagcgacgactcccgtcaccggggagccggcggtctggggccgtggtgacccgagggcttctttttctccccctacgcgtttgtgccgccctggggcatcctgggagaaccgagcgctccgccttgaagcgctgtgggagtcggtccgctagtcgtaggcctggtgcatcctgggaaagagtgtcccagatccttgtcgagaccggttccttttatcccacacctgccgctgaccgtcctggaggcttggagcgcttccacacggggagtctgggaaggtggtcgctataggcctaaggcatcctgggaagaactgccacaacgaattgtgggaactggccgttattgtcccgtagtggaaggttttgccctggtctctttgctcgagcattggaacgggtgcctattgtgttcacgcggggcatcttgggaattgactgctataggcccagggcattgtggggtctccagcactgtgtttgcctttcagtttggctgccataggcgtggtaggagtgggacttgtgaaccaagggatggccctacctgacgtctggaatactctggaaggggcctt

SEQ ID NO: 113746 - DNA, 194 bp, Homo sapiens
aaatctttgatccctaacctaaatcaggttaatacagactcatatgctccaattatggtgatatctttctcttaaccttggcagaaggaacattatagtaggtcaaaaagtatctttgagtttcattgagaaattaacccataagggaattgtgctcatggttgtagtgttaattagtttcaccatgaacatat

SEQ ID NO: 113747 - DNA, 343 bp, Homo sapiens
ccaccacgtagctgatactgtagaaggaattcttttaaaaattaaaatcttttaaaatttattattattttttaatatagagacagggtcttgctattgttgaccaagctggtctcgaactcctggtctcaagcaatcctcagcctcccaaagtgctaggattacaggcgtgagccaccacaccctgcctaaaaatatcgaacatatcttgtatttgaaattgcactgcaattttatatgagttaaataaatgaatatattcaatgcaaacatttaaagtacaatacaacccctttgttgctttaagggtgcaattccctgaatctctcttaatctcccaata

SEQ ID NO: 113748 - DNA, 234 bp, Homo sapiens
ggattgcttgaggccaggagtgtgagaccagcctgggcaacacagagagaccctgtctctataaaaaaatttaaaaattagcctagtgcagtgtcatgtacttgtagtaccagctgagttaactgaggctactgaggtgggaagatcacttgagcccaggaattcgaagctgcagtgagctatgatgacacccttgtgctccagcatgggtgacagagtgagaccctgccttta

SEQ ID NO: 113749 - DNA, 337 bp, Homo sapiens
gaaactacacctgttttgtggcttctggccacatgattcctgagtagaaagggattatagaaactacacttacaggctgggcgtggtggctcacgcctgtaatcctagcactttgggaggtggaggcaggtagattacctgagttcaggagtttgagaccagcctggccaatacggtgaaactctgtctctactaaaaatacaaaaattagctgggcatggtggcaggcgtctgtaatcccatctgcttcggaggccgaggcaggagaattgcttgaacccgggaggcggaggttgcggtaagttgagattgcaccactgcattccagcctgggcaa

SEQ ID NO: 113750 - DNA, 211 bp, Homo sapiens
cctctccagcactcgtatgtcgcctgcctcttcatgtgaaatggtggcgtccggggttcctccacagcactcgcatgtcgcctgcctcttcttgtgaaatggtggcgtccagggttcctcctcagcactcgcatgtcgcctgcctcttcatgtgaaatggtggcgtccggggttcctctccagcactcgcatgtcgcctgcctcttccatg

SEQ ID NO: 113751 - DNA, 124 bp, Homo sapiens
cagtgtggctgtgggggcggcacgcagagggaatgggcactgctagcagaacacaggctaggaaacagcttgaaaactgagctggtaaaaccaccgacttgtgcgttttacatgaactcgctta

SEQ ID NO: 113752 - DNA, 417 bp, Homo sapiens
aacatgagagtggcagtaaggtcgactcttattcattttatcgtcaaatagcttttttgtacgtaggtcattttgccactgccactatgttaaaatagaatgaaaaagacattcttgaggcattattacttaaagacagtttttggctgggcgtggtggctcacacctgtaatctcagcactttgggaggctgaggcaggtggatcatggggtcaggagatcgagaccaccctggctaacatggtgaaaccctgtctctattaaaaatacaaaaaattagccgggcgtggtggcgggcgcctatagtcccagctactggagaggctgaggcgggagaatggcgtgaacccgggaggtggagcttgcagtgagccgggatcgtgccactgcactccagcctgggcaacagagtgagac

SEQ ID NO: 113753 - DNA, 641 bp, Homo sapiens
taggagtgagtctcggtgctgggacagagagcttcctctctctgaactgctatttccctactgaaaaccaagaataaacatacccaccagatcagcttcacgggcatgttgtatggtttaaagacaatggggtctacaaagcattttgtaaattagaaagctccacaaagataccagctgtattcatcagcccatgagatgtctaaatgtgatccttaaattccaaaaagcttgctaagttcactttcctaatatatgaatataaaacattagtgaattatcaaataaatgaggtgtttcattatgttcatatactttttcaatatgtcaattataaaaaccattgtatctgagaccctatgaagaactacatatgaaattacaaagaaagatctaattatatatgaaaaagtatatatattataaagtctaattatatgtgatttcaaaaaatataactagattattcttaaggaactactgtagtggcaattgattttttaaatgtatacagaaatatcaaaagttttacaaaaatacccaaagtccagagtctccatttcacacttcaacaagtagtgcatgctttactcctattttagactgtttcatctcagaattggatgttatgcgtctctgct

SEQ ID NO: 113754 - DNA, 351 bp, Homo sapiens
actccagatgttatgtaattgttgaagtttatgtgtcatactcatgtttaaatttatacattcacatttatttttaaattaatatttaaaaaccagaataatccatttttattaatttgcctttatttcttctcccttattttgaaataaaataattgtagttaacattataaaaacacaacttaatattctgtttttcttaactagaaaggaaaagaaccatgcaaaaacttactacattgagaaaataggatggcagtaaatgggtttaggttgtatgtatttttccactccatccaagtacctggccattattttccattagattgtaaactctcataaaacatggat

SEQ ID NO: 113755 - DNA, 536 bp, Homo sapiens
tggcaggtgatgcagcaggagagacagagggcagcatggagaggatgggagagccttcccaggacccaaagcagggcacatcaggtggtgtggacacaagctctgagcaaatcgccaccctcactggcttcccagacttcagggagcacatcgccaagatcttcgagaagcctgtgctcggagccctggccacacctggagaaaaggcaggagctgggaggagtgcagtgggtaaagacctcaccaggccattgggcccagagaagcttctagatgggcctccaggagtggatgtcacccttctccctgcacctcctgctcgactccaggtggagaagaagcaacagttggctggagaggctgagatttcccatctggctctgcaagatccagcttcagacaagcttctgggtccagcagggctgacctgggagcggaacttgccaggtgccggtgtggggaaggagatggcaggtgtcccacccacactgagggaagacgagaggccagaggggcctggggcagcctggccaggc

SEQ ID NO: 113756 - DNA, 418 bp, Homo sapiens
tggtaacaactaaaatgcccttccggtgaatagttaaacagcctgtggtatatacacaccatggaatactactcagagataaaaggaacaaactattgctgccacacaataacttggatggatggtgtgacactaagtgaaaaatgccgggttcaagaccagcctgggaaacacagtgagacctatctctacaaaaaatacattcgaggctgggtgtagtggctcacacctgtaataccagcattttgggaggctgaggcggacaaatcgcttgagctcaggagttcaagaccagcctgggcaacatggtgaaaccctgtctataaaaaaaatacaaaaattagccagacatggtggcatgcgcctataatcctagctacttgggaggctgaggaaggagaattgcttgaacccggga

SEQ ID NO: 113757 - DNA, 407 bp, Homo sapiens
ccccaacccgggtctccagctccacagccctcaacctgcaacactggctacccactgggtctccagatgcatggccctcaaactggaacatcagctccacccccggtatccagctgcacagccctcaaactggaacatcagctccctgccgggtctccaggtgcacggccctcaaactggaacatcagctccctgccgggtatccagctgcacggccctcaaactggaacatcagctccccaccaggtctccagctgcacggccctcatactggaacatcagctccccaccagatctccagctgcacggctctcaaacaggaacatcagctccccacaggatctccagctgcacggctctcaaacaggaacatcagctccccaccagatctccagctgcacggctct

SEQ ID NO: 113758 - DNA, 480 bp, Homo sapiens
gtcatatgttttcatttctcaggtatatacctaggggtgcaattgttgggtcatatgcaactccctattcaaccatctgaagaactgccagattgttttccaaagcagatgtactattttacattaacacatacagtgtattccacttttcctacaaccttgccaatacttgttactgtctttttgactatagaaatcctagcacattaaggtattgcagtgtggttttgatttacatttctctgatggctaatgatattgagcatcttttcatgctctaactggccatttgtatatcttctttagagaaatgtctattcaggtcctttgcccatttttaaatttctttttattcttgacttgtaagttttttatacgttccagattcaagtcctttctgaaacatattgtttgtacatattttctcccattttgtgaattttcttttaatttttgttgttgttgttctttttttttttt

SEQ ID NO: 113759 - DNA, 435 bp, Homo sapiens
gtttggaacatctactcatattttcatactgtccctctctgggcaactagcttttgtaatttacaaatatttacaaatgtttaacaaatttaaaggttaaaaacaaatttaaagaaattatccacacagaagtacaaaagagaaaaaagatggaagaaaaaaacaagagcgtcagggaacgaagggacagtatcaacaggtctaacattcatgtcattaaaatccagaaggagaggagattgggcacagaaaaaatatgtaaattaataattgccaaaaacttcctattattggataaagatataaatttacagatttaagaggcctgttaaacccaaacaggataaactcacagaaaggcatggtcagaaaaatcaaactgctataaaacaaatgtaagggagacctagtctctccccggatcaaagaagaaaa

SEQ ID NO: 113760 - DNA, 410 bp, Homo sapiens
ggacgtgcagggtctgtacttgcccagtcgcactgggacttcaaattggggatgcagacacggccctgctcctggtgtgcgcgaagcccgctcagccggccagctcgcctgcacgcccgccgcgtccctgggccccaggagggcccccgtatccagctccgaccaaacagcaagcccgcagttggcgagcatctttcccagaccgggagcggggacagagcagagcagacggatccgaccagcgcaccacggcgccccagggccctcctaccgtcctcggccctcggccccccgttccccggccaccgcgcgggctccgccgctcctgggacgcgcactggctccggcccggcgccaccctctgcccctctgtcaccccgcacggaggctcccatcacccaagccgcgcc

SEQ ID NO: 113761 - DNA, 353 bp, Homo sapiens
tagcagctgggcttgctttttcttttttaaatcataaacaagttctattagagtttggttatttagccaatagaaatgtgtatagttaaatatgtttggactttggggaaacagtgtttatcaatcttaagaaatactcttatcgggctgggcatggtggcttacgcctgtaatcccagcactttgggagtctgaggtgggtggatcacgaggtcaagagattgagaccatcctggccaacatggtgaaaccccatctctacaaaaaatataaaaattagccaggcgtggtggcaggcacctgtagtcccagctattcgtgaggctgaggcaggagaatcgcttgaacccagg

SEQ ID NO: 113762 - DNA, 748 bp, Homo sapiens
gggggggaagcaaattgagggggaaaggtgagttcaaacctaaattcggccactttccatggagttagtcacctgtgctcactcacttgcaaaggtttctcgtttctctgcctggcagctttttaaaaaacaaacaaaaaagtgaaccctttgagatttggaaacatgttcaatcgacacaatggcaccattcaaaattcaccaatgtatgaactgcagcatatcatttgtaaaaattgcttcagcctgagttacctttcaccagctctctaagtctactcactgggtcactaggagtgagcaagaacattttgataaattctgtttccatgacgatgaattaaccagtgaaaagggggaggtgctgaaagatctgtattctgtagaatactctcaaatgtttgcctgttttcatttttagccatttagttctcatggctctgttccaggactctttaatttgccagtagctgtttttcctacacagattacaggagtaattcatcagtgaatgtttcactcagtggtcccatctaatgtaaggaaacataaaaatgaatttttccaattatgccttttttgtttgtttagaaagaatgtagtaagcttttttccttttcttctctcacaatctagctttagtgttcttattctcccttatttattgaccatcaccttacacaggctacaactgcaatttgtaagatgttgggatccgcttttaaataccaataaatccccgaaaggc

SEQ ID NO: 113763 - DNA, 832 bp, Homo sapiens
tgaaacaaaaagctgtgtgaaaagatcaacaaaattaacaaacctctagcaagactgataaaggaaaaagagaggacacaaattaccagtatgaggaatgaaatagggcatatactatagaccatataggtatcaaaagaatcataaggaaatcctatgaacagttctaaacacaattaagacatgtagatgaaagggactaacttctcaaaaatcaaactatcacaactcatacagtgtgaaataggtaatttcagtagccctatataagtgttaaggaaagcgaatccatactttttaaactttttagatatatggatgaaaataaacctatgaaaagaggttcacataattagtcatttgggaagtgcaaattaaaactaccatgaaatattactccataaccatgaaaaaaagtaagttttaaaattatgtcaatagcaaactggcaaggatatggagaaactagatcacttggacattgcagatggggatataaaatggtacagacattctggaaaaccaattggctgtgttcctgaaaaactaaacatgtgcctactatgtgacctagcaattgtattcttgggcatgtattccagaaaaatgaaaatgtatattctcacaaaaacctgtatactaatgtttataacagctctatttgtaatagccaaaaactgaaaacaatcaaaatgtcctacagtaggtgaatggttgaacaaacttcggtacatttgtaccatggaatactcagccacaagaaggaataaactgtagatacatacaatacagagatggattttaaggtctttatgttgagttaaaaaaaaaa

SEQ ID NO: 113764 - DNA, 635 bp, Homo sapiens
ggtactaagcctaatactcaatagttatttttttctgcttctctccctcctcccaaccttcactttcaagtaggcaccagtatcagttgttcccttctttgtgtccatgagctcccatcttttagcttccacttgtgagaacatgtggtagttggttttctgttcctgcattagtttgctaaggataatggccttcagctccagccacattcctggaaaagacatgatctcatctatttttgtggctgtctatagtattccatggtgtatatgtaccatattttctttatctaatctgtaattgatgggcatttaggttgattccctgcattttgacatattctaaaagttattatgtacatatctataaatttgtaaagaaggatcaaatagaatatatttgtcaatgaaaaaataatgtgttatataattactcccagattggcgtcagacgaagctgtgtcttaatttttgctgtgcccacctttaggtcctttgtcctctttcatttgttctcagctagctaccaaaacccccctttcaaagtattgactgcaaataattaagtgtagtacatttgccaggaatatttgtggtttaatatatgaccacaaaggaaggtagcgttcattcac

SEQ ID NO: 113765 - DNA, 248 bp, Homo sapiens
gaggcggaggttgcacagtgagccgacactgcacctctgcactccagcctaggtaacagagtgagctccgtctaaaaaaaaaggaattcagataaatgtaaagttaccatagtgatagggccaggcgcagtggtcacgcctataatcccagcgactccggaggccaaggcaagagaatcacttgagtccaggaattcaagaccagcctgggcaatatagcaaggccccgtttctacaaaaaatacaga

SEQ ID NO: 113766 - DNA, 2205 bp, Homo sapiens
gtccctccaactcacttgtgtttacatcctccccagccacagcacggcttctgccctttggattgctgcacgtgtgttgagcttactgagatgataccatgcaaaagatagactggctcggtaaccaggcagacccttttgcagtttgttgacaattacgatgagttccagatgtcccttctttgatatggtagaagggcatttatttatatgagagcaaatgtgtgtgtgtgtttgcgggcgcttttaagtgtgtggatagatgagtgtgcttgcacataatgtgctatttctgtgagttttaaagtaggcaagggataataaccaaagaagaaaatttcatgaagactagacatcataaagcataattttaatagtcactcaaccaagtattttttattttttatggatactctgaatggcaattaaatgtgaaacccagtttcttgggcaagtcaaattctggaatcacatccacctaaattaaaatgactagctcgtattttccccatcttcaagtttcacatcctggtcatcaaaagactcgacagcaagacttagaatgaaaaagggtacttgtttatattaatattttttacttgaacacgtgtagcttgcagcaggttcttgatgaatgtgctttgtgtccaaaatgcctccccattgtacacaggtgtacaccatgcatgcaccaacacctaaaactcaaaactaaatggctattttgtaaggttaatactttcagttaaacagcatgtttgacttgattccatcatggtgctcttaaattacatgtcagtgcatcacatatatcatgatctaatgcagatgactaggctttttccaaaaggaagacagaccctcagacaccaaaagccaatctaaacaactcccaggtttgctgtggacaatcagcatggaatgttttctgcactctcagtcatgaccatctgtatcttgttacctgctttctctctcaacaccacagttctcaaccctgagccttccagagagagctattgatgatacaagaggaatcaccagggcccggatctaagatgcccttagaagaccagcccaagtgccgtcttagccattcagtgaagggcaaacagcccatgggtagtatggcccgagcactgaattcccttgcgccttttcaaagaacagttaacttggtgctaatgtgccctggtgaaataaataaaagatgggcagtttctgtggcattttaggcataggtttgcaatccagatctgattttctccaacataaatatcagctcatgttcttatttcaaaaagatttcttattaccgactaaaagctattttttacctcacctggaaactaccattgtgagggccatcccccaggcactgcacagcaccttggctgatgctggaagaggagggcagtcagtgtcacttctgggatgtgccccagcactgagaacaaaatgcaggcatcccccggggcagcatcagagtgcctttctagagggagccacgcacagaatgtaacaggatgaaacagtttcaagtaagccttgaattgaaacctgagtaggttaaaacaattctatttcatagcacatcacaatactgctgctactctgtagccacccccatggctacatgatgccctattcctaaataataacaatagcattgtcagtggaggctgggccaccatggcagaccttccaaaagtagtgagctacatagactacttagggaaccccagggaaactggtaccctacacctgggagcagtatctgccactgggataaagtcctactaaaaaaggaacggtaaatgtaccctaatgattaaaccccgtgagatacatatgatttcccaaatagtccatttcattaggaacttttttgtttgaatgaatgtcacataggtatcctcagtaacacagaacgaaattacctttgtattattgtgattagttgttgcttattattttatactcagtaataatgtggtacactgttaatttttttgcttttgtaaattatattctaatttattgccatgtttcctaacacttgtcctacattcattctcctgcttgtaatgaaaatgaaaaaatcattgtaacacttgatggagtgaaattccacgccaggcacagaatttttttgacatagataatttagtaaaataaaaattcagcttataataatgatacaga

SEQ ID NO: 113767 - DNA, 514 bp, Homo sapiens
cagatcagtggcactggccgatgctgatgctgccgggggactatttgcctcacacaagaaaggaccctaggcaggagaagatggagagatgtataaaaaaggctatgacagaaggcagagcaaggcagttgtcccaagcaacaaagttataggatcaaaggagaagcagcagcagttctcaaagtgtagtagtccagagagctttgggagcctctgagacttttcagagtctgcagggctacaaccgttttcttaataattctaacactttatttgactttttcactttaattctctcacaagtgagaggcgttttcttttttgaggcagagtctcactctgtcacccaagatggagtgcattggcgcgatctcggcttactgcaacctccgtgaagaggcgttttcaagaggctacttgacatgttagactgaatgaagcagcgggcatgagaatccagctgtcttccattaagatatactgaagaaacttgcaaaaatatatttccactctt

SEQ ID NO: 113768 - DNA, 686 bp, Homo sapiens
gctatgtatatgtatttttaaaatgtaataatttgatgtagtttagaattgatattgccctgccaatggttaggaagaatactcatcccaagatattttaactttttttcctctattatttaagaaatgaagaacaatgaagagaaataaagaaaagctaatttattcagcagtttacaggttgatgctgttatatatgtgtgtgtatacatatgtatacatatacgcacatatatacacacatgtgtatatatgtacacgtgtacacaaatgtatatgtgtatatatgtgtatgtgtgtgtatatgtgtgtatgtatatatatggtgccaaaataacagtgacatcaatgtgatagaagtttatttcttgcttataaaatttttgtgtaatgtccaggtgtggtggctcacgcctataatcccagcactttgggaggctgaggagggtggattacctgaggtcaggagtttgaggacagcctggccaacatggtgaaaccctgtatctaccaaaaatacaaaaactagctgagcatggtggcatgcacctgtaatcccagctactcgggaggctgagacaggagagttgcttgaactggggaggtggaggttgcagtgagctgagattgagccactgcactccagcctgggtgaaagggtaagactgtctcaaaaaaaaagaaca

SEQ ID NO: 113769 - DNA, 219 bp, Homo sapiens
actctcagcccatctggtcattagcattccaagaccaagagctctgggtcttaaagcttatacccacagccagtaactgcgtgacctgaatatatctctcttctacttgccaaatgtcaagcatcaattaatacctggattctcactgcatttctcagatccccatcctctctcatctcaggcccagcaaataattcctaattaatccattaatctatg

SEQ ID NO: 113770 - DNA, 470 bp, Homo sapiens
ctttatctggcatatggtaagctctgaatcaatgtttattgaaagaatgaaatgtcacccctttgtgaagccttccagagttgtccctgaagaattaatttctcaactccaaggtcctttgctcatcctgtcatcatttttgtctagtagtcagttgaaaaccaataattgaaaagcttggccggacacggtggctcatgcctgtaatcccagcactctgggaggccgaggcaggcggatcacaaggtcaggaaatcaagaccatcctggctaacacggtgaaaccccgtctctactaaaaatgcaaaaaattagccaggcatggtggtgggcacctgtagtcccagctactcaggaggtgaggcaagagaatggggtgaacccaggaggcggagtttgcagtgagccgagatcgcgccactgcattccagcctggatgacacagcgagactctgtctcaaaaaaaaaaa

SEQ ID NO: 113771 - DNA, 573 bp, Homo sapiens
tctcccactttagtcacccctgcttcataaatgtctgtgccagaaagccacagtgagcccccagtggcccctgtattacccacccagagagacaacctctcccctccatgaaactcatttctgggacccacacctaaactttaacacaaatcagaaaagttgagactccttaaaaatgcgttttgcaagctcacaggttcttggttcataagtgatactatggaacaatctggttgggaagggtggcacacaatagaaaaagttaatgattatctggtgtagtttgctttagtctgtgagttcaaaagtctcctcatttacaataaccttaaaggataacaaaataaagtcctagaagaaatgtaaatttaattatttccattttctcaaaatattaattgctgatacaattaaatggattggcctaaactgctccaaagcttttcctatctgctaattaaatttgccctcgctgccataatacaaattctgggaaaccttctggcttctgggcacactatgtaggatgagagaatcaaatccattcagtcctaatctactgccccacttaat

SEQ ID NO: 113772 - DNA, 669 bp, Homo sapiens
cacgtcacccattgcacagttggagactggaagagcaggagttagacacttgcccaagatcccgtagttgttggtagagttagaaactaaaacaaagggtccaggtcataaacccagagttgtttcctaatacattggccttctactgttacagagccataggactctgcattcatgtttacccattcattcacaaactaagcgttcattcatacaatgtgattggtagatcttagaccaatggctttcgttctgcttggacattagaatcacctggagcaaaaaccaaagttgccaggtaggggggtgatttgatttacttttacctggacatcagtatttttcttaagtgtcccaggtgatctgcagaagcaacagggttgagcaccaccgtggcagacttggctggtcctaactaccagccgtggtgggcgagtgaagatattcctttggctgggtggtaagtgccctgacgagatgcccatgggcacccacctccttccctgcaccgttcctgatgccgaaggcccttggacagcctgcactagctggatctggctccggtagaggcgagggaaggataacaccataatgaccaggcgtgtgcctcggctgtctgctgcctctgtgcagacatctctgagactagctgcaatggggccagttagc

SEQ ID NO: 113773 - DNA, 219 bp, Homo sapiens
agcgtaggagggaggagcgagtcagggctccagctgacgagcagagccagacgatccccacacgcttcctgggagacccggctgcaaggccaggctaatgcgcgctccgacgtctttgtgccaagccggggcgcaagctcaacccccatctcaagttcagccgcgcttcctcccgcaaggtcacgcttaaacactcgcgcagagaaaggaggagcggaa

SEQ ID NO: 113774 - DNA, 333 bp, Homo sapiens
ttcatgagagctagaaataatattgtcatgacggttattatttaaatatttttggtacaatttgggattttttttctaaattctcatggcacatctgagaggtctcacagagcaccagtgtttcaaggaataggaagacatgaccaagagtgcaactcgtggatggctgagttcttgcttctgcctctggaacaatgtttggtcaggtcaaaacaatttcttaaggtgcttacaaatcttgacagcaaaaacatccattttttaaaaattttttaaaaagaatggaaatctgagaagtaatcaaattcaaagaaaaaatgttattttgacgct

SEQ ID NO: 113775 - DNA, 257 bp, Homo sapiens
gatgctgggactgcatgtgaacttcacagcggccccacgggccaagcacaggaagaggcgagtcccacttccgactgccactcagaagggggatgaaagcccccatcacgtggccctccgtgatctggtttgcttctttttagaaaaagaaggtgtggctaggagcggtggctcacgtctctaatcccagcactttgggaggccaaggtgggtggatcacctgaggtcaggagttccagaccagcctggccaacatg

SEQ ID NO: 113776 - DNA, 706 bp, Homo sapiens
cccaaatttttcgttggggaaatttgttgaaccaggttaaacaaattttccaccacagggataacagtcttatggacccatggatttcaccccaaaacttcttaattccgaactcaacttataggagaaaactttgttacgcgttcccaggtaaccggaccgagacaatcccagggtacacaacataccaaaattcgcggccgcgtcgacgggctttgcatagattatttcatttaatcctcataaaacctcatttacatccctgttttcctctgtcatcattcaacatgtaagcatccagtttgacatacctgctttgtgaccttgggcaaatcacttgagctctgtgcttgtcttctcatctgtaaaattaaggtctactcttcatgaggttttatgaggattaaatgaaataatctatgcaaagccctgttagattattattattattgttatgttttattattattgttgttcttatcctctaactgcattcccatattgctctgtgcttcttctccctgaacctgaccttccactttttttttttttttttttttttgagatggagttttgttgttgttgccctggctggagtacactggcaggatctcggctcaccgtaacctccacctcccgggttcaagcgattcttctgcctcagcctcccaagtagctggaattacagacatgtgccgccatgccc

SEQ ID NO: 113777 - DNA, 491 bp, Homo sapiens
taaaatcccgctctctaagttcccttgaaggaagtgaactccataaaattttgcctgctgacttatttgtccactcctttgaagtatttaacattaatttcacctataaatcattggcacctcaatttttcattgaagtatcaggactgttaaagacataccctggatgtgcctggaaaaaaagatttgggaagcagatccactaatttaactgttattcacgtgcatcgttttggttgaaaccaatcctagttaccgtcaaagttctctaactcaaagtccgttttctttctagtttgtatttgtttgtgcatataattacagaaaacacattttagatggaacaccagcttgcttttttcagtttctttctgttgcattgatacatcttctaatggggaaagacatatgatggtacttggaaaaatgatgacagccgtaactggaataataaatgctaccgggaagattttatcaaatgtaaaaaataa

SEQ ID NO: 113778 - DNA, 100 bp, Homo sapiens
attaatttttaattaaaccattcatctttaatttccttcaactacataatcaagatgttgttcatatctagtagcctaaaattgttttcaaacttggatc

SEQ ID NO: 113779 - DNA, 450 bp, Homo sapiens
attggaagccattatcctcagcatactaatcgggaacagaaaaccaaacactgcatgttcttacttataagtgggagctaaataataagaacacatggatagatgtggggaaacaacacacactgggaactaactgagggtggagggtgagaggagggagaggagcagaaaaaacaactaatgggtactaggtttagtacctgggtcaccaaataatctatacaaaatccctcatgacatgaggttacctatgtaacaaacctgtatatgtacccctgaacctaaaataaaagttaaaaaaataatccttggcctatctagcttagagaggctcttagtttgaaagagacaatggatggtgtgcaaattgaaggtcacattatccttctaggctgagatgttcatagttcacagttcttcaggagctggcctgggcaatacagtttgatc

SEQ ID NO: 113780 - DNA, 213 bp, Homo sapiens
atttagggctgcatttggctacaggtaattaaacacccaactgtaaatatagcaaatatctaaatattaagccaggtcaggtgcagcagctcaggcatgtaattttagcacttcggaaggccgagatgggcagattgcttgagcttaggagtttgagaccggcctgggcaacgtagtgagaccctgttctctacaaaacataaaaataattta

SEQ ID NO: 113781 - DNA, 346 bp, Homo sapiens
aaaggattttagctttactctgagtgtgataggaagcctttgggtttagagcagagtggtggtgtgaccgacttggattttaaaggatcactctggcagctctgtggagaacaaactgtagaggcaatgttagaagcccagagactgggctggagacaagtacagttgtcctggcaagagatgactgtggctcaaatcagtgatagaagtggtttaaagagcaaaaaagcctgtttaaaaaacaaaaaagtggtcagattctgtaaatggtctgagtgtacatttcagcagtccattgaaaggctcttagtcttaaacctgtggcctctgccacgtggttccctgg

SEQ ID NO: 113782 - DNA, 388 bp, Homo sapiens
atgtccctgaatccagatacttgtaatacatcgtaacagaaatcattgttgtgggttgtggtaaccctcaccacacacacacaccccccacaccccacacccccaccaggctcaagccatcctcccacctcagcctcctgagcagctgggactgcaggcatgcaccaccacacctggctaatttttgcaccttttttttttatgtagagacggggttttgccatgttgcccaggctggtctcgaactcctgagctcgagctgtttgcccacctcggcctcccaaagtgctggggtgacagatacaagccactgagtccagcccagttgtagtattcaagcatcacatagtgtgttaaatgaccatgactttcacaagctttttgactt

SEQ ID NO: 113783 - DNA, 490 bp, Homo sapiens
cagacggacaggatcccgtcgccggttctggtgtacaggccactatactggcgtagtaactaactcatctcttttatccacaccctacatctaatctatgggtaaatccttatttggttctaccttcaagatacatacagaacttgatcacttccactgtctctacttctattaccctggtctaggccactatcatttctggcctggactatggcaatatccccagttcttggtatggtggccagagcgatcctttctatgccctgctcaaaacaaaatccagtgttccttaaacctctaaggcactggcccctgtttatactcttaacctcatgtctcaagttagcaggatctcacacttctccacacacaccagaatactgtggtgtccttgcaaggtcaaggcctcacaggggcggttgtatgcatactccagcagtgcaggcagtgaatggcaggggcacacgggcatctccggtgactgcaacat

SEQ ID NO: 113784 - DNA, 747 bp, Homo sapiens
agacaatttaaacattaagtgggacagctaacagtttacatttacagttctactgtagggctacctatgttaaatgtcctgccttcagtcataatacacagtcatgcttcacttaattgcgggatagttctaagaaatgtgtttctaagcattaccatcattgtgcaatattcatagagtgtacttaggctaacctagatggtattgcctactatacacctaggctatatggtatagcctattgctcctaggctacagacctgtgcaatatgttactgtactaaatactataggctactgtaacacaacaataaatatttgtatatctacacatagaaaaggtaaagtaaaaatattatgtaaaagacgaaaaatgctacacctgtatagggcacttaccatgaatggagcttgcagtactggaatattctctgggtaaatcactgagcaactgaatggtgagtgaatgtgaaggcttaggacattactgaaccctactgtagactttcaaaacgcgtacacttaggctaaattaagttgatgaaaaaaatttgctttaccaatacattaactttagattactataacttttaaccttataaactaagtcattttttaacttcttgactctttaaaaaaacacatcttaaagcacaaacacattgtacagctgtacaaaaatattttccttctttgtattcttgttttatatgttttttctttttattaacttttaaaatattttgt

SEQ ID NO: 113785 - DNA, 811 bp, Homo sapiens
ggtctttgcaccacaccatgcagttggctctttatatcgcagtgctcaaaatacatccactcctctaggagatagtgcagaggtacacacccctgttggggatgaaggaacaagcaaagagaggagactttgcttttagctacacacttcaaagacatacaaactataaggcaaagaaagatatctctctgcaactgtccacattaatttgggattataggtccaggcctggaggaaattagctagtcattaaagaaatcagatgggaataaagaacagatcatgagaaaagtagaaactgttatctgatatggattcacttttttaagctgttgggaattcctggtactaaagcctctgttagccaaatgcagaagtcagtgagcattccgagggacttcagaatccagtgcagggcaacagatacattggacccttctgcaaagtggttttcctggtaaaatcatggaaattagtgaggtctaatcgtcactctactcgtcacacactaggaaacaccgctggtattttcttctcttctatagaggaagaaaaatagccagaaaagaatggataaccttcattctgagttacatctgacaaaaagccaaatgtagggcactggccatgccttgagtatagtgaccatccatcccagttcgctcaggagcctcccgatttatgcttgctgttccagtgcaattacaaaaaaaacactactctttcctctaaaaagtgtcctgattttgacaataaattgactatttgatcaccctacttatagagcaggtttcaacttactgctcctttg

SEQ ID NO: 113786 - DNA, 807 bp, Homo sapiens
ctcggtggctcatgcctgtaatcccagcactttgggaggccaaggcaggcagatcacatgagatcaggagttagagaccagcctggccaacgtggtgaaaccccaaatctactaaaaatacaaaaaattagccaggtgtgatggcgcgtgcctgtaatccctgctacttgggaggctgaggcaggagaatcgcttgaacctgggaggcggaggttgcagtgagccacgatcaggccattgcactccagcctgggcaacaagagcaaaactctgtctcaaaataataataataacaataaaagtaaaggaaatagattagaagcaaaaattttcttattagaaaattaaaccttgaaaataatattttgataaataaagccatgagttgattctttggaaagactagcaaggtctggcaagtctgagtaagaaacaccaagacaggccaggtgcagtggctcacgcctataatcccagcactttgggaggccaaggcgggcggatcacaaggtcaggagatcgagaccatcctggctaactcagtgaaaccccgtctctaataaaaatacaaaaaattagccgggcatggtggtgggcgcctgtagtcccagctacttgagaggctgaggcaagagaatggcgtgaacccaggaggtggagcttgaagtgagctgagatcacgccactgcactccagcctgggcgacagagcaagagtccgtctcaaaacaaaaacaaaaacaaacaaacaaaaaaacaccaagacaaatacaaacaatatttgaacacagaagagacagaatcttgg

SEQ ID NO: 113787 - DNA, 662 bp, Homo sapiens
gatctgcccacgtcaggaatctctttctaaaaaggtctccagaaactttccgattctaatctcagccaacgttggcagccatgtgtggaagggaaaaccatttatagtgtatcaggaagaacactggattcgaagtcaggagttccagaattcaaatcctggtttggctattgactgttaacttcagtttgcctctttgaggtttagttttcacatttataaaatgagaagataatgttttcagcattgtaaggactgtgtaagaaaatgtgggcaactgtttgaaaccatcaacaccctgtgtaataatgatgcattattcagtggcttttgtgtgtcctgcagtacaccaatgtttgccttatatcaccacaactagtactcacagtaaccctcttagatagattttattcccactttacagaggccaaaactgagatttgcagagattaggaacttttcatgtggttacgtagccttggaagaatatgtacctaactgctaccctatatcgtctctccaaaattgggtaccattattttgtcactggatagttggatcatttgttgatggcttgtcagcatgacagcattaccccactgtcagcatattctgcaggaggactggactgattttgtccaataaatctgggttcttcaagc

SEQ ID NO: 113788 - DNA, 290 bp, Homo sapiens
cccaggtggtactacatattgtagagggagctttagccaatgactgctgaaagatctgtctctctggaaaatagatgcatcagcctgttttagggagtatagctaaaatcagctaactctcttgttttatttgcatactcgcctaataacttctggttaaaattgggcttcttatatagatctacagggagacatttctctggttttgttgccacaagtattacagctctgtcataattatgtttattattgtaaattaaaagataggtgttgcagttctataaatgttt

SEQ ID NO: 113789 - DNA, 267 bp, Homo sapiens
gttgacagcacccaattcagagcaaaactacatttccctgagcctacccctaaatcactgaacacagtccaaattgtataatgagctcctcctgacatcctcttgctgagatctctgaaattctgcctgttgtagtgtccaccttgctgcagtgaaccaatgaacccaactttgtttgaccacaggtatgttcctggtagtctttaactggagccggtggcatagtcgcttggtgaataaaactttgtcctaggcatcactgtagaa

SEQ ID NO: 113790 - DNA, 344 bp, Homo sapiens
agaagttttctggaagctaggcaaagaccgtgtttttaaaaggaggcagtgatgaattgcatccaaaggtacttaaagatcaagagagggctgagaatgaaacttggttttggtgacttggagactttttagtgatttcagcaaaagtggtttcaatggattaatgtctttaaaaactgctgcttcctgtggctttatttatcgtcaaaaggagaggggaagctctggaattgaactaagttgaaaccaccgttctgacggtctgaagtttggcttaagaagggcatcctcttaatagctgtcaaagatgaagattttcccctacttttatatgtaagttttgg

SEQ ID NO: 113791 - DNA, 723 bp, Homo sapiens
ggtaaggacttcgtgctatctttgtacaattaacatatagggcaaatttcaataccaatgacagtagatgtaatttcacatatcaagtagtttccctaataatttaggacttttttcactgacttcttgtcatatatgattctgtcattacttttttatatagctcaaaatatggctgatggagtgcttgtgcccttccatggttttttcatttggtatcactagtattatatttatttattctttttttccaggacatttgcaagacattcgtcaagttttgaggtttatttaaggtataactagataatgtattatgtaaatcagcctaaccagcacgcataaactaaaccatgtcacaggatgccaatagtgacagacggagtgctgatgcctctggaaatctcttcacattgtggagtttctcctcttctcttgggatatcttctctattttctgtgacagatgcctatttgctagatcaactgagagcatcagtgcctataggtaatgaaatacaaataaaactcaatttgtgttatggtctgaatgtttatattcctccaaaattcatatgtcgaaatccggtccccagtgtgttggtattaagagtcgaggcttttgggaagtgacagggtcatgagagtggagcacttgtgaacaggattagtggtcttatgaaagatggagcgtctgtttttcccttcccccatgggagtggga

SEQ ID NO: 113792 - DNA, 333 bp, Homo sapiens
gtaaattagagcaaagtcttgcaaatcctacaggatggcactgaactgtgatatcaatcttgatgacagataaattagcaaaaatttcatttagtaaaaaaactctttgccaccaagtcattttatttaaaaaaaaggtatacatttggaactcataaaaaacatagggctaattttcctaatatgtaaagagcttttacaaattaatcagtaattgatcttgaatccaaaagaaaaatgggcgaagaatatagttaacagaaagggatacataagtgacaaacatacgaaaaaatggttagctttatttgtaatgcaaattaaaaccaatct

SEQ ID NO: 113793 - DNA, 284 bp, Homo sapiens
tgagcctttatgcattagtcatatctctgcaaagttcagcattaaaaaataaaatacacatgcatataaaatatatattatatgtatttaatgtgtatgtgtacatatatatgtacagaagcattaccaacattatgcattttgtttgcaggtacatagtatatacatgtaccccgcttttaaagtcatatatatacatacatttaaaaatatacaatatattccacctgactttctcttaaatgttggtgaagtatttttataggaaaaaaattgtagccctg

SEQ ID NO: 113794 - DNA, 396 bp, Homo sapiens
caaaaaaaaaaaaaaaaaaaaaaaaaaatcacaggatctgaacagagatttctccaaagaagacgcacagatggccaacagcgtgtgagaagatggtcggcctcattagtcatgagggaaacgtaaatcaaaaccactgtccagccgggcgcggtgcctcacgcctgtaatcccagcactttaggagagcagatggcttgaggccaggagtttgaggccagcctgggcaacatagcgagaccaataaatagatattagtggtggcgcctgtagtcccagctagttgggaggctgaggggggaggattccctgagtctatgaggttgagactgcagttagctgtgatggtgccactgcactccagcctgggcgactaggaaacggtctttaaaaaaa

SEQ ID NO: 113795 - DNA, 744 bp, Homo sapiens
tcaggtgattctgggaaaatggcaatcatattccgtttttctccactaataatttcaagctgtctttcttgctgctaatccagcagtctaatagctgctggatcataagagacattttgattccatggaagtctacctgaggctaattttggagccccggcaaagaactctaaactcatgagcactgagaagaattgggcattaggagatctgtgatgcccagcagatatttgagactagccttctactaatttgccttagtatgtctgtatccctggcctccaacatatcaaaataatgctgaaaggctgattattactttgcttaatacttgatattagactattattacagataagagtatattttccatatataaacacacatatatatgtccaagcagaaaaacaaaactttaacttgaatctgaatagtttatgagataacctcatagtgccctaagagaatcatacatgagaaaagaaaaaaaaatgcttacaaagaaaggaaatcacatggaaaaagactgaatacagtggagagtagcatggtgatgaggaccacagtgacagctgcatgttcagttcaatatgacagctaacttggccagtaataggatgtcagaagcaaggtgttagttagtcaaatggaaggcaggaaaagattgaggactagccttgccatctgcccttacatggactctgacagttaaaccttaatggcaaatgaagcccaaaaaggatg

SEQ ID NO: 113796 - DNA, 348 bp, Homo sapiens
cacagtgctattagtgtgtgttcagtgtgttccaggaacagaaaaaaacccaatgtggttggagtggattggtgggagaaaagcacgtgagtaagtcagaggttatgggaggacagatcgtgtaaggcctacaggcattgtaaggagtttggcttttactgagagaaatgagaagacattggaaggttttaagagcagtgccataatctgactcacattttaacaggattgctttggcatctatgttacagaaaataagctgtgggagtaggggataaggtagaagcagggagagcaattaggaggcaattgcaataatacaggctggatgtggtaagcatagtagca

SEQ ID NO: 113797 - DNA, 225 bp, Homo sapiens
agatacgttgtgcaggtaaatttttcaaattcagaggatagttgccaaagagtgaaagaatgaaagtaaatgaaagaatgatactgaaatttcataccataattctcttgaaggaaatttcagtatcattcatttaggattattacagtgagaaagtgtgattaacttttgtaacatttgtgtttcaaattgtagtcaagttgttatgtgtaacatagagtttta

SEQ ID NO: 113798 - DNA, 600 bp, Homo sapiens
tgttctttatataaatggaatcatatggaatgttggaatgttcccttttttttttttgagacagggttttgctttgtttcccaggctggagtgcagtggcctgatcatggctcactgtagcctcaaactcctggtctcaaggaatcctcccacctcagtcacctgagtagctgggactacaggtggatgccaccatgcctggctaatttttttatttttattttttgtagagataggatctcaacatgttgcccaggctggtctcaaactcctagcctcaagcgatcctcctaccttggcctcccaaagtgctgggattacaggcatgagccactgaacttggctgaatgtactctttaagtgtccattttctttcactcaacatgatgtttgtgagactcattcacagtgttgtgtttacatggcttatttttattgctgtgttatatcatgtaacttaacacaattcgcttatccattctactgttcgtatttggtttgtttcctgtgtgggtctattataagtggtgctgccattaacattctagtatatgccttttgatgaattatgttttcagatctcttgggtatatacacagg

SEQ ID NO: 113799 - DNA, 774 bp, Homo sapiens
gactaatgatgttgctgatcttttcatgggcttcttggccatctgtacatctttggagaaatatctgcacaaatgtttgcccattttttaattgagttgttcattccattgaatttttaagaggcatcttccgttaaatatgtcattgtaagcctcatttcaatttcagaaaagttaaacatataataaacacatatcttagaataataactaaggtgctatctctttatgtggcttattttaaaatgtataaatatttactttgtctgtaaaatatacatgaactggcttttagaaaattgcctcattgtggggatgataatcatcttaataaagtaggttaagttacctattaaaaattaattaacatgattgatttatgttccattacatgtaccagtatctgctccagttaagcatttactatttaaacacactgtgttcatttttggggggaagatgtaacatattaaacacagtattagatcactgcattacagggtatagtgtgaatctgaaaaaaatgaagtttttgtctcttaattttgaattctaattattacgggaatattcaaaatacactatggaaaataatgatcatattttttaatgtatgccgccctttagagtctaatttaaatcaatataggggctacgtaatgatccatgtctgtttttgtcttcgcagaacctggggtctctgttctccatccgtgttgtgggactctctgtggcctgcagctatttgtctccgaaggacagtcggcccctctg

SEQ ID NO: 113800 - DNA, 431 bp, Homo sapiens
gaattatgtttttctttttagttttctatatattcaaaataatctaaaatgaacatgtaacacttttattacaggaggaataatattttaaaatcagtcacatgaagttgagtgtggctgctccaaagaataacctgaatgtaaaagagcaaacattttcagaacagagctctatatactaagtataagtgataagagcttaacatgctaaaatactgaagtttaccaataatcctatgaaatagctatcccattctgtggactaagaaactgaggtttcctgaaactcttaacaaaagacacatagctatttaatggcagaggcagaaatcacacacaaaggctgggcgcggtggctaacacctataatccgagcactctgaggccaaggccaatggatcacttgaggtcaggagtttgagatcagcctg

SEQ ID NO: 113801 - DNA, 272 bp, Homo sapiens
ggtcggtaccctgctccgcccctctctggcagtgcctgaaaggcagcgaggagatgaggaggagacagggcatctgggttgctggtaattttctattcattttctttctttctttgatacagggtctctgtcacccaggctggagtacactggcacaatcataactcactataaccttgacctcctgggctcaagaatcttcctgcctcagcctcccaagtagttaggactacagttgtgcgccaccacgcctggctaatttttggtaactt

SEQ ID NO: 113802 - DNA, 198 bp, Homo sapiens
acctcagttttttgcaccaaaaatgacttggttatagacagagaaggagagaaggagatatggaatgatgtgctgaaaacatggcccttgctgcatttagcttctcaccccacatcctctcctgttttcttctggttctgatgaccagatcccctacctcagagattatgcctcccccatacctgaggcaagctccca

SEQ ID NO: 113803 - DNA, 101 bp, Homo sapiens
aaaaaaaaatgttggaaacagccctacccctgccaggctgtgggtgaatgacggagacatgcaggtggccgaggagttaaggccgctgctgcgcagccggc

SEQ ID NO: 113804 - DNA, 472 bp, Homo sapiens
ggcgcggtctcggggagccgcgtggggtacagggctggagctttcctccagccttgcggcattatacgctgaacccggcccggatggtggaggcgggcacggactaccaaccttatctcacatatgggaaaactgagaaggagacacttggccaaggtcaccccgcaggagcaggagtcccgtctccttcccttgggcggtactttgtcccacctccccattcagttgggaggtgctggagtatgagggggaggccttggattgggattgaggtggggggcgttaccacaggggcaagcatctgaacgcttcagtctaagagtggtggcagttctctgggtcttggtactcaacaaagtttaaggtgactgtcactaatcagttgttacctattgttgagggaacaccagacttcttgcttcgtactccacagcgacacagtagtgccatttgctaagactctaggagttat

SEQ ID NO: 113805 - DNA, 325 bp, Homo sapiens
cctgatgaccactggcctgaaaactgttgtctcgtgtatttttttttctggctttttggttgtgtcaggtaagagtaaatccataccctgtgacaccatcttgctagaagtagaagtgttacctttttaatatattatttttccttcaaaacccacattagaaggaactttcctctgtaacaacaaccgacagcttgacaaagtgtgttcccattgtcctgtgattgctctgcttttcaaagtaagcctgcgaggtgggtgtcatgtcattcccattttacagataaggggacagaacctcagagaggtgaagagacttgttcaa

SEQ ID NO: 113806 - DNA, 562 bp, Homo sapiens
atgcatagacaacaaatatctttaacttaagatgatagattgatatgatggcatagggcgaggggtggtggtgatagtgatataatctgtagcttcaacgacttaaatctatagctaagatgttgactggagtcgcttagaattagccagacgcagccaattaggttggatcagacagtccagtgagcagatgtagtgcacaattattttttcaggaggctgatggagaaaggcttagcgatgagcaacaaagatgaagacaatgaaaaagatatgtaagtaaaatatataatatgtaagaaagtaaattccaaggtgaaaaagatgaaaaaagggatggggagccagggaaggcccttctgaagttaacttttgagtgaagacctaaaagagaaatatctatctatctgtctatctacctatctctatctatctatctatctatctatctatctatctatctatctatctatctatctatctatctactcatccatccatctatccaaactacatatatatacccacctatagacacatttatatgcctttatagctaatg

SEQ ID NO: 113807 - DNA, 738 bp, Homo sapiens
tattcttttaaggcactgcagtgataaggaatgcagggttattctgtatttattttttctttttgagacaggatctcattctgtcattcaggctcaagtgcagtggggcaatctaggctcactgaagcctcaacctctccaggaggtgatcttcccacttcagcctcctgagtggcttgtgaatattttaacaatgatagagacaaaagcaacctctaactatgtataataacattactttaaatgggataagtaaagttgtctgtcctttaagccaaacctatgttccaaactgaatttactcagtaatacatagcttttaatgacatgtatttttttatgtatgtatagcttgagtattgagagatctcttagaaatgcagtttaccatactattgcaagaaaagtatttgaataagtatactaagaaaagttgccagaactatttatcagtgttttataaaatttactgaattcattgtttctctctattaattctgggattagttttctttttacagagcatgtaattctgtttgctgatcaatcagataatttatgggacaatatttatttgacataaagtctgtttttttttttattcagtcagttcataactattgaggattttacggtctgccagatagatctcatctttattataggatttcagtttgcaaaatattctagtatcaggttttctgacacttgtagtaccttttttttaaccacatagaa

SEQ ID NO: 113808 - DNA, 175 bp, Homo sapiens
tgatttccaacacaaagtcctgcctttagttttctattccaaatggattgtaagtgatatactctttcatacatgggtgtttctgtccaacatttttcttttcttttttttctttctttcccctttccttccttccttcctttcttccttccttccttccttcctttcgttcctt

SEQ ID NO: 113809 - DNA, 482 bp, Homo sapiens
ttctggcaggtcagtgaggccactgtggatcaggcttttaagatcatgggaaaacacacataacaaacatgcaacatcttgtctagatttatgtgcacagttcagtgctttagcacgttcaccttgtgtcaccatcaccactgcccccccgcagaacttccgcttcttcccaaactgaaactccgtcccgcttaaattctctcctccttcccccttcccgtagaccctggcagccccattcaactttctgtctctaggtatttgtcagctcaaatgagtgactcacacaggatttgtccttttgtgaccagctcatttcactcagcacaaagtccacaagggtccctgtgttgtagcctgtatgactccgccgttcctttgcatggatataccacgttttgctcacacattcacctgttgaaggacacttgggttgtttcctgcggcagcttttcctgaccgaaagcttctcaaaaggacta

SEQ ID NO: 113810 - DNA, 386 bp, Homo sapiens
ccagaggatggggaaccaattgaccatgactgccaacaaattatagtccagacttatgctgcccgagatgatctcgtagaagtccccttaactaatcctgaccttaacctatatactgatggaagttcatttgtggagaatgggatacgaagggcaggttacgccatagttagtgatgtaaccatacttgaaagcaagcctcttaccccagagaccagtgcccagttagtggaactagtgcatcaccctctcaccctccctctccccaccaccaaaagttgagaaggggcagatatgccagcaactcttctacaagctctaattttaatagtctgagctttcctttccagatgtgcatacccctctgcatgtgtgtgggggggaag

SEQ ID NO: 113811 - DNA, 593 bp, Homo sapiens
ggagtacagtggtgcaagcatagcttaccgtaacctcgaactctcaggctcaagtaatcctttcgtctcagcctcctgagtggctaggactataggtacatgccaccatgcctggctaattgttaaaaattgttgtagagacaacaaacaaggactttagaggcctgcaaaagaaaatatagtctatcctaggaaggaaaagagcactaaactaaatctaacacttaattcacaattaattctgatatattgatatgctcatgtgtgttgggggaggtacatgtataaaaacgaaagggaacgggagattataaagagaaaacattcctcctaatactagctcttaactgcctcggggggttatagagtagtagttccaatggagattcaaaggtatcagcttcactcagttgttagagaagattggagaggcacttttattcttttctgccattgtatgtatacataaataaatccgcaaataataatgagagtgcagaaagaattaagctgccaaatgtatttcctgttgtgaacaaataaaggtagaggtcttctctcccaaaaagaataatcataggctaggcacggca

SEQ ID NO: 113812 - DNA, 546 bp, Homo sapiens
agaagacaagctacagactgggagaaaatatctataaaaaacacatctgaaaaggaatattatccaaaacatacaaagaacccttaaaatcaacaataagaaagtgaacaactcaattaaaaaatgagcagaagatctgaacagaaacctcaccaaagacgacctacagatggcaaataaacacatgaaaagatgctccacattatatgtcattaggtaactgcaaatgaaaatgaccaggggataccactatacacacattagaatggccaaagtctaacactgacaacaccaagtgctgacaggatgtggagaaacagaaactctcatccattgctggtggaaataaaaagtggtacagctactctggaagactgtttggcagtttcctgcaaaactgaaaacattcttaccatacaatctagcaatcatgttctttggtatttacacaaatgagctgaaaacttaggtccacacaaaaacctgcacccaaatgtgtattagcagcattaatcataattgcaaaaagttggaagcacccaagat

SEQ ID NO: 113813 - DNA, 183 bp, Homo sapiens
ccatcagagaaatgcaaatcaaagccacaatgagataccacttcatacccactaggacagttgtcattaaaaagataacaaaaacagctgagtgaagtgcctcacaactgtaatcccagtattttgggaggccaaggcaggaggatcacttgagcacaggagttcaatatcagcctgggcaac

SEQ ID NO: 113814 - DNA, 346 bp, Homo sapiens
tggggagacccttggacatgagaagggagtctctccattctttttgtcgaaacctgtgctaattctgaagaggccatcagcaggctgaaaacatatgcctcagaaggcaccccctcccacctggggagaagagtctggcccactcacgatatctgtgacagtgacaggacgcatgaatggatacggacccagaacgacaggtctggctatcacaggttctaagacatggccaagatgagcatggtacctcatccttcaaaccagcagctccccgaagacgatgctcatggggacaggaactggtagcgctactccaaagaggcagctaagaaatgttcgattgcac

SEQ ID NO: 113815 - DNA, 306 bp, Homo sapiens
  misc_feature (31)..(31): n is a, c, g, or t
  misc_feature (49)..(49): n is a, c, g, or t
  misc_feature (60)..(60): n is a, c, g, or t
ggaaggagtttaggtaaaagatagcagtagnccgggcgtggtggcttangcctgtaattncagcactttgggagaatagacacagagttctaagtaaaagatctagcatatgcagaggcccagaaaaaggaaagagtgatccattagggaagcagaatacaggaagctcaatgggtctggaaaagagggtaaggagagtaacggaaggagtttaggtaaaagataagcagtaggccgggcgtggtggcttacgcctgtaattccagcactttgggaggccgaggcgggcggatcacaaggtcagga

SEQ ID NO: 113816 - DNA, 690 bp, Homo sapiens
gaacatttaggttttttccaatttttatcattataaaaaatgctgtaattaacatccttatttgttcatgtccacatttctttttatgaaaattcagagaaaggaaatgtctggaccaaatggcatgtacaatattaacacttctgttatgtggtttcatattctgcagaaatattactgccacttctacattgtacaagagatctcatagccctaaacatttgctttcatagataattttctgttttttagaaatcttttgtctctttggttatagaaaaagagaacctctttttaattttattttttaaattactagtcaggttgaatgtttcttgttcctaggtcattaacagtttttattttggcaattgtctacagcccatttttctgctgtgttcattttctaatcgaattatgggatttatcttgtaaaaagcctattaagcctttttcatactttacacaagagatcacatctacttactttaccttaaaataacatttacttattttcttataaaagtaatatattatgtttgaaaagaaaaataatatgcaataatatacaataatatgtataatcataatagacaataataaaaatgaaaaaacaccaaccagaggtaattaacattaacatcataatattcttccaggctttttcagatagacaggtaggtaagtagg

SEQ ID NO: 113817 - DNA, 547 bp, Homo sapiens
aacagcaataacagtaaaaacaacaaaccctggttgggggcagggggtagaatccagaattgccatattacctaaaatgttcagttttgacagaaattatgagatatgcacagaaacgagaaagtatgactcttacataggaaaaagcagtcactagaaactgtctttgaggaagctcaaatgttggacttgctagatgaagactttaaatcagctatttaaagtatattcaaagagctaaaggaaaacatgtctaaagaaataaaggagagctgaagaatgagttttcaaccaattgaaaatatcagtaaagataaaaatgataaaaagcagccaaaccaaaaacatggagttgaaaagtgcaataactgaaataaaaagtcaccgtgggggcacttgaacaggtgggagaaagaatataccaagttgaatgcaagtaattgaaattatctggtctgagaaacagaaagggaacacagcaacaaaaaatgaaaggagctggatagacctgtggcataccatcaagcataccaatatacacataata

SEQ ID NO: 113818 - DNA, 401 bp, Homo sapiens
tgccagggaccagtgagaggtaagtagggatgaatagcactgggcaattttaagagttatttaaggtgaagaatgacaagtttagtgattgaatatgggtaacgagggaaaggaaggagtcaaatagttcctagacccctggcttgagcatttgtggggatgccgtcattgtatgaagggcacgttagtggggaaggatcaatggtttcttttttggaaatactgagttttgagtgccaatgcaatgtccacatggagatatctagtaaacaatttgaaataatgttttggacttagaagggtggaatgggctggagataaaagtttaggaattgttaccctgtggatgttaattgatgctatgctaagagatgaaattattttggaagagagatatggta

SEQ ID NO: 113819 - DNA, 287 bp, Homo sapiens
tcctccccagtcagcaccccacatctagaaccagtccagcatctcccaccagccctgggccctctcctccatcttcatctacccaggaacgtgagaactgctacttccgtttcccttctccctcccggcagcggcacctcctgcaagagcatcctcccctgcaccaagcgcccacaggccagccaccgccagctccgccttggtccaggggcgagggcttcataacctgggccctgctgacattttgagccagatcattctctgtggtgacggcgctgccctgtgtg

SEQ ID NO: 113820 - DNA, 399 bp, Homo sapiens
aaaattggtgtggagcctttgaaagagagagacaatgccagagcctgagagtcaggagcacagaagaaggcaagccagctgcatcatgggattgcatttaccacaccaagacaccagagtccttgatcccatcctttttgcctagatgttcatttacagaggcaatatgaccttgtagggcccaaaatattcgtgtccactgttttctttcctttatttttttccagaataactggagaactgcattaataaataggtttcttggttgggcgtggtggctcacgcctgtaatcccagcactttgggaggccaaggcaggtggatcacaaggtcaggagttcgaggccagcctgaccaacatggtgaaacccctgtctctactaaaaaaatacaaaatta

SEQ ID NO: 113821 - DNA, 388 bp, Homo sapiens
ccccgtgtacagtaagggccaagcacataggtatcatgtcttttgatgacctggtaagggattatttccctgcagaaataaaagcttcttatcgtcttcatatcagtaacaactggcatcatacatagtgtatgcatttctttataatgaatctaatgacacctgagtgagactcaggataaggaaatgagatttcagactacctgtattgtattcaatttcaatcaagggtaacctatagctgaatctcaagccattccctaaaattgccaaagtctttcagttgtgagtagtgcctcaatgatccacaaacatcataacaccatacacagcaaccaaaaaataaaataatagaaaaggattgtctatttgtgcaatcactaaagag

SEQ ID NO: 113822 - DNA, 650 bp, Homo sapiens
gggctgaagcagtcctcttacctcagcctccctagtagctgggactcaaaggtgtgtaccatcatgcctggctgatgatcctccaccttggcctcccaaattgctgggattacaggcatgagccaccttaccagcatcttaatgtgaggtgaactcactcagcattaatcagagccagccccagaaaatgtatctagtatcaagcatccagcatccacctgcttcagctcagtgaccccgcagatatccatggagcagctacatctgtgccaggccaggcagagcacacatgaacagcatgcagccctgccctcaacctaaccagcttaaggtctagaagacagcatgacaaagtacaaagcaccaagtgatctatgcaaggaatgcaagagggaatccatgaaagaaaacctagctgatgggaattggaaatgtttctggaaagggtagcatggaagctggatgttggaggagagataggaagaggaggagaggaggcggcgcccagaagagtgcaccacattctgctagggagcagctccaggtctacttggctgagacccgataaacggaagtagtgaacacctgttccagaaatacggccttccagctccctaagactaggggcccaggattcatgtgaataaacc

SEQ ID NO: 113823 - DNA, 294 bp, Homo sapiens
cagcggaacaagcaatccccccgagtagctgggaccacaggcacgcacagccacgcctggctaatttttttgtagtttttttggagacagtgttttgccatgttgtccaggctggtttcgaactcctgggctcaagcaatccaccagtctcagcttcccaaagtgctgagattacaggcgtgagccactgcacccagccctctgtatttcttttaacatgatgctattttaaaaggtctgtaaactcacagtgggcattgtcacctgtaatgcttgcttatgttgcagtttcct

SEQ ID NO: 113824 - DNA, 268 bp, Homo sapiens
gtcacatgtcattagattcctgtggagtaaatccatgtgttaagttattgctcttggcatcctgtggcctgttttacatgcaggagctcattcatcattaccatatccctatgagatgttagtattcctactttacagatgaggaaactgaggcagggagtttaaatatcttgtctgagccaagtgtggtggctcgcgcctgtgggcctatctactcaagaggctgaggcatgaagattgcttgagcccaggagttcaaggctgcagt

SEQ ID NO: 113825 - DNA, 248 bp, Homo sapiens
tgccagtcaattggctacttttgagacctatgcagtcaaagtaaccagcctggagggcaccataccaccacccaaaaattatgccaggtgggctggggtgcatgagaaacatggggagatggagatacaataaaggatgtggttgggagagcaagtcagggcatattaatgaaagccttgaaaattggttaggtttgaaggctgtggggactcattgaagatatgttagcaaggtattacataaaatc

SEQ ID NO: 113826 - DNA, 601 bp, Homo sapiens
ggtgaaacggcgctgaggactgacgatgtggggccgggtcctcttcccccgagcctgaggggctgcagctggggatagggggcccatgccttctgatgtctacaggcgctgacggccacccctccagatctgctttgccacggcatggaggcagaagatctttcaaaggctgaagacagaaatgaagacccaggttccaaaaatgaagggcagcttgctgctgtgcagcctgatgtcccacatggagggcagtcctccagccccacagctctctgggacatgctggaaaggaagtttctggaataccagcagttgactcacaagagccccattgagcgtcagaagagcctgttgagtcttctccccctattcctaaaggcctgggaacactccgtggggatcatctgctttcccagtctccaaaggctggctgaagacgtgtctgaccagcttgcccagcaactccagaaggcccttgtggggaagcctgcggagcaagctcggttggcagctggacagttgctgtggtggaagggggacgtggatcaggatggctacttgctcctgaagtcagtgtacgtgctcacggggacagactcgg

SEQ ID NO: 113827 - DNA, 961 bp, Homo sapiens
ggtgaaacggcgctgaggactgacgatgtggggccgggtcctcttcccccgagcctgaggggctgcagctggggatagggggcccatgccttctgatgtctacaggcgctgacggccacccctccaggtaggccaccttgctcttggcccagccaggccagcctagaggtgggcatatgggcgccgcctgtcagcgtggggcctactggctgcctcctgggaggctgactatggggcacatgtgacccagtgcctggtttgggtttgtgaatgtgggagaggaggtgagctggggagcaggaagtgtgtgtggcgtggggggcccatgtggtcagggccactccagggcctgggtctgcctgagtgtgtgtcactgctgaagtttgggagtcaggctgggctccagcagcactcctcgacctctgacggtaggtcaagtcctttctcggggtcctgctatgaagggaaccctgggaagggctgacacgggctttcctggttgtcgagggggcggagagagcaggccgacaggacagtgaggctcgccctccaagctccctcataggcctctgaggagtgcagagttggagggccatttccaacgggcctcagagggagctggtctatcccggccctgtcattactccactgggttctggtaagtaggtgcctccctgggctcacttccctcatctgaattattacagcaaaccattgaaacgcctgcattttctgcctaagcagggccacctgctcagtaaggactgattcttcttttcccctgaaatgaaacttctagaacactaaaccgatcctttgtcccaactcatctaaagtgtgggggggctggtttgataactaagggctctatgcattaccctttccatggagcacactaattttaatatgagtttatgtatagtcattcatttagttatttaacaaataggtattgagaaac

SEQ ID NO: 113828 - DNA, 636 bp, Homo sapiens
gagagactaggattccttgggagtcctttctgaggagccccagataggagctagtgagaaaagagtgttgtctgtgtgtgtatgtgtggatgcatgcttgtgtacacacacacacacacacacgaaaagaacatcagttgttccttttctcctttaaaaactccaagaatgcatttcaaactcctgtctgccaatctctcgtcctcccccagaaatccttggttaagtctttagactcaacaacaacaacaaagaacaaagccacagacaatctctccctcccgacaatgtcagctgtgaactgaagatctgaatagcctttaaaattgttttattgttgtcagcgctgcagaatggtgtgtaatctttgtattctggagaatttttaattggcacaaaagggcagtttagccggcatcttgtaggaggtttgtcatgcaaacggttagtgcctgccactcacaacatatagggctatccaagctgatttacatcagcagctccctctggttaatagccttgtatatttcctgggggtctctgagcagaagtcaagggaagatgaggcttccctcccctcctctgcatccacactgcattgcaacgcattaggaacctcctggcaccttcccctga

SEQ ID NO: 113829 - DNA, 391 bp, Homo sapiens
caggctgtgcagagggcatcgctggggaggcttgacgaaacttaaaaaaatgacaaaaggcaaaggggaagcaagcacatcttcacatgtgaaaggagagacagagagtgaaggtagaagtgtcacacacttttcaatcatcagatctcatgagagctcactcactatcatgagaagatcaagggaaaatctgtccccatgacccagtcaccttccaccaagcccctcttctaacacttaagatcataattcaacatacaatttgggtgggaatacaggaccaaaccatatcattccatccttgacccctcccaaatctcatgttctcacatttcagaacagaatcatgccctcccaaaagtttctcaaagtcttaactcattttagcatt

SEQ ID NO: 113830 - DNA, 442 bp, Homo sapiens
cctcacagacatacccagaaatattgtttaaatttgcaccctgtggtgcaatcaagttgaccataaaattagccatcacagtcagctaattgaagttattactctacttatatgaccatcttcagtctagaatttagttaaacattcgagttggaccattatctgtaggaatttgggttccaggaaatacaagaagaactgaaaataattttttaaaaaaatttaaaccatagtcatgtttatgcctgaaaataatactttaaattttttcctaaatattctagaaattaaagtttaccaaacatgaaccatttgttattaatattatacttttgatgaatgacttgataaaatacaaaagaaggaaatgtattttttaggagaggaatttgaataatttttccccaaaaaattcatatgtatgtaaaatatcttcatctta

SEQ ID NO: 113831 - DNA, 344 bp, Homo sapiens
gctagcttgatgtctgaccagtccccaggtgtacgataaccaagagccactgagagagggaaactctgattttattctgactgaaggcgacctcacattgacctatggggacagcacagtgactgcaaatggcttctcaggttcccacactgcctccacgagtctgtcgggctagtcggggccccgactagcccgacagccccgactagcccgaccccccgactagcccgacagcgcgacttctgagtctcatgaccactcaacccaagggacccctccccagaccagaaccaagtcagctgggggctgtcgtactaccctgtcgggctagtcgggggggtacc

SEQ ID NO: 113832 - DNA, 696 bp, Homo sapiens
tacttcaaagcgtcctaagtgatacacaaggtcatgagccaaaacacatgtttaatcaatccatacaacaaacatttaatcagcacctacactataccaagtcattagacagactcaaaggttaatagaggccagatgcagtagctcgtgcctgtaatcccagcactttgggaggccaaggtgggtagatcacttgaggtcaagagttagagaccagcctggccaacatgaaaatacaaaaattagccaggtgccgtggtgcacacctgtagtcccagctactcaggaggctgaggcaggagaattgctccaacctgggaagttgaggttgcagtgagccaagatgccaagatcatgccactgcactccagcctggtgacacagcgagactctgtcttaaaaaaaaaaaaaagaaggttaatagaactctgccctcctggaacccactccatccagtaagaaagacagaaaagaacataatatcaccatactttgtgtggtttgatgtgatgtgatggatacattgggtcagcacctccttctagcatgctatgccagggtccctggcagccaggactctgacaattaagactcagccaatcagattcagtcacacaagatgtagaaaatggaaggaaggtgaaggccatcttcctgttgtttttgccatttctgctaacaacacagttgtgaaga

SEQ ID NO: 113833 - DNA, 746 bp, Homo sapiens
gacgatggttttgtactattttctacaaaaagacaggaaagataagtcctctatcatggtaggtggaaatctattttttattgttaatagttgcataaaacctgaaaattctcacgcacacaaatttgctatttgtagcactgccacaggtttgttgcatttgtaattgcatatactgcattattgaatatgtttctgacaggagagagccttcgtttagtctagccactgatggaaactgaatcctttgtttacaattttagatacctgatgattggaagaattttctacagactagcttgtggctctatacattttacatgctgtttctccttcactactcatatatttctggtgccaggcttggcaagaggtgttttcattgtgatgtgacctctgaccttgcagggtgagatggaatgaggggcagtaggaatattcctgcctttttttctagtctggaacagctatcaatacctatccctggaggtgaccccaaatccatataaaaaagccactaaaccaaaataaagtataattccaaagtcagtttgaccccccagattccaaaaatgtccatgtctccttcagtgcagtcaatttaaaggaatgtttgatgagaggaaaattgcagtggatggcaacagcagtcataacagatccagttgaaatattttatttttacaaattttacaaaagcagagccattgaacacatttcgaggatcccttttacgtcttggaaga

SEQ ID NO: 113834 - DNA, 353 bp, Homo sapiens
agatatgctcccctctgtcacccaggctggaatgcagtggcatgaacatagctcactgtagcctccacctcctaggttcaagcaatcctcccacctcagctccctgtgtagctgggactacaggcatgcacactgttaattgttaagacagggtctccctacgttgcccaggctggtctcgaactcctggtctcaagtgatcttccctcctcagcctcccaaagtattggaattacaggcatgagccaccatgcctggcctttcttttatatttttaaaatttatttattgtggtaaaatatacatagtaaatgtactacttcaaccatttttaaatgtatagtttagtggca

SEQ ID NO: 113835 - DNA, 398 bp, Homo sapiens
ctctcgctccgtggccaggttgcacgtgcagtgtacaatctcggctcactgccacttccgcctcccaggttcaggcgattgtcctgcctcggccgtctggagtggttgggattccaggcgcacaccagcacaccgggctggttttttatttttagtagagatggggtttcaccatgttggacaggatggtctcgatctcctgacctcgtgatctgcccgcctcggtctcccaaagtgctgggattataggcatgagccaccgcacccagctgatactccaataattttttaaatgaataaaacaaaaatggctgcagaagaacatgacagtgtgatcccatttttctaaatgagtaaaaatagtggccgggatcgcactactgcactccagcctgggc

SEQ ID NO: 113836 - DNA, 317 bp, Homo sapiens
gggattggggacacctgtattagaagatagagtacctaatataattttgtgctttgaatctatgaaatatctggattttggatccaatgtgttcttcaagctgagtgacttgtgaaagcctcaagcctcttttgtctaaagatatgaaaaaggccagggtatgtctttttcagatataaaaaaaatacaatttctaggataacgcattaaataacatttactagtttttattgacaatccaacagaatggcctataaaattatgaagctataatactatgcacaaaaatgtgttgtttcaaaagtgtcctactttat

SEQ ID NO: 113837 - DNA, 525 bp, Homo sapiens
ttcctgacaagaagagttggagatgatgaatacaaaacccctgggacactgcctggcccatagtgatgttaccatcagtagtggctttgccgtttccagattgacatccatgccctaaacagagaactttgctgagatgaaatttccttgttggtatacttttgtgaaccactccattgagaaccagcacaaagccattgccttcttgaacgtcttcattaaaactagaataatctctgcccctcatttgcccatgcacatggaaaacccacggatatgccttccctgatggaaaatatgaccactgactggagttcgagaccagcctgaccaatatggagaaaccccatctctactaaaaatacaaaattagccaggcgtggtggtgcatgcttgtaattccagctacttgggaggctgaggcaggagaatcacttgaacccaggaggcaggggctaccgtgagccgagccgagatcacgccattgcactctagtctgggcaacaagagtgaaattccatctca

SEQ ID NO: 113838 - DNA, 380 bp, Homo sapiens
aggttgtgtacaataactaaattgtagaagggaagcagaaacagcaatgtctcttcaggtggtcaagaagccactctgatgggcaggctgtgagcatgggtcacctggaattccaccttcatggtgactgtgataagcatctgagcagctcccaacttctctgccctatggtggcacgcatgagtccccagtcctaccctaggagttttggtgcccacagaaagtaagtactgcctcggactaatcacattattccaaaggaggtcgggccaccaggtaggggcaacacaaggaagtagctgtgatgtgtttaaaggtgagaatgacatgactactcaagtgtccacggtaggaaaatatccttgtaagatggctcttag

SEQ ID NO: 113839 - DNA, 527 bp, Homo sapiens
tgcacagtatatccaatctagcagcaaatttataaccaaatcagacttctcatcacctccaatgctaccaggtccaagcaccataatcccccatctggattattttaataatgaccctagctttttcttccccaaaatttctaaacattatagccagggcaatccttttctgctgaaaactcttcagttgtcaaaggtctcccaatcccttataaagaccaacaggatgtgtcttcctgttaccctgctgatatcatctctttctaatcttttcttcattctgttgaagtcacagctctacttattccaagaacatgctttgcatgttatcacctcagaacatttatacgttaactattcttcgtctggaattctcttctttcagggatccacatgacccattccttacttcctttactccaatgacatcttctcagtgaggcttcctttaaccaaccctactcaaaaagtgcaacactccgtttcccacacacatagacacatgcgtgcatccccctggggaactc

SEQ ID NO: 113840 - DNA, 304 bp, Homo sapiens
tgcatatatttgtcttatccaccattcagtcatctttaaataactatcacagaaatttcaaagcaactgtaccttcaaataaaatgttgtaaggaagaaaagcatgtatgtacaaaagctcattaaacatctaacaaattcttccatatgtcctaatataatatttaatggcaatataatatttttgatcccaatgttttcatctttgatgtgaatacaatttaactgtaattgaatatattttcaagtttttaaagtaataccagattttaaacagaggcatgtacaaatttcactaataacc

SEQ ID NO: 113841 - DNA, 455 bp, Homo sapiens
agcaaaggacataattagagttgggcagaaaaaagcagggcaaaataggtgaattattgccaccttgaattgaaatccaaaatgtaacaaatgttcaaaaccatcgaaacttgactaaaggacggtggtggctaactcagttcattagcttccttataaaatgaccagtgtctcatgttaaataccctgccattaagttagcttctgtgtgtttatcgaaaaatacagaatcaaactgtatctctaatcccagtgagtcattcggaaataaatgcgtaaaaaagacagagcgagagagtgtgaataaaccatcacagacacatactcctcctaaaaaaacaaacgcaaggcgtaaaaaaacttcacagtgcgtgctccatttcctttcacccaggacgtactcaataaacgcttgttaaagagttttattttggtactgggttaaaaatacaccc

SEQ ID NO: 113842 - DNA, 353 bp, Homo sapiens
cccttcagcacctttgtttagtattccccagaacacatttctaccagattcctgcccagctggctggcttcttctcattattcagatctcaattggctgttacttcctcagaggggccttcctttaccactctgtctaaagtgccctactaatcctctagtcacccatctatttcctttatggcattatttgtaacaagattaggaattatcttgtgttagtttgtatatatgcccacccactagggtgtaagtgtagtgaagccaaggaccttgttttttgattcaccactacatctttagtacttaccacaaagtaggtacatagtatgggctcagtaaagccctaaatga

SEQ ID NO: 113843 - DNA, 500 bp, Homo sapiens
tcccctctcagtgtaaaggatgcaagaaacaggaagcccctggtatggggacacagtttaatcagaactcagagcgcacctttccagctgtctgcctggactgcagagagaccttggctgaatatttcatcctcttgaaatatactgctgcgacctgactgaacattttcacacaggggctttaaattagaagagagtctgtgatattctcattcgtaaaaccataacaaactgtttcatttgatcagctgcagcaaaccaagatagcctggtatataccaagagtttgtctattttttttcttctcttaaagcaatgatattaatcataccttgcatattcactatattataggagataaaaatagaggtaaaaagaaaatgatcaattctttaaaaaaaaaaatctaattcttcccccatcaggtgatgtcatccgggccaagaaatgcagacatagaaaggggcaaagtcttggtggtgcgtgcctgtaatcccagc

SEQ ID NO: 113844 - DNA, 352 bp, Homo sapiens
ctgatcagcccagaaggagtagtacagtcggcacctcccccattaatatgggtcaaagggctgggcgcggtggctcacgcctgtaatcccagcactttgggaggccgaggcgggcggatcacgaggtcatgagatcgagaacatcctggctaacatggtgaaaccccatctctactaaaaatacaaaaaattagccggatgtggtggcgggtgcctgtagtcccacctactcaggaggctgaggcaggagaattgcctgaacccgggaggcagagcttgcagggagccgagatcacaccactgcccactccagtttgggcaacagagcgagactctgtctcaaaaaaaaaaa

SEQ ID NO: 113845 - DNA, 260 bp, Homo sapiens
ctttccagagttgcaggtgcttcaggaggacaggaggccaggtgagtggcccagcatgatgccctggctgcagggttgtctctgaggataaagggaccctgtgcaggtgatcaggtaggcagggctccgggctgcttcgtgaccttcagctgagactctaggaccagcccacacaaacccctttctcctctggagggttcttcacacagggtggggccagtgcagagctggtccttcccagctgagagcttcttagcagc

SEQ ID NO: 113846 - DNA, 480 bp, Homo sapiens
aggacacagcaaaacaacggccttctacaaaccaggaagtgagccctcaacagacatcaaattggctgctttttgatctaggtcttcccagcctccagaactgtaagaaataaatttctgttgtttaagccacccaatttatggtgtttttgttatagcaggcctaatggcctaagacaccatccactctccccaacatatacacaaacgaatacaagtaaagttggggtaaatttaaataagataggtataatttatcaatgtcaatatcctagttatgatattacattaccattttccaaaatgctgtcattgggagaaactgggcaaagtatataaaaacatcttggcataatttctcacagctatctgtgaatccataattatctcaaaaaatagaattttaaaaaagatgaggctgggggtggtggctcgcatctgtaatcccagcaatttgggatgccggggtgggcaaattgt

SEQ ID NO: 113847 - DNA, 888 bp, Homo sapiens
ataaaattgagagagaaaagaatcagctctctccattatacagtcagcactattgcaaatacttattcaattactttcagcaaacacaaggccctctgtggtggctgctccatgggtaatttgctctggaactctgacctttcagtttgtgacagtgaaaagaaacatcacattaatataggagaagatagaaggacctctcgaaagacccaagaaagtggtcttgataataatacctaccacttattatattctcaccatataccaggcttctcatttaattcttataaagggcttcagagatgggcattagcatccccattttctaatgagggccatggggctttgttggtttatataacctgcccaatattagtggtagaagcagatttctcacagaaatctgccttgctctggattgatgcttaacaattagttctaatgcttcccatttagggagtagcaaggtcagccataatttaaattccattcagcaaatattgttagtcctggctacactcccagagccgtgatatggttgctctcctctaggaatttgtagtattattagaaataattataggatataaggtggtatagaattcaattccaaattggataaaaccatgagccaatttactgagcgcccactgtgtgctaggcgctattctttagtctgacgaattatagccatgcataaatgctgcaatagccatacaagtctgactaaattaggcacataatagacattttaaatatttcttattgcccaatgtccatattctcagcgtcagggttcaacaaactgggtgtgatcaactcacaatagctatgagtctcccggatggcacattcttagtccagccttggtgaaggtggcatggtcgc

SEQ ID NO: 113848 - DNA, 739 bp, Homo sapiens
  misc_feature (728)..(728): n is a, c, g, or t
  misc_feature (730)..(730): n is a, c, g, or t
  misc_feature (734)..(734): n is a, c, g, or t
  misc_feature (739)..(739): n is a, c, g, or t
gaagagctagcaccgagcttcaataccctgcagattaaaaaaaaagtttggattcacgtggcttctgccacagaaaggtacctcccgtttctcattcagctcttcaaattccctttagtggtcttagctgatttttaaaaagggccgggcgcggtggctcatgcctgtaatcccagcactttcagaggtgaatcacctgaggtcaggatttcaagaccagcctggccaacatggtgaaaccccgtctctactaaaaataaataaattagctgggcatggtggcgggcagctgtaatctcagctactcgggaagccgaggtaggagaattacttgaacccagggaggtgggaggatgcagtgggccaagatcgcaccactgcactccagcctcgggcaagagagcaagactctgtctcaaaaaaaaaaaaaaaaaaaaaagatattaagcagagtttttgtggatttaaccatccctgctggcttcctggaaacatttaattattaatatcacacctgaatggtaaacttttgcactaagttccaaagcttgggcagctacactttcattaaaccctacacaagaaacgaactgcatgtttgaaagagaggctgtgagccgggcgccgtggctcaacctgagcagacatattttatagggctccaggatatccttacccctccccaccatcaccttcttaccatgacctgcagctgtaccctgcagatnantttnttccn

SEQ ID NO: 113849 - DNA, 483 bp, Homo sapiens
tggcttggggagggaggcagcctgaagccagtgggtctccatcctaaccctgggctcatgaaagctgaaggaagtgtttcccacccatctcgggtcttcttggctcagctcatccctctggctgggctggagtcaaggcggagcacagagccctcctggacttcacagtggtacccaaggcctgcgactcacttcaccctgaagctcattaacagggcaaggtcaaagtaggaccattcgcgccagtgtcagacccatgggaaggaggggagccagcatcgtggctgaggccctgacccagacgttggctcacagaaggcaggaaatgcagcccctggggctcccgggggtgaaaggcgccaagctcatgcttttttcgtacctcagagccttcttggaaaagcgatgacatccccagcctcaagacaaggatgggaaactaaggcacgggctccagacccaggcctgccacttgctctggct

SEQ ID NO: 113850 - DNA, 266 bp, Homo sapiens
tttccccactcccatcaaagtcctctcagtaatcagaatgccttgttccaatttatgtctttgccacagattttatctatgagtttctcttatcaaattagcagattagagtagttgcgtttccactgctgtgccattcagttcttttcattgaattattttgtgattaacattgtgtagccttacctttcttctcagtatactctagtagaaagcccagcccaatttaaagtaaaataaattgtatatataaggcagaaaaacta

SEQ ID NO: 113851 - DNA, 533 bp, Homo sapiens
taagctcattagaggaagactgctgttttgtttactgtgatattccagtgcctagcaaaatgcacagtaaaatataagtgttcaaaaatatttgctggatgaatacctgtataaccctaacacaatggctattaaaatgcatcccttcctgaaattctgggtttccagtttgaacatatatacagtatatgagtgtgtatgtgtgtgtgtgcacgcgcacgcacgcaggtgcacagctctcatctgaagcaaaaaaaaaggcaacttgaaaactacagtatctgtagctccaagaaccagttcatcagtctggattctacttcatatgtataaaactggtggagttggattagtctcaaggaaatgttgtagcagaaaatcaaagagtattgaataagcattcagtaatgtcacccccactgaaggtctttccactcttgctaattcttaaaccactgggtacagagaggtgatgtactttgggtacagagaggtgatgcactctgcattattaaaattctctctttaatctg

SEQ ID NO: 113852 - DNA, 364 bp, Homo sapiens
atggagttaaacattttatagacattactgaatttattcctcaaaacacccctattatgtagaagtaggaactaaggcttagagtgattacaggatccaagattacactggtagcaaacagcactggtacaagatctgtattctggggactatcctaatgcaaatggttctgtagggaaaataatatggtccttgcatgcaggatggaacagaagttggtgaaggtcataagtgactaaggtgggggatgattgggagatatggaagaaaccaattccagagaaatgtcagagaaaggtgcggtggtattgctaataggttagagagatgggggagggcaggcactcaagatgactagcagttc

SEQ ID NO: 113853 - DNA, 625 bp, Homo sapiens
gaaagagaaaaaatgacagaaagcttctgtctttctgaggctaagatcccagagttgaaattaagttttaaaaaatgattggcaggttttactgcatatgtagatagtgttgtcattctatttagaccgatggtaggggtggaactgttaggcatctaaaagtattacaatatctgtattaaggaggtagaggtgacatagtgttattgttaaaggactagactttggagtcagtctacttgggattagaatgttggcatttccactaattagcttcataattgtggagacattttctggcctctcagagcccaatttattcatatgtaatagggaataatgatattacctatcttatatagttaatgtgaagattaaattagaaaatgttttagcagtgtctggattatggtgactactcaataatgatggtaatgtcagatacttgtatgattaaatcttttgggaaggttttatcaacaggtttttgtaatgattgaagggacatattttcaataattactgtgttaatcttgattttttgtcttagaattcagtggaaaagtaggttaatcattttcagagcccatacaaaattattttgtcatattttagtaatgggaat

SEQ ID NO: 113854 - DNA, 345 bp, Homo sapiens
cttcttagttttagtagtggttgtggatacttgatagaaagctgggcttttttcttcagaatagttctgaaagtgaccatattacattcaaataggagttgaggcattatccctgtaagttttctttttttcccccccaaaccaaccccaaaatggtcagtgcactgtaagtttttcagataagcaagtgggcctgttctcgaacaccagtgcaaaatgctaaaccagacttccatttcctgtgacctgccctggaatttgaagaggagaatccaggtggatccatggacagaacagcttctgaacagctctgtggaaataaccaccatggacatgcattcctta

SEQ ID NO: 113855 - DNA, 205 bp, Homo sapiens
tgtgcttgcaccgacagggtgctggctgttagtcgagggacatcaggccaatgtctgtctgacccctagatcaaaattcgcatcctactgatagaaggccttgggtctcgagccttttggttgcaggtgtggggatggtttccaggtctggaggctgccaactatggcaacccgttgtgctgtcgggctagtcggggggggagac

SEQ ID NO: 113856 - DNA, 286 bp, Homo sapiens
accggctagcagctcggtactaaagtacactgcacaggtgatgtatgcaccacctgatggttggaaatgaagagaaatgtataaccacggctctccagaactgaacaactgtgaagcccaccttcaggatttggggctgtgggctggcatggcccttatttcaccacagagctttctaaacaagtcaggatgcatgaaacccctggaagggctgtcgagtggagacagctctcatcacagcgtcaccaccacctctttcccagagagggacacacataagccagga

SEQ ID NO: 113857 - DNA, 802 bp, Homo sapiens
ggcaaaggcagagctgtaaccaatctcactgtttctgtacctcacttccgattcctgtacgtcactttaccttttttgtctataaatttgttctgaccataaggcacccctggagtctctgtgaatctgccgtgattctgagggctgcccaatttgtgaatcattcattgctcaattaaactcctttaaatttaatttggctgaagttcttttatcaatggccatgattgattgaatcattagccacacgactgaactcaatcattagaccttttcctctccccacaagtagggctaatatcacctgactcaaagccccaaccctttaatcacataattggtctttctagcttggcagcccccatcctgaaattatctaggggcctaccatgagtagcttcattagctactcatttagctactcatattgtggaacctacgtgtggtctgagaatctaccagaaataatggagacttctatcaatttagaaattccaagggcttagaagctttcatcccaggaacctgggatgaggaccagacacattatttatacaacaaacagaaacttaaaaactgtttggtttataaattttattataggaatgctggcccagagataggaatatagcaactaattgaggccaaaaagtcctatgaagaaaatcttcacagtcaaagcacaagttcatctctttgttagagaggtagctgctgaggatacaagagaacaataaatgaaatgtgtttaactcatgtttctgattcaagccttttctggaagacatggcattgtagacac

SEQ ID NO: 113858 - DNA, 3045 bp, Homo sapiens
caggaccgctggcgccagcgggagaaccaggaagcgcagctctccccttagctgactctggtgctctctacaggtggccttcactatcaactgcacagcgggcagaggcagaggaacacagaaccttctcacacagcgggataaaagggtgaatttggagctgacagatgcaggcttctccacttcaaacgagtcaaccaactccacctgaagaacttcatgctgctgcctatgtgtttacaaatgatgggcagcaaatgaggagtgatgaagtaaatctggttgcaacagggcatcaaagcaaaaagaaacattccagaaaatccaagagacactcttcatctaagagaaggaagagtatgtcctcgtggttagacaaacaggaagatgctgcagtcactcacagcatttgtgaagagaggataaataacggccaaccagtagctgataatgtcttgtcaactgctccaccatggcctgatgctaccatcgctcacaatatccgtgaagagaggatggaaaatggccaatctcgaactgacaaagtcttgtcaactgctccaccacagcttgttcatatggctgcagctggtattccatccatgagtaccagggatctgcattctaccgtcactcacaatatccgtgaagagagaatggaaaatggccaaccccaacctgataacgtcttgtcaactggtcccacagggcttattaatatggcagcaactcctattccagccatgagtgccagagatctctatgctacagtcactcacaatgtctgtgaacagaagatggaaaatgtccaaccagcacctgataacgtgttgttgactcttcgaccacggcgtattaatatgacagacactggtatttcacccatgagtaccagggatccatatgctaccattacttacaatgtccctgaggagaagatggaaaagggccaaccccaacctgataacatcttgtcaactgcttcaacagggcttattaatgtggcaggagctggtactccagccatcagcaccaatggcctgtattccaccgtccctcacaatgtctgtgaagagaagatggaaaatgaccaaccgcaacctaataacgtattgtcaactgttcaaccagtgattatttatttgacagcaactggtattccgggcatgaataccagggatcagtatgctaccatcactcacaatgtctgtgaagagagagtggtaaataaccaaccactacctagtaacgccttgtcaactgttctaccagggcttgcttatttggcaacagctgatatgccagccatgagtaccagggatcagcatgctaccatcattcacaatctgcgtgaagagaagaaagataacagccaaccaacccctgataacgtcttgtcagctgttacaccagagcttattaacttggcaggagctggtattccacccatgagtaccagggatcagtatgctaccgtcaatcaccatgtccatgaagcaaggatggaaaatggccaacgaaaacaggataacgtcttgtcaaatgttctatccgggcttattaatatggcaggagctagtattccagcaatgagttccagggatctgtatgctaccattactcacagtgttcgtgaagagaagatggaaagtggcaaaccccagactgataaggtcatatcaaatgatgcaccacagcttggtcatatggctgcaggtggtattccatccatgagtaccaaggatctgtatgctaccgtcactcaaaatgtccatgaagagaggatggaaaataaccaaccacaacctagttatgacttgtcaactgttctaccaggacttacttatttgacagtagctggtattccggccatgagtaccagggatcagtatgctaccgtcactcacaatgtccatgaagagaagattaaaaatggccaagcagcatccgataatgtcttctcgactgttccaccagcatttattaatatggcagcaactggtgtttcatccatgagtaccagggatcagtatgctgcagtcactcacaacatccgtgaagagaagataaataacagccaaccagcacctggtaacatcttgtcaactgctcctccatggcttcgtcatatggcagcagctggaatttcatccacgattaccagggatctgtatgtcaccgccactcacagtgtccatgaggagaagatgacaaatggccaacaggcacctgataactccttgtcaacggttccacctggttgtattaatctgtcaggagctggtatttcatgcagaagtaccagggatctgtatgctactgtcattcacgatatccaggaggaggagatggaaaatgatcaaacccctcctgatggcttcctgtcaaattctgattcaccagagctgataaatatgacaggacattgtatgccacccaatgcattggattctttctctcacgacttcacaagtctcagcaaagatgagctgctttacaaacctgatagtaatgaatttgcggtaggcaccaaaaactacagtgtctctgcaggtgacccaccagttacagtaatgtcttcggtggaaactgtgccaaatacaccacaaatatctcctgccatggcaaaaaaaattaatgatgatataaaatatcaattaatgaaagaagttcgaaggtttgggcaaaattatgaaagaattttcattttgcttgaagaggtacaaggatctatgaaagtcaagagacaatttgttgaatttaccatcaaggaagcagcaaggtttaaaaaagttgtcttaattcagcaactcgagaaggcgcttaaagaaatagattcccactgccatctcagaaaagttaagcacatgagaaaaagataattgtgttagtgcaaagaccaaggagaaacaaggacatatgctgtaggatggaacaggttattgctgaagctccctataatcctgaaatgaagagaattcccttccagaagctacgaaaaagggagctgtttaaatttaataaatctctgttagtaaaagctgc

SEQ ID NO: 113859 - DNA, 390 bp, Homo sapiens
cggagtctggtgggaacggcctcttcgggactgctccgagagacggtgtgcagagcctggcgtgctcgccgaggtctgacaggcagcccggggctaggtcctgttggatttttttttctaaggaaaatgggaagtggtggtagggtttgagcagtggagtcccgggcagttttaaaaggatccctgcagctgccggctgggagggcgtgggtgcgcgtaaggccggaatcacagagaccaggtagaagatgattacgagaacccaggaacgtggccctcaggaggccggcagtaccaaggggacagcagctgggaggagagaggcaggagatggtcaggggccagaccagggaaggccgcggagaccgcagaattcgctctgaatgagtg

SEQ ID NO: 113860 - DNA, 306 bp, Homo sapiens
ggagcaaggctttcaggctcttggctctcactgccaggtgagccaaaagttctggcttgctggtatccccttcccactctgcccagttcctttttctctgttttactctccatagctgatctcataaatacttagttttgctgtgtagaaggcacagcacttgaagccacttctgtggcctgtgtgccacgtagcctgataatgatccagcaagatcatttctagggctaatatgccgattcatgttgttatggatgttaggactctagagatggaagggaccatctgggccaattcccatcacct

SEQ ID NO: 113861 - DNA, 292 bp, Homo sapiens
gggggacgtgaggaggcatgtagtgactgactgcaggacatgggacccccctgctcggcttctgctcctaccccaccggtcactgggtcagacaagcttagcctgagccccgcgtcaccatccctgtcctagtggtagcctcttgctgtttagaaaaacagagttgggggagatgacagtagcttgcctgtgatctacacacagggcaggttgggaggggtcctgcacactctgtcacgtagtgctcatcccagctcctgcctgctaggtttgtggcaatatttgtggtaag

SEQ ID NO: 113862 - DNA, 620 bp, Homo sapiens
ctcctgagctcaagcgatcctccagccttggcctctgaaagtgctgggattataggtgtgagccaccgcaccggcccccgctggcttccaagggagggcaggctggattccatttgctgccatctctctgcctccaagtctcatcccaccctacctccacttccttgcttgcttacattgtgcttaacagacaaccctgccctcgaaacagccttgagatgcctctaaatcatcaactcctgttcctctttgaactctgtcccttcacccttaatctgctgggacagcctttttcctgatgcattttattaagatttcatcacccgggaggcagagtttgcagccagggcatcttcccgccagcttgggggcccagataagtggctttggaggagggctgagtcgccaacacctgcacacgagaaacctctccacttgccccttcttctgtcctgaaatgtcactggagcctcatcctgacacaactctttccaaactcgcccactggcttgcttgtgccatcattccaaacacctgctcagctctgctgggccaaggaagcaacacgctgcgcttgttagattctgcgtgacttgcaagcccccagtctctggtcctgg

SEQ ID NO: 113863 - DNA, 242 bp, Homo sapiens
gacctgtttctgcctgtttcaagttccatataggaattagatcagtagttggcaaatgacggcctgtgcgccaaaatctagcccagtctgtaaataaagtcatgctggaacacagctgtgctcctttgttgatgtgttgccgtgttgcctgtggctgctttcacatcacaatatcagaaattgagtagttgatacagagactacgtggacagcaaatctagaatatttaccatctagctctt

SEQ ID NO: 113864 - DNA, 322 bp, Homo sapiens
tctagatatatatctaataagaaatgtataaaatcgatatggagaaagtgataaaacttttaaaaacaatgtaaaagaagacctgaataaataaaaacataccatgctcctgggtgggaagactcaatattgtaaagatgtcattctcccccaattaatctataatttccaagcaatcccaatcaaaatcccaacagggcttttttttttttaatggaacttgacaagcagattctcaagttcatctgaaagagaaaatgtgcaagaatagccaagtaatttttgaaaaggaaccataagagaaaatttgccctatcagtta

SEQ ID NO: 113865 - DNA, 728 bp, Homo sapiens
aagtcctcctttgaggggcacagcacacggcagctgacagcgtgtggcagacagagggccaggcagagcggcggcagaggggccggcaccgccccagccccagagtccagctcccgacacacagggagacgggggccagggcctgggagccaggctggggacgacctcaccctgtgtgtcaccaggaggggcggcaccatcgggctctcctgctccccgtccccttccataccctgaggaccagccgcatcaaggggctttgagcaaaagcaggcgtcctgggaaaatgacaagctcaaactggcctcaagaacttttcacttcagggttctttcagataaagtactttatgcattaacaaatctccatcttcccggaaatctattctcacaattggaagcgtgctccctacaaaccggacagccccataggccccgaaacagtgcttgcttctaggaattattctagagtcaaaagtaaggtcctcttgagagtggatctcaggtaactgtaagcccagctggcagccaggtagccggaaaagccaggctgagccagcacatccccggtgcagcttcctgcagcgagcggccccctccccacgacgcccccgggtctcccctcaccactgtcccatcgcaggatctcagcaaaccgttccctcccacgtggcagcccaggttgcataaagttgattcgggtcagaccagccccgagaaagcatccct

SEQ ID NO: 113866 - DNA, 215 bp, Homo sapiens
tgactgcattacagtctcagccttctcctcggcagcactcccccgtcgctctcagataacatcccccatccctgccatctgggcttcagactcccacttgggggcacagggaagctggggtccacctccaggggcccatctgtttacttctgcaggtccaaatccaatggccaagatcacttggccagtgacctggctccccacaacctctcaga

SEQ ID NO: 113867 - DNA, 3506 bp, Homo sapiens
  misc_feature (10)..(10): n is a, c, g, or t
ggcgtgggcngacaagccgtgcgctcccgggctgcgaggtctggctaggctacgggccacgcgccgccgccgctgccgccgccactgtcctcttcggaggcgcgggcccgacggaaaccatgtttgtggctcgcagcatcgcggcggaccacaaggatctcatccacgatgtctctttcgacttccacgggcggcggatggcaacctgctccagcgatcagagcgttaaggtctgggataaaagtgaaagtggtgattggcattgtactgctagctggaagacacatagtggatctgtatggcgtgtgacatgggcccatcctgaatttgggcaggttttggcttcctgttcttttgaccgaacagctgctgtatgggaagaaatagtaggagaatcaaatgataaactgcgaggacagagccactgggttaaaaggacaactctggtggatagcagaacatctgttactgatgtgaagtttgctcccaagcacatgggtcttatgttagcaacctgttccgcagatggtatagtaagaatctatgaggcaccagatgttatgaatctcagccagtggtctttgcagcatgagatctcatgtaagctaagctgtagttgtatttcttggaacccttcaagctctcgtgctcattcccccatgatcgccgtaggaagtgatgacagtagccccaacgcaatggccaaggttcagatttttgaatataatgaaaacaccaggaaatatgcaaaagctgaaactcttatgacagtcactgatcctgttcatgatattgcattcgctccaaatttgggaagatctttccatattctagcaatagcgaccaaagatgtgagaatttttacattaaagcctgtgaggaaagaactgacttcctctggtgggccaacaaagtttgaaatccatatagtggctcagttcgataatcataattctcaggtctggcgagtgagttggaatataacaggaacggtgctagcatcttcaggagatgatgggtgtgtaagattgtggaaagctaattatatggacaattggaagtgtactggtattttgaaaggtaatgggagcccagtcaatgggagttctcagcagggaacctcaaatccttccctaggttcaaatattccaagtcttcagaattcattaaatggatcttctgctggcagaaagcacagctgagtacaagctaactggagtaactttgctgttttgctgcttgttgcatgcacactggaatggaaagcgagctcccttttccccttccccagcgccgtttgacctctcccaaggatacaccagcagcctgcttactactaaacgcaatccaaaaggcctttaaaaatacagtgtatattttttgtactagtcagtttattgacactatttgaaacttttgaaatataaacggagaggctttctgttgagacattgtcaccaaaacaattttttgaaatgttcctgaaactaatttgggtttaaagattaaaagggttgttaccattcttatctgagtagttgggaggaggggaataccactttagttcatttggaaaatatagacatatttcttttgctttcttaaaacagcttaaaatgatgaacttttataattttaatttgaagattgaataaatattttttataaagattgttttgagtgctgatttgtttactttttgtagatttgctttatccatgatattcagtacaactctgtcatttctttgtaatatttaaaaaatattagtaaaggagtgaattaataaagtagtaatagtaaaatgaaaggaacttgactgtacagtttgtagcccaggttaaggcatttgggtattgtttcatttaaccaatttggggactaagatgggaaacactttttttattaagtttttaattcatagtcactaaagagataaatgtttcttatatacatttgtgtatttttatggtgttatttattccatggcttagcttccttcaaatcaaaatttggacacacactattaagagaagccattaaaattttactaaaattgtgcatgtaaattaattgtcagcattccatgtctcaagattttcttaatttagttcgctgtttaaattaattcatgtcctgtaaagttctgaccttgataacaaagctataaatatttaagtttgctaatatgcgtaagtattatcggtaagttacaagatggaagaagaataacagtagggcacagtcattctgtgaatccttttacttatcaaaatttggtagctattctaaggcttttgcagaaaaataagtgttcaatgtttgtagttcttcaaaagcatgttgcagtagccagccatactatgtgtattcccagtatcatgtacgcactaaaaaaaatgtgtgcttgctgctgctgtgagtgaaccattgcttaagataaaaaacttaactagatctgtaaatgtacagaatagcatcagatgtttctgagagattaggaaaatgttttgaatttataaaattaatgtttttctttgtaacatttatatatattttttaacattttaagtttaacagattgtattcctttcaagtttctatacttgcttaagcaatcttgatttgagtaagggtcttgatttgtgctattatgttctgttagttttggcatgaatatactaaagcttttttttttttttttagcatgtgttttctcctctttggttctctttgtatttactacttttctctttttcttgtgttttttttttcctgtttttgttttgtttggtgttttgttcctgtcttcattgtttcaggtatttctttacccctctggattccccacgggctggatcgagatggtccagttatgcccagctccttcctcctcctcctcctcctctggtagagcactcttgcgatgctgacactgccaacctccagtatcctcaccctcgcagacgatatctctctcggcctcttaatcccttacctgagaatgaagggatttaaaacactgatttaacattgaaaggccttattcaagtgcttgtaaatgctttcatttctggctgctttttgtttttcattttctttcagaagatttttctaacttagggtctgtcttgcatgtattacaaccagaatacagtgtttggaacctaaatctgtttgtgcgtctgcatcaaaggaacatttgcttcactgggtgataacctttgatgaaatgagatatgtccaagtaacgttaactgtgaagttacacacagtagctgacttcaaagtgcctgttcctgtaaattttattttaaactgttaccatagtcttaagttgtttatgctttatcagactggctaatgtgaaagcataatattatgaagtttattctgccttatgagaccttaaaaaatggatttcattttacaggctaatgttgtaactgactagtatgtaaaataaatcattcctgtgtataaagcagcaaaacctaaaaaaaaaa

SEQ ID NO: 113868 - DNA, 3455 bp, Homo sapiens
  misc_feature (10)..(10): n is a, c, g, or t
ggcgtgggcngacaagccgtgcgctcccgggctgcgaggtctggctaggctacgggccacgcgccgccgccgctgccgccgccactgtcctcttcggaggcgcgggcccgacggaaaccatgtttgtggctcgcagcatcgcggcggaccacaaggatctcatccacgatgtctctttcgacttccacgggcggcggatggcaacctgctccagcgatcagagcgttaagacacatagtggatctgtatggcgtgtgacatgggcccatcctgaatttgggcaggttttggcttcctgttcttttgaccgaacagctgctgtatgggaagaaatagtaggagaatcaaatgataaactgcgaggacagagccactgggttaaaaggacaactctggtggatagcagaacatctgttactgatgtgaagtttgctcccaagcacatgggtcttatgttagcaacctgttccgcagatggtatagtaagaatctatgaggcaccagatgttatgaatctcagccagtggtctttgcagcatgagatctcatgtaagctaagctgtagttgtatttcttggaacccttcaagctctcgtgctcattcccccatgatcgccgtaggaagtgatgacagtagccccaacgcaatggccaaggttcagatttttgaatataatgaaaacaccaggaaatatgcaaaagctgaaactcttatgacagtcactgatcctgttcatgatattgcattcgctccaaatttgggaagatctttccatattctagcaatagcgaccaaagatgtgagaatttttacattaaagcctgtgaggaaagaactgacttcctctggtgggccaacaaagtttgaaatccatatagtggctcagttcgataatcataattctcaggtctggcgagtgagttggaatataacaggaacggtgctagcatcttcaggagatgatgggtgtgtaagattgtggaaagctaattatatggacaattggaagtgtactggtattttgaaaggtaatgggagcccagtcaatgggagttctcagcagggaacctcaaatccttccctaggttcaaatattccaagtcttcagaattcattaaatggatcttctgctggcagaaagcacagctgagtacaagctaactggagtaactttgctgttttgctgcttgttgcatgcacactggaatggaaagcgagctcccttttccccttccccagcgccgtttgacctctcccaaggatacaccagcagcctgcttactactaaacgcaatccaaaaggcctttaaaaatacagtgtatattttttgtactagtcagtttattgacactatttgaaacttttgaaatataaacggagaggctttctgttgagacattgtcaccaaaacaattttttgaaatgttcctgaaactaatttgggtttaaagattaaaagggttgttaccattcttatctgagtagttgggaggaggggaataccactttagttcatttggaaaatatagacatatttcttttgctttcttaaaacagcttaaaatgatgaacttttataattttaatttgaagattgaataaatattttttataaagattgttttgagtgctgatttgtttactttttgtagatttgctttatccatgatattcagtacaactctgtcatttctttgtaatatttaaaaaatattagtaaaggagtgaattaataaagtagtaatagtaaaatgaaaggaacttgactgtacagtttgtagcccaggttaaggcatttgggtattgtttcatttaaccaatttggggactaagatgggaaacactttttttattaagtttttaattcatagtcactaaagagataaatgtttcttatatacatttgtgtatttttatggtgttatttattccatggcttagcttccttcaaatcaaaatttggacacacactattaagagaagccattaaaattttactaaaattgtgcatgtaaattaattgtcagcattccatgtctcaagattttcttaatttagttcgctgtttaaattaattcatgtcctgtaaagttctgaccttgataacaaagctataaatatttaagtttgctaatatgcgtaagtattatcggtaagttacaagatggaagaagaataacagtagggcacagtcattctgtgaatccttttacttatcaaaatttggtagctattctaaggcttttgcagaaaaataagtgttcaatgtttgtagttcttcaaaagcatgttgcagtagccagccatactatgtgtattcccagtatcatgtacgcactaaaaaaaatgtgtgcttgctgctgctgtgagtgaaccattgcttaagataaaaaacttaactagatctgtaaatgtacagaatagcatcagatgtttctgagagattaggaaaatgttttgaatttataaaattaatgtttttctttgtaacatttatatatattttttaacattttaagtttaacagattgtattcctttcaagtttctatacttgcttaagcaatcttgatttgagtaagggtcttgatttgtgctattatgttctgttagttttggcatgaatatactaaagcttttttttttttttttagcatgtgttttctcctctttggttctctttgtatttactacttttctctttttcttgtgttttttttttcctgtttttgttttgtttggtgttttgttcctgtcttcattgtttcaggtatttctttacccctctggattccccacgggctggatcgagatggtccagttatgcccagctccttcctcctcctcctcctcctctggtagagcactcttgcgatgctgacactgccaacctccagtatcctcaccctcgcagacgatatctctctcggcctcttaatcccttacctgagaatgaagggatttaaaacactgatttaacattgaaaggccttattcaagtgcttgtaaatgctttcatttctggctgctttttgtttttcattttctttcagaagatttttctaacttagggtctgtcttgcatgtattacaaccagaatacagtgtttggaacctaaatctgtttgtgcgtctgcatcaaaggaacatttgcttcactgggtgataacctttgatgaaatgagatatgtccaagtaacgttaactgtgaagttacacacagtagctgacttcaaagtgcctgttcctgtaaattttattttaaactgttaccatagtcttaagttgtttatgctttatcagactggctaatgtgaaagcataatattatgaagtttattctgccttatgagaccttaaaaaatggatttcattttacaggctaatgttgtaactgactagtatgtaaaataaatcattcctgtgtataaagcagcaaaacctaaaaaaaaaa

SEQ ID NO: 113869 - DNA, 347 bp, Homo sapiens
aataatattcattctgactggtgtgagatggtatctcattttagttttgatttgcatttctctaatgattagtgatgttgagcaatttttcatatgcttgttgactgcaagtgtgtcaaaaatagctttttaatttattgagttgctattcacattgaattgaaaatatctgtaatttgcctcacagattctgatatatagtaagttttccacagatgttaattctgtttttgttgttgttgttgtttgaaagctctccacctaggaagagaattgcctccccacttgcaaaggcaagtttaatagaacataatatctttatcctgtgtctagaaattgctgtttta

SEQ ID NO: 113870 - DNA, 455 bp, Homo sapiens
cctcccaccattccctccaccaccttcgagaacagcaaccatccccaatgcccacatctcctcttggggtctcccccaggcagcaggtgaggtccccatgacttctctgtcttcaagtcagggtccacagtcagctgtttggggatctgccccagcatgtgggccactgaccattgggtggggtcctggtcctttccagaagggcaagccatacccgtcacttgcctctcataggaaacaccatctctaatgaatgcaggcagggatcacccaccacctatgcagagcttcctgctctcattggcttttctcagcctcactgtcctcttgctgacatccggttgggaccatttgcgcaactgcagactggcagggccaggcaaacacagcatggcgcctgccaagaaggtggtgtgagactgggcacagtggctcatgcctgtaatcccagcact

SEQ ID NO: 113871 - DNA, 491 bp, Homo sapiens
tcttaataaatgttagctatttttattacccatatttccttgaacaacaaagcttttcacaatcaaagaatagcttctcaaggagaagaattaggggttaaaagggttaaaagttctgaagaatgaatcagcatttttctctcccttgtctttccctgtctgtttagcaacactgattaacagctcagaggaagaggtccagaatgaacttgaatgacaaggaaaacaactaatcttccctaggcaatatccttattaaagtttcactttagtaacaaccaggttttcactgagacaggttggttggggtggggtgggtagaaaaggaaaaagtaggccaggcacgcgttcgtgatacagaatgtacgtgctttgattatttctctttttattgtaactttaatcaaatcttcaattcatccatgacccaaaagattaagcatcactcttagaagaagcaactccttcccttgattctgtgtatttggatc

SEQ ID NO: 113872 - DNA, 143 bp, Homo sapiens
cacacacacccccacacacagccagggcttctccactgcagcactagtgacatgttgggctggatgactcctgtcacagggggctgtcctgggcattgcaggatgttcaatagcatccttagcctctgcccacgagatgccag

SEQ ID NO: 113873 - DNA, 721 bp, Homo sapiens
caaagtgctaggatcacaggcatgagccaccatgcctgaccagctagctgtcagcttcttgaagtcaagattcatatatgatacatctctgtgttcctgctatgatcttatacatatttggagctcaataaatacgtcttaaattgagtaaattaataaattattatactagtggtttatgatgccctgtaaattttatttttcatttttaactgttttaattacaatgtttaactttttatttgaaatgaaaataatgaaagaaaagaaataaaatagtgaagaatagtacaaagaaattccatatatccttcacccagattcagattcactaattgttaacattttgccacatttggtttatcattaatttctctctatatatgtacacacacatacacatattttctggaaatgtttgagtgcatttgtaatgcccccttactctaaatactataggatgtatttcctgaaaacaaggacattctcttacattaccacagtataaatttctaaaccaggacattgatacagtactgtcatctcatctacagcacgtattccaatgggtaacatccttcatggcggtccctcctcctggctctgctcctctcccccatcatacattgcattagttgccatgtctctttagtctcatttaatttagagtagttccttagcctttatttcatgatcttgatatttttgaagaatgtaaacc

SEQ ID NO: 113874 - DNA, 770 bp, Homo sapiens
tatgacaataatattgagccgttttccatctcctgttttatgtatgtatatatgtgtatttgtttttattaaataataccatgcctgaccagctagctgtcagcttcttgaagtcaagattcatatatgatacatctctgtgttcctgctatgatcttatacatatttggagctcaataaatacgtcttaaattgagtaaattaataaattattatactagtggtttatgatgccctgtaaattttatttttcatttttaactgttttaattacaatgtttaactttttatttgaaatgaaaataatgaaagaaaagaaataaaatagtgaagaatagtacaaagaaattccatatatccttcacccagattcagattcactaattgttaacattttgccacatttggtttatcattaatttctctctatatatgtacacacacatacacatattttctggaaatgtttgagtgcatttgtaatgcccccttactctaaatactataggatgtatttcctgaaaacaaggacattctcttacattaccacagtataaatttctaaaccaggacattgatacagtactgtcatctcatctacagcacgtattccaatgggtaacatccttcatggcggtccctcctcctggctctgctcctctcccccatcatacattgcattagttgccatgtctctttagtctcatttaatttagagtagttccttagcctttatttcatgatcttgatatttttgaagaatgtaaacc

SEQ ID NO: 113875 - DNA, 385 bp, Homo sapiens
gaatcttttgaatttttgccagtcttatgaaggtgagaaatgatagctatttcattgttgtaatttgcacttctctctcactaatgagattgagcatcttttgagatgttcgtgggtcacttttctttgtccttctgtgaatcacctgtttatatcctttgcacattttcagtagtggttgcttttttcttattgatttatgatagctgtttattatggataaatataagtacttttatatttaaaaattgtgagagccaagtacaatggtgcacacctgtagtcccagcttcttaggaggctgagacgagaggattgcttgaggccaggagtttgagtccagcctgggcaatgtaacaagaccctgtctctgaaaaaaaaaaaa

SEQ ID NO: 113876 - DNA, 393 bp, Homo sapiens
tgccatccaaggttgctatgagggttaaatgaggtaagatccatctcaaagtgtctaactacaacctggcatatatatggtgggctctcataaaatgttaaaaattgttacttgaagtccaagattcaaattgttcttatctataaaaatttgaacaagtcaaccaaatcctcaagcctcacttttctcataggttcaataaaagtatcacacgcttcataggctaggactaattaaatttagcactacagacaggatttcttacacttcaaaataagtaactgttttcttgtttgtttttcttcccctaaggttctaataggggaaacaccaggactgcagtgcagaaatcctgacatgttatactgagccaggttctctatcctgccatga

SEQ ID NO: 113877 - DNA, 417 bp, Homo sapiens
ttaactaagaaaagtaaatatttgcaagatctacacatgagcaccctggttcttttgcattcatgcaccagtggggtctcccaactcatccaatttacgaattttcagtttgtctccatgtctttccacagtttccaattccaagtgcaaatatcctcctagctgatttcccattaaacagagccacattatgactcctggaagacacatcaggttaggattattagacttatcttcagggaacagacatctcagaacatatcagaatttatgaagttgatgcatttgattaactgtatcatcgctgcagtcctacagctggattattgttttgctgtcaacattcgtcagatcttgatttgagcatccttgcaacactattcctcctctgttcagttagctcctgtgtggagacag

SEQ ID NO: 113878 - DNA, 765 bp, Homo sapiens
tatctttcttctgctagccagctaattcaagagcaatcacttttgcttctttccgcatttcacatctagcacagtgccaagcaacagagcaaatgaataaataatttttcgtatttaaattacttttaaaatgtcaccattttttaaaaaagggaataattctgaaatgaactgcatacttcttttcctctttaaacatgccatactgcatatctattaactgaacatcattagtttattgatttatttatactgatgatgggataacgatatgagactgttttggtgatgtgttcaggcagaggctgataatgcgagatacaggagtgggcaatagcacatattttcttaaacctgttcgtgatgttgctggcttacaggtagtttgtctctttcccacaacaggaactgtatcatttactgctgcctttctgcaagatgagttagagtgtaattagtctccctaggccaaagtgggtttctcttgctccagaaaatcaccctctgtttttatcagtttcctttgacttgtcagcaacacttaaactatgatctacggtttctacgtcactagtaaaatagaccctgtctccttgtcactttcaatttattcttcatatcttaataaaaagtggcctgggggaatttgataacagagtatagttgtggccaagtttcccatggcagttagcttggaacaaactcttaacacaatgagcattaaacacttatgcttttgaatgtttgaaaaaggttgaaggccca

SEQ ID NO: 113879 - DNA, 169 bp, Homo sapiens
gtggcgtgtgcctatatttccagctacttggaaggctgaggcaggagaatcacttgaacctgggaggcagaggttgcagggagccaagatcacgccattgcactgcagccttaatcataaattataagttgagtttggtggcttatgcctatattcccagcaggttggg

SEQ ID NO: 113880 - DNA, 159 bp, Homo sapiens
ctggtgggggctgaacagcgtgggtggacaatctgagctcctgggcggcaggagcagctgcccaatggcactctcccccgaagatgctcctcctagccaggtgtgagggtagactgcgagatccccacaaagacagcatctgtgacactgtgctccctg

SEQ ID NO: 113881 - DNA, 2460 bp, Homo sapiens
ccaaagtggccatttaagaagaaacatgatgagctataaatatgctgagtctgtttgcaaaaagagagtgtttaaacactccaacacccagacttagaattaaatcagtaaagcaatctgttatttcctatccccgaattaccttttctatgccaaaacataccttcaggatattgttatgtgttgtatagatgttaagtgtttcatgtggtttttgtgtcattgctatttatcaatagcaataattttgcactgaaaactttttatagttcaaaaattaagcatggactccccagtatactttaactttctttctttctttttttttttttggagacagagtctcactgtcacccaggctggagtgcagtggcatgatctcagtttatgcaacttctgcctccccaggttcaagcgattcttttgcctcagccacctgactagctgggattgcagcctgcaccaccacacctggctaaatttttgttgttgtcgttgagatacagtttcactctgtcacccaggctggagtgcagtggcatgatctcagctcactgcaacctctgccttctggattcaagtgattcttgtgccttagcctcccaagtagctgggattacaggcgtgcaccaccacgcccagttgatttttgtatttttgatagagacggagtttcaccatgttggccaggctggtctcgaactctgggttcaagaaatcctcccaccttgcctcccaaagtgctgggattacaggtgtgagccaccacgcatggccctgaaccttctctttttaggaataccaaagttttcaactttttcagctttagaatttgtaaatatttttgtagaatatcatatgactgtaattccagagtgttccaacttgtttatgatatatttgggtaaatttacaactgttcttttatttgccataatctggttataacactgtttgtggtaggaaaggaaaacatgcaaaacatacacacacacacacacacacacacacacacacacacacacgcagagttgtgattctcagtaccaagctataggaccatgttatagatcagcgtttagtcacctccaggttatatgcatcgagaacctgaataaatcatgccactatattaatttatattacatgtttcatatttaaatcatgttttcctaaaatgtagcaactacatgtgataaaagcaaattagaacattctgtaggactgtcttgcataccttctgtctggtttccactgattccttcttagccatggagagcatttgtgattaattaatttatatatgaaataatggtttccattttatgcgagtatttgtaactgcatataccagtgcgtgtgcgtctacctctgtcagcatgaaagtattccagtctttaatttcaaaaacttcaaattagcctcatgaagagaatttttccctgtgaaaagtaagaccaagaaaaaacaaactaaagacatgtgacttattcaatgaaagtgaaaaagaagctctaaaacagtgtcattgattaaaaagaatatctggaatgtagccccactctttgagtgggattcatttcttactgcttatgaactttcaatttagtagtcagaaaccatggatttattttactgcacaatgtgaagtttacattttattaacacttgagtagtctgatttagagactagttacttctattttttaaaataatggagtaacaaattacagaatagctaaataattttttaaaaatattttacagttgtaaaaaatatccatcagaaaaatgacacacaaaacaaaatatctggacctttacagaagacgtttgctgacccccactttaaaggattggaacagtcttctagaattgaggaatatttattaaaatacctgtaaagaaaatagtgaatcactgtagcaatggctttgattcagaccttaaaatcacataagaagaattacaacatgttatggatttttaagtggcaggtattgtaactgttttttgtgtgcaaaatactgagtaaccactgggaaaatatttcagatgaaagggatgacaaaagcatgttgcgctttgcatcagcaaggcattgacttctgaaaaaatgatctgaaaaaagtttcaccgtttgtcttcttacctcattttaagaagcatgtgaaaatgggatactatagactactgagaatttcagaaattgagaacaatttcataataaaacggctatatttgaagagagaatacattttatataaacaggaaaatacatttgacactttatggaattttatgagactttttgtgggaacagaaggtcttcaaattgtaaaatgtaaagattgctctttttattaagtctttaacagggatgtatttcattgtatgttttgggtatggctttggaataaatcattttatattttatttgaatatcagaaccatttttaa

SEQ ID NO: 113882 - DNA, 376 bp, Homo sapiens
tagatgtctggagctaggccagcagtctcacttctcttgaatttatcactttgggatgctatctaggaactatagttaattatacaaataatgctacacagaatgttccagataaaaacagtatagcatagttcccaacttgtctgagagttatgagaatttatattcaagtcaagggctagatgaagagacaaatctggacagtttttcattttttcatgttcttaaaattgaaccctttaaaattctgctattcaactttttcctctcaaaatacgctgatcagctctcaagaggtccttcattaaaaccttgggaaggtttggtccctacaggatgtaacaaagtacattcttccaggaactagagacaacgt

SEQ ID NO: 113883 - DNA, 849 bp, Homo sapiens
accaattttcccgtaggctgattgaaataaagaagagttaaattcctatggcatatttctggttacaaaaacattaccaaacttctagataaagacaaaaacacttctaatattacacattgaaataaatgtgagctatacgtacatttgagaaaagattaatcaaaacaagacgattatttacccagtggttccagttcagggtcacgggtggccagagcccaccatctctgcagctctgggtgccaaatgggacccagcctggacaggatgccctcccgtctcaggacacactcacccatacccacacccactgagacagggaccatttagacacaccagtgaagccaacaggcagttttgggatatgaaaggaaagcggaggacccagagaaaacacaagcaggcatggggagaacgtgccaaatcgacacagacagtgaccctgccaggaacagatttctatattcacattgaagttgtaatgaaacaaagctgaatgcattgacgttatttgaggacctgcggcgctccaggtaacccaatttcaactcttccaaacatgagtgctaactgctatttccaccagggcggtacatcagtgccacttgtggccctccactggtggttgatatcaaggatagagggactcagggcgtcacagaagagggagcggaaacctgcctactggattctcaccaaatgacttcctgcgtcttttctccctgacacaattatgcagacatttctgcattgttataaggcttttctttttgtccaaagacaattaaaatgcttctttcataaaattagatgtttttccaaagggttgagaaagaactagagagc

SEQ ID NO: 113884 - DNA, 334 bp, Homo sapiens
taatcagctcggcccgcttaccgacggggtggcaggtaaggattcaaggtgcttctggaagactctccactgcccacaagctggggacctctccccactagatctagatgaagtccaagaagtggtccacatttgccagccctttcttgggttcttacaggcatgtggtgtgccttccaacagacttcatctttctaagtaagatgagaatccccacttactggaaccctactgagcgagctttggagtgttagttaaatttagtatttggaagccgggcgtggtgactaacacctgtaatcccaccccgtcgggtggaggaggcaggcagatc

SEQ ID NO: 113885 - DNA, 542 bp, Homo sapiens
aaacaccatgatttgtactgtgcatgggtcacattcttattctagaaatgcatcaccctgtgtttatccaagtgtgtttacttggtgtaatgtccagtagtaatagaatatgaaatatcaaggaaccatctttgttacgtgacttccaaaatgtgagatctcattgctgtcactgtgatatttgtattgtgtgaatctcttcctcctcttcctcctcatgctttctcagggaggagccctgatgtatatcatgaactcacagttcctagaccacagtaattgaggggcggtgggggggcctttatcggagaagctagagaacaagagtccttctcctccttatcccccaacaggacactaagagacaaggactgagtggaatcctggagaaaggggactcaggaactgacctcattggcctgatttgtgaggagaggagtataagtggagaggggccattcctgaggtttccgtgttttccagcctggtctcctggaaagaatctttatacagaaataaagtatgtgtttcactcaaaaaag

SEQ ID NO: 113886 - DNA, 202 bp, Homo sapiens
cagctgcttcctatcggattcagccagtagggggtgctagaaggacactggaaagctggagggaagccctctttttcttgtttacttctgttcttgtaagcggctccggtagtacttcttcaccccggcagcagcagttccttaccatagcagcagctaaattcagtttacaatctttctaacacttgtagaactaacttca

SEQ ID NO: 113887 - DNA, 384 bp, Homo sapiens
tattcacacacagaggtggtgaagtacaggtttgcctgccaaaggcagttatttcttcctaaaagccttcatgattagtcaccaccaccactgcatccacacacacacaccatagtcaatattctgccaatattctgcaccatacaacatggtagaaatgcttttggcatgggaaatttgaagagaaaatgttttcagcaggctgtcttaactgtaagtgtaaggtatcatggtaacttgtcttcgaactgggctccatgtttccttagtcttctagagagatgagaggaagactgagtgggcgggccatgggttctctatcaccaaccccatcatagcacacctgttttgaaccagacttctaatgtaagattccacctgaaa

SEQ ID NO: 113888 - DNA, 728 bp, Homo sapiens
atattttgtattctgagttagctgatacacaagtgtggtatggtgaaatgtatatttggtcattgactgtgcttactggcatacaactcctataaagtgatgtctttttgtatgctagtgagttgaccaatgtctggcagtccctaggagctctaggatgaggaattagagggttgggactttcagccccatgcccaaacttcagggaaggttggggctgaaggttaagttgttcaccaatggcaagccaacattttaatcagtcatgcctacataatgaaaacctccatgaaacccaaaaggacacggttcagagagcttctggctagctgaacacatggagggtagcatgcccgtagaggccatggaaactccctgcccctccctgcatacctcaccctatgtgtcccctcatctgcatcttttctaagggtgttccatttgccacaaaatatgtgagaagtccctaggctatggagctagatgaaagaattagggcctaggtaggagtaagcggcaaggaaccagggcaacttgctgaagcaagatgacgggtcctacctacactgtctccttataggctatggcatgaaatacccatgggattccatcctgcctcttacacactggccttgagggggtgggcaagatattataatctgtgaggcaatgtccccatttctaaagtaggaattagaatatttacactaaatacttgttatgaagaa

SEQ ID NO: 113889 - DNA, 157 bp, Homo sapiens
tctgaaggcagaaaaatatagccaatatgttgatgttttcctaatactaccaccttggtgggcataaggtctctaagtcaaggtaaaatatgtcacaattttaccaaacatgttgccaccacctaatgggggtgtcaaagtcctagctcttccctgt

SEQ ID NO: 113890 - DNA, 616 bp, Homo sapiens
tcaaatattcccagacattgataagattccagttctagtataggtttttaccccaaaggaaagaaaatatatgtccatatatatattagactgttttcatactgctataaataactacctgagactgggtaatttatgaggaaaataggtttcattgactcacagtgaaggaagacacatcttcccatggcagagcaggagagagagcgagtgagcaggggggagagtaccacacactcttaaaccaccggatctcataactcactatgatgagaacagcatgggggacatccatcctcatgatgtaatcacctcccaccaggtccctcccccaacactgggaattacaattcaacatgaaatttgggcgaggacagagccaaaccatataaccatacaaagacttgtgcatgtatgctcacacaagctgaatatcccttatctgaaatgcttggaaccagagattttggagtatttgcatatatccaatgacatatcttggaaataggacccaacgtaaacattaaattcatttatgtttcatatataccttatatacacagcctgaagataatcttagacaatatttttgataattttgtacacaaaaagtttt

SEQ ID NO: 113891 - DNA, 449 bp, Homo sapiens
actagtgaattggttcgaggcatagctaagaaaagaagatgagacacctattggggagttaaaaattacttaacaaatttgttttgccctgtttgccgtcaccacaaacatgaactgaagtgcgaggagtggcaaatggtagggaaatttatatctacagaaaatcacaagctaataaagagttccctaatggattctcttagattcccagtaggtagattatgaaatggttgaatttcacatcaaacccattggaagggtggcagatactctctgagttaaaaacacacacacacacaaaaacacctttcagcctggtgcagtggtgtccacttgtactcctatagtcccagctactcaggaggctgaagtggaaagattgcttgaccccaggagctcaaattcagcctgggcaacctaccaagacccccatctttaaatttaaaaag

SEQ ID NO: 113892 - DNA, 601 bp, Homo sapiens
caacgttgcaaataccatgcccaatgtgtattttagaatttactcatttaaatgagtgcatattaccattcctccatgtgagtactcgagttgataattccctctatctttttaaacccataaactacatttttaaaaaaatcaatgggagttttaaattttgactcatgttaaagataagattctgataatgactatatagtgactaatttcattgtttcagtaggaaacaaatcaaactttcaaaaatgttggtcatttcagtcaaattattcaaagatttcatatacatacatcctaagttaggataatttatgttaacatttttgaaagaacagccaatgtttatattgcttgttaaaatggaatgtattgtctatctcaaagattacttagctaaataatagtagacaaatggagatttaatttcacaaaatacttcataacatcactcctaattggcaatatagtcacaaagcaaaaaaaaaaaaaaaaactcgagttggggcccggtccccaatcgccctatatgagtcggattacattcactggcccgcgtttacaacgtcggaattgagaaaacctggcgtacccacttaat

SEQ ID NO: 113893 - DNA, 262 bp, Homo sapiens
gggtaatcaggggtgactgcacagttttaggcagaagcggcaagacacaattgtgctttagaagtatggtggaggaggtatagcagttaagatagcgaggccacaaatgaagcctttgaagtcctccagagaaaagatgatgggtaccagaaggggagtagttagaatttttattatctcctcttggaactgagaacagcctcaggaacttctgagaacttttgagctaatcaaataagcttatcactttttccactgtgct

SEQ ID NO: 113894 - DNA, 646 bp, Homo sapiens
caagtgttcggtgtatactgtgtacaaggcactatacaagtgctatggagtttacaaggatgaataaactatagattttaccctcaaataacttagattctagtgaggctggcacatccacacccgtcaatacacagctgaaaggtgtcgttagacaaacagttaatgtatgtgggagttcacaggaagatcactttaagcccagtgatgggaaaaactctaatgaagggaattaattgcctgctttgtgcattaattagtcacatatgagtgcctcaagctgccctggggtcctctttccacagaggcttgtgtgatgtgttcatgagaaaatactttaaattaagctaaaatgaacaattcagattaaacttgttttggcccacatcccatacttaccttggccataaaaaggaaaaaaaagcaaggcggtggaaagaagaaaagaaagaaaaatgataaggtattatcctcccctcagtgctgtgttgccttggcacccagccttgcatcctgttttccgaccttctcgttggctgtggaatcaggtaggtgtgtgagaagattggtttagattctacaagaagtagtcagaggccttgaaaataagttgattataccacagtggctcacacctgtaatccca

SEQ ID NO: 113895 - DNA, 208 bp, Homo sapiens
gagtcagagctgacaagtttcctgggcattatctctaacatgtccaatcagtttccccctttgaacggcagctgtcagcctgctgttctacccgtctccccacaagcccacacatttcagagaacagctgcgactgtcacctgcctcatttcacagagtttggacaggggtcccatttggggaccttcacccagggttgtatgcatga

SEQ ID NO: 113896 - DNA, 581 bp, Homo sapiens
tagttatctattctattctattctaaatttaatagaaatacattctcttggtttaaaggtgaagcaacagacttgaattcactcctttaaattacttttacaaaacatttttggccaggcacagtggctcatgcctgtaatcccagcactttgggaggccgaggctggcagatcatttgaggtcaggagttcgagaccagcctggccaacatggtaaaaccctgtctctactaagaatacaaacattagccaagcatagtggtgcatgcctgtagtcccagctacttgggaggctgaggtcgaggggagaatcacttgaacctgggagacagaggttgcagtgagccaagattgtaccactgcactccagcctgggtgacagagtgagaccctatctcaaaaaaaacaataacaaaacaaacatttttgttttatatcatgaaactcattaaatcaatatttaatagttgccttttagtaacttttaatatttggttcttcattccccttcctcttgccttggaataaataatataaaatgttttccttgcagaaaatttcaagatcacctacacttacca

SEQ ID NO: 113897 - DNA, 642 bp, Homo sapiens
ttactaaatggctgttgtcaccaaccgggccgttaaaaataataattgagcctgcagcactcctgagccccagattattcatgaaggggcaactggaggtggaacagctgatcccaaaggtcatttccagactataaaccgaagaagctaagcatatctatatacatatcttttacgttaagcaagattatcatagcaataatggttattgtagtccaagaaatataatgttattttttgatatattacccaagttctcaggctaaatccaaacatgcttcataatgctaaaagtagttccccaaccaccaccttaaaaaaagtaagcattacccaatcatttttgtttttgattttggtatttttgtttttaatttgggtgtttttgtttttagtttttcttttcttttttttttttcacggtcaactccatggtatctgggattcttcaaaacccttcacagaacatgggcgtggtcacacagataggttaaaggcttccttttaagtttcccccatcagttagcagacctctcatgaatattcccacttattaataacttgtcattaacaaagcttaaacagactagcctaggctttcagttcctcaaaagcatccatccactgatttctcaaaacact

SEQ ID NO: 113898 - DNA, 357 bp, Homo sapiens
tggagagttgcagccacctttttactgaccctcaaggcaagggaaatgggacttctaggagttgggttccaagcaaaatgcccaactccctttcctggcagagctgctggcagctgggctggtagagttctgccagtcctctcctcactataccattccattctggagaactagggtgtgtagatcggggacttctgcaaacccaggcaggcagaccaggctgttagtcaccacctcagggccaatgtggccaaataccagttagcacctggtaggcacggcatcagaatagccaaagtctcttcctctcaagccctaatcctaaatgtctacgcatgtacaggaacgctccttcca

SEQ ID NO: 113899 - DNA, 482 bp, Homo sapiens
taagagaccaactataaacctgtatgctaatttatttatttgcagtatcaggtagtgtaaggagatagattgcttacctctaatagcagctgcagtattttatgtttgggaaagttaatcagactgagatgtagtaatggttattctcagcacctgacacatgccaaaacaattcaaaagcagcagcaaaacactacattttgggtttgattcctcatcctgtaataataacaactttactctctcagcctttgcttaattaaaacccgttttgtttctaatgttgtattaggcattggcaaatacagcaaactgtatggcccagtttgtttgccaaaaatagttacagaaagagaagtactaagctcaatgattactgccctaaattcagtagaagtgtaaagatagagaattctgtgtttatagaaaaattgatccttgaattggagctttaagtaatggtggggtttggatgggtggaa

SEQ ID NO: 113900 - DNA, 175 bp, Homo sapiens
ggattctccagtatccacggcgggacgtgtgtgagtagaaggattctccagtgtccacggcaggacgtgtgtggcgagaaggattctccagtgtccatggtgggaagtgtgtggcgagaaggattctccagtgtccacggcaggacgtgtgtggcaaggattctccagtatccac

SEQ ID NO: 113901 - DNA, 839 bp, Homo sapiens
atggactcagactaaaaagttacaataggtattttaatatttagggtaaaggacagctttctaaaaaaataaacagatctttgtgacttgatgggatataggaaatgaggaaagaaatgttgattctggcatgagtgtcttagttgctttcaaccaaagaatgcaggaggaaaaggattttttgacagtgattcaattttgaacatatatgtatttctttcatcatcatcattattattatttatagagatgaggtctcaatatattgcccaggctggtctcaaattcctgagttcaagtgatcctcccatcttggcctgccaaagcgttgggattacaagcatgagccactgggcctggctcaattttgaatatatatttaaggtgctttggggacatttagctggagatgtctgacagggagtttactaatacaggtccagggtttggcacagatagctggacaggagggatagatttttaagtcatcaacattatagatggtggttaaaatcgtaagtatagatgaggttgcttagagaaaatgaaatgagatccacactcctttataccaaagtaaattccaagtgatcaaaacttaaacatttttaaacaaatgaaagatggtaggttttatcaaaatcttggagaagaaaagctctgctaagcaaaacccagaaaccatgattacgtaaactaaaaatcctacacagaaaactaatgaccataagcaaagtcaacgaactaggaaataaaatattttatttatatgttattaaacataatattttatctttacattttaataaagctctgtccatattgaaagaaaatcagta

SEQ ID NO: 113902 - DNA, 408 bp, Homo sapiens
ataagagaaagtgtattaccaaaccgttcaaatataaaggcgtttttcagcagcctcactgaatcattaatgcagcatctgaaatggaatatttgcaatctatgtattgaaggcaagagaacaaaatagaaacaggattatttaatgagcaagcaaacactggaagggaatgatgtcataatgtgctagtgaacagtaaattgaaatgcttttttgaagtattaaaaatagtaattgccaccactagctaatgaagcatttagtttcttgcattccacaggaaatgtaacattttagaagacttattggcaaaaattaagttctctagggaataagagaaaagtgatgggagtgaaaaaatcgtgtttgtgcgtaattttgaaatatatcctcacacctggaatgcca

SEQ ID NO: 113903 - DNA, 339 bp, Homo sapiens
  misc_feature (171)..(171): n is a, c, g, or t
  misc_feature (211)..(211): n is a, c, g, or t
  misc_feature (220)..(220): n is a, c, g, or t
  misc_feature (308)..(308): n is a, c, g, or t
gtagagacagggtcttgcccagggtggtcttgaactcttgggctccagtgatccttctgcctcagccttccaaggtgtcgggttacagttgtgagccaccgtgccaggcttcatgatgcattcttatcaaagtcactcttgacttctacatcactaaatctaatctttttncttttttaaaaaattatttatgtttttaattttaattttnatatttttnagagatagggtcttcctctgttgcccaggaggattacttcaacctgggaggttgaggctgcagtgagctgtgtttcgccactgcacancagcctgggtgacagtgtgagaccccgcctc

SEQ ID NO: 113904 - DNA, 257 bp, Homo sapiens
gagaaacagtggggcagtgggctttgggttgaatgggcctaggttcatgtcttatctctaccctctaatggttatatgatctagcaaagctacttgtcatctccgagcctcatttttctcacctttaagtgaggatgatggttccatcaggcacggcatatagctccaggtcatgagttttccttgggcctcctcctgggccattatttgagattttcttttctcttgttctcttttctcctccactttagggcctt

SEQ ID NO: 113905 - DNA, 790 bp, Homo sapiens
tatagatatatctttttctcattaaaataagcctgggcactgtggctcacacctgtgatgccagcactttgggagcgtgaagcaggcagatcacttgggctaggagtttgagaccagattgaccagcatggtgaaaccctgtctcaaataaaaatacaaaaattagtcaggtgtttgtggcgcatgagtgtaatcccagctactcaggaagctgaggtaggagaatggcttgaaccagggaagtggaggttacagtgagcagaaatcacgccactgcactccagcttgggtgacagagtcagaccctgtctcaaaaaaataaaaaataaaattaccagatttcagtggctatattattctcttgtataggtgcataataattggtttaaacatttttttatatttgactttcaatttttaaaattttgagaatgtagattacaaataaatctgttttatcttgattatatctcaattttcactaaaaattgacttaaaaattacaaaaaagatcaatttttgaaatcttattgattttaatttgtattacaaagtttttatgggactaaattaatgtattcttccaaaataatgtacaagaatagttcacaagcaaaaatgaaaaaaaaatttactttggtttaattgtggggattttctattacttctgatgttaatacttaaaacatttattaattatatccttcttatgtaagtaatctgcatttgtccttttctttatttttctgttggaatatttatttctattgctctgtaagaacatcaatgg

SEQ ID NO: 113906 - DNA, 540 bp, Homo sapiens
cggctagcagcgtgggagctggcaaggcttctgcaagccctctgctcccaccctggccccatttcacagacgaggaaacaaaggcccaaagaagagttccgcccgggacggaacgtggtatagctcgcaacagaacccagtctccggagatccctctcctctgcaccacttggacgttccacggagaggcagcggtgcgcggggcgacggggagctgccagagaagtcagtggggagccatggaaagtttctgaacagagaagcacttattgggaactgtcagagctatgcttcaggagatgaatctggcaacaacgtgggttaatattaatgccctgtacatcctgagtacatgtttccagaaagaggtgatccaggaggctgccaagtggcctgccaggtgacatccagacgggcacgaaaatgcccatgcagggtccacgtgtgggtccttaagccccttgcaggacaaatgggacggagaaaacggaccaaaggaacggctctcccctttcccttggatcccctttctacctccca

SEQ ID NO: 113907 - DNA, 632 bp, Homo sapiens
aaatcagaaaacatatatacataatacatataaaacatatctattctatatatattataatatatgtatattgcatatatatattaaatgctaaaaaatttggccaaaagtaaaatttatttgtcaaatagtgtcttctgataaaagtttacccaaccaaacaaatcaagcatcatttaaaataaaggaaattgaggtgggcagatcacctgaggtcaggagttcaagaccagcctggccaacatggtgaaacaccatctctactaaaaatataaaaattagccgggcttggtggcgggtgtctgtaatcccagctacattggaggctgaggcaggagaattgcttgaacccaggaggtagaggttgcagtgagccgagatcgtaccactgcactccagcctaggtgacagagcgagactctgtctcaaaaaaatatataagtaaaaaataaataaaataaaggaaatatgctaaaggaaaaggctgtagaaaaaattgttttataagatttaccattattggcttcaagaataaatatcatattaaatgatgggttaatatttaacccatataaccaaaatattaatcagtacatttaatctattttatactgtgggcaatggttaataat

SEQ ID NO: 113908 - DNA, 418 bp, Homo sapiens
ggctattagtcacaaatcagatatagtaatctaatcattgctaccttgtgacacttgccatgcaaagtgggcatgggtcaatttcacaatatcacatttagcattaagaatactgacaaatagtctttaattggtaaagttgaaattcaaaagtcagcatacaaccacagaagtcacccaatcctcactatgtcccacagagaagtgtggtggatgcacgcagtgagaacacatgtgtcccagtggtgggccctgcagtcccttcccaaccttcccagtgggaagagaaaacattacacaggtaccaggcaatctgggtttagatgccaacaatttatggtatttgtcttaaaaacatcagggaccctgcacttaaagattcgatgcataagaaaagctgaatttaaataaaattcct

SEQ ID NO: 113909 - DNA, 184 bp, Homo sapiens
aggttgcagtgagccgagattgagattttgccactgtactccagcctgggcgacaaagcgaggctctgttaagaaagaaagagagagagagaggagagagagaaaaagaggagaggagaggagaagaaaagagaaaagaaaaaaagttattgggctgggcaccgtggcttatacctgtaatccc

SEQ ID NO: 113910 - DNA, 504 bp, Homo sapiens
gtggcagctgtcatagaacctcggaggtagctgacctaaaaatagccccttcctctctccttccttccctaccttctccccaggcagccatttgcccaggcactattagtcctgatctctcatttgagggaaggatgaagaaagggagcagggagggaagatctatttttttccccaggctgttggggaagggagggtgaagctgctctctctgagttgattgatgttgcgcttggggatctaaattctctgatgtaattacactgtgtgctccgtgagataaggagattaatcagtccattacgcaggggctgttttacccgcagattgaacagagacgtcggacaccaccaggtcctagccagccagccagtctgctccagttataggcaggtggctggcctctgggcagataggctatcttctccaaataggaacaacttctgttgctaccactactaactagcttgtttttgagcctccctgagattccaggcacttcac

SEQ ID NO: 113911 - DNA, 190 bp, Homo sapiens
ttaaaatcttccccttcttcttttctgccattccactgcttttcctgataaccctcactcttcccgggggacagcacagtgtgcttgaaagagcatgactcctgcacaagaagggcctagggttaaatcctaattctaatgtttacttgctttatgatcttgagcaagtaatttttcattttcagttttt

SEQ ID NO: 113912 - DNA, 263 bp, Homo sapiens
cctggtaatgttggagggtggagaatccctcttcaaagaatgaggatgagtacagcagaaatccatattccaagtttcaaataatttagtgggttatttgagttatataaaatcttctttcaaccatttttcatgccaaatgttcaataactagactcgagtgtgtgggtgtgtgttgggggagtggtttgtttttgaagaaagccagtctgtgtgctgctgttggcagtttcgggctggctgcatcaggcaccccctggagg

SEQ ID NO: 113913 - DNA, 114 bp, Homo sapiens
aagttggctggttgtgtgtgtgtgtgtgtgtgtgttttgtttaagagacaaggtcttgcttcatcgcccagactggcatgcagtggggtgatcacagctcactgcagcctccag

SEQ ID NO: 113914 - DNA, 458 bp, Homo sapiens
tgcctttgcgtaagctacttcctctgcctgaaatgtccttcttcaccctattccagagtcccttctgactgggaaactcctgcccatcctgcaagactcagctcaactttccccttcaaagccttctgttgctctccaccaagcagcccctcctctctgatcccaagtacccaccagggagcaggtgttgtgctgcactgtaactgatggcctccccatctctctccatcactccaggcctctaggcaaaaaggtccaggatcctgcgcacacagaaagttcttgaggcatgctcagtgacagtacatgcatgcacacacaagcaagccctgcaccataacaaacttcctctccctccacctggagaaaaggcagagctcctgtcaaagtggaagaagggagctaagaagacagggctcccaggatccaggaggtgtgtggggcacagcagctccttt

SEQ ID NO: 113915 - DNA, 322 bp, Homo sapiens
  misc_feature (266)..(266): n is a, c, g, or t
  misc_feature (281)..(281): n is a, c, g, or t
  misc_feature (283)..(283): n is a, c, g, or t
ggtggctgtcaccacatggctgggtgccgggaagaagaacaccttgaagccaaatttctggtagaggtcgatgagctcaggggagggcgattcctcaccttcactcaggatgctgcccacggcacatcggcacttatcaggggccaccagggagcaggtgttgtgctgcactgtaactgatggcctccccatctctctccatcactccaggcctctaggcaaaaaggtccaggatccatgtgggggttgtcatagtagacagcganggagcggagcttggnanagatgctgcagctctcagtgaaaagccgcccagtctcac

SEQ ID NO: 113916 - DNA, 1087 bp, Homo sapiens
acacacacacagacgtgctcacggagcctgtgcctgcctctacttgtctgctctgcgcagatggttcctggcttttgggtcacctcatcctgcagcccagtccagttagaacctttcttccacagagactggcaagctgtggggtaagagttttggtaaggctgcctgtcttcagagcatgaaggacactgcccggagagggaagagggcaatatttagtgtttgggcctacttgttgttgggctccccactgcctctcctttgcagagctatcactggcccctggttgcaaactctcggtggctttcaagcctacaaaacaaaaactgagagggtgtccaaaaagagaagaagaaaacgttgttgttggtcctggattccactgttggattttggtggggatgagaagaaggaattaccaggtgtgatcaacacctgcacggtacctgcacgatgacatctcctaatctttcttcttcgaacaagaaaaaaaatggttgccaacagtttgaagggaaaagaagataaaagaaaacagagtctgccatcagtgggtataggagacagttaaaaaaaaaaaaagaaaaagaaaagagaagacaaagattgggatatgaagtaaaaagcaaaaacccgaagcttcgaataaagctttgaagagggtagggattcagcaacggaaacctttgccttgcattttggagctggcctgggaaagcaccaaaaagctctccacagtctgtgcctggaggcccaggggggctgtcaaatttaaagctctcggactccactgcaggataaacagcttgggattcttttttaatgacaacagcgtatcagctttttttgaggttacagcatacataaacaagatctgcctcatattttccagttgtggaggagggaagggaaaaaaaggcccccacaaccttttccccagttaacaatagaagagacttgcttttacttgaatgcaagactgaaaaaagggaaggagaaccatggcgtgcaaaatggccacaccgaaaggaaacaggaaaaccattacttcctctgtgaaaacttcagtgggcaatcaaagggaaga

SEQ ID NO: 113917 - DNA, 308 bp, Homo sapiens
agaaggattagctcaagaagcttgtagagtttaagataagtttatagataagaaaagtcaagctcagagataaattgccccaggtcagtcatcaataggtcctggtttcaggtccaacgatgttactatcactgtgggatgaaattctccccaaatctataaattgcctttataattagttattaccatgttgtgtaatttttccgagaatttatattatagatgttgcttcatttaattcttgtgtaataaggaaaagaagataaaagaaaacagagtctgccatcagtgggtataggagacagtta

SEQ ID NO: 113918 - DNA, 1078 bp, Homo sapiens
  misc_feature (1078)..(1078): n is a, c, g, or t
acacacacacagacgtgctcacggagcctgtgcctgcctctacttgtctgctctgcgcagatggttcctggcttttgggtcacctcatcctgcagcccagtccagttagaacctttcttccacagagactggcaagctgtggggtaagagttttggtaaggctgcctgtcttcagagcatgaaggacactgcccggagagggaagagggcaatatttagtgtttgggcctacttgttgttgggctccccactgcctctcctttgcagagctatcactggcccctggttgcaaactctcggtggctttcaagcctacaaaacaaaaactgagagggtgtccaaaaagagaagaagaaaacgttgttgttggtcctggattccactgttggattttggtggggatgagaagaaggaattaccaggtgtgatcaacacctgcacggtacctgcacggctttaaagaatgcgttccagaggcagtgataccgagggctcagcccaaaagaaatttccaagacatactaaaggccacagtttccaagggcctaaaaacatgaagcatagacagcaagacaaagactcccccagtgagtcggatgtaatacttccgtgtcccaaggcagagaagccacacagtggtaatggccaccaagcagaagacctctcaagagatgacctgttatttctcctcagcattctggagggagaactgcaggctcgagatgcggtcctaggccattctacaggctgaaaaaatggaacctggtttgctgtaagctcagtatgcggtggtcactccaaaaagtgttaggaggtctccaggagagatgctttcaaagcgaaatctaaccctggggggaggacttcttgtgaacatggtgcgtgggcacgtgggggccacttagacttcgcaacccgggagctttgggaaaacccgggacccattggttgggcgacgagacttacattggaacgcatcatgcaaaagagaaagactccgggaggaatgtacatccggatagagccagagcgcacacattagcgttcctcccgaccctgtgctactctttctttgggn

SEQ ID NO: 113919 - DNA, 234 bp, Homo sapiens
gtttataggcctagaagccagagttattgctgacttgggaaggacagtcatgttctcaaggtaagttctccaaagagcaccaagcatggaggagaagagtggtgagctgagagggcaaatgccagaaaaaggaggatgtcagcaagaaaaataaggggtccacaggcaggccagtgcataatgtgcagtgcctactgccaaatgaaaatgagggaccctatgctccaaaattat

SEQ ID NO: 113920 - DNA, 513 bp, Homo sapiens
ccgcgcccggcccccaggcaattttaataataaatcttaatagatggggtaagagctgccttcatcccatacagagaatacaatggtgctagactaagtagagattttatttcagcttaaagattctgtttgatgtctgaaattacatgtttaggcggcatggggaacaggactgttctttagcatcagtttcacaattactttaatctactaggtttcattcaccttataattctgaaatttcatcagcagtgggaacagaaaaggatattcacatgccagccccaaattggctgtgattgaaactaatgatacaattacagcaatgagtgtttgcaacggttgatgatcaggtactggtgtgggatgaaatagcagataagtggtgcttgtgggtgatgtgagtctccattgatctgttgaattaggtgcctcttcctctggcatcactgacaattcttggtggggcccgaagatgggggtgggttacactctgggtcaatttcttctcct

SEQ ID NO: 113921 - DNA, 219 bp, Homo sapiens
cctgatccccaaccattactctgattattattatcactgattagttttgcttctattcttgaacttaatataaatggtacagtatgtattctttttttattctggtttcttcaactgaacattatgtctgtgatcattgtccatcattgtatgtagcagcagttctttttcattgctgtgtagtgttccattatgtgagtataccatgatttgtttatt

SEQ ID NO: 113922 - DNA, 703 bp, Homo sapiens
aacccaaatatatcaataatcactttaaatgtcaatggtctaaatacactaggtaaaatacagagattgctagagtgggtcaaaaataagaccgaactatgtgttttttacaagatacatattgattaaggaaagagatggagaatgatattccattctaacactaataaaaagaaagttaaattagctatattaatttcagacagcagacttccagcaatgagtgttatcaggaataaagtggagcattacataataataaaagggttaatttttcaaaaagacatgacaatccttaatgtatttgtgcctaacaaaagaatattaaaatacgtgagtcaagccaggctcattggtatgcatctttagtcccagctactctggaggctgaataggaggattgcttaagcccaggaggccagcctggggaacatagccagaccctttttcttaaaaaaagaacacatgagttaaaaactggcaaaactataaggagaaagagataactttcatttttctagttggaactttaacacctgtctatccgaaatggacagagacagcaggcaaaaattcaataaagacatagttgaactcaacagtatcatcagtcaactggatataattgacatttatagactacttcatcccaaaagagcaaaatacaaattctgctccggctaatatggaacattcaccaaga

SEQ ID NO: 113923 - DNA, 301 bp, Homo sapiens
ggaagggaaaattcagggattatactaaataatttgttttctctctttcaactctaacatttcaaaaattataatatccccaatcccccaaactaggatttgtattcctggcttgaacttttttcgctcaagaccctatagattggttttcccatggatttcggatcaaaagcttcctttgaattatgtattcctttgaaacggattcaaatgcagggggatctgaaaagacttcatccttgctgagtgaatcagcatcccgtgaacacaggtgacaagttctgacccatcccttcactgt

SEQ ID NO: 113924 - DNA, 3101 bp, Homo sapiens
cttggaggagaaggattcctgtaaatcactcactatgatttcccacagcaggcaagtggatcccctaaagaaagaaggcttatagagttccctcaaaagagctcagaacttcaacaatgattctattcacataggcatttctgtcttccaaattttagctttaagagtctgaggaagtacatgtttttatttagaaaacaaaaaaatcccaatttgtaacacttggactggctgcatttccaatcaggcaagcagatgaggggccatgctgaacttaaactgcaattgaggactgttataaatttgggagaacaaggaagaattccaggaccggctcctcccagctgcaaaatacacccaacctggtgatactgacacctaaagagaaaagagacagactgccgtcaagggctgtctcccttgctcttttcctaatttgtctcctctgcccacgaccagggagtaactgatcttcaagcacagagcccaagatactgaactataagtgaaatgttttgcaagacctgtgctgaatcaacaggtctcttggaccacgtaagactgcctggacaaggaagaaccatcaatggttagagacccagcacaaaccacatgctaagcagcaggcatttcctcttcattagctcattaagctcagaaagaaatctctttgtgaaggagtttgctaaaaaccttaaaacaaaaaagttttctgtctccagccagcagccagccttggagaaacacctttacaggcaaagcctaaaacacatctttctccaaagccaacatgttttatgccttcaccagtgttgtcttgaatatgtatttggttgctactttggttccagacatctctggctggtagtaggtagtttaatgaatggatgttgacggacaggtacatatcccagcttgtggcctgcggcgatgttagttaggcaagcatgctggctgcttttcaaggttgtacatttaataataaatataactggcttccctttcagatgcaatgcttggtgctagcaattaccacaaaatgagtgaattgatcaatataaagtgctattttctctggaagcttctctaaccaactctcgattgcctttccatctatgtgacttaacttgttgacaatcttgtcaaacacctgtgattgcaccattttaaaaatacattaatattaatttgaacagtggaaattatgttcctctaaacattagcccctaaaatagaacttcaattccagttgcaaataaagattcagatttttctttttaaagacaatcaggaacccagtacctagcaagtaattgtgtcaaaaactttagtgttttgttttgtttttttttaatttgggcagagagatctgtgtctaaaaaccgacagaaggaactttccctgcagctagttcttgcttcttctactggacttctctaaaagccacatccttctacagaatccgtctacacagaacaatatttgaaccaattcttgggtctcctgttggatgtcttcccatggtttgcccaggacactctagtgggtgtgaagatgtcatattatactggactgtgaagcgagaaggtgatatttaagccactaaagcttgtggcagccaccaaattttccaatgccttctgcaatcttgcatttaactggcttcaccgccattcccacccccacccagtgggaaaggctttaggagcatttggtcaggtgggggtgctgtcagggtttacggttcaccttcaaggaagccctgggtgcgctgactccggggtggggggcacctggcaaggtagcggggacccccgtaggcccggagaagctggggcagcctttgccacgtggacagcaaccgcgctgctgcaagttcccgggcgtgcccgtcgaaagcggccaggaggtcaactggggcggcttccctcagtgccttgggcaggggacccacctcggcagccgccccaccagggcccaggacgcagtggaagagcgtatggcgtcgcagcaggcagtccctaaggaactgcaccaactcctccaaacaccttcccaggtgctcctcgtcccagccttgcccaggggcccccttgcgcagcagcactgccagcagcactgtcttgagcacatatgaggataggatgcgtccccactgggtggcggccgctgagtccagcccacgggcccccagatcgcgcagagccttaagcaactgcaggcacttgaggtagcaggcacctggagctgcccgttcctgcagccaactcagcagcttctgctcctggcgtgctgtgttcacaccccacagtgcctccgcacgcaggccctcagggagctccaacaggggcgcgctgggcaagggtggcggtggtggcgccacaaggaagaccccatctcccagatggacagcggggatgagacgcacagccatagaaaggcggcagcagccgtagtcagtgcggcagggcaagatgtgtaaggtggggggctgttccaggccacctggggtcaaggtgacccgacagcgcccctccaggctgtaacgcacagtggccaaggagcgctgcagatgcgactggaaccagcgcagcaccagagtagcagagaggtgacgccgcccgcgcacatccacgcagaaggcatcagcaaagggtttgcagtcccgaagccagtggccccccgaggcccccgatggtgagggtggtgccttgagggcgcacaagaagcagccgcggaaggccggggccagcgctggctcctcgcccaggctccgtggctccagcgccacaagcggcgggaggcgcagtggcaccagcacgtcgaagctgtcgggccggcggattttatgttgctcgtaggcgctgcccacctggatgaagtctccgcggaaggccaaggccagcgctcccccaggaatgagaccgggggacccccgggcgcggccagcccgcaccagctcgcccacgatccggctcacgtgcgccttgctgtggcccaacacgtgcggagacaggcgcacctcatgctcgtagtaactctccagcaggatgctgaggcccggctctcggaagtgtctcgaggagaaggcggcgtgaccc

SEQ ID NO: 113925 - DNA, 306 bp, Homo sapiens
caggcatgtgccaccatgtccagctaatcaatttttaaaaattacatattggagtctcttttccaatgctgagttgccacgtctttccttggtgggagctgagggctctaaaatgactaacagatactcagggaagctggcagatgtgacttttagatggtggcacggagaatgaattctgatgcttactgctcctcccacttcattagggctgctagaactcccagcctgcttgagaaagagtcagaatagactggcgcaagtagagaataatataggatccatgttatctgcaactggaggtct

SEQ ID NO: 113926 - DNA, 832 bp, Homo sapiens
agaaggcatggcttctcagctgttcctctaagcagcggctctttccacccatctggagatttagattctagagttcggtatcacatttgcctgcagatttgttaagaatgcaggcagggaagacggattctgttcaatgacccccttcaagactccagtgaagttcaggatctggcagaggggatggatttatatagaagtggggcaactgacacacagaggtattaagcccaaggtcactctgtccatgaatgatgaagccagttgtgaacagcctacaaccagagcctgggctcttaaatatcaggctttgctggctttgatgagtagatctttatatgaaggcaagcaaacaggagttcacatggaggaagcagaagaggctgaggtctgacttgatggatggcttttcattgactgtctgaatacacaccatgaaatcagcaccattggcttcaaagacatttattaaaacgatgcatttgtaagaagaaattttatgagatctgtggcttatgaagtccttgatctatttaatccagatgattggatcctaatgtttgcagcaaagacaggccctaatgcttataggtccactcagcataaagttaaaagtgcttacatgctagacagctctcttggaggagtagcctgcaaaaactatatctttaaaggtgacatgcagaagctggtgcccttctttacagagctgcacttgctcctggctcaggatgcagagaagataaagaaggagatcagaaggaactactggacgtgcaggtcagggcatggccattgccacaagggagcagcagttcagaaagaatgtgtg

SEQ ID NO: 113927 - DNA, 443 bp, Homo sapiens
catctcctcacccccttctttacccggaggtactgctatctctccaccaacctcctaagtatattcccacctacccacttccttacatcccgaagtgtgcctttcccagtccaggccacattataggaaaaatctcttctgcagaagcctcttatccctcttacccaacgggcctactggcttttcaccttatccctgcatggtatattttcctccacactagagccaaagttattattttcaaacatgagttagagcattcaagtttcctgtctaaaactccccagtggctctctagcacccttaggaaagaaaatccaaacctcagcatgacctaattcctgttttcctttctgatctcctttcttaccattctccctttgctcaccccacagagagagcgtacaccccccacggagagcgtcccccacagagagagcgtc

SEQ ID NO: 113928 - DNA, 845 bp, Homo sapiens
ccaccggcaggttgtactccacctgcaggtgtactccaggattcactgcttgtttacccttagattctcagtatcaagtcttcaatcaatcagtgccccaaatcataccattgaggccgtataaaacgccaaacatataatgaaacatttctttgcattggcaagagaaaaggaggaattactacctgttgagtctgagcatattctgagtttctccctagccttgtctgtaccctgagccctggcacagttgcctacttggtactttctggggcaactcggcctaacaagtccaaaacagaaccctagatcccagactctctagttgcaaatcattccctccccagccttcctgaacccagtacaacctgccgtctgccttctccacatgccttgtgctgacatgcaggaagtcatccctgtgtccctctttttactccgtaagccaccaacctcctaagtatattcccacctacccacttccttacatcccgaagtgtgcctttcccagtccaggccacattataggaaaaatctcttctgcagaagcctcttatccctcttacccaacgggcctactggcttttcaccttatccctgcatggtatattttcctccacactagagccaaagttattattttcaaacatgagttagagcattcaagtttcctgtctaaaactccccagtggctctctagcacccttaggaaagaaaatccaaacctcagcatgacctaattcctgttttcctttctgatctcctttcttaccattctccctttgctcaccccacagagagagcgtacaccccccacggagagcgtcccccacagagagagcgtc

SEQ ID NO: 113929 - DNA, 436 bp, Homo sapiens
aggacttttactattttatgagttcagctttggtagagagagtgtttccttaagacagatatgacccaaaatagaaaaccagggaggcctaagcactttgaatgggttacctattgtgatatattccaggattcactgcttgtttacccttagattctcagtatcaagtcttcaatcaatcagtgccccaaatcataccattgaggccgtataaaacgccaaacatataatgaaacatttctttgcattggcaagagaaaaggaggaattactacctgttgagtctgagcatattctgagtttctccctagccttgtctgtaccctgagccctggcacagttgcctacttggtactttctggggcaactcggcctaacaagtccaaaacagaaccctagatcccagactctctagttgcaaatcattccctcccca

SEQ ID NO: 113930 - DNA, 1406 bp, Homo sapiens
gattgatccgccgtgcgcacgccagcgcgttcctctgtggcaggagaggggggcctgcgtgtgaccgagcgtgcgtgggaggacgcgcgtgtgtgtctgtgcgccctgatcacggtggtctgtgggtggggcggatcgtgcacgcgcgcccgatctgtgcgccccaagccagccttgccttactggtaccagtacctgcctgctgctaccaactagtcaacatgtggcatcttccaggccactgtgatgagtcagggatgagcatctgactctggttggtccaatcagcttgtccagggactttggctgggaagattggaaaggaggccagctttttgggctggggttgctgagagatgtgatgatgaaatgtgtggcctacctggcatctggccccagcttcagctccatttactgtcttgctccccaccctcactagcctgcattgaggcctcctctgtgccccccaacccctgagtttctcatccccagagagcccagctacacagaattgaagggttttctcattcatcttcctgcgctcaccctgaagactgggcctatgtcatctgctaaccactgtccccccagcactcacagtggaaaatggagtgttatgcagccctgcagcttgccttctagaacagttcacaggcaaggctcccaactgaaccctgctacagccagatggtgccagcaacacagagctacttgttacatcagctcagactaagccaacccaacaggagcatctggtgattccacagaaccacaagagacttgacctcctggaaatgaatttaaccaagattaatgaaaaagattaaggtcatgtgccctgtaaaaatgtccctcactggatgaactgtgacaaagtagggtactgcgtggtctccccagctgaccctctccatgggtcattctttgcttttatcactacctggcacaaatctttacgtatttgtttatcgtcttccctccaccagtagttaggtgtttgcccttgctgtatcccctgtgcctagaacagtgcccaacattggcaggtggccaataattgcaaaataagcaaatgtatgaatgaaccattagatgctttgtgttgtatacttactacctgctgggcacatttatttaatcctcatgacagcccctgaagtaggtgttactttttccatcttacagataaagactctgaggtttggagaggtgaagtgatttgatcaatgtcacatggtagtgagtgaggccaagaatcatagtttcattttattcgagaagttgggggccaggtacagtggctcatgcctgtaatcctaacactttgggaggccagggtgggaagatctcttgagcctaggagtttgagaccagcctggacaacaacatggtgagactccatctct

SEQ ID NO: 113931 - DNA, 371 bp, Homo sapiens
cctttaatctgctaatgacatggatttatgttaataagttttgaacattttaaacaaaacagccttcttgggatataccaagcttgatggacttaatttactaatacctttgaaaagacttctgtgtatttattcaataataagactgacttttttttttttttttttccttttggaggcagggcctggtcctgccacccaggcgtggagttgcagttgttcactctgtggctcacctccaccctcgtattctcctgtggccccaagacaaccttctgccctcaccctcccaggtatagggggaattacggtgtgcccacccccatgcccgtctaccttttggtttttgtagtatagaccaggtttacccc

SEQ ID NO: 113932 - DNA, 583 bp, Homo sapiens
gtgaaccgaggtgttcggaagcgaaatctcgagatggacgttctgatggtgcatgtgactggagtctagtcgaacaggatgtccaagcgagacgtgcgatatgctaagatgatcgacgcccggcactgagccactgcactccagcccaggcaacaagagaaactccgtctcaaacaaaaaaacaaacaaacaaaaaattatgaaaatccacagccaacattacagtgaaaggctgagagcttcacccctaacatcaggattgaaaggaagatgcctgctttcactattgctctctaacattgtactagaagttcttgccagagcaattaggaaggaaaaaactatccaagttagaaaagaagtaaaactatccctattcacagataacatgattctacatatggaaaatcctaaagaattcacaaaaatctattgcaaaaaataaacgatttcagcaaaattgcaaggtacaagatcaacacacaatagtcagttgtatttctgtacaatagcaatgaacagtccaaaaagaaaattaagaaaacaattccatttataataagttccaaaagaataaaatata

SEQ ID NO: 113933 - DNA, 350 bp, Homo sapiens
cgcctgagacaggcgttatgtttttctaagagaaagttatttttgcttcgctaaatgcctacaaaagtatcctgttaaataccaataacccattcttggattgttacaaagggcaccactgactatcattctgttttctgatttttaaatttttattgtaaatataaatacatatggccgggcacggtggctcacacctgtaatcccagtactttgggaggccaggacaggtggatcacctgaggtcagaagttcgagaccagcctggataacgtggtggaacctcatctctactaaaaatacaaaaattagctgggcgtggtggcgtgtgcctgtagtaccagctactc

SEQ ID NO: 113934 - DNA, 178 bp, Homo sapiens
ttataataggtattttagcctaggtccctcttcttgaaggcctcttggtgacctgctttgtatcccagtatgctcccaggcctgtgtcagtccttccttgtaccccaggaccctctgatttcctaagacagagatctacaagatcaaaaacagcctaccccaacttttatatttctat

SEQ ID NO: 113935 - DNA, 659 bp, Homo sapiens
gctgtcttaactgtggtctgtttgcttacttacagaatttatagtaagaaatatgagatacttacttagatttagactttctaaatttatatatagaaatactagatacaaatattgaaacaatgtatattgtttatactaagtattaagttaattgactagtttgtttatacacactttcataccacataccaaagtaaaggctctgggatctgggattttagcaaaagtaggaggcatgatttcatgggacagtagaaattgagcctcctacaaaaatctgaagttttaagtttctcagtccctgagaagactgggaaaagtttgcccagtaatcttggaacaagaaagtttgatgtgtgtttggtgtcttggaatgggaaaaggagatgcaagaggaaaccattagaaattgaaaccaacatattcaaattaggagtgaattgaagcacaaagacttgcctttgttctatgagaactccaatttgagaaactgatctaggactattgacatttctagatacagatatgacaccagttagaacactttctcagaagagagcacacaagaatcctgtagaaagagtaatttctgctaaaataacctcccaaaacttataaacttcacatggaaacaaataacgaaaagtcattaaaca

SEQ ID NO: 113936 - DNA, 694 bp, Homo sapiens
aaggattaattttcttaattgctatattttacaagaatcgatattattatatttaaagcaaaattaggaatgcctctgttctcaagatatcagggtgttaggacactcccagttctgggtctgtttactaaacattatcaatctgttcccttaaccgtaaacatctagaggctaggaacacctaactttctgggagtgcagcccagcaagttccagcctcattttcctagccctcactcaagattgagtcgctctggttcaaacccctctaacactactgtatccctacgatgcacagcgtgccttagtagatgtttagtaaataactgctaaatacatggatgaaaaaaatagttccaatgccatattaatacaatactgataaaaattatatatttttggatttcagtcacacaggcaaaaaacaactttctgatatgatttagccaataactgacaccaatataaaaaatgatctgtaacccccccaatggattatctttgcccaggtagagcttgtttatcaagacagaaatagagaaagaattgaatgcacacagagccagttaaatgggagaccagagttttattacccaaatcacgctctctgtgcatttggagactgagttttttttaagggaggtagggggttaggaagtgaggaatgctgattggtcagattggagatgaaata

SEQ ID NO: 113937 - DNA, 213 bp, Homo sapiens
tagtgattctccaagtgtgtcgctgggctggcagcaacagcatcatctggaaatttgtgagaaatgcacatctccagcccccacccagacctactgtattgcaccgttttcacactgctacaaagaactgcccaagactgggtaatttctaaagaaaagaggtttaattgacttacagttcttcatgactggggaggcctgaggaagcttaga

SEQ ID NO: 113938 - DNA, 601 bp, Homo sapiens
  misc_feature (584)..(584): n is a, c, g, or t
attttttttcctctcatcatatttttacacacatactcactcatacatattcttcaggagtttgaaaattgtttctcagtcttgcttttcacattaggaaaaaatgtagagtaactggatccaaatgttctgtcattatcaccagacggcgaatgccacacagcgtgttgttaataatggtaatgaaacgggcaccatcagcaccgtcgatcacgcggtggtcgaaggagaaagaaatcggcagcatcagacgcggcacgaactctttaccattccacaccggctccatcgcggacttggaaacgccgaggatagccacttccggcgcgttcacaatcggcgcgaagtgggtagtacccaggccgccgatgctggagatggtgaagcaaccgccctgcatttcgcccgcagtcagcttaccgtcacgcgctttttagaaatagtcatcagctcgcgagacagctcgatgatgcctttcttggtgacgtctttgaatacccggaacaaccacaccgttcggggtattcaccggcacacccgatgttggatggaatttctttcaaggtcagaacgcttgacccgtntttccgacaggcgaaac

SEQ ID NO: 113939 - DNA, 185 bp, Homo sapiens
tcatgtggggagcagggataaaaggcctcagtggtgtggaagcctgggactgctgatatgcaggggggccagggtacaacagaggtacttagggtgcctaatgaaaagagacccaactctaaaatcactcggggagtgatcttaaaaccaaagccacaaactggaacaaaaatctcactttattg

SEQ ID NO: 113940 - DNA, 273 bp, Homo sapiens
gactgcatacgccgctgactgcatccaacgccgctgactgcatccaacgccgctgactgcatccaacgccgctgactgcatccaacgctcgcaacagagttcttttattgaaataaacgtattggtggctcaaggtgataaggtacttacatttatctctctccctcctgaaatcccattaaatgatggtaaaataataaattaaaaaattgtaaaaattataaactctcaatattgaagagaacagatggagaacaaaagtatacaaacata

SEQ ID NO: 113941 - DNA, 272 bp, Homo sapiens
aaatggttcctgcagagatgtgaataatgagaactattattttaggtcatctggtcttcattaagaattgatttgaagccgggcgtggtgggtcatgcctttaatcctaggactttgggaggctgaggcaggtggatcacctgaggtcaggagttcaagaacagcttggccaacatgacgaaaccccgtctctactaaaaatgcaaaaattagccaggcatggtggcgggtgcctgtaatcccagctacttgggaggctgagacaggagaat

SEQ ID NO: 113942 - DNA, 365 bp, Homo sapiens
tactgggagggccccttggggtcccacaggaacaacccccatgtgtccacagtcactctcttctgcctccccacacatccacactcctcgtgtatctctacctgtggaaatatgaatagccagcatcctccctctaactcaaaagtactgttagatcccaaaccctagaaattctcatttctcaagtcattcctttccctccacgttgccgccctcccatgtggctgctccacatttctcccacagtctattgctataaactcctaattggggtctccacttccacatccttcttcctccccaggtgttcttagccctgttgccacccttacaccctgctctgatccagcacacaaggcacttca

SEQ ID NO: 113943 - DNA, 395 bp, Homo sapiens
tcctctaggatcccaggattagctctccaatactgtactgccccccacattcctgttcaatttaagtctgtatcattcatcatagcctcaaaattagtatcatccctaggccccttagaacgtttcccctttgctcgattcctctctttcaatacagtcctccaaaatcctccatttggctgactcaccaaaaagccccacctcagtaaaaacagccaggcctagaaagcctgcagactctctctttaggccagctcagcttagcatgccagagtcaaggcagtagttttggtgacagctaaactacctagtatgccacacaaccatgacgcactgctcaagaactacgggctgctctacggcttcaggaaggacatagaccaggtagagccgag

SEQ ID NO: 113944 - DNA, 380 bp, Homo sapiens
tacagtagtagcagtaacaaaatacaatgtaccaagaatttcctttgtcccagactctatcctaaatcttacgtatacttaattcatttgttaataattccactgcaaccttgaggtttggtgctataattaacccccaatttataagtcaggaaacagaagtatcaagaggtaaagtaacttccctaagatcataaagctagttgcttggctattaaaacaaaccagtaggctccaggacccagattattaatcattacatgattgtcagcatgacaggtacattatttctccaagttggtatactacagccaaatcgtcccctaagaacatacatttcaacaagcccttccagggattaaagatcactggtatggtag

SEQ ID NO: 113945 - DNA, 187 bp, Homo sapiens
gtatatttttgccttacagcctacagcctgttccttcagttctgaatccccccagtctcccaatctcttccaaatcacccaagtcagcaacttcttatactccagattttttttgccaacataaagcacgacccaatcactttatcacatcaccctttaattctctgcataacacatcactctgatc

SEQ ID NO: 113946 - DNA, 487 bp, Homo sapiens
atccctttacatttaaagtaattacttcctaaagtaaattacttatttctgttctttgttttttatatgccatattagctgtttttattcctcatattttatatattttgatttatattgggatattagctggagctgactttgggttatagtggttttcttcataaagtggtttcttcaaaaaaacccaaaccactatttgagttatagtggtttcttcatagtcccgtcctggctaacatggtaaaaccccgtctctactaaaaatacaaaaaattagccgagcctggtggtgggcgcctgtagtcccagctacttgggaaactgaggcaggagaatggccggaacccaggaggtggagctagcagtgagctgaaatcacgccgctgcactccagcctgggcgacagagcaagactctgtctcaaaaaaaaaaaaaaaaaaaaaagggtcatagtcataggttagaggcagagaaaaatgtgtgt

SEQ ID NO: 113947 - DNA, 236 bp, Homo sapiens
aagatttttaaacgcaccaatcagcacactgtaaaaacagaccaatcagcactctgtaaaatggaccaatcagcagggtgtgggcggggccaaataagggcataaaagctggccacccgagccagaagcggcaactgctggagtccctttccaggtgtgaagctttgttctttcgctcttgctgctgctccctgtttaagtccagactacctttgtgagcttgtaacacagtgagg

SEQ ID NO: 113948 - DNA, 999 bp, Homo sapiens
tagaactacagtttaaaaaacttatttcttgatggatagtctcgtgaaggtattgctgtgtctactcaattatgactaaccatagtctctcaagggtggcccacactaatcattctccatttttcatcttaccagaatgctgctggtggagtcagcaggaaaagcctttctgcccctgatcaacctctacctgaggacctaaggcaatgcttttattgtagatcctgatatgcaaacagaactacagcactccagaagtaacctcatttgactggcctattagttaatgggtaaatacatgtgtaaatgaacgaatgactaagcaaatagagttaaccggccaaggccgtgctcagcatcctattagaatatagtaattataaggctatcaaaaaccattgttctttaaatataatgccttttcacacacacacacgtgcatgcatgcacacacacacacccccacacactcctacctctgtccatttttctccattccttcctccaccttttcaaataaatgaagaaacctgagtatacatacaaaataactgttgatttgtgtatttgcagcatgaaactcacagtagaaaatcccagggttctgtcttggaatcttgagcactgctctctgagatctggagtctctctctgtgtgaaggttaagctcctgatggtctctgcctgtcctgggactgctgttgattcatgcagggagagagccgagaacaagctgtggctgaagagggcaaaatatgaggacatgctaactggtttgggaaaggaacctcctgacatctggctctctgcccccacaacagtggtcaggaaggagaagcagaaagaggcaaacaagcttaatggctctgaaacatatcattggacatttcagagccccttgcagggaactgaaatgttgcatgttttttaaagctaactatcactaatttaatttaaataattttttttgtactgcctataacacattttgtggatgag

SEQ ID NO: 113949 - DNA, 385 bp, Homo sapiens
ttttttttttgagacagagcttcactccgttgtccaggctggagtgcagtggcatgatctcggctcactgcaacctccacctcccaagttcaagcaattctcctgcctcagcctcccaagtagctgggactacaggtgtgcatcactacgcctggttaatttttgtatttttagcagagacggggttttaccatgttgaccaggctggtctccaactcctgacctcgtgatccacccgcctcggcctcctaaagtgttgggattacaagtgtgagccactgcatccagccaccatggctgattttaagaaatcaacatgaagccattgtatggggagttggtaagaaacatccacaatcaggttttacactatccttatctgtgc

SEQ ID NO: 113950 - DNA, 1423 bp, Homo sapiens
  misc_feature (32)..(32): n is a, c, g, or t
  misc_feature (43)..(43): n is a, c, g, or t
  misc_feature (51)..(51): n is a, c, g, or t
  misc_feature (53)..(53): n is a, c, g, or t
  misc_feature (55)..(55): n is a, c, g, or t
atttccacggggggaaatgttaacaaaccccnaaaaggggaangctttaancncnaatactaagtaccatgcacccaaatcctagcaagcttaactatagctaccagttatgaaagttatgtcacaagacatcctttcctctcccttggaggaggactcagttccacagtttcaccttagcatttggcttatgataaggagtccgtgcaacccccctccctcctacccctgagatacatttttctcccagatgcaactccaagcttcgagtcaaggccctaggaaacaaaattggatctgagggatccagaggcaaataacaacagaggttaaaaggcacagggcaagtgagcatggctgattcctgccaaataagccaacactaagcttcctgtttcatggataaagaccacgttaatattcatggcataaatgaggtctagggaattcgaaggccatgcatccagccaccatggctgattttaagaaatcaacatgaagccattgtatggggagttgaatgctgctggtggagtcagcaggaaaagcctttctgcccctgatcaacctctacctgaggacctaaggcaatgcttttattgtagatcctgatatgcaaacagaactacagcactccagaagtaacctcatttgactggcctattagttaatggctctctacgtttatcactgaaaaataagacagatctgctaagacgactgataaaggacagaggctggaattgtgattgcattaatggaacctgactagagaacttcacaaatgcccaaatcttatcctgccattcactcctgatgctgacatttccagaagagctacacataggaagactgatagcaactgggaaccaaaatgacaattatctttcagagcttggtaaggttgggtaagagcatatggttcattcttaaggcctaagaaagacactccctccctacctgcccctcttccccacacatctcagcttctcctcaaaatctggactctctctattccatcccatagagtggaaacaagaaatgcaaaaggagcaccatccatgggcatggtctttttatggttgatctggccatcgataaacatggccaaccaatactttaactgaccaaacatgaatggcaagccattcttccctaaaggatgtgggagaacgagagagagggccaatagggaagtaggcagagaggcagaagcatttcttcctctataacatattcaccctatttccataaaaatgttctatttgaaatcctatacagagaagtttatgaaattgatttggcttcctttagtaaaccctaaagtaaaaacgcttagaaaaatgatgaaataaggtttaaatatttaattataggagaatttttaacatttcaaaaaatacaatcctatggaaagaaaatt

SEQ ID NO: 113951 - DNA, 316 bp, Homo sapiens
ggcctggagagaggtgccacccaggacgggccatcaggagaggccggggatggccccaggtgtggctggcggaggtgggtggttctcccagccagggctcctggtccctggctcacctggagtcacacgtggcggggccaggactgctgtgagcttcacaggcagccgctcagttgggccttgtcctttcctgtggatagcctgagactctcctgttccaaatgatgatgcctaagtttgccaaggggaacttcagcggctctcaactaggactagagaggcaccgatttctcatcacctgagcacacacggcacg

SEQ ID NO: 113952 - DNA, 283 bp, Homo sapiens
taaaagtagacatcaactataagtaaagtgaaaaagcagaaaaatatcaacaaagtcaaaatgtggtcatttgaaagattaataaaattggtaagccctggcaatactgattttttttaaaaagagaaaacacaaagtatcagcataatgaatgaaagaagggtagatactacagatgctgctggcattaaaaggacattagcaacttcatatcaatacgtctgacaatttagatgaaatggacaatttatttgaaaaacacaagttaccaaaacaggaacag

SEQ ID NO: 113953 - DNA, 351 bp, Homo sapiens
ctcgagctgaaaattgactgtaagagggagtacaaaatggtggcagtagcctttactcctctatttcacaaaaattcatgtagttcatagatccaaaaataaaaagggtaatagataactaatagaatagattctttaggttttgtcagatactatttcttcagtatgcttttttcaagtttccttgtaacttctttgaaattgaagacgttcatgaattttagaaaatattatcaaatattatctctactgacaatttgaattttaatgtaacctcttaaattaattcagtgtcctccaaatttaagtgatcatttcagcacatcaggtggtatagtattaacatatgtt

SEQ ID NO: 113954 - DNA, 552 bp, Homo sapiens
agctcggtacccaggaaagatgacccagaccatatgtaatactatagcagcctttgcaatctggtctccactcctatcattctgtagaaactgctttcttgaaggttacccacaccacctaattgccaggaccacagtccttagtccttattctcattttcgtttagcagacagcaactacttcatctctagaaaggtagttactacatttttcttgacacttaaacttactttggactctttaacagtgttctggttgattacatacctgtctgaggcacactgcagtgcaaagtacatattttgaagtcagatagggtctgagtctgaatcttagctctgaccttgggcaaagtatatgtttttacagagcctatttcttccgttggtgagtggaacactaccaaattaccagactgaattgtgagaatcaaataaaataatgtagagtctagcagtgtttgcatttagttggtgctcaaagtgtctgtttcccctccctccccttttctgctttctctgtattcttcaggcatccttggccttgatcca

SEQ ID NO: 113955 - DNA, 273 bp, Homo sapiens
aggagagaagctgtttccttgccttttccagttcctaggggccacctgcattccttggcccatggcctccttctttcatcatcaaaacaagcagtttaacatgttcaatctctctctctttctccctctctgatctctgcttcctttgtcacatctcctctaactccatgtgtcctctccctcttataaggaccctgtgatttgttggacccaccagaataacccccccatctcaagatcctttactaagtcacatctgcaaagtacttgctg

SEQ ID NO: 113956 - DNA, 220 bp, Homo sapiens
cctagagttcgtgctgtcctaggtctacgctgcgagccccctccaggacagggcctgggagctcttgttcatctgcatcctgggggcgggcagaggtggcagagggctgggagatctgtccgggcttttggaggaagctcttcaacctgttcaccccgcctccgccgttgtgtcacttccaaggcccctggccagaaaacccactgggaggaagtgaggg

SEQ ID NO: 113957 - DNA, 478 bp, Homo sapiens
cgtcgctgtactgggtaggcctctccatcccaaagcctgattagttaccggactgcttgaggtgtaactccagagggtggcgccgcttatgcccagcaggtgggatgtgccagagaaaggcatctcttactgccacggttttcttttactggcatttcaacctcacacatcgcacccattttacaggtgccgcaaacgaggggccccactgggggacgtggttttattcagtgactcagaattggtgctatagaaacttctaaaactcggtctcagtttagcagtttcaatcgcataacttaggctatcctgattgattcagccaaaggcagtgtggctggagaaaagtgagatgagaagtcctagctcttttaagctaataggatgcctttaaggaggcttcagcaggggaatttgacattttccacatattatgtattaaaacaaggtactattgctactcaatcattaaaacacc

SEQ ID NO: 113958 - DNA, 200 bp, Homo sapiens
cccgcctcagcctcccatagtgctgggattataggcatgagccaacgcacctggccaggaaaatacttttttaataagcatctacacagaggctgctaggcaagtatccattctctgcctttgcctccaaattatcccaagtgtctaaagccagacacatttccccctattttatgagttgttttttttttttttttttt

SEQ ID NO: 113959 - DNA, 335 bp, Homo sapiens
cgagtaatattcattttccagatggaccgtaacacatttattcacctactgaaggattacttggttgcttccaagttttggcaattatgaataagattgctacaagcattggtgtgcaggtttttgtgtggatgtaacttttccactcccttggctaaatgccaagtggtgccaatcatggattatatggtaagaggatgtctagtttcgtaagaggctgccaaactgtcttccaaagtggctgggtaattctgtagtcccactagcaatgaaggagagatcctggtgctccacatgctcaccagcagttggtgttttcagtgttctggattttg

SEQ ID NO: 113960 - DNA, 225 bp, Homo sapiens
atggcccacagactgaattaggcccactgactgtttttataagtaaagttttattgaaacacagccatgcccatttttaaaatataatgtctccagccgctttctgacaaatagtggcaaacaatgacagagttgagttgttacggtggaaacaacattctccaaagcctacaacattttctctctggccctttacagaaaaagtttgctgatttctggtatagg

SEQ ID NO: 113961 - DNA, 212 bp, Homo sapiens
gctgagagctggggtgtgagttcctgtggaagctgagagctggggtgtgagttcctgtggaagctgagagctggggtgtgagttcctgtggaagctgagagctggggtgtgagttcctgtggacgctgagagctggggtgtgagttcctgtggacgctgagagctggggtgtgagttcctgtggaagctgagagctggggtgtgagttcctg

SEQ ID NO: 113962 - DNA, 456 bp, Homo sapiens
acttctcattttcaacttatacctgcaatgtttatgtagctggaaaaatgaaaacgaaatgtggctaaaagaaaagaaaacgaaagaaagccacaaaattcccaaaacctcagcataacttgcttctttcttcactcgctctcattaagtcttaattctccagattagctttgtctcaaatatttctcaaactagtaacctatttctgggtacagtatatttggcggggtaaaagaaacactgtcaagtttttctaaaacgtcgggtgcacgttaaaataattcctatccactctaataccaaaacgatatcaaaggaaagcatcccatctggagtagtcccatgaatctaaataggacgaagcagcctaccgctattgtctaaatcaagtatttactcgtattcatgcctaagagagagaagtaaaaaaaaaaaaattaaatcttagatcttgct

SEQ ID NO: 113963 - DNA, 408 bp, Homo sapiens
gaggcagaagaatcacttgaatccgggaggcagaggttgcagtgagctgagatcatgccactgcactccagcctgggcgacagaagcgagactccatctcaaaaaacagaaaaaaaaaacgggtaatggagtctggggcctacgagatgggggatgagcagggatgggactggacactgaatgtccaagggtaagaggaggcctgtagagaaggaaacacgcattcacaatggccctgctaaggactgtcctgccattttcacatactataaggtaagcactattactgtctccgttttacagatgagaaacccagggcacagtgaaggattaagtaactagcccatgcttccatcgctagaagaggcagaggcaggattccaacccaggcaatctggctctaagaca

SEQ ID NO: 113964 - DNA, 280 bp, Homo sapiens
tttaactcaagccccttgtcctaccacattttcccacagctctccacttcatcaaacctcgtgtacagacactcaggtttaactgtgtatttgggtcctcgtttccttatgaaggctcccatgtcgtttaaaacttactatctgaaatacatttgtgtgcttttctcctgttaatcagtgatttgttgcaggtgctccagtcaagaacttagaagagtagaaggaaagagattttccccccctacagtagccctctcttactataagctatcaatcgatt

SEQ ID NO: 113965 - DNA, 386 bp, Homo sapiens
agcccggctcctcccttcaaaaggcaagagagggtgagtgtatcaatattccttctacagtgtgaaaactagaatttctagatttccttcactgggaccctgtatgatataataccatgagttttctatttggaattttctgagaacaaatcacaatttaaattcaagttcttcaattagtaacaaaggttaggatggatgccaaggctttcatccaactaaaactcattttctggatttactggatatgaaggaaacaaggaatattcctggctgattcccaggtgtcccctcccactcgcttacccctccccacttcattctcatgagaaatgaaagtcacccacgggatttggatgcccattagaatcttcctgccttacaga

SEQ ID NO: 113966 - DNA, 236 bp, Homo sapiens
gtaactcaaaccagtcacagactgtgttttatgatttttagactaattacataactgaaaattccagagggagatcaggcatggtttgatcagggtgctaactcagtttttcagcatttctcttggtctgtgtttctctatagcattagctttgtcctcaggctggcttttcttgtgatggcaaaataactgccaattttccagtcattaaatgtgtattccccattgtccaaaac

SEQ ID NO: 113967 - DNA, 261 bp, Homo sapiens
gctccttaaggaaaagtcagcaatttaaatcaaaattaaagcttgaatctctaaaactggctaacctcatctggaacatgtggctcccgcttgcacctaagatcaccttctccattgtctaccaggctagcgtgagccacacctgttcagttttccaactatcagctaagagaaagacttcattaatatttggaggatacaggccgggcacagtgtctcatacttgtaatcccagcactttgggaggctgaggcaggtgga

SEQ ID NO: 113968 - DNA, 361 bp, Homo sapiens
tttttttttttaacaggatcttgctctgtcacccaggctggagagctgtgacctgatcacagctcactgcaaccttgacctcccaggctcaagtggtcctcccaccacagctacctgagtagctgggaccacaggtgcacaccaccatccctggctagtttttgtatattttgtagtgacagagtttcgccatgtttcccaggctggtctcaaactcctggggtcaagcagtctgcccgcctcagcctcccaaagtgctggaattacaggcatgagtcaccgtacctggccacattcttttttacttgccacacttccctgaattagccaactaggtatgcagaacaatgacatggaaggc

SEQ ID NO: 113969 - DNA, 150 bp, Homo sapiens
ccgggattggaccccataatcttgtaggggaggaaagatcagaatgccccattgctggttccttatggagcctcagtccagctttgtcctaaaccaaacttccttggcataccccccctttttttttttgcaactgacatcttttttttt

SEQ ID NO: 113970 - DNA, 279 bp, Homo sapiens
ctgtgttgcccaggctggtctcgaactcctgagctcaggtaatccacctgccttagcctcccaatcctattaatttattaaaggttagtgtgctgtcttctcccccttgctatgaattagttgggttatcactataagttttccatactgtaggaaaccaaaacactgccttcttcctatttctggcagcttggggatgctcctaaattgcaatatcatttatattgttagtttacattccagtttgccagtatgccatgtaaataagtcccatacatg

SEQ ID NO: 113971 - DNA, 140 bp, Homo sapiens
gaaccctgttggaaaggaccacaccaagttcttctcacacccacacctgtaaccttgggtccacatctcacaacacaaaagggccccttcagactcttagaacacctgttggagactttaaggtaaagctgaccaggaat

SEQ ID NO: 113972 - DNA, 144 bp, Homo sapiens
cgcgccgcggagcggggacccgacgcggtgtcccggacctccagtgcccggcttccttgggaacaaactgttccagccaaataggtcactgtgccgatgggaggacggagaccgcgaaggggcaggggagagggcttctggagt

SEQ ID NO: 113973 - DNA, 291 bp, Homo sapiens
cttttggcttttaaactgcgtaagatggggagccactgaccaattttgagcagaaaagtggcaaaagcttcattcaagggaatcaaacacatcaaatctttaaatatgattaacatatcattgtgtcactgagttaagtctattacacagttttatctaaaaattagatttaaatgacatacgatgaattaaattactctatcttacaaagtttttgatggccccaaatcattatcaacagcgaagctggtgatttcagggctaggagataagggttagtggtgtggcctc

SEQ ID NO: 113974 - DNA, 956 bp, Homo sapiens
agattggaaaacagtctgtcggttcctcaaaaacttaaacataaagtcatatatgatgcagcaatggcactcctaggtatataaccaagaaaattaaaatcaaatattcactcaaaaacatgtacaaaaatgttcatagcagcattattcataatagtgaaaaagtggaaacatcccaaaccaccatcagttgatgaacaggtaaacaaaatgtggtataactataaaatggaatatcatttggccacaaaaaggattgaagtactgctgcatgctacaacaaggatgaaccttgagaacattgtgctaagtaagagatgcagatgcaaaaggcaatgttgcattattccatatacaggaaatgcccagatcaaatatatctatatatagagaaggtagattagtgtttgtcagggactgcaaaaacggggtaattggagagtgactgccagtaagtacaggaatgctttccagcattgctgaagtattctgaaattaggtagtggtgatggttgcaaaaccttcggaatatagtaaaagacgctgaatggtatgcataaaaatggtgacttttgtgatatatgaattatactttagaagtaataatagcaacagtaataaagagaggtatctttccacacctccatgtcctgtatttttattaagaaagaaaaaaaaaaggctttttaaggccaggttcagtggctcactcctgtaatcccagcaattttggaggcctaggtgggaggatggtttgaggccagaagtttgagagcagcctgagaaacatagcatcacctcatctctacaaaacattaaaaaacttagccaagatagtgatgtgtgcatagagttccagctacttctgaagttcggacaggaggatcgcttgagcctggaagtttcaggtagcagtgagcagtaatcactactgcacttcagcctgagtaacagaa

SEQ ID NO: 113975 - DNA, 636 bp, Homo sapiens
tacagtttttatcagtgatcacattttagtgtaatacatgaaactgaggcttgatagaaaacaggagagaaggcatgagtgcatggggtacatagggagatgagggcaagcatcaccaaggagcggcagtgagatagacgctctcatggactgctgctttacaacctccctggagagcaatttaaaaatatgaatcaagatccttttgatccactaatcatccagaaatctacacagaaatatgcacaaaaatatgtggcatccattgacttccaacctcttctctttcaggggaaatattccttaactcttctctcttgttgccctcaaaggcaaagcctctccatcctcccactctggaactcactgtaactgttcacattgttcaggctttgctaaactgcaagaagagtggctgccttctggatggtgaggcagaaaggaggaagatgtctgcattcctgatggcagtggtcaccatacaagccttatcctgactacctctgttatttttttttaatatcaaaacatataccccttatctgtttaagcttctccgatcaggtctctggttaccatcagtcggatgtagttcagagctaaaaatttttaataaagcttttgtagctctattca

SEQ ID NO: 113976 - DNA, 412 bp, Homo sapiens
ctattatacagccttaaaaaggaattacgatgtatgctacaatataggcaaaccttgaagacattatgctaagtaaaataagacagacacaaaaagacaactgtcttatggttgattgcatttatataaggtatgcagaacagtcaagtttgtagagatagaaggtagaatagtagttaccagaggccaggggagaggagaatagggagctgttgtttgatgggcatagtttcaatttggggtgatgaaaaagctctagagatggatggcaatgatgtgcagatacttaatgccactgaattgtacacttaaaaattattaaaatgatacatttttatgtatattttatcaaaatgaaaaactttcaattaacaccataagccactggaaaagcctgtggtatttgaagagg

SEQ ID NO: 113977 - DNA, 537 bp, Homo sapiens
gggagagactgtcacttcctttctgcatggactgtggtgttcctgccccacccctgccgaaatgttaatgagctgtgcaaactactgctggattgttttgttcttccccctaatcagagtttccactcaggactgggtagcctgtggactccctggaggacagataggtgtggcagcctcagtggcctagagtggacagctggtttaccgatagtccttttttttgagacagagtcttggtctatcacccgggctggagtgcagtagtacgatcttggctcaccacatcccctacctcccaggctgaagtgattctcgtgcttcagccttcccagtagctgagactataggcagacaccaacatacccacctaattttgtatttttagtagagtcggggtttcaccatgttggccagcctggtcttgaactcctgtcctccagtgatctgtccacctcggcctcccaaaatgctgggtttataggcacgagtcaccgcgggcttactgatagttctgtaggccaggggaataatccg

SEQ ID NO: 113978 - DNA, 460 bp, Homo sapiens
tcatggctgggaccctctgagaccttaccctatgcatcactccctttggttggttctacttgtatctttttgctataacaaaactgtaatcataagcatgtacttttctgagttatatgagtcattctaccaaattattaaacctgagtgtataccgagaacccttaagttgaatcaaggtgtggaagtggaagtggcaccattcaccatcacccctagtgacccactagcaaaatttttgcttcctgttcctgcaacattatgttctgccagcctagagatcttagttccagagggaggaatgctgccaccaggagacacaacaatgattccattaaactggaagttaagactgccacctggctactttgggctcctcctacctgtaagtcaacaggctacaaagagagttatagtgttggctggggtgactgacccacactatcaagatgaaatcagt

SEQ ID NO: 113979 - DNA, 375 bp, Homo sapiens
agcctggggttgcagtttctttcccagagtaacacttttcctaccaacaagtagttgattaagtaggttttaactttttttccttcctgtctaccatccattgtgtgtgagatgggacattaatatgggtaagagaaacagacaaatctaaaaggtgctgaaaacccacataatagagtaactgccctcccccaaacaaacccaatgacttgttttacagtgcatgacactagaaagataagcactgataagctaagccctgttagacaggcttccaatgtgaatcctctaaccatcctccctgaatctcctctggaagcatttctgagaggcagccaaggaaatgggaaaaaaagcaggctttgtggtcaagat

SEQ ID NO: 113980 - DNA, 847 bp, Homo sapiens
ctccatagtctaggcatggagacaaatgcttctctgcccctaagggaggcctctctaccagagggctcagaaaattccttcctccctcctttcttccctcccttccttccagtgtttacagaatgcccccttggaccagaaactggctgcctttatgaagagaagaatcggggggaagagatgcttaaaggtaactttttagcctccagaggctgggccctctaatcacaggcacaaaactattaatattattccatgcagagacaagcagccagaataattagagctcaagcaattctttcacagcaagttcttgatgttttattttattttattttgtatttatctgtgtttgcctgggttacctacagtgcacactcccaccactcggccccaggctgctttctcttttcttggaactctccatgcttcctcctgccccggaacgtttgcacctgctgttcccaatgctggtcaaaagaaacaaaaaccagatacgctttaaaagggagaaagggtttgtattagtcagagttttccagagaaacagaaccaataggatatttatttatttatttaagatttattataaagaattggctcacataattttgaaggcaggcaagtctcaggatctacagggtgaattggcaagctggagacccaggagagctgatgggtagttccagtccacatcagagggcctgagaatcatgagtgctaatggtgtagttctgtctgaatgaaggcaggctaaagacccaggaagagccaatgtttcagtttgaatccaaaggtaggaaaaaagctgatgtcccagcccaaaggcatattctggggaaggtca

SEQ ID NO: 113981 - DNA, 411 bp, Homo sapiens
gagacagggtctaactctgtcacttgggctgcagtgcggtggcgcaatctcagctcactgcaacctccacctctgatctcagctcactgcaacttccacctcccgggttcaagtgattctcctgcctcagcctcctaagtagctgagattacaggtgtgcaccaccacgcccagttaattttttgcctttttagtgaagacagggtctcgctatattggccaggctgatcaactcccagcctcaattgatccacctgcctcagcctcccaaagtgctaggattacaggcatgagccaccacgcctggcctcttttttcaatttctttttttgagacggggttggggggggtctcactctgtcacccatgctggagtacagtggcatgatctcagttcactgcaacctctgc

SEQ ID NO: 113982 - DNA, 208 bp, Homo sapiens
ctaagactcaatgacacttgactgatttggggtcagtatctaataagcgcatttcccagatgaaaaaccagcacagctaggccttctccacagagcctatacctaggtctatcgaaggaagaagatcattcagaattttatttttgcaaaccttcaaatgttaagatctgaataatctatttaggacagtcagaactgcctaatggaa

SEQ ID NO: 113983 - DNA, 263 bp, Homo sapiens
ctgattttgaattccatagaaaaccctatgcactatgttaagcaacaaggatttcagtggcaaataattggaggcaacccacatcacagcaacctaatgtttcaatactggttgggcaagcgacagattaagaaaaattttaaaaggaattctggagatatggaagttgtacatgcttgcaggagagatcagagaggtttcctgctatctacttatccttggctgactgtgagaccttttgcaagcagacagtaaaatacagg

SEQ ID NO: 113984 - DNA, 357 bp, Homo sapiens
ttccatctattttcacagggctaaattttatcttgggttaggtatgaaaaagaacacttctcaaggatagtaaaatagtttatgttcaatgaaatattttcatggttcaatgttgtttcattcttaatgatcataaaacctctcaactgctctggactcattttaatgacagctctctcgtggctgtgaatcacagttcaccagcacattaattggcaaggtaactacagaaaaagggcttcctcgtgagcttcattaagttttcacaaatgacagcagcttcaacttcttacacttaattttctttcagtttaacacgaagagtcaatgcaaacccccccagcagcttgatgggta

SEQ ID NO: 113985 - DNA, 225 bp, Homo sapiens
tcttttgaaaagtattaaaggaatataaatgatcacccagtagtgaatgagattgtctcctttactgagtaatgactggagtaacattttccatcaccatcaagaaaacgtgataagtagaaaatagtatgtatatatttttaggctgggcatggtggctcatgcctgtaattccagcactttgggagactgaggtgagcaaagtctgccttccgggttcaagcg

SEQ ID NO: 113986 - DNA, 229 bp, Homo sapiens
catgcactaaagaactttaagctattttagggtaactgagtgctctttatttgagccataagcccatgctaagactgctttgaatacttgcccttactcatgcattaaaagagggctgaccatgatttctcaaaagggtaaacatagactactatatgacccagcaagtctactcctaggtatatatccaaaagaaatggcgtgaacccgggaggcggagctttgctgt

SEQ ID NO: 113987 - DNA, 754 bp, Homo sapiens
gtacggccggtgattgctttccaaggccaccgagggtatctgagactcccaggccctggttggtcctgcctcttctccttcatagtgtcccagtgttgtcaggagggcgctggtggtagcttggaccttgtgtgccaacgcttcctcaggtctgggcctaacagcctccactgcctgggctcactcagggagcgcctcattatttgggcagccatggattctatcccagccccatcatcagttcagggacacaacctgactgaagatgccagacatcctgagagttggcagaacacaggaggctattctgaaggagatgcagtatcacagccacagatggcactagaggaggtgtcagtgtcagatccactggcaagcaaccaaggacagtcactcccaggatcctcaagggagcacatggcacagtgggaagtgagaagccagacccatgttccaaacagagaacctgttcaggcactgccttcctctgccagccggaaacgtctggacaagaaacgttcagtgcctgtagccactgtagaactggaagaaaagaggttcagaactctgcctttagtgccaagccccctacaaggcctgaccaatcaggatttacaagagggagaagattgggagcaagaagatgaggacatggaccccagattagaacacagttcctcagttcaagaagattctgaatccccaagtcctgaagatataccagactacctcctgtgagttccttgctttttcc

SEQ ID NO: 113988 - DNA, 610 bp, Homo sapiens
atggtctcagaagtgaagtggaaggggccagctccccaggagggagaggcacttggtgggggcagtcttccttaaacagggactggaaagccaggcccatgggcagaaggggtgtctgccaggggggcatcagtaccgtcattccaatcatatagaagcaccaggcttgatgtgatggaagggttcctatcactttctgtttgtgtgtttttttttgagacggcgtctcgccctgtcgcccaggctacagtgcagtggcgccatctcggctcactgcaacctccacctcccgggttcaagtgattctcctgcctcagcctcccgagtaagtagctgggattatgggaatgagccactgcacccagtcatttacctttttttttttttcaatatggcaagagctcctaaaatctactgtcttagcagaaatccccggtataattcaatgttgttgactaggagtcctcatgcacattaggcctctgggcgatgcatcttgcatatctgcctctctgcgtcctttcacctacatctcccgtttcctccttcacctcccccacccctgctccttggtaaccactgttttattttctatgtcttctacttaaaa

SEQ ID NO: 113989 - DNA, 879 bp, Homo sapiens
gagacagagcataaacagcagccacacaagacacccacgcgggacacgggccgtgtgcgcacatgggcacctgatgcctggtggccgagaggacagcacggcctgaacacccggcaggaggggacggatggtccatccacactggaacattatcccatgacgaaccggagccaggccacagcgtgaacctggaggacatcatgctcagtcacagatgccaaactcagaaggccacgcagtgtgtgatcccatttctatgaactgtccgggacaggcccatccagagacagggaggggatgtgtgggtgtcggggagtgacggctgatggggacaaggtttgttcttctcgaggtgatagaatgctgtagaattggaggtggtagttgcacacttttctgaatgtactacatgcgactgaattgtacaccttaaatgagtgaattgtatggaatgtgaattacaaatcaatgaagatgcccaggccgggtgcggtggctcacgcctgtaatcccagcactttgggaggccaaggtgggcagatcacctgaggtcaggagttcaagaccagcctggtcaacatggcgaaacccagtctctactaaaaatacagaaattagctgggtggtggcttacgcctgtaatcccagctactcaggagggtgaggcaggagaatcgcttgaacccaggaggcagaagttgcagtgagctgagatggcgccattgcactccagcctgggtgacagagagaggctctgtctcaaaaagtaagtaggccgggcgtggtggttcacgcctgtaatcccagcaccttgggaggccaagggacgcagaacacaaggtcaggagttcaagaccagcctggccaagatagtgaaac

SEQ ID NO: 113990 - DNA, 319 bp, Homo sapiens
ctcagcttcaaagacagtgccctcttgctgtttctgcgtaggaccagaggggccaaaggggctggggtgccccttcaacctctcttacaagggcattaatcccatttaaatcatcatcccatattttaaaaacacacaggggctcctgatgatacataacagaaaatctaagcagccaaccttactgacagtttgtaatgactccccccttgaccatggtgaggtgaacctcacacaggtaggggctgtcgggatctgcctcctcactctgggcttcagccagtggcttctaagccagaggcagcatgatggccacggt

SEQ ID NO: 113991 - DNA, 937 bp, Homo sapiens
gatcagccaagcaggctgctgagaaagatgacctgaattgcagggatgcagaaagtgctgaagatgctttgtcagctgagaactggttaagagaaagtggctgatacagcaaccccgttcagtgtctgcttttgtggggagccctctgctcagaaaactgctcttcttggcacccacttttctccctcctgtctctgggccacccttcttctttccactgggtgggccatggatgcatggacttcagatagctcggacccctgggtgctgacgagatgggaccctcgggacccctggaggactcgcagtgctgaccactagccgcgtcgcctgagccccagcgctgatgcgatacagtttccccctcactgtgctggagggagaagaccctgggatttctgagcgaggcccgtggatgttgaagtcttcctgggtccccgactccatgctctcgcgccccagttactatgacgccctgcacaaccgcagctcggggcacgcccagcgccctgcaggacactcggcctccccggctcagcatctgcttcgagggcccccctctgaggcggcggggcggcgtggtggatcaccgagatgtcatcttggcccaccaggcccacaaaatccacagcaccccccaggccaggaggaaagaatgggagttatcaatactctggctgaccatcgtcatccgtgggactgacttcggtggaacgtccttgggttacttatcattacctgtgtttctggagaagttaataaaatttggccatctacgctctgcaacaaagttaacctataagatgttgtcattcctggaagaactaatcttcccggtttcaaaatggaccctgtgggatccacggttgtaccagcacaaaaccacgaggtcaaccgacggaacacacgcaggactcacactcgtccctgcagacaa

SEQ ID NO: 113992 - DNA, 163 bp, Homo sapiens
atgtttgagggggaggaaggaggaggctaagagaggccttcttatgttctgcttttttgccctgaggggatgacacttaaccactgcagaggctgcagctgagccgcagggatggtcacactgaaccagtagttcttcccttcccccactctaaacctctgcc

SEQ ID NO: 113993 - DNA, 547 bp, Homo sapiens
aggcgttcaagaccagcatggacaacatggcgaaaccctgtctctactaaaaatacaaatattagccgggtttggtggcccatgcctgcaatcccaactacttgggaggctgaggcacgaggattgcttgaatccgggaggcagaggttgtagtgagccaagatcatgccactacactccagcctgagcaacagagtgagaccctgtcacaaacaaacaaacaaacatgcaaacacccattctctctataaggtggacagtagaagccatattttaccaatgaagaaactgggctttagagaagagcaagtcacagagctggaaagtggtagaacaggcatttaaatctaggttagcttgataccgaagcctatgtttttagtaaccatactgaacctccttgagtagttaatttgctgagcattactgtgaaagagagctaagtcacttatgttccctaggatttataaatgagacatctgtgttagcacagggcattagtaacatgatttagattaaatctggctttgggattaaagaatagaga

SEQ ID NO: 113994 - DNA, 431 bp, Homo sapiens
cacactagagtggaggagggactgaattccccaaaggaaaacaaggaaacctagggagacaaaaaaaaatgcccattctgcaatgtatttttccccaaaatttgaactgactgtgggcaggtgttggcagtagggcttggtgggtggggaggtgggacaaagcctgggatcttaagaggaaacagtgggtagaaggaaatgaatgacgagctagagaagctacttggacgtaaggagatggctgctcttttcgttcaatagttactggattccaaaagttttacaagacattatctcaattaatcttcataatggtctcatgaggtatgaactcattttagccttgttgcaccagtgaggaagcagacccaggaaggtccatggatttgtccaaggtctctttgtcattaagtagcacaatcagggctcac

SEQ ID NO: 113995 - DNA, 389 bp, Homo sapiens
attgaaatgcaagagaatttttattgtcttggagtgggaattcagcatgacacaaaattcaaagacaatgaagtgaaatgtaactacataaaaattataattgtctgccgggcacagtggttcacacctgtaatcccagcactttgggaggctgaggcaggtggatcacttgaggtcaggacttcgagaccagcctgactaatacagtgaaatcacatctctactaagaatacaaaaattagccaggcgtggtggcgtgcgcctataatcccagctactcgggaggctgaggcaggagaattgcttgaaccagggaggcagaggttgtagtgagctgagatcgttccaatgcactccagcctgggcgacagagtgagagtccatcttaa

SEQ ID NO: 113996 - DNA, 271 bp, Homo sapiens
gacaatctggtggtcatcgaagtgcagtttaatgcaaaatatatacaataaccaacttggctgggcgcggtggctcacgcctgtaatcccagcactttgggaggtcaagacgggcagatcacctgaggtcaggagttcgagaccagcctggccaacatggtgaaaccccgtctctactaaaaatacaaaaattagccggccatggtggcaggtgcctgtaatcccagctactttggaggctgaggcaggagaatcgcttgaacccgtgagg

SEQ ID NO: 113997 - DNA, 302 bp, Homo sapiens
aaggaacttgtcaaaatgcatttgttagatcacgttttaaatgaagtacaattgaaggtagtttttgtccaaagaaaggaaaaacccctgcaaatccgctgagctcccagagagcgcgcctcctttgtcgtcgcgctgacattgaagtgtaatttttcatggttatttggactggaaaatgggggggggaagggagagatgggcctgcgattatttcccataaatgacaacacaatcacatcacgctctgctacagacatgctcggggaatttgccttttttacatttcatgtgtgaaagta

SEQ ID NO: 113998 - DNA, 443 bp, Homo sapiens
ctcttggcaacccagctcctggcctgtggtcggagctcaggatgggagcaggtgatgtctccactccacatccagaaccaagtccccggaaggaatcgagtcttcttcctgggtggcacagtagggcacccactcgtgggacaaagccctcagaattaagacccatggggacagagccccagccctgccactgacttgccagggatccctggaagggtccctacccaactgcacctggggccacctggggtctctacaaacagaccacttgcttgctgcccccaccctgcctgagacgccagcattgagaagcgagacccagggggagggcccttgcttccaggtacctgcctgagacgccagcattgagaagcgagacccaggtggagggcccttgcttccaggtacctgcctgagacgccagcattgagaagcgagaccca

SEQ ID NO: 113999 - DNA, 302 bp, Homo sapiens
gctgagatcacaggcgtgtgccaccacgcccagctaattttattttatttttttttgtacttttagtagagacagggttttgccatgttggtcaggctggtctgaaactcctggcctcaagtgatccaccagcctcagtctcccaaagtgctgggattacaggcatgagccacagcacccggccgtgatgttgctggctttgaagatgaggaagaggccaagtgctaaggagtccacctactctagaaactggaagaggtgaagcaggggaggggtgggagtgaacccacagccacgggatc

SEQ ID NO: 114000 - DNA, 429 bp, Homo sapiens
gggtttctaatagtacaaagaatgtcatcattcttggttatttcaggtatcagtaaatttaccacttagggttgtaggtatgtcatagctgattgctttcaacacagatatttaatgtagtttaggggagtacattcacttttaaaaacagtattcttggatgtaagagatatttttaatctcttaattttcagtatattctaaatgtatcactatggattaactttagcagtttaaaattatttttatgactaacttctgattctttttccacagcttctcttttaaaaaaaaaaatgctggattttgtctttgacaaaacacgttacagggctttgtgggattttttttcttttaatgttttaaccaaatctcattttacagtttctttatttgatcaccaattttcataaattttttcaagtaaaa

SEQ ID NO: 114001 - DNA, 335 bp, Homo sapiens
ggacatgtatggggagtcaaactggcgcttaaaggcttctgcccatttcacttctcccaacactgcattggccaaagcaaatcaccaggccatagagaagtgagatcctacgatgcacctggaagtggggaaattggaatcttcctggacagcccagtggctatccggggtttaccaggacttttgacatgttaaagtggtcaatctgtcaagtgcaagatttatcctgaaaagtattttgtgactgtaacagtgcttatcctccaggatggaccactctgggaaggttgaggcagagaaactataaacacccttattccttttccatctagaat

SEQ ID NO: 114002 - DNA, 422 bp, Homo sapiens
cagctccgacctttcctcaggcccacctcacacgttcgctgctttggcccacatcacgtatttccttttttttcagagccatttcttaaattataaaggcatttgaggccgggcccagtcagctcacacctgtaatcacagcgctttgaagccagagggtcacttgagcccaggagttttagatcagcctgaacaacacagcgacacccattctctacaaaaaaaaaaatttaaaaattagccaggcatggtagcgtgcacctgttgccccagctacttggaaggctgaggcaggaggatctcttgagcccaggggtttgaagttgcagtgagctatgatggcgcccctgcccttcagcctgggcaacaaagtgagagaccctttctacaaaaataaataaataaaaatcaagtcatttgag

SEQ ID NO: 114003 - DNA, 463 bp, Homo sapiens
  misc_feature (70)..(70): n is a, c, g, or t
  misc_feature (182)..(182): n is a, c, g, or t
gacagagtctcgctctgttgtctatggaaataaaaaaggaaattgtaatcaaacaattagcttttcaganatgatttagttataaatcctacatatgaatacaggacagaatctagacagtaggtattcctccaatatatttcctgatgtgaacatacagcgatgtgtacaccaggcatgtntctcctgggggaaatcgatgctttcatatggcccctcccttctttgtctcatgggtcccaaattatatctaatctttgcactgaaaatcagatccttcatatttcatacaccctgaagctaatgtggtttctccctggtcatcttcttctatgatggcaaagcaacgtccattagttatgcatgtgttattaatagcatcatctgggcagtgccctcagcaatagcacttgaaaaaaggcaaggtatcctctggtgctaaggttactccattttctgactt

SEQ ID NO: 114004 - DNA, 144 bp, Homo sapiens
tggcaggcagggacgggacacaagtgagaggcgggcgtccaggggagggggctgcagagacccgcaggcctgacagaggggctgagctccccactaagggctgagggagttccagtaggtgtgaggcagctgtgacacagcgga

SEQ ID NO: 114005 - DNA, 375 bp, Homo sapiens
ggagaaatttacatataatcgatattaaatatttggtagaatttgccagtgaagcaacttgggttgggagttttgttttttcctttccaagttttaaaactttgcatctttttatagatagagttctgatccttcccccttccctcccccctttgccctccttttcttccttcctttccccttccttccccctttcccttctcctcccttccccctccttttcttcccttccccctctcctgttttgtctccttcttttggaaaaagaaatcggttttatttctcttggcacagagcaatatatgaaggtggctatctcctgactccatatatcacttacataaagatgtccttcaaatatgtccagttacctac

SEQ ID NO: 114006 - DNA, 557 bp, Homo sapiens
ataataaactgtgggggaacggttggcactgaggagagcggagagcccctgccctgtggaaagagggcagtccttgcttggggacagctggttgttgccacaaggtaatgtgattcctctagagccagatctgatttttttcttaaaagaggcctgtaatctggactttaagatatccaaaattttaaataaagacaacgaaagcaaatgtaaaactcagtataagccaaaagaagacaggtgagcaggtcgagtgggtgaatgataggaaactgcagtcaggactgggaaatctgagagcaatgcacttttgcctgggttcccacagagagccctaacaggagcaccctgcctccctcagcctgtcttcctccctccgggctgaggagactttctatctgtccccatcccttttgttcaagccaatattgtggccaatccttgcctaacttttatgggatctggattttgaaactcaaaatatttattttttccatctgctttctgcttcccttaggcaatgaaaaatgctcagctgacttaatgtggggagggag

SEQ ID NO: 114007 - DNA, 390 bp, Homo sapiens
taccctcattaacacagatgacagccccaccagaccatttgccaagcaatcagtcagacaacagccgagctgagacccttttaaccagccccctggggaaccctttaccaagctttgcaggcagtgacactacttttaaccccctgttcctcccagctgtcaatggggcctcaggattaatgaccttgaatccccagctgttgggaggtgtcctgaactcggcatcggccaacaccgctaatcatccagaggtttccatagcaacctcctcccaggcaaccactaccacaaccactacatcatcagcagtggcagcactgactgtctcaacacttggtgggacagcagtggtgtcaatggcagaaacattgctgaatatatctaataatg

SEQ ID NO: 114008 - DNA, 1472 bp, Homo sapiens
gaaaggataaataaattgtggcatattcatacagtggactagtagcacatgagaaggaaagaattgccattccacataatgcctggttgaatcttatgaacctaatgaatgaaagaagacggacacaaaagagaatgtatctatcattccattttcatgaatttcaaaaacatgcaaaataactctatggtttcataagtcaggatagtggttactaatttggggaaaggagatctttttagggtactggtaatgttctgtttcttgtctagggtactgattacagaggtactttcactttgtgaaaattcattgaggtgtaacttatttatgtatttttgcatattaatgcaataaaaatttactaaaattcaaacataatagattttaaaattctaattttagattaataagatatttacactattagaaaattttaaaaacagaagaaaatagtttaaaattctcattcctacccccagaccccagccacctagttccctcacaaacagccaatgatactagtttttgggggggggtttgtttttatttttgtttttgagacatggtctcactctgtcgcctaggctggagtgcaatggctcaatcaccactcactgcaacctctgcctcccaggctcaagcggtcttcctgtctcagcctcccaagttgctgggactacagggtgtgcacaccacggctggctaatttttatgttttttgcagagctgggattttgccatgttatccaggctggtcctgaactcctaggctcaagcagtctgcctgcctcagcctcccaaagtgcaggaattataggcgtgagccactgtgcctagctgatactatttttgtacatgcttccagagatattttttaaatatgcaagcaaataagcatgtatgtaattacacacatgcacacacacacatatctattctcttccagctcccccattttatatgtgtggcaacattttgaacacattattctacagtttgcttttatcatttgttttatcttaaagacctttccagtatctgtacataaagaagtggttatttatttatttatttatttagagatggagtctcgttctgtcgctcaggttcgagtgcagtggcgggatctcagctcattgcaacctccgcctcccgggttcaagcaattctcctgcctcagcctcccaagcagctgggactacaggcgcacaccaccgtgcccagctaattttcatatttttagtagagacggggtttcaccatattggctaggctggtctcgaactcctgacctcatcatccacctgcctcggcctcccaaagtgctgggattacagacgtgagccaccgcgcccggccccttatttctttttacagctgcataatttacttaataagtctccctccttttctgttttgaaacaggatctcactctgttgcccaagctagagtgcagttgcgtgaccac

SEQ ID NO: 114009 - DNA, 210 bp, Homo sapiens
aaagctttacattatctaggttgtgctgtgcgtcatgtctttgcaactgttttcataaaactttgcacaatcctgtcttcccaagtgatctcagagtacttattatttattcttgtaatattacagtggctcttctagccatgtggcatgtcacaatgatttagttaaaggaagtattcacagccggatcacacattgaattcagaatgt

SEQ ID NO: 114010 - DNA, 322 bp, Homo sapiens
aatggcgatgatgatgttgccaaccacaaggaagccagtgatgatggcagtaacgatgataaagaagatgatgccagtgatggagatgaagatgaaatggtgacgatgatgatgatgatgacagatgtggtgatgatgataagtagtgtgtactttgagcacttcctacaagctaagaacttaccttgcattttgtcttcacaacctttgcctttcaaaatgtggcccatggaccagcagcatggctgtcacctgagcacttgttagaaattcagagtccaggccgggcgcggtggctcacgcctgtaatcccagcaatttg

SEQ ID NO: 114011 - DNA, 245 bp, Homo sapiens
tgtccactcccaacctagcacatatatcagtctttctcactagccttgtggttcttcatttctctctttctctgtccatgtggttccttcttgtgtctgttgtctgtctgtatgggattggggaagggaatttcttctctctgtcctctgtcttctctttgttgtctctgtgtcttcatcttttattatggaagagtgtatttgacaggactgatttagttacatctgaatggattttttaaatt

SEQ ID NO: 114012 - DNA, 426 bp, Homo sapiens
tggccaacatggtgaaaccccgtctctactaaaaatacaaaaattagctgggcatccacctgtagtcccagctgtttgggaggctgaggcgggacaatcgtttgaactcagggggcagaggttgcagtgagccgagatggcaccactgcactccagcctgggccacagatcgagactccatctcaaaaacaaaacaaaacaaaaaacaaggcaaaacaccttcgtatactcatggtagcaaagtttttcttcatcacgacacagaaacaaccataaatgaaaattacgaaacattcagtgaccttaaaattaggaatgtccattgatcaaaagacaccataaagagagtgaaaaccttatgtagtaggttgctatgaataaaagcaaaacaaaaaggagtgaaaacacaagtgaaaaattgggagg

SEQ ID NO: 114013 - DNA, 826 bp, Homo sapiens
atacgacgacgaggagtttgagtatcgacatgtcgtgctgcccaaggacatagccaagctggtccgtaaaacccatttgatgtctgaatctgaatggaggaatcttggcgttcagcagagtcagggatgggtctattatatgatccatgaaccagaacctcacatattgctgttccggtgcccactacccaagaagccaaagaaatgaagctggcaagctgcttttcagcctcaagctttacacagctgtccttacttcctaacatctttctgacaacattttttgttgccttcttgtttctcactttcatatttagaagatgttcaatgtactgtttcaatgtgctggtaactgctttgcttcttgggtagagccaccaccaccatagcccagccagatgagtgctctgtggacccacagcctcagctgaatatgaccccagaagccacgatgttgtctgtatccagaatacacttggcagatggaggaagcatctgagtttgagactgtggctgttacagggatcatgtaaacttgctgtttttgttttttcctgccgggtgttgtatgtatggcaacttgagaatttatgtttcagtgtactggaaactttccattttattcaagaaatctgttcatgttaaaagccttgattagagaggaagtttttgtaattgtgctgagatgtttcctccaagaactgcaaagccatcgtggaaagagctgcccagctgtccatcggagtcacaccaaccccaacacccagtaggtgtgttttattgttaaccccttttttttctttttttttttttttttttttttttt

SEQ ID NO: 114014 - DNA, 356 bp, Homo sapiens
ttacctctaggatcccagtgtgactgataagagagaatggagacctgtgcattatgcagcttttcatgggcggcttggctgcttgcaacttcttgttaaatggggttgtagcatagaagatgtggactacaatggaaaccttccagagtcttgctctgtcgcacaggctggagtgcagtggtgcagtctcggcttgctgcaacctctgcctcccggattcaagcgattcttctgcctcagcctcccgagtagctgggattacagttcacttagcagccatggaaggccaccttcactgtttcaaattcctagtcagtagaatgagcagtgcgacgcaagttttaaaagctttcaat

SEQ ID NO: 114015 - DNA, 2589 bp, Homo sapiens
atacgacgacgaggagtttgagtatcgacatgtcgtgctgcccaaggacatagccaagctggtccgtaaaacccatttgatgtctgaatctgaatggaggaatcttggcgttcagcagagtcagggatgggtctattatatgatccatgaaccagaacctcacatattgctgttccggtgcccactacccaagaagccaaagaaatgaagctggcaagctgcttttcagcctcaagctttacacagctgtccttacttcctaacatctttctgacaacattttttgttgccttcttgtttctcactttcatatttagaagatgttcaatgtactgtttcaatgtgctggtaactgctttgcttcttgggtagagccaccaccaccatagcccagccagatgagtgctctgtggacccacagcctcagctgaatatgaccccagaagccacgatgttgtctgtatccagaatacacttggcagatggaggaagcatctgagtttgagactgtggctgttacagggatcatgtaaacttgctgtttttgttttttcctgccgggtgttgtatgtatggcaacttgagaatttatgtttcagtgtactggaaactttccattttattcaagaaatctgttcatgttaaaagccttgattagagaggaagtttttgtaattgtgctgagatgtttcctccaagaactgcaaagccatcgtggaaagagctgcccagctgtccatcggagtcacaccaaccccaacgccaggctgcgcagtgaagaaaatgaatagacagctcatgtgcatgttttgtgtttaaataaaactgtaaaaactgcaaagaaaaaccaaaaaacaacaacaaaaaattattttgtgttaggcttccttcgctttttcagactgctttcaatttccattttcacatatggtattattagtttttttttttagttttagtctttctgatggatgtatctcattgcagtttcaaatttacatttttcctgatgactaaagatgttgaacatcatttcgtacgtttaaaggctatttggtttttttgtgtgtgtgatgtactagttcaaatcttttgcctattggctgttagagtgtgtctttttcttattgaatcataggagttctttatatattctagatacaagccctttgtcagttacgtttattaccaatatcttttcatgcaaatatctttctaatctttctacttcatggcttgctctttcattctttggtattttttgataaatgaggttttaattattttttttttttgaaatagagtcttgctctgtcgcacaggctggagtgcagtggtgcagtctcggcttgctgcaacctctgcctcccggattcaagcgattcttctgcctcagcctcccgagtagctgggattacaggtgtgcaccaccacgcttggctaatttttgtatttttagtagaaacagaattttagcatgttggccacgctggtcttgaactcctgaccttgtgatccacccacctcggcctcccaaagtgctgggattacaggtgtgagccaccgcgcttggccagaggttttaattttaacgtagtccattttaataatctcttcctttgtagttagtcctttctgtactttccctattttgtgatcatgaagacattcctttatgttatctgttagaaattttatttatctttcatatttatattcccaatcctcctagaactgacttttccgtgtgtaatacaaggtaggggtcagttttatttttgtattgtcctttatcaaatatacttgatcatttttgttggtcttgtctggtcattaaaaaatccaattgtttctttaaacatgtatgattattttatttataaccaggtagagtatttataataatatagatgttaagaaagaatgtggccttaggtctagactgcttgtgttcaaatcgctctcataaaattattttttattgataaatgtacatatttttggtgtacatgtgataatttgatacattcatttgtatcaaatttgataatgtataaagatcaaatcaaggtaattggggtagccatcccttaaatatttcttttatactaggaacatttgaattatttttttctagttatttttaaatacacaatagattatggttaactataatcaccctactgatctgtcaaacactagatcttatttcttctactcaattgtatatttatacccattaatcaacttctgttcttgctctctccgtgctacccttctggcctttggtaatcgccaatcaatctactctctatcttcatgagaccagcgtattttagctcccacatatgaatgaaaacatataatatttgtctttctgtgcttgacttattttacttaacataatgacctccaattccatccatcttgtggcactgacagtatttcattcatttttgtgtgaattatatttcgttgtgaatatacattacattttctttatccattcatcactgatgtgcacttaggttgattccatattttggctattgtgaatagtgtgttaataaacatgagagtgcagttatc

SEQ ID NO: 114016 - DNA, 2535 bp, Homo sapiens
atacgacgacgaggagtttgagtatcgacatgtcgtgctgcccaaggacatagccaagctggtccgtaaaacccatttgatgtctgaatctgaatggaggaatcttggcgttcagcagagtcagggatgggtctattatatgatccatgaaccagaacctcacatattgctgttccggtgcccactacccaagaagccaaagaaatgaagctggcaagctgcttttcagcctcaagctttacacagctgtccttacttcctaacatctttctgacaacattttttgttgccttcttgtttctcactttcatatttagaagatgttcaatgtactgtttcaatgtgctggtaactgctttgcttcttgggtagagccaccaccaccatagcccagccagatgagtgctctgtggacccacagcctcagctgaatatgaccccagaagccacgatgttgtctgtatccagaatacacttggcagatggaggaagcatctgagtttgagactgtggctgttacagggatcatgtaaacttgctgtttttgttttttcctgccgggtgttgtatgtatggcaacttgagaatttatgtttcagtgtactggaaactttccattttattcaagaaatctgttcatgttaaaagccttgattagagaggaagtttttgtaattgtgctgagatgtttcctccaagaactgcaaagccatcgtggaaagagctgcccagctgtccatcggagtcacaccaaccccaacgccaggctgcgcagtgaagaaaatgaatagacagctcatgtgcatgttttgtgtttaaataaaactgtaaaaactgcaaagaaaaaccaaaaaacaacaacaaaaaattattttgtgttaggcttccttcgctttttcagactgctttcaatttccattttcacatatggtattattagtttttttttttagttttagtctttctgatggatgtatctcattgcagtttcaaatttacatttttcctgatgactaaagatgttgaacatcatttcgtacgtttaaaggctatttggtttttttgtgtgtgtgatgtactagttcaaatcttttgcctattggctgttagagtgtgtctttttcttattgaatcataggagttctttatatattctagatacaagccctttgtcagttacgtttattaccaatatcttttcatgcaaatatctttctaatctttctacttcatggcttgctctttcattctttggtattttttgataaatgaggttttaattattttttttttttgaaatagagtcttgctctgtcgcacaggctggagtgcagtggtgcagtctcggcttgctgcaacctctgcctcccggattcaagcgattcttctgcctcagcctcccgagtagctgggattacaggtgtgcaccaccacgcttggctaatttttgtatttttagtagaaacagaattttagcatgttggccacgctggtcttgaactcctgaccttgtgatccacccacctcggcctcccaaagtgctgggattacaggtgtgagccaccgcgcttggccagaggttttaattttaacgtagtccattttaataatctcttcctttgtagttagtcctttctgtactttccctattttgtgatcatgaagacattcctttatgttatctgttagaaattttatttatctttcatatttatattcccaatcctcctagaactgacttttccgtgtgtaatacaaggtaggggtcagttttatttttgtattgtcctttatcaaatatacttgatcatttttgttggtcttgtctggtcattaaaaaatccaattgtttctttaaacatgtatgattattttatttataaccaggtagagtatttataataatatagatgttaagaaagaatgtggccttaggtctagactgcttgtgttcaaatcgctctcatgatacattcatttgtatcaaatttgataatgtataaagatcaaatcaaggtaattggggtagccatcccttaaatatttcttttatactaggaacatttgaattatttttttctagttatttttaaatacacaatagattatggttaactataatcaccctactgatctgtcaaacactagatcttatttcttctactcaattgtatatttatacccattaatcaacttctgttcttgctctctccgtgctacccttctggcctttggtaatcgccaatcaatctactctctatcttcatgagaccagcgtattttagctcccacatatgaatgaaaacatataatatttgtctttctgtgcttgacttattttacttaacataatgacctccaattccatccatcttgtggcactgacagtatttcattcatttttgtgtgaattatatttcgttgtgaatatacattacattttctttatccattcatcactgatgtgcacttaggttgattccatattttggctattgtgaatagtgtgttaataaacatgagagtgcagttatc

SEQ ID NO: 114017 - DNA, 360 bp, Homo sapiens
gcagccaccacagggtttacagtggaaagagtgatgtagggcctcacgggtgagccggccctaagaatgtgccactcctggccggacgcagtggctcaagcctgtaatcccagcactgtgggaggctgaggcgggcggatcacctgtggtcaggagtttgagaccagcctgacccacacggagaaaccccgtctctactaaaaatacaaaattagccgggcgtggtggctcatgcctgtaatcccagctactcgggaggctgaggaagaagaatcgcttgaacccgggaggcggaggttgtggtgagccaagatcgcaccgtggcactccagcctgggcgacaagagtgaaactctgtct

SEQ ID NO: 114018 - DNA, 903 bp, Homo sapiens
ctccttcctggaaacccacccagaacctccaccctctgacaccatggtcaactcctgttgtggctctgtgtgctctgaccagggctgtggcctagagaactgctgccgtcccagctactgccagaccacctgctgcaggaccacctgctgccgccccagctgctgccgccccagctgctgcaggccccagtgctgccagtctgtgtgctgccagcccacctgctgctgccccagctactgtgtgtccagctgctgcagaccccagtgctgccagaccacctgctgcagaaccacctgctgccgccccagctgctgtgtgtccaggtgctacaggccccattgtggccagtctctatgctgctagcccatctgctggcaaaccacctgctacaggaccacctgctgccaccccagctattgcatttccagctgctgccagccttcctgcagtatctctagcagcagtagctcctcctgctgtggcttcagctgctgcaggctctcctgctgcatctccagttgctgccgccccaactgctgccagaccatgtgctgccgcccaacctgctctagtgcttcttgctgctgaggctgtcatctggactcaccagattctcatcaaccagcattcttgatgtagctcatctatgagctgagttatgggaagctagttggaaaacttcagttccaaccaattcttagattgaatctggcctccaaatatatgctccccccacattttacctctctaccaaatgaacataagttgtaatttgctctgaaatctgtcaactatcttaattgaaatatttgctctctgccataatttctcatatggagctattccattttaaacaaatatttatctaaataaatcttaaataaattttcaggcatagaaat

SEQ ID NO: 114019 - DNA, 1083 bp, Homo sapiens
ctccttcctggaaacccacccagaacctccaccctctgacaccatggtcaactcctgttgtggctctgtgtgctctgaccagggctgtggcctagagaactgctgccgtcccagctactgccagaccacctgctgcaggaccacctgctgccgccccagctgctgtgtgtccagctgctgcagaccccagtgctgccagaccacctgctgcaggaccacctgctgccaccccagctgctgtgtgtccagctgctgcagaccccagtgctgccagtctgtgtgctgccagcccacctgctgcagaccccaatgctgccagactacctgctgtaggaccacctgctgccgccccagctgctgcaggccccagtgctgccagtctgtgtgctgccagcccacctgctgctgccccagctactgtgtgtccagctgctgcagaccccagtgctgccagaccacctgctgcagaaccacctgctgccgccccagctgctgtgtgtccaggtgctacaggccccattgtggccagtctctatgctgctagcccatctgctggcaaaccacctgctacaggaccacctgctgccaccccagctattgcatttccagctgctgccagccttcctgcagtatctctagcagcagtagctcctcctgctgtggcttcagctgctgcaggctctcctgctgcatctccagttgctgccgccccaactgctgccagaccatgtgctgccgcccaacctgctctagtgcttcttgctgctgaggctgtcatctggactcaccagattctcatcaaccagcattcttgatgtagctcatctatgagctgagttatgggaagctagttggaaaacttcagttccaaccaattcttagattgaatctggcctccaaatatatgctccccccacattttacctctctaccaaatgaacataagttgtaatttgctctgaaatctgtcaactatcttaattgaaatatttgctctctgccataatttctcatatggagctattccattttaaacaaatatttatctaaataaatcttaaataaattttcaggcatagaaat

SEQ ID NO: 114020 - DNA, 348 bp, Homo sapiens
aaattatacactgcggaagattggtgaattagaacatacagcaaaagaaacagtccaaaataaaaagagaaaaaaggctaaagaaaattagtgagctatggaacaacatctagtgatataatatacatataactggagtcaataaatatgctagggagaagacaaaaagattttgaaaatataatggccaaaacttcccaattttatgaaaactgtatactcacagaatcagaatgctcaatgaaccctgtgcagaagtttgaaataaaccataccaaggcataatcaaattcctgataaaaagtgatagagaattcttaaatgcagctgggggaaaatggtattaca

SEQ ID NO: 114021 - DNA, 748 bp, Homo sapiens
tcttccatgctagtctgaccgcagcctcattgatagcacccctcacctctcaccttaatcacacgtgtagattcccttgtttaacttctgctcattctttaggtttcagctcaattagagctctggctgagaacccttaagcgagcatcccctttaccctcctgccgcacttgaaggcactttgttatcatcactggctgttagtgttctttgattgtctttctcatagtgtgtgggcttcatgaagtcaggtactgtgagcctcttgctcactgttaaaccttgagtgacttgcactgtatgtggcacataacggtactcagttgctgtatattgcataattacataaatgtttaactcagtgatgcagtttggtgttgactgggtttcgttcttaaaagaatataatcagtagtctatttatatgtttaactcccaggatttatatttgtgatggttccagataactgataatccccaaatcatgtggctttagcaatccgctttaggagtataaatatttatatttctgttatttttcttaggctaatgttgtgctttatctatggtgtaaatactgataatcagaagagaatggcaatccagaacgtgctggtttaactggtgaatgtagcctaggctgtctcacttgtgactagaatacaaagtcagttattcttacagtgatcattgaaagttattcctattccacctataagctggttattctctttgctaccacaggata

SEQ ID NO: 114022 - DNA, 361 bp, Homo sapiens
ttaggttgctgagtccttatttgatttgtacatgtatatttttattaattttttttctactgagtgtgaacgaatttttctttaggggggaggatatagaatctgtggtttagccgggcgcggtggctcacgcttgtaattccagcgctttgggaggccgaggcaggtggatcacctgaggtcagcagtttgagaccagcctggccaacatggtgaaaccctgtctctactaaaaatacaaaaattagctgggcatggtggcacacgcctgttatcgcagctaatcgggaggctgagacaggagaatggcttgaacacaggaggcagaggttgcagtgagctgagatagcaccattgcact

SEQ ID NO: 114023 - DNA, 432 bp, Homo sapiens
gaggattgcttgagcccaggaggttgagactgcaatgagctgtgattgagccttgcactcccacctgggtgacagagtgagaccctgcctcagaaataagaacaggatatgtctgaaatttcccaagttgagtatttcattgtacccttctcattgagccaagttcttttagctaagctttttaagacagtttgttgcacataaaagcagagaatcttgaggctctcacatctcatattcaaattgccatttaaaaatcgttcctttgctcctttgtttttattacttttccccttgcttgtgacattggtctttccttgaggaaattgactcctggttttactgcactagtggttcactctctctgcagaagcagcagagggcactactcagaggttttcctgctcctggaaaccgagacggtgccctccc

SEQ ID NO: 114024 - DNA, 438 bp, Homo sapiens
ctaacatttctatgccgtgtggtgtgaccagggcacacgctaagtgtattacctatagtgactaattaaatcctaacaaaacccatatgcattaggtactattgtattaaccccatttcacaggcaagtaaactggagcctgtagggacattaagcagcctgtccaaggtcacacaacaattaggtgacaaaaaacaggatttgccctcaggcagtctagctgcagaatccttttctttataattccacacacttgctcctctatctccaagtcaatcaacagaggtagtccaaccaacacttctcccttcctactcttttcacttttccactccccaagcaactctttctttttttaatattatatttattttagattcaagggtccgtgtgcctgtttgttacgtgggtatatcgtgtcatggtgggcttgggatc

SEQ ID NO: 114025 - DNA, 424 bp, Homo sapiens
tattggccaggctggtctcgaactcctgagttcaagtgatccgcctgcctcagcctcgcaaagtgctgggattataggcatgagccacagcacccagcctcagttttccttttatgttttctttatggcttaagaattatatctacatttcttttggctaaggtttaggctaaggttaaagattagctgtaatttgaatgaatcaaatctataaaaagtattctagatgctacataaacattctcattttcaaatcaaaagtaggagagaggaacataacagtgtattctaaaccctttcaatagaggggaggatatatttataaaactagcatatcccaaaatacaaaaagtaattaagaagttaacaaagtttagaaatgtagcatttggacctgggtggaccaaagaaacccaaaccctag

SEQ ID NO: 114026 - DNA, 500 bp, Homo sapiens
  misc_feature (7)..(7): n is a, c, g, or t
  misc_feature (64)..(64): n is a, c, g, or t
  misc_feature (66)..(66): n is a, c, g, or t
  misc_feature (68)..(68): n is a, c, g, or t
  misc_feature (485)..(485): n is a, c, g, or t
cccacangagttgggagctgaagttaggcattttggacaattgatgggggagctgagtctctananangccctgcctaagtgcattcaaatttttaaaatgtaaatgcctggctaagcccctgtaagcagaatgatagggactggggttgatgttttgtgattgtaacccattctactcactaggtagatagacggacagtttaactcccttaggagtacataccacactttcagaattcagaagtcctggtttaccttatttctgctcctagtagatgttccacctcttttaagttaacatttctttggacaatgacatgcagaaacagtagcctctcattttactcttccttctttaagggattgatcaatgaaggcaggccatgtcttttctgaaggtcagctagtaagaatagaataaagagttcctgatttatatagagtcaataatttcacagtcagaagagacttcaaggtcactagncaaaactgtcttagg

SEQ ID NO: 114027 - DNA, 159 bp, Homo sapiens
ccttatgccacagggggtgcagcaggaaaaaggaaaaaggggtctctgtgtgtgattaagcctgggtaggccctgtcacttacttcacctccatgcctcagtatcctcgtctgtaaaatgaggatgaacacctaaacaatgcctggcgtgctgtaggca

SEQ ID NO: 114028 - DNA, 630 bp, Homo sapiens
tcactggttatactgcaaatataataccaaactgtctgcccccaaatataataccaaactacatcatttagtatttgtccttagtaatagttgattgctccataccaccaattaaaagccagtttgctacacctgaaaccccatgagctaatatgagagacatatctcatcagatagtaagaggggaaaaaattaaaaggagtcaagacaatttctctgcaaagtcatgggaatgtgaattttttatattaacttattcttccccatggttttcttccccattacagttgcagtaatgccccatagaactaattgattcagatatgaaataaaaatcacacctaagaaatcaactaatctagatgtcatatgcccctataagtagttagtccactagaaaacaaatttgctctttcataaattactcctgtgctttttctgtacttctgagaataagaaaggaaaagcctttttagaaattattattatactgtagatttcacataaagaaataacaaaaaattattatagatggttttgatttgcaagtaacaaaatgaacaggtgggagaaggattttctgatttattttcatttgggaaatttagtcctataccactgaatttctaa

SEQ ID NO: 114029 - DNA, 319 bp, Homo sapiens
cttgacaattgatgtaatcatttatcaggtgaatcttttatccaagtaactggataataacaatttataggtgctaattgactttgaaggtggtcttttaaagctctggcatatttttaacttctttgaagtgtggaatttcagaaaaaaatacttattaatagacccaagtgataaacattcagaggcatacaccagtgtcttatgactttctaagaaataatttaggtgtgaaatattattcacaagtaaaactaggctttaagtagctggatttgggggaaagtgagggagatgttaaccctccaattaagtaaaa

SEQ ID NO: 114030 - DNA, 606 bp, Homo sapiens
ctctgccctctctgctaccccacaatggcccaatcgtctcccagaaagcacagtgtgggtgggggtagccccttctttggtttgaagataatttcagactgagacatccctttatgaaatggatgggctggcagagctgaggctgggagtcaagtgagtatttgtgagtgttagaagtggggagggggcattcaaagcacccctcctagaaatcaggcttggatgtaaggcttgtccttgctccccagccccccttttttctgatttcctacgtttaggtaggttatcttcctgacttaaaaaaattagttgtggaattgagtttgagatggaagaattcaccagcttaccccaacccacacacaaacacacatacacatataagtgtaaaaatacttatcacagtattttagaagctaggtcacctgcggtatacatgccactcccccaaatcataatttaacctgaaagccaaattctgggaagataagactataaagtgctgagactgggttcatacccaacactaataaaaaataaatgctttgtcttcacaccttttgtgtgtatgaaaaagagagggcgaaacatgatcactacaggatc

SEQ ID NO: 114031 - DNA, 432 bp, Homo sapiens
ggaggggactatgttagggcaatgaatttgcgaataatagcatgaaacagtctcttggttattctccatcaaatatgaccacatcatcagcacacaatgtccatcctcccttatctcttccatctacgcctagaaactgctctcttccctgtctagcacctgccaccactagactactgcagatctagttgttctagctcttctcatctttacacgcttgaagcattcctcttagatgagaagctcaacacacttccctttattctttgggaaacgtttttagcttaagtcaaattctcacccctaggaatgaaaaaaaattgactcccaaacctctgactttgtaacccttggacaccactgatttcctatcatttcaccccactgatgtacttgaactctgttccctgagaagggagagggcagaccctt

SEQ ID NO: 114032 - DNA, 389 bp, Homo sapiens
aagctgccagccacaggcacagggggagagggaggagggaagagcaggtgaggaggcccctgggttggggaatttgctaggttgtcaggggcattctgagaggcaagaggtagggtagtgtcagccccaactgtgttcaaggatacaggtgtaacctagagagacaaatgtggcacaagggtcaggagccagcttcctcccagggaggtaggagtctggcggtattggcggtggtgagacttgtccttagagcccccggcaagggggcccagggcaggcagatgtgtccaggagaacaggactggcagccacaaggactaaagagcctcatggatcagagcatccttccttcccactgctggaagggcaggaaatcagcagcaatgcat

SEQ ID NO: 114033 - DNA, 565 bp, Homo sapiens
cagtgcttttcatcgcatctactttcaactcccatgtgatcttagtctatcacatattcctctgttttcctctattttcagtcctctccacggtccttccctcatacccgaaaacatatttcaatctctctcatcttaggctctctcttgagattttatcttttctagccactgtcctacccagccaagttcttcaaaggaacagtactcaggtgctgactttactcctcacctccattcatgtttcagccatttgtgacttgggttttgtccccaccatcccatgaaaaatgccttccaaaaggtaagcaatagcctcgtagctacatatggatacttggtagtcattgggttaaccaatctactccattgaacatggttgaccacacttaaaattttattcttccttggcttttttgacactgttttctcctagttctcctctatctatatttttcactgattcttccttctccacattacctttagatagctagtgtttttcagggttttgttttttacatgctgtctctaggtggaatcaccacaatgatccccagatctc

SEQ ID NO: 114034 - DNA, 456 bp, Homo sapiens
gacaatgcccagacctccagaaaccatgtgtcaagctcggattgccttagacaggtgcaatttaagaacagctttcatcctcttttctctcatattgtcacactatgtgttctgacttctggctcctttcctcacaagaagctcacccagctggaactcttatgggaccttggcaccagagaccacaaattcctctttgaagttttctaacagcaacaatggtatttctgacttggctttcttgtatttctctcacgttaacaaaattggttcagcatctaccatgggctacatgctgagctacaggtaaggtttggctaaaggatgaataagaccccctccttgtcttcaggagtttgtctagcagaggagtctgtcatgtaatcaggaaactccagtacacaacgtgatagctctaagacaggtatatacaagatgatgttctggaccttaact

SEQ ID NO: 114035 - DNA, 999 bp, Homo sapiens
gacaatgcccagacctccagaaaccatgtgtcaagctcggattgccttagacaggtgcaatttaagaacagctttcatcctcttttctctcatattgtcacactatgtgttctgacttctggctcctttcctcacaagaagctcacccagctggaactcttatgggaccttggcaccagagaccacaaattcctctttgaagttttctaacagcaacaatggtatttctgacttggctttcttgtatttctctcacgttaacaaaattggttcagcatctaccatgggctacatgctgagctacagagtttcgctctgtcgcccaggctggagtgcagtggcgcgcgatctcggttcactgcaagctccacctcccgggttcacgccattctcctgcctcagcctcctgagtagctgggactacaggcgcccgccaccacacccagcttgaaataacacggtgctaagcatggatttttccaccgaatgaggaaattctaattctaattgttagtctctttatcaatgacgccaagtggcaaggaacatcaccatctttggagacctagtggtggagttaaactactacagggaaacaactttacgtatagaggagttgagcttcctagaggaaaagaaggaaaatcattcctaatggaagatcaactattcaagaaagaaagaagagcaatgagaaagaatgtctctgacggcacttcactgacagctgaatcaaggccaattctatgcctctgaggaatgcagagcatacttcaggctctcctgttgcacaacacccaagtgagcacccaagtggtggctctggaccaagaattggactgttacagctactgcctaccaacatagggtgttctgagagacaggttacagctactgcctatcaacacagggtgttctgagaaacagcaaagacacttcgtttctgaaaatggcgatctgagaactttagaaatgaacttgagaggaaaagatgaacct

SEQ ID NO: 114036 - DNA, 1491 bp, Homo sapiens
gacaatgcccagacctccagaaaccatgtgtcaagctcggattgccttagacaggtgcaatttaagaacagctttcatcctcttttctctcatattgtcacactatgtgttctgacttctggctcctttcctcacaagaagctcacccagctggaactcttatgggaccttggcaccagagaccacaaattcctctttgaagttttctaacagcaacaatggtatttctgacttggctttcttgtatttctctcacgttaacaaaattggttcagcatctaccatgggctacatgctgagctacagagtttcgctctgtcgcccaggctggagtgcagtggcgcgcgatctcggttcactgcaagctccacctcccgggttcacgccattctcctgcctcagcctcctgagtagctgggactacaggcgcccgccaccacacccaggaatccaacttgctgtttgctatcacatgtgctatacgtgctgttgatgaaactgctaaaggggctgaatgtgactgacgtctttggaaggatgagacttagcgtgcctgtacagttgtgtccaaatgctgtcctcatctcccaatgaaaagggtttttccttaagcctcacaacaatttacagcattgccagcagcattcagtacattcagaacaggataatttcacccgcagctgaactagggccatgcctgggacagacagagaatggccttccagcagacatgccaagaagcaagccaggtcagtgagtgaagaggagggcaggcccatttgaagcaacacagtttatgaacaaaacccatcagaagatgtcagaagataaggattttggtcctgatgctacacttaccagctgtccctcagtgttctacttcttaaaaaaagatggataaacagaggcaacccgaggataaaggccttgctcagtgtcacacatttcagtcactaaataagacacaatggatgccagtattctcatcccctcacaaataaagagccttcaagctctgcagtcaaacaagaactttggaatgatttcactggctgaaaaggcgattttttgggtagacaccaaaattaggagagaaattaaactggaacctgactggtggtgggtcccagtgactctaagcagtaccacaccagaaggaacacattacagttttcacgcaagacgacggggttctgacagaaaattaaatatagctcgtttattcaagtggctgtttccaaccccatgtaacttcgtgggcaaatattactcttccttcaggtagtactactactctccaggctaggtcacctactacatccattgaatacatacactcgggtgtatcatggtgtggagcctcttcctgtttggcattttatctcggccaagttgccctcgtatataacatatacgtaataagaggcccaattttggggtcatctgtcattggggcacgcattatgggcgtccgctgaaaccacatactgg

SEQ ID NO: 114037 - DNA, 1409 bp, Homo sapiens
gacaatgcccagacctccagaaaccatgtgtcaagctcggattgccttagacaggtgcaatttaagaacagctttcatcctcttttctctcatattgtcacactatgtgttctgacttctggctcctttcctcacaagaagctcacccagctggaactcttatgggaccttggcaccagagaccacaaattcctctttgaagttttctaacagcaacaatggtatttctgacttggctttcttgtatttctctcacgttaacaaaattggttcagcatctaccatgggctacatgctgagctacagagtttcgctctgtcgcccaggctggagtgcagtggcgcgcgatctcggttcactgcaagctccacctcccgggttcacgccattctcctgcctcagcctcctgagtagctgggactacaggcgcccgccaccacacccaggaatccaacttgctgtttgctatcacatgtgctatacgtgctgttgatgaaactgctaaaggggctgaatgtgactgacgtctttggaaggatgagacttagcgtgcctgtacagttgtgtccaaatgctgtcctcatctcccaatgaaaagctgaactagggccatgcctgggacagacagagaatggccttccagcagacatgccaagaagcaagccaggtcagtgagtgaagaggagggcaggcccatttgaagcaacacagtttatgaacaaaacccatcagaagatgtcagaagataaggattttggtcctgatgctacacttaccagctgtccctcagtgttctacttcttaaaaaaagatggataaacagaggcaacccgaggataaaggccttgctcagtgtcacacatttcagtcactaaataagacacaatggatgccagtattctcatcccctcacaaataaagagccttcaagctctgcagtcaaacaagaactttggaatgatttcactggctgaaaaggcgattttttgggtagacaccaaaattaggagagaaattaaactggaacctgactggtggtgggtcccagtgactctaagcagtaccacaccagaaggaacacattacagttttcacgcaagacgacggggttctgacagaaaattaaatatagctcgtttattcaagtggctgtttccaaccccatgtaacttcgtgggcaaatattactcttccttcaggtagtactactactctccaggctaggtcacctactacatccattgaatacatacactcgggtgtatcatggtgtggagcctcttcctgtttggcattttatctcggccaagttgccctcgtatataacatatacgtaataagaggcccaattttggggtcatctgtcattggggcacgcattatgggcgtccgctgaaaccacatactgg

SEQ ID NO: 114038 - DNA, 1187 bp, Homo sapiens
gacaatgcccagacctccagaaaccatgtgtcaagctcggattgccttagacaggtgcaatttaagaacagctttcatcctcttttctctcatattgtcacactatgtgttctgacttctggctcctttcctcacaagaagctcacccagctggaactcttatgggaccttggcaccagagaccacaaattcctctttgaagttttctaacagcaacaatggtatttctgacttggctttcttgtatttctctcacgttaacaaaattggttcagcatctaccatgggctacatgctgagctacagagtttcgctctgtcgcccaggctggagtgcagtggcgcgcgatctcggttcactgcaagctccacctcccgggttcacgccattctcctgcctcagcctcctgagtagctgggactacaggcgcccgccaccacacccaggaatccaacttgctgtttgctatcacatgtgctatacgtgctgttgatgaaactgctaaaggggctgaatgtgactgacgtctttggaaggatgagacttagcgtgcctgtacagttgtgtccaaatgctgtcctcatctcccaatgaaaagggtttttccttaagcctcacaacaatttacagcattgccagcagcattcagtacattcagaacaggataatttcacccgcagctgaactagggccatgcctgggacagacagagaatggccttccagcagacatgccaagaaagaagaaagaagcagagaaaggaagagaaaagaaattacggccagtgcggtggctcacgcctgtaatcctagcactttgggaggcctaagcgggctgatcacctgaggtcaggagttcgtaagccagcctggccaacatggtgaaaccctatctctactaaaaatacaaaaatcagcagggcatggtggtgcatgcctgtaatccaagctacctgggaggctgaggtaggagaatcgctggaacccgagaggcggaggctgcagtgagttgagatcatgtcactgcactccaggctgggcaacagagtgagactctgtctcagaaaaaaaaaaaagaaagaaagaaagaaagaaagttaccattagttttttgttgtatttgcaagcaaagacaaaagcaccaaggtacttgtttccttctgtaattagagtttcaaatagactaaa

SEQ ID NO: 114039 - DNA, 258 bp, Homo sapiens
tgtgcttttcccctaaggttgtgagcaaggcaaaaatgtacactgccaccatatgtattcaacattagaggtccttgccagtgcaataactaagaaaaacaaataaaaggcatacaaattgaagaataataaagtgtctttaatttcagataacatgctcatctacatggattatcaaaaacaaaacaaaacaaaacaaaactacaaagaagctactaaaagtaaaaagtgagttaaggaaggctgtactatacaaaa

SEQ ID NO: 114040 - DNA, 454 bp, Homo sapiens
ggttagtctattcttcttgaatttcatatgcctcttcctgggtgggggtgaggatgggattttatggagttgaggctagggcaggtagggagaaaacatgagaaagatgaagagataagccaagccagattcttcagcagaaaaatcaaggttgaaataccatgtttcaaaaatcagactgaggtgggagttgaggttaggggtccctaggccaggggattgaagcttcaaagagataaaactagagcaaaagcaagcacagagagtggcagagaggtccctgggcatttttccacagtccattctagtgctggcaatccacctttcatggccaggcaggtaagagtatttgtggggtgggagaaaggacagggccataggctgggcacacagccctttactggcccttatctctcctctcttctcctatacagtgctgtttccgaactgtaca

SEQ ID NO: 114041 - DNA, 400 bp, Homo sapiens
gccagggatgagtcaggcatgactcatcaatatccccagcccctggtacagtgcctggcccagttcctggaccactgtaaaataaattcctgttgaatacatttggagccaggaaaaaatatgtatcttattttaacagctgtcatcagacttcattttaggaaaggaatcaagtatgaggttgaatgagcccaaattgtggaaatgaccatgggatatttaggtatagtaatatgtaacattgagatttccttttctgagctaaaattattccatacctacaagatattcacaatgtgaatgccttatgtaaatggttggactggtgaatgttaagaaaaatggctgagttctgtaactgagttaatggggtgcagaacagggaagacacgagcaacaa

SEQ ID NO: 114042 - DNA, 2037 bp, Homo sapiens
tccaggtttgttctggaaaacactaggtctgagagacagcaacaacaaaagtatactctaccattaaagaaataatgccgtatatgtagtagcacttttcaaagaaggaagaaaggtgggagtcatttccagggtaattttgacaagaggaactgtcattatgaacatggtgggtatgaacttctgccttcacgctgccaggagaatgatggaagcatggagatgagggatgtccacaaggaccgccaactaagacacactccttatagaatccaatgcaacaggaagctagtgaaatgacatagtgaagatcaaatccatattaccatttggagaaatagaaaacctccagagagaaaaatgaggcggaacacacaagatgaaaacatgaggaaatggttcaaggtcacaattccttatgggataaagtatgacaaggcatggctaatgaattcaatccagagcaattgcagtgtccccttcactccggttgatttccactacatccgaaatcgggcatgcttctttgtccaggttgctagtgctgcctctgcattgaaggatgtcagttataagatttatgatgatgagaaccaaaagatatgtatatttgtcagtcattttactgcgccctactctgtgaagaataagttgaagccaggccaaatggagatgctaaagctgaccatgaacaaacggtacaatgtctcccagcaagctcttgatctccagaatctccgctttgacccagacttgatgggccgtgacattgatataatcctgaatcgaagaaactgcatggctgccaccctgaagatcactgaaagaaatttccctgagctgttgtctttgaacttgtgcaacaacaaactgtaccagctggatggcctttctgacattacagagaaggctcccaaagtcaagaccctgaatctctccaaaaataagctggagtcggcgtgggagttgggcaaggtgaaagggctgaagctcgaagagctatggctagaagggaacccgttgtgcagcaccttctcggaccagtctgcctatgtaagtgccatccgggattgtttccccaagttgttacgcctggacggccgagagttatccgcaccagtgattgttgacattgacagctctgagacaatgaaaccctgcaaggaaaactttactggatctgagaccctaaagcatttagtcctgcaattcctgcagcagagcaacttgtgcaagtacttcaaggatagcaggaatataaaaattctcaaagacccctacctgcagaggaagctgctaaagcacacaaaatgtccacgaaacgtggactccctcagtgcattgcctgaaactcagcatgacttcacctccatcctggtggacatgtggtaccagaccgtgaacacctgcttcctccctcgggcaggcccagagagccagagtggaaggatggtctcagggttctgatcttgccttcatgtggaccttcatcactacctctggccgcaattccagtctgtgcatcatgaatgataagctgtttctgagggatgccagcccccaagagactcagagtgccttctccatcccagtgtccacactctcctccagctctgagccctccctctcctaggagcacaggaaatggtgcaggctttctctgcccagtctgggatgaaactagagtggtctcagaagtgccttcaggacaataagtggaactacattagagctggtcaggtcttcactatgctccagactgagggcaagatcccagtggaggccttcaagcaaatcccctaaaaggagccctttgatgtcatctttgtcttccttctcatcctctttgtttcctcttttcaccagcctaagaccactctaaggactggggttggaggcctggctgaccaagaagccaaagttaacttgcaggccacaggacatagccacctgaagagccagttgttctgtgtatttgccccactcatgatcaccgtttattttcataataaacagtgacgttacatgttgtatgtt

SEQ ID NO: 114043 - DNA, 1973 bp, Homo sapiens
tccaggtttgttctggaaaacactaggtctgagagacagcaacaacaaaagtatactctaccattaaagaaataatgccgtatatgtagtagcacttttcaaagaaggaagaaaggtgggagtcatttccagggtaattttgacaagaggaactgtcattatgaacatggtgggtatgaacttctgccttcacgctgccaggagaatgatggaagcatggagatgagggatgtccacaaggaccgccaactaagacacactccttatagaatccaatgcaacaggaagctagtgaaatgacatagtgaagatcaaatccatattaccatttggagaaatagaaaacctccagagagaaaaatgaggcggaacacacaagatgaaaacatgaggaaatggttcaaggtcacaattccttatgggataaagtatgacaaggcatggctaatgaattcaatccagagcaattgcagtgtccccttcactccggttgatttccactacatccgaaatcgggcatgcttctttgtccaggttgctagtgctgcctctgcattgaaggatgtcagttataagatttatgatgatgagaaccaaaagatatgtatatttgtcagtcattttactgcgccctactctgtgaagaataagttgaagccaggccaaatggagatgctaaagctgaccatgaacaaacggtacaatgtctcccagcaagctcttgatctccagaatctccgctttgacccagacttgatgggccgtgacattgatataatcctgaatcgaagaaactgcatggctgccaccctgaagatcactgaaagaaatttccctgagagaaggctcccaaagtcaagaccctgaatctctccaaaaataagctggagtcggcgtgggagttgggcaaggtgaaagggctgaagctcgaagagctatggctagaagggaacccgttgtgcagcaccttctcggaccagtctgcctatgtaagtgccatccgggattgtttccccaagttgttacgcctggacggccgagagttatccgcaccagtgattgttgacattgacagctctgagacaatgaaaccctgcaaggaaaactttactggatctgagaccctaaagcatttagtcctgcaattcctgcagcagagcaacttgtgcaagtacttcaaggatagcaggaatataaaaattctcaaagacccctacctgcagaggaagctgctaaagcacacaaaatgtccacgaaacgtggactccctcagtgcattgcctgaaactcagcatgacttcacctccatcctggtggacatgtggtaccagaccgtgaacacctgcttcctccctcgggcaggcccagagagccagagtggaaggatggtctcagggttctgatcttgccttcatgtggaccttcatcactacctctggccgcaattccagtctgtgcatcatgaatgataagctgtttctgagggatgccagcccccaagagactcagagtgccttctccatcccagtgtccacactctcctccagctctgagccctccctctcctaggagcacaggaaatggtgcaggctttctctgcccagtctgggatgaaactagagtggtctcagaagtgccttcaggacaataagtggaactacattagagctggtcaggtcttcactatgctccagactgagggcaagatcccagtggaggccttcaagcaaatcccctaaaaggagccctttgatgtcatctttgtcttccttctcatcctctttgtttcctcttttcaccagcctaagaccactctaaggactggggttggaggcctggctgaccaagaagccaaagttaacttgcaggccacaggacatagccacctgaagagccagttgttctgtgtatttgccccactcatgatcaccgtttattttcataataaacagtgacgttacatgttgtatgtt

SEQ ID NO: 114044 - DNA, 1848 bp, Homo sapiens
tccaggtttgttctggaaaacactaggtctgagagacagcaacaacaaaagtatactctaccattaaagaaataatgccgtatatgtagtagcacttttcaaagaaggaagaaaggtgggagtcatttccagggtaattttgacaagaggaactgtcattatgaacatggtgggtatgaacttctgccttcacgctgccaggagaatgatggaagcatggagatgagggatgtccacaaggaccgccaactaagacacactccttatagaatccaatgcaacaggaagctagtgaaatgacatagtgaagatcaaatccatattaccatttggagaaatagaaaacctccagagagaaaaatgaggcggaacacacaagatgaaaacatgaggaaatggttcaaggtcacaatatgtatatttgtcagtcattttactgcgccctactctgtgaagaataagttgaagccaggccaaatggagatgctaaagctgaccatgaacaaacggtacaatgtctcccagcaagctcttgatctccagaatctccgctttgacccagacttgatgggccgtgacattgatataatcctgaatcgaagaaactgcatggctgccaccctgaagatcactgaaagaaatttccctgagctgttgtctttgaacttgtgcaacaacaaactgtaccagctggatggcctttctgacattacagagaaggctcccaaagtcaagaccctgaatctctccaaaaataagctggagtcggcgtgggagttgggcaaggtgaaagggctgaagctcgaagagctatggctagaagggaacccgttgtgcagcaccttctcggaccagtctgcctatgtaagtgccatccgggattgtttccccaagttgttacgcctggacggccgagagttatccgcaccagtgattgttgacattgacagctctgagacaatgaaaccctgcaaggaaaactttactggatctgagaccctaaagcatttagtcctgcaattcctgcagcagagcaacttgtgcaagtacttcaaggatagcaggaatataaaaattctcaaagacccctacctgcagaggaagctgctaaagcacacaaaatgtccacgaaacgtggactccctcagtgcattgcctgaaactcagcatgacttcacctccatcctggtggacatgtggtaccagaccgtgaacacctgcttcctccctcgggcaggcccagagagccagagtggaaggatggtctcagggttctgatcttgccttcatgtggaccttcatcactacctctggccgcaattccagtctgtgcatcatgaatgataagctgtttctgagggatgccagcccccaagagactcagagtgccttctccatcccagtgtccacactctcctccagctctgagccctccctctcctaggagcacaggaaatggtgcaggctttctctgcccagtctgggatgaaactagagtggtctcagaagtgccttcaggacaataagtggaactacattagagctggtcaggtcttcactatgctccagactgagggcaagatcccagtggaggccttcaagcaaatcccctaaaaggagccctttgatgtcatctttgtcttccttctcatcctctttgtttcctcttttcaccagcctaagaccactctaaggactggggttggaggcctggctgaccaagaagccaaagttaacttgcaggccacaggacatagccacctgaagagccagttgttctgtgtatttgccccactcatgatcaccgtttattttcataataaacagtgacgttacatgttgtatgtt

SEQ ID NO: 114045 - DNA, 2062 bp, Homo sapiens
tccaggtttgttctggaaaacactaggtctgagagacagcaacaacaaaagtatactctaccattaaagaaataatgccgtatatgtagtagcacttttcaaagaaggaagaaaggtgggagtcatttccagggtaattttgacaagaggaactgtcattatgaacatggtgggtatgaacttctgccttcacgctgccaggagaatgatggaagcatggagatgagggatgtccacaaggaccgccaactaagacacactccttatagaatccaatgcaacaggaagctagtgaaatgacatagtgaagatcaaatccatattaccatttggagaaatagaaaacctccagagagaaaaatgaggcggaacacacaagatgaaaacatgaggaaatggttcaaggtcacaattccttatgggataaagtatgacaaggcatggctaatgaattcaatccagagcaattgcagtgtccccttcactccggttgatttccactacatccgaaatcgggcatgcttctttgtccaggttgctagtgctgcctctgcattgaaggatgtcagttataagatttatgatgatgagaaccaaaagatatgtatatttgtcagtcattttactgcgccctactctgtgaagaataagttgaagccaggccaaatggagatgctaaagctgaccatgaacaaacggtacaatgtctcccagcaagctcttgatctccagaatctccgctttgacccagacttgatgggccgtgacattgatataatcctgaatcgaagaaactgcatggctgccaccctgaagatcactgaaagaaatttccctgagctgttgtctttgaacttgtgcaacaacaaactgtaccagctggatggcctttctgacattacagagaaggctcccaaagtcaagaccctgaatctctccaaaaataagctggagtcggcgtgggagttgggcaaggtgaaagggctgaagctcgaagagctatggctagaagggaacccgttgtgcagcaccttctcggaccagtctgcctatgtaagtgccatccgggattgtttccccaagttgttacgcctggacggccgagagttatccgcaccagtgattgttgacattgacagctctgagacaatgaaaccctgcaaggaaaactttactggatctgagaccctaaagcatttagtcctgcaattcctgcagcagagcaacttgtgcaagtacttcaaggatagcaggaatataaaaattctcaaagacccctacctgcagaggaagctgctaaagcacacaaaatgtccacgaaacgtggactccctcagtgcattgcctgaaactcagcatgacttcacctccatcctggtggacatgtggtaccagaccgtgaacacctgcttcctccctcgggcaggcccagagagccagaggtggtggtgtttgttgtctctgaagtggaaggatggtctcagggttctgatcttgccttcatgtggaccttcatcactacctctggccgcaattccagtctgtgcatcatgaatgataagctgtttctgagggatgccagcccccaagagactcagagtgccttctccatcccagtgtccacactctcctccagctctgagccctccctctcctaggagcacaggaaatggtgcaggctttctctgcccagtctgggatgaaactagagtggtctcagaagtgccttcaggacaataagtggaactacattagagctggtcaggtcttcactatgctccagactgagggcaagatcccagtggaggccttcaagcaaatcccctaaaaggagccctttgatgtcatctttgtcttccttctcatcctctttgtttcctcttttcaccagcctaagaccactctaaggactggggttggaggcctggctgaccaagaagccaaagttaacttgcaggccacaggacatagccacctgaagagccagttgttctgtgtatttgccccactcatgatcaccgtttattttcataataaacagtgacgttacatgttgtatgtt

SEQ ID NO: 114046 - DNA, 1967 bp, Homo sapiens
tccaggtttgttctggaaaacactaggtctgagagacagcaacaacaaaagtatactctaccattaaagaaataatgccgtatatgtagtagcacttttcaaagaaggaagaaaggtgggagtcatttccagggtaattttgacaagaggaactgtcattatgaacatggtgggtatgaacttctgccttcacgctgccaggagaatgatggaagcatggagatgagggatgtccacaaggaccgccaactaagacacactccttatagaatccaatgcaacaggaagctagtgaaatgacatagtgaagatcaaatccatattaccatttggagaaatagaaaacctccagagagaaaaatgaggcggaacacacaagatgaaaacatgaggaaatggttcaaggtcacaatatgtatatttgtcagtcattttactgcgccctactctgtgaagaataagttgaagccaggccaaatggagatgctaaagctgaccatgaacaaacggtacaatgtctcccagcaagctcttgatctccagaatctccgctttgacccagacttgatgggccgtgacattgatataatcctgaatcgaagaaactgcatggctgccaccctgaagatcactgaaagaaatttccctgagctgttgtctttgaacttgtgcaacaacaaactgtaccagctggatggcctttctgacattacagagaaggctcccaaagtcaagaccctgaatctctccaaaaataagctggagtcggcgtgggagttgggcaaggtgaaagggctgaagctcgaagagctatggctagaagggaacccgttgtgcagcaccttctcggaccagtctgcctatgtaagtgccatccgggattgtttccccaagttgttacgcctggacggccgagagttatccgcaccagtgattgttgacattgacagctctgagacaatgaaaccctgcaaggaaaactttactggatctgagaccctaaagcatttagtcctgcaattcctgcagcagagcaacttgtgcaagtacttcaaggatagcaggaatataaaaattctcaaagacccctacctgcagaggaagctgctaaagcacacaaaatgtccacgaaacgtggactccctcagtgcattgcctgaaactcagcatgacttcacctccatcctggtggacatgtggtaccagaccgtgaacacctgcttcctccctcgggcaggcccagagagccagaggtgggtaggaggttgaggaggatcctgagcacctgagcgcttccttttcaggaaaggatgctctgcttttctgtcaacggagtgttcaaggaaggtggtggtgtttgttgtctctgaagtggaaggatggtctcagggttctgatcttgccttcatgtggaccttcatcactacctctggccgcaattccagtctgtgcatcatgaatgataagctgtttctgagggatgccagcccccaagagactcagagtgccttctccatcccagtgtccacactctcctccagctctgagccctccctctcctaggagcacaggaaatggtgcaggctttctctgcccagtctgggatgaaactagagtggtctcagaagtgccttcaggacaataagtggaactacattagagctggtcaggtcttcactatgctccagactgagggcaagatcccagtggaggccttcaagcaaatcccctaaaaggagccctttgatgtcatctttgtcttccttctcatcctctttgtttcctcttttcaccagcctaagaccactctaaggactggggttggaggcctggctgaccaagaagccaaagttaacttgcaggccacaggacatagccacctgaagagccagttgttctgtgtatttgccccactcatgatcaccgtttattttcataataaacagtgacgttacatgttgtatgtt

SEQ ID NO: 114047 - DNA, 584 bp, Homo sapiens
tggtgcgcatgcctgtcccagctactcaggaggctgaggttgggggattgctggagcccaggaggtcaaggctgcagtgagctgtgactgcgccactgcattctagcccaggcaacagaatgagaccctgtctcaaaaaacaaacccaaaaaccttacgtgaaacagttcaaaattacttacttcctaagttttcacaagaaatcagggttaacaattctgcatatggggtttataaagaaaagcaagatacttttttggtaaggaaagtggtaaaggcataaaaaggtgtgtggccaggccgcggtggttcacgcttgtaatcccagcactttgggaggctgaggcaggtgaatcacctgaggtcaggagttcaagacaagcctggccagcgtggtgaaaccccatctctactaaaaatacaaaaattagcagggtgtggtggtgcaggtctgtaaacccagctactcaggaaactgaggcagaagaatctgttgaacctgggaggcagaggttgcagtgagccgagatcgcgccactgcactccagcctggggaacagagcaagattccgtctcaaaaaaaa

SEQ ID NO: 114048 - DNA, 249 bp, Homo sapiens
tcttgattccagatgggactgggaagtcatccccatgaatggaaacgcaattaacagaccttactagcagggttatagcattttcatattttataatgtcacaacactgaagtgtactactttttagtttaatactgaatttttaaagcactcatcaatgtccgttatgtgcttgatgtaagtctccttttagttcaaagcagttaatgacattttgtcaattcgccattttctatagcctgaaatgca

SEQ ID NO: 114049 - DNA, 820 bp, Homo sapiens
gcgggttagttgttagttttccatttttaaagatttgcctaaggccagagaaacagaaaataaagaagcatgatgtagaatctgtttctccatatttataatttggatattttcttcaacacctcactataaccagcttagtacccctcctcccaacttactgcattaccagggatcactctgtagtaaatcactaaatcacttccttactaagttgtgcagttctaaaagcagagtatttttttttctcataaacaaaaaatccagtttttaagttgagattttcgttggttcccaggaaggatggaatgaatacaatattaagcattgatttagaaggatgaatgtcagctgaaatttaagaaacccctttgtaaataacccaggtctctataggagggtcgtagatagcattttatgtctttctgacctccaacctgaagtgaaacataaggcattgtgctcatgacttttgatctctccaagtctgacattcgaatcgattaccacaggaagctataaaatatttttctctagaggtattgcaaactaaggtaagaatttcagaagggaccaggctacaacttgaggatgaactgaatgacctcttgatattttctaagcatgaaaatgatttagtagcaaggtgtacaggtcttaagtgtacccagtgcaagcctcagaagtgacttgtctcaattcacaacttgtcttgatcttttgcagaacctaaaatttttccaaatgtgagtctggatggaacatgaggtagtgcagaatgattgaggaaagtctaacttataagtcaaatctataataa

SEQ ID NO: 114050 - DNA, 346 bp, Homo sapiens
gtgagggacacagtatgtgcacaacaaactctaagacttttaaacactttcaattatttttaaaaagtggggtaggagacaagtttctacccaatttttagtaataacatataagaaggggaaagcttttgaatttttaaaacttcagtattttaaaataatgcagtcactctcacacacaaattagtccatggtctttgataaagcaagacattaggtgtaattttgcttcaaatttaatacccacactcgttgacactgttggaaacactgaggctggcggtgggagggtgcaaagcacttgcttaggaaccagctgagaaatcctcactgatttctcagggag

SEQ ID NO: 114051 - DNA, 482 bp, Homo sapiens
cacgagggtccgcggcttcattgttgaagtcagtgagaccaagaacccaccaattccggacacaatattgaacatctgttacatttcagttttaaaaaagtttttgaagtttaggaattgttatcacatcagttttctgtgtaaatggttttgattggaattaaatttaaaataaattattgtgcttttttgcggtagttcctctaacatgggtaaatacgaccaaggcaagtatattctactgtggttgaagtaatgctgaagctgcagtttaaaaacattgtgaagaatgagaacaattattgcatgtggccgaggtattgaaggagttaaacctgtaccactctggcattattgacaattttgaattaaaggtacttaaaaaaacagcaggtgcaagaagatcattgtgacctcttttctacttcttaaaagcggaagatgaaattcctatgtgaaagacactttccctgtggaaagga

SEQ ID NO: 114052 - DNA, 1599 bp, Homo sapiens
ttcctcctaagatatatgacatctcaaatgatatgaccgtcaatgaaggaaccaacgtcactcttacttgtttggccactgggaaaccagagccttccatttcttggcgacacatctccccatcagcaaaaccatttgaaaatggacaatatttggacatttatggaattacaagggaccaggctggggaatatgaatgcagtgcggaaaatgatgtgtcattcccagatgtgaggaaagtaaaagttgttgtcaactttgctcctactattcaggaaattaaatctggcaccgtgacccccggacgcagtggcctgataagatgtgaaggtgcaggtgtgccgcctccagcctttgaatggtacaaaggagagaagaagctcttcaatggccaacaaggaattattattcaaaattttagcacaagatccattctcactgttaccaacgtgacacaggagcacttcggcaattatacttgtgtggctgccaacaagctaggcacaaccaatgcgagcctgcctcttaaccctccaagtacagcccagtatggaattaccgggagcgctgatgttcttttctcctgctggtaccttgtgttgacactgtcctctttcaccagcatattctccctgaagaatgccattctacaataaattcaaagacccataaaaggcttttaaggattctctgaaagtgctgatggctggatccaatctggtacagtttgttaaaagcagcgtgggatataatcagcagtgcttacatggggatgatcgccttctgtagaattgctcattatgtaaatactttaattctactcttttttgattagctacattaccttgtgaagcagtacacattgtcctttttttaagacgtgaaagctctgaaattacttttagaggatattaattgtgatttcatgtttgtaatctacaacttttcaaaagcattcagtcatggtctgctaggttgcaggctgtagtttacaaaaacgaatattgcagtgaatatgtgattctttaaggctgcaatacaagcattcagttccctgtttcaataagagtcaatccacatttacaaagatgcatttttttcttttttgataaaaaagcaaataatattgccttcagattatttcttcaaaatataacacatatctagatttttctgctcgcatgatattcaggtttcaggaatgagccttgtaatataactggctgtgcagctctgcttctctttcctgtaagttcagcatgggtgtgccttcatacaataatatttttctctttgtctccaactaatataaaatgttttgctaaatcttacaatttgaaagtaaaaataaaccagagtgatcaagttaaaccatacactatctctaagtaacgaaggagctattggactgtaaaaatctcttcctgcactgacaatggggtttgagaattttgccccacactaactcagttcttgtgatgagagacaatttaataacagtatagtaaatataccatatgatttctttagttgtagctaaatgttagatccaccgtgggaaatcattccctttaaaatgacagcacagtccactcaaag

SEQ ID NO: 114053 - DNA, 715 bp, Homo sapiens
  misc_feature (1)..(1): n is a, c, g, or t
  misc_feature (8)..(8): n is a, c, g, or t
  misc_feature (12)..(12): n is a, c, g, or t
  misc_feature (24)..(24): n is a, c, g, or t
  misc_feature (33)..(34): n is a, c, g, or t
  misc_feature (128)..(128): n is a, c, g, or t
nctagggncacnagacccaaactntttctgaannctaggagctgaggtggaggtctcgagaaagatctgtttagtgaaatgggatttaccctcggtgttgcatttgtgcatggatcacctctgtgacnggcgaatcaccctgatgagatgaagaactctaagtggattgagggaggcctttgactcatcccagccccacattggatattggacattatgttgttaagtgtttagattttgttttgttcccttaaagagtgttggattttttttaaacaggctcctgtatcacctgcaaattattttggtccattaaaccttgttattaagctttaaaggataggccaaaaagagtctttattctggcttttattcagccatacaactaaggcattagccttttggaatctccatcagtctctgcaaaaccatttgaaaatggacaatatttggacatttatggaattacaagggaccaggctggggaatatgaatgcagtgcggaaaatgatgtgtcattcccagatgtgaggaaagtaaaagttgttgtcaactgtaagtgtcatcaccttttatcaagataagttctgagaaaagataaaacaccttgaaaaattctgactgaaatttatgttgctgtttttaagaggttgtctattggtaaaaatcacctactaacactgaagacgtgtagatgttgaaatgttggttaaat

SEQ ID NO: 114054 - DNA, 1896 bp, Homo sapiens
  misc_feature (1)..(1): n is a, c, g, or t
  misc_feature (8)..(8): n is a, c, g, or t
  misc_feature (12)..(12): n is a, c, g, or t
  misc_feature (24)..(24): n is a, c, g, or t
  misc_feature (33)..(34): n is a, c, g, or t
  misc_feature (128)..(128): n is a, c, g, or t
nctagggncacnagacccaaactntttctgaannctaggagctgaggtggaggtctcgagaaagatctgtttagtgaaatgggatttaccctcggtgttgcatttgtgcatggatcacctctgtgacnggcgaatcaccctgatgagatgaagaactctaagtggattgagggaggcctttgactcatcccagccccacattggatattggacattatgttgttaagtgtttagattttgttttgttcccttaaagagtgttggattttttttaaacaggctcctgtatcacctgcaaattattttggtccattaaaccttgttattaagctttaaaggataggccaaaaagagtctttattctggcttttattcagccatacaactaaggcattagccttttggaatctccatcagtctctgcaaaaccatttgaaaatggacaatatttggacatttatggaattacaagggaccaggctggggaatatgaatgcagtgcggaaaatgatgtgtcattcccagatgtgaggaaagtaaaagttgttgtcaactttgctcctactattcaggaaattaaatctggcaccgtgacccccggacgcagtggcctgataagatgtgaaggtgcaggtgtgccgcctccagcctttgaatggtacaaaggagagaagaagctcttcaatggccaacaaggaattattattcaaaattttagcacaagatccattctcactgttaccaacgtgacacaggagcacttcggcaattatacttgtgtggctgccaacaagctaggcacaaccaatgcgagcctgcctcttaaccctccaagtacagcccagtatggaattaccgggagcgctgatgttcttttctcctgctggtaccttgtgttgacactgtcctctttcaccagcatattctccctgaagaatgccattctacaataaattcaaagacccataaaaggcttttaaggattctctgaaagtgctgatggctggatccaatctggtacagtttgttaaaagcagcgtgggatataatcagcagtgcttacatggggatgatcgccttctgtagaattgctcattatgtaaatactttaattctactcttttttgattagctacattaccttgtgaagcagtacacattgtcctttttttaagacgtgaaagctctgaaattacttttagaggatattaattgtgatttcatgtttgtaatctacaacttttcaaaagcattcagtcatggtctgctaggttgcaggctgtagtttacaaaaacgaatattgcagtgaatatgtgattctttaaggctgcaatacaagcattcagttccctgtttcaataagagtcaatccacatttacaaagatgcatttttttcttttttgataaaaaagcaaataatattgccttcagattatttcttcaaaatataacacatatctagatttttctgctcgcatgatattcaggtttcaggaatgagccttgtaatataactggctgtgcagctctgcttctctttcctgtaagttcagcatgggtgtgccttcatacaataatatttttctctttgtctccaactaatataaaatgttttgctaaatcttacaatttgaaagtaaaaataaaccagagtgatcaagttaaaccatacactatctctaagtaacgaaggagctattggactgtaaaaatctcttcctgcactgacaatggggtttgagaattttgccccacactaactcagttcttgtgatgagagacaatttaataacagtatagtaaatataccatatgatttctttagttgtagctaaatgttagatccaccgtgggaaatcattccctttaaaatgacagcacagtccactcaaag

SEQ ID NO: 114055 - DNA, 1181 bp, Homo sapiens
atataggcatatacagaaaaagagagaagaaagaccagtagaatgattaaaataagaaaacaagaatccctcagccagagtcccatccagaatctttaataaagcatggtaagctccaagtacagcccagtatggaattaccgggagcgctgatgttcttttctcctgctggtaccttgtgttgacactgtcctctttcaccagcatattctccctgaagaatgccattctacaataaattcaaagacccataaaaggcttttaaggattctctgaaagtgctgatggctggatccaatctggtacagtttgttaaaagcagcgtgggatataatcagcagtgcttacatggggatgatcgccttctgtagaattgctcattatgtaaatactttaattctactcttttttgattagctacattaccttgtgaagcagtacacattgtcctttttttaagacgtgaaagctctgaaattacttttagaggatattaattgtgatttcatgtttgtaatctacaacttttcaaaagcattcagtcatggtctgctaggttgcaggctgtagtttacaaaaacgaatattgcagtgaatatgtgattctttaaggctgcaatacaagcattcagttccctgtttcaataagagtcaatccacatttacaaagatgcatttttttcttttttgataaaaaagcaaataatattgccttcagattatttcttcaaaatataacacatatctagatttttctgctcgcatgatattcaggtttcaggaatgagccttgtaatataactggctgtgcagctctgcttctctttcctgtaagttcagcatgggtgtgccttcatacaataatatttttctctttgtctccaactaatataaaatgttttgctaaatcttacaatttgaaagtaaaaataaaccagagtgatcaagttaaaccatacactatctctaagtaacgaaggagctattggactgtaaaaatctcttcctgcactgacaatggggtttgagaattttgccccacactaactcagttcttgtgatgagagacaatttaataacagtatagtaaatataccatatgatttctttagttgtagctaaatgttagatccaccgtgggaaatcattccctttaaaatgacagcacagtccactcaaag

SEQ ID NO: 114056 - DNA, 653 bp, Homo sapiens
agtatcccgtggttactgcttgacgttcccgtgaagacatcgccctgcaccagggggtgggggagtgcgagctgaaagctgctggagagtgagcagccctagcagggatggacatgatgctgttggtgcagggtgcttgttgctcgaaccagtggctggcggcggtgctcctcagcctgtgctgcctgctaccctcctgcctcccggctggacagagtgtggacttcccctgggcggccgtggacaacatgatggtcagaaaaggggacacggcggtgcttaggtgttatttggaagatggagcttcaaagggtgcctggctgaaccagtcaagtattatttttgcgggaggtgataagtggtcagtggatcctcgagtttcaatttcaacattgaataaaagggactacagcctccagatacagaatgtagatgtgacagatgatggcccatacacgtgttctgttcagactcaacatacacccagaacaatgcaggtgcatctaactgtgcaagctccaagtacagcccagtatggaattaccgggagcgctgatgttcttttctcctgctggtaccttgtgttgacactgtcctctttcaccagcatattctccctgaagaatgccattctacaataaattcaaagaccc

SEQ ID NO: 114057 - DNA, 333 bp, Homo sapiens
ccgtgaagacatcgccctgcaccagggggtgggggagtgcgagctgaaagctgctggagagtgagcagccctagcagggatggacatgatgctgttggtgcagggtgcttgttgctcgaaccagtggctggcggcggtgctcctcagcctgtgctgcctgctaccctcctgcctcccggctggacagagtgtggacttcccctgggcggccgtggacaacatgatggtcagaaaaggggacacggcggtgcttaggtaggaagaacggcgtgcttttcgtacttgtttcggtctatctttctgtctctctttgaaccctctttgccttcttta

SEQ ID NO: 114058 - DNA, 1584 bp, Homo sapiens
agtatcccgtggttactgcttgacgttcccgtgaagacatcgccctgcaccagggggtgggggagtgcgagctgaaagctgctggagagtgagcagccctagcagggatggacatgatgctgttggtgcagggtgcttgttgctcgaaccagtggctggcggcggtgctcctcagcctgtgctgcctgctaccctcctgcctcccggctggacagagtgtggacttcccctgggcggccgtggacaacatgatggtcagaaaaggggacacggcggtgcttaggtgttatttggaagatggagcttcaaagggtgcctggctgaaccagtcaagtattatttttgcgggaggtgataagtggtcagtggatcctcgagtttcaatttcaacattgaataaaagggactacagcctccagatacagaatgtagatgtgacagatgatggcccatacacgtgttctgttcagactcaacatacacccagaacaatgcaggtgcatctaactgtgcaagctccaagtacagcccagtatggaattaccgggagcgctgatgttcttttctcctgctggtaccttgtgttgacactgtcctctttcaccagcatattctccctgaagaatgccattctacaataaattcaaagacccataaaaggcttttaaggattctctgaaagtgctgatggctggatccaatctggtacagtttgttaaaagcagcgtgggatataatcagcagtgcttacatggggatgatcgccttctgtagaattgctcattatgtaaatactttaattctactcttttttgattagctacattaccttgtgaagcagtacacattgtcctttttttaagacgtgaaagctctgaaattacttttagaggatattaattgtgatttcatgtttgtaatctacaacttttcaaaagcattcagtcatggtctgctaggttgcaggctgtagtttacaaaaacgaatattgcagtgaatatgtgattctttaaggctgcaatacaagcattcagttccctgtttcaataagagtcaatccacatttacaaagatgcatttttttcttttttgataaaaaagcaaataatattgccttcagattatttcttcaaaatataacacatatctagatttttctgctcgcatgatattcaggtttcaggaatgagccttgtaatataactggctgtgcagctctgcttctctttcctgtaagttcagcatgggtgtgccttcatacaataatatttttctctttgtctccaactaatataaaatgttttgctaaatcttacaatttgaaagtaaaaataaaccagagtgatcaagttaaaccatacactatctctaagtaacgaaggagctattggactgtaaaaatctcttcctgcactgacaatggggtttgagaattttgccccacactaactcagttcttgtgatgagagacaatttaataacagtatagtaaatataccatatgatttctttagttgtagctaaatgttagatccaccgtgggaaatcattccctttaaaatgacagcacagtccactcaaag

SEQ ID NO: 114059 - DNA, 768 bp, Homo sapiens
agtatcccgtggttactgcttgacgttcccgtgaagacatcgccctgcaccagggggtgggggagtgcgagctgaaagctgctggagagtgagcagccctagcagggatggacatgatgctgttggtgcagggtgcttgttgctcgaaccagtggctggcggcggtgctcctcagcctgtgctgcctgctaccctcctgcctcccggctggacagagtgtggacttcccctgggcggccgtggacaacatgatggtcagaaaaggggacacggcggtgcttaggtgttatttggaagatggagcttcaaagggtgcctggctgaaccagtcaagtattatttttgcgggaggtgataagtggtcagtggatcctcgagtttcaatttcaacattgaataaaagggactacagcctccagatacagaatgtagatgtgacagatgatggcccatacacgtgttctgttcagactcaacatacacccagaacaatgcaggtgcatctaactgtgcaaggtatgtattttcagaactgctatattgtgaaagactgtgcttagaaatatttaatatttaggtatcaaaatgactaggaagcagttaacaatgttgaaatatttgttgtcattgaaatatttgttgaattatattgtcatagttttcaggaatttacattcctagacatcagaaagtcattaagagtcatacagacagaatgaaaaagtcttttgactggctttcagttgaaacacacacgcgcacacacat

SEQ ID NO: 114060 - DNA, 145 bp, Homo sapiens
ctcaaaaaaaaagaagaaagaaacaggagtgaaaagttgagatgaccatgtgaagccagccaacctgaacaaaatgtaacttttgaatgataaggcacagctgagcggcccagactttgaattttctccaaatatcatgatcttc

SEQ ID NO: 114061 - DNA, 318 bp, Homo sapiens
tttttttagtagagacggggtttcaccgtgttagccaggatggtctcgatctcctgacctcgtgatccgcccacctcggcctcccaaagtgctgggattacaggcgtgagccacctcacccggccctaaaagaagattctaaagggatttgcttcaaattcacacctaatgaggattctccctgttttacactagaggaagcagagacacagagaggttttatggcttgctcaagctcacacagcaagtccgctgcagagctggaattccacccaggcagcctggccggaagcccaggcctttcacccctatgctaca

SEQ ID NO: 114062 - DNA, 503 bp, Homo sapiens
ggaaggccttgcagatggatgggccttggtcacaaaagcaacaggtaagagagtggctgtggacacagggtggtttatagatttgctgaggagtcaaggtgatttcccagctgataactcgaggggcagcatagcagagctaagtgaggctctgctcctttcggctgtcacaaggtccttctcggtggaaaataagggtgaggatgtagtaacaggaccactgcacgggtgtgctgtgaatgagttaacgtgcatcaagcatcaagaacagtgccagaatgtagtgggctcacatgtaaatagtcatcagtattgtgagttctgtgttctccatagaatggaaggtgaggtcatataaaggtaggtaaatcggaggtatgtggaaaatgcagactatatgacaggaacatggggagtgagaaacaataggctgccaggtatgctggccagagggcatgaccttaccatgcgcctgggccctgttcttggtgattctgtgcacc

SEQ ID NO: 114063 - DNA, 419 bp, Homo sapiens
accaggtcaagctcaccccaaactattaccttcgatgcatgtcttgtcataccctgtggagatctccaaagtcaaaagcaactctcagactcagagaagtatctctgcccctttaagataaaaggctccccctatcaagacccttgttccttaacgaatgcaggaaaacaggtctgccatagctggaatgatgttgtgtggacaactgaatatcaaggctggacctcgtcaaccggtggttgtatgtccttaaaaccatacattcacttcactaaagaaagtaccccccataattgccagtataaccaatgtaatccagtgcaaatttctattctcattccaacttctactgaccctaaacctactttaagttgcttatatggcatgggagccgaaatagcaggggcacatcttattgg

SEQ ID NO: 114064 - DNA, 778 bp, Homo sapiens
aatagtttcctcatctgtgaaatggggattataatggggtcgtttttcatagtaagtaagatgagccatggaaaagcacaatgccttgtgcagaatgagaatatttttatattataatattactatttattttatcgacaagtgtttaattagcacccattagggactgggcactattcttagctctggggaaaatagcagtgaacaaaatggacacaaatgtagaccttgtggaacttacgcttcagtgttgggaggagacattcagatgacaagtaaatatcacctggaatcccagttacttgggaggctggggcagaaggatcacctgagccagagttcaagaccagcctgggcaacatagcaagattcccatccctaaaaataccacacacacactaaggaaaatgtgttatctgttaagtggtaaaagtgctgtggagaaaatgaaagcagggaggggtgcctagatggtggtataatttaaagtgaggggtcaggatgggtttgcagaggaggtgatatttgagtaaagacctcaaaagggtagagaagggctccatggggatacagctggaaaagagctttggaagctgagctcatgtggaagccaaaggggagtgaaccagggttgttggaaaaccctggggccaggggtgaggccacaaggggccctgggcatgacatttagggaggtgcttgctttccagtacccactgcactcacgggtctctgagcacaggtgtgaaggagggaagagtaatgagaagagaaggtg

SEQ ID NO: 114065 - DNA, 369 bp, Homo sapiens
agacaaatgtatattaaacagtttgttgaaatgctttccaaagatcataaacaaaagcagcctgtttgtagcatagctcctggtgcttccctgggcatacacaaacagcactatttagaactggtcttcttggagctggcccctgccaccactgctcctgaagcttacatctgtagaaacctgcacatttccctgcaggttctctgatactgtatcttgaactagagcaccagtcagttcagttgcaggttttgagaacattttagctgccatcatggtagggctaagtgttcataataataaattttgcttccttcaagaaaccagtttgcagacggatgacagcagtgatcaaagtcactttagttt

SEQ ID NO: 114066 - DNA, 707 bp, Homo sapiens
cacccttcgtctcaagatgctgtaataaaggagttggctgagggttcagtttaatctcaaggatccagtttctgcagtttgacctcaaggactgcactttcagcagaggacctagctaggcagtgctcaaactcctgacccacaaaaataatgaatgtgacataaataagggtgtgttgcttacagccactatatttgtaggcattttttacacaacaatatatatctaatacagaagtattacagggttttagcagagagtcatccgtgttttaattacatagtgaattaatcactctggttgcattttgcactataagctctatgtggaagacaggagatcaactggagctctgatgcaagaatttgaaagtggcttacaataattcatagaagagcagtgcaagtgtctagaaatggctaaattctagatggatttgaaggaggagctgaaaggatttaggaatatattaaattatatgtgtgtgaggaagtgaggaatcaaatttttagtgcataggtaagtagaaagatgacagttgttattagcagagatggatgaattataaagagagcacacgcaaagagcagcatggtagattaaaattctagtatttaacatattaagttttattctttttctttaggtgtctagtggagaagtcaagtagctaggcagatatacatgcctagaattcagaagaaaa

SEQ ID NO: 114067 - DNA, 218 bp, Homo sapiens
gtcgcccctctctgggcacatcactggagaacttagagttctccaaactccctgctgcatagggatattgagtcatttgtttagactgctcagagcctgctattgggaaccccaggctggagaaagcacacagcaagaactggccaccataggtccagctctgagctttatttccagggaggagcctacctggctatattcagagaggggcggagcag

SEQ ID NO: 114068 - DNA, 735 bp, Homo sapiens
tagagacaaggtttcaccgtgttagccaggatggtctcgatctcctgaccttgtgatccacctacctcggcctcccaaagtgctgggattacaggcgtgagccaccgtgcccggcctgaaatatattcttatatttaatttaaattttgttctttgagtcttttcatcaatttgaaatttttgtaaatagcaaagaatctggttttgctttctcctggattgagagagagttattcaagtacattttcccactgaactaaatgccagctttgccttatattaaattctcaacatacctggacctatttccataccttgttctgcccacccctgtggctgcccccctgttacacttgactcagtggtttcacagggtctcaccctcaccttctattgctatgcttttcctttttttgtgtgtgctgtttttgaatatttattttgccatctaaaccttaaaattataattctgagtggaattggaatggatttttatttaattttaaaaataatttgcatttataatattgttcttctatccaagaacattatgtatgcctctccacatattcagattctgttcagattttaagcatggaaaaaagaaactcattttttacttatttatcttttatccagtgaactacataaattctcttattagtcatttgcttaatgactaagagaatcacttggatatctaagtatacaatagtatcatctgaaataattgta

SEQ ID NO: 114069 - DNA, 523 bp, Homo sapiens
aacagaaggaggcaacgcaatgttccagttctgaggctgagactcaagaagcggaacatggctctgccctcctttggaaacacggctggaacacttgggcttggccagaacaagcccaagtgagcctgtggggtgatgagaggcacgtggtcctggtgccccattcacagaggctgatccagtctgccaacctccaagaaccaagcatagccacatgagagaagaaccggccagctgagccagccagattgcctcctcaggtagatggtggtcgttgcatgccccagttctggggtggtttggacacagcagtaaagaagggacagagaaacagaagccggtgtctggtggtattgtcctccctctgttctggcttttccttgaatgtctgggcaatggcctctgagcttgaatgtcataactggagcttcccagccatcaagcaactatgagggtgaacacagacatcttgttctatagggcagataaactctgtttgtttatgcctggttttctgttactt

SEQ ID NO: 114070 - DNA, 335 bp, Homo sapiens
aacttctggccttaagcaatctgcccacctcggcctcccaaggtgctgataaacattttactgagcatgtacaatatgccagccacagggaatctacatgtgtacatcatacctgtgtgatgtacctctagaagtttgtagtctagaggaggcctgacatcccagcagcttctatggtggctaatgtaagaagccccacaaaagagggggatgattcattgtctacagaaatcagggaattcttcacagcagagtccaccctccagtggggtctgaaagagtgagtaagagatctctgcacagacgagatggagaaggaggcagtgttacttact

SEQ ID NO: 114071 - DNA, 309 bp, Homo sapiens
aggctctgacccaggccacagcgcggacacacctcgggaacgccatgctcagtgagagacgccagacacacgaggccacgcagcgtgtgatcccattgctatgaaatgtccaggacaggccgatccacagagacagggaggggatgcgtgggtgccggggctggggaggggacggggagtggctgtgatggggacggggtgttttgatggggtaatgagaatgttcggaactagacagtggtgatcgtgtgactctgtgaagagcctaaagtctcaaactgtacattatatctcacatacgcacgtgta

SEQ ID NO: 114072 - DNA, 922 bp, Homo sapiens
ctctctgggggtgattctgctctggagaacctctggtctggatatacctttattgtgacattgatttgtattgttttgctctactgacaggccttttccaatccatacaagctgaacttgcttcctaatgtttgtctaggccttacatggatagtaaggaagcttaggagacatgtacacaaggcagcccacttgtaggaaactgcttcaggtgaggacatcattcaccagtggatcaccgagcaccgtgacagcaccctcagtccacgtctgcagattaagagctgaactctcacagagaaagtggaagtagagaaagggttaattcaaactgctagaaaagctaaaagtaaattttaaaatgctgagctgcccatattcatgctaggatgagagccggcttaaatgcttgctgggcattttggtatttaccacttagcatgttttcaacttctgtgagggattttccccccaatctccctaatgtaaacacagatttctcagcaagtcatttctcaagccatgtcatttctagtgtaaaataaattataataatgtgtcatctgaatggtgttcttgtctgcaaacattagttatcctttgctaacagattctgagatgagagtctatcagtttggagccaatgtttagttttttttaaaaaaagttaaaaatacaactttttctctgatcaacaaagacctaaaaattcatcagtggcagaaaaaagttccaaggagctcctgtagactggggaggcctttcttcccagatagatccatctcctcaagcagcttgatttctttctagaatttttttcacttaaaaaacttctaatttttggttgataacaatttccatttttataaatgcagttatgctaacagaatgttatcctgacagttattaaacattagaagat

SEQ ID NO: 114073 - DNA, 429 bp, Homo sapiens
gataaagctgtaattagtatgctgtgttagcaggcaaatgaatatgagctgaagctctttggttatttaacagtgtgatgcagagtttcaatatattaaatttttctcaaaaggaaagtttgtaattttatataatgttcattccttgattcaataaccacttatgatgcactttctatatgtatggactgcatatgttatataaccaaaaactatattataatacatgaaatagcaagtctagagaaaaacatcattgtataataatagtaattgcatgcatgttttggaaaacattcaccagttttgccattcaggtataaatacgggatatttggggcatgtgcatgttatcatcatccctagctgtgtatggaactgtttctcaaacaatgcaacagtgactccttaatatattgtgtgaaccat

SEQ ID NO: 114074 - DNA, 534 bp, Homo sapiens
gcctcccaaagtgctgggattacaggtgtgagccactacacccggccttcttttttttaaattttattttactttagttctgggatacatgtgcagaacgcgcaggcttgttacatagggatacacgtgccatggtggtttgctgcacctattgacctgccctctaagttccctccccttgcctcccaccccccaacaccatatttatttttaacaaaagaaaatagaccaggcgcagtggctcacgcctgtaatctcagcactttgcgaggccaaggtgggcagatcacaaggtcaagagatcgagaccatcctggctaacacagtgaaaccccgtctctactaaatatacaaaaaaaaaaaattagccgggcatggtggcaggtgcctgtagtctcagctactcaggagactgaggcaggagaatggcgtgaacccgggaggcggaggttgcagtgagccaagatcgcaccactgcactctagccagggcgacagagtgagagtccgtctcaaaaaaaaaaaaaaagaaagg

SEQ ID NO: 114075 - DNA, 320 bp, Homo sapiens
aagtttgacccacagaaggaggaggtgataaggccttaggggcctaacactgccagattgtctatgcataccaaaaaggaaggacgacttccacgtttattttcttctttggaaattatagatttcagtttcaaacaaatggaacaccccctaattagcatggaccaaatttatcttcattttctctttgtggaggctaaagcaactccatcttggatgctaatccactgtgttgacttctgattaactccagttctaggaatgcctctaaggttactacttaatctactcttaagagcatgtacttgccgtaaatcctg

SEQ ID NO: 114076 - DNA, 725 bp, Homo sapiens
tggtcgtgaactcctgggttcaagtgattttttccaccttggtctcccagagtcctgggattacaggcatgagtctgaccaaaaagtttatttttgagggactggagagagatggagaaaactaaagaagagaggatgagtttgatttttatcatttcaagaaatgttgaacaattttctatgtgagtgaagagaggaggcatcagagatttgaaaagaatggagaatgtttgcaacctaagaaaataaaaaagtgtgaatattcaaatttgagaattgccagaggtaggaataactttgttattgtaggcaaaaaaattaatcagtaagccagggaagcaaacccatcaaaattgattgaagtttattttaacaatttttgtagcttctttttagaatcagatattatcaaacaagacaaaaatcacattttattcccttgtgtgctcatgttcaagaccaaacactttaagacatctcagaggtctgcaaagtcaaaatgatgatgatgaaaagtaataccataatcatttatggtatttgtgttaacatccaacagattcatgattgctattatatggatccatacctcttaaaaaatgtttcaagtttaatttctaatataatacatttcaatagttatacatgaacaacagctctccagggtccctaataagtcccaataaagaaaaggagtatagaggtgttttttttttgttctttct

SEQ ID NO: 114077 - DNA, 703 bp, Homo sapiens
gtttataagaaaccacgagaccgttttttcaaagtattattaccattttacctactttccaacaatgtgtgagagttcctgtttcatatccttggtaatatttgacgttgtcaatctttttaattttaggcattcagatgggtatgtagtggcatttttaaattttatttagagtttccatgataatcctaatggtgttgagtgtcctctcatgtatgtataagccatttatttcttcttatggcaagtgtctattcagatattttgccatttttggtgaattatctttttttattattgaattgtagatatctatatacttgtgtatatttttattatttttttaaaatctagcaggtaaccttatgcttaatacatattcattttattaccgctagaaactgggtcctggcaaaagttttttttttttaattatactttaatttctgggataaatgtgcagaacatacaggttacgtaggtatacatgtgccatgctgcacccatcaacccgtcatctacattaggtagttctcctaatgctatccctcctctatccccctaaccccaacaggccccggtgtgtgatgtttccttccctgtgtccacgtgttctcattgttcacctcccacttatgagtgagaacatgtggtgtttggttttctgttcctgtgttagtttgcagagaatgacggtttccag

SEQ ID NO: 114078 - DNA, 269 bp, Homo sapiens
  misc_feature (93)..(93): n is a, c, g, or t
tacaagcctggcaatgtggcgaaaccccatttctacaaaaaattagctgggcgcacagctgtagtcccagctctttggaaggctgaggtgggnaggatcatctgagcccaggatgttgagcctgtagtgagccgtgaaggcacgagaccctgtttcaaaaatatgtatattttaaacttagattgtagtagtagttgcatagctataatattactctatgagtattctaaagacttattaaattgtacactttaagtgggtgaattttg

SEQ ID NO: 114079 - DNA, 427 bp, Homo sapiens
tctcgctattcatcggcaccctagttctcaggatgagttactatctttgccagggagagatggtaaatcatgggaatggggcagggcacagccctagggcctcagagaagccacaggagtttgatgggaaggaggcagtaggcccctgggaaaagtgctcttcacttcctctccttttgcagtttggttttccaaggcctctgtctctgagggctcatggacacaagacctaaggatatctaccaaaagcaggtacctctgtccttttaattccaggggaacagggcccagagaaaaactcacggtagatattaaggaaaaggaaaatgcaatacagcccatctttatgttggagttaaacttgatgccccagggtattgttcccaaagacagatatttacatagatatctcatgtgcagatgaatg

SEQ ID NO: 114080 - DNA, 160 bp, Homo sapiens
tgctgagactacaggtgtgagccaccatgcttggcctgtaactgcttttgaggaaggctcctttatccttgggcccactggggtattccagagctttctgtctgtgtggatgagtggggtaagaactggcattaaaggtggaagagcaggtggtggcacc

SEQ ID NO: 114081 - DNA, 383 bp, Homo sapiens
tgctgagactacaggtgtgagccaccatgcttggcctgtaactgcttttgaggaaggctcctttatccttgggcccactggggtattcagagatggggttggctttagccttctatgctactagctgagcaccccactgcatagccaccacctggccttggcctgggacagagcagcagtggggaggggcctttgtgcatctctgctcctacagctcagggctgggagtggcttacactggggaatatgtgatccctgagcctgggtagtggctactttgtcagggtgcttgtccaacctttgtccccttccagagctttctgtctgtgtggatgagtggggtaagaactggcattaaaggtggaagagcaggtggtggcacc

SEQ ID NO: 114082 - DNA, 447 bp, Homo sapiens
acccacccttccaagcaggatctggatcatctggaaccctactcctcaagccactgcctatttgccatgaggggccagccctgacccctccctgtactgcagaccctcagatactgggctggccttgcattggccattctcctttctgttttgagtgaggcctgaagcccgaggtctgacaccaacctcctgcatgctgcctgtcccctgcctgggactcactgttcactgcaacacaggtgaaaccacaatcctgtctcccggagttgcctctcagttggcctggtgtgtcattctgggaaatgggacctatgaggaaatgcttggagacgtgttgggtgggtcattagtggtgtgcaagatcccaggtctgtgtgtgggaaggctcgttgctcccgatatgcggtgcctgtggccaacctggagcccttgtcctcatcctgctgg

SEQ ID NO: 114083 - DNA, 5645 bp, Homo sapiens
  misc_feature (4257)..(4257): n is a, c, g, or t
ccgaggaggacgtgactcggagctgcctccgctttctccaagccatattcctttaagatgatgtaatagtcatttccctggatggtttcttgcctgcactgctgaaacaacagcatccgaactgcactgggaactgtggaaccacccagctccgccgccagagaagccggagccccgggccccccgccggcatctctgcgctgcgttggcctctggctcgcaccggctcccacctggctgggaacatgggagtccgtttgcccttgccggcaggtggggtggctacctgggaccctagcagggcacatctctccatctttctgcttctgggctttctgaaaagcttctaagtcctggtacctcttgcaactctcttctaaggatcctttccaaagatttctttttccatttttcttttcccctggggaagctttggttgaatattttctctgctttacttcttcaacccaacctcctctcatcagggcttaactttttttgcgacttgttttaacttaagatacggaatgaacacatatgtacctacatacatacataaatacaaataggcatttatataaatgcatatatataatagttattttccaagagcacacctctctggcacttttcattgatacctcggtcgtttacctgtttgggatttgacaagatccagactcagtttggctgtggattttgattgctttacaaatggttattattatttttttcacaagaactgggtctccagcactcactaagacggacatctgagtaactggggaattggcctgccttgcatgtgagcttgatggaagattggatatagacgagttgattatattttatgaagtagcagctcactaccatccaccatccagggtttaaactactttttcagcatcacttcacctgtggactcttatacattttgatttcttgggggaaaaatactgggataagaggaggtcattttttaataagttagcatccttttccctttcttacaagttgatccaaaggataaggctgtgactccattggattgcacctttaaatcaaaatagcagcagcagaagaaagggacaatggctctgagtggaaactgtagtcgttattatcctcgagaacaagggtccgcagttcccaactccttccctgaggtggtagagctgaatgtcgggggtcaagtttattttactcgccattccacattgataagcatccctcattccctcctgtggaaaatgttttccccaaagagagacacggctaatgatctagccaaggactccaagggaaggtttttcattgacagagatggattcttgttccgttatattctggactatctcagggacaggcaggtggtcctgcctgatcactttccagaaaaaggaagactgaaaagggaagctgaatacttccagctcccagacttggtcaaactcctgacccccgatgaaatcaagcaaagcccagatgaattctgccacagtgactttgaagatgcctcccaaggaagcgacacaagaatctgccccccttcctccctgctccctgccgaccgcaagtggggtttcattactgtgggttacagaggatcctgcaccttgggcagagagggacaggcagatgccaagtttcggagagttccccggattttggtttgtggaaggatttccttggcaaaagaagtctttggagaaactttgaatgaaagcagagaccctgatcgagccccagaaagatacacctccagattttatctcaaattcaagcacctggaaagggcttttgatatgttgtcagagtgtggattccacatggtggcctgtaactcatcggtgacagcatctttcatcaaccaatatacagatgacaagatctggtcaagctacactgaatatgtcttctaccgtgagccttccagatggtcaccctcacactgcgattgctgctgcaagaatggcaaaggtgacaaagaaggggagagcggcacgtcttgcaatgacctctccacatctagctgcgacagccagtctgaggccagctctccccaggagacggtcatctgtggtcccgtgacacgccagaccaacatccagactctggaccgtcccatcaagaagggccctgtccagctgatccaacagtcagagatgcggcggaaaagcgacttactccggactctgacttcaggctccagggaatcgaacatgagcagcaaaaaaaaagctgttaaagaaaagctctcaattgaggaggagctggagaaatgtatccaggatttcctaaaaatcaaaattccagatcggtttcctgagagaaaacatccttggcaatctgaacttttaaggaagtatcatctataagggagggctgggggcgggaaaagaaaaaaaaaagtcattttgaaattaacctcctaaaaggaattcatattttaaaggaaaaaaatacaactaatgatgcacatttcttagaacacaatagtccattgatatactactgcctactttacctagttcaccttaacatgtaaatccacagggtagatttctttctagatgtggaagtacaagaaaatcttttttagttatttgtttgtttacttcgtcccatgtgctaactatcttatatataatgagagccagctacgtaaaagtagctgagaggccttgggagtcatttatcccaaactgggttttttctctcatccttctacctccctcctttgaatgagggtatggtagaaaaagatctggcccaatggcataagtttggaatttttaattttggtttttccttttgtttatggggttggggggaatggcagatttatatgacttttcactcaaatctatatgtgccagtttatattgactccgtatgcatgagtatttgtgcaacacaagcacaactaagtatgtatatacacatgacgcacacgatgccagggcctagacctcccaagggctgtgctcctgctcccagcagccctctcttagaatatttcagatggatgagcttctgactctttcttaaaattcttttgggaagatttcccagcctttcttcacaacactttctaacatcaaatgactctcatcatcaacaaattgtattccttattgtgaaattaataccctcaggctccattttactgctttgctctttgtctgcattaagagaggatgaggagagctggtcaaacattccttgtgttaaaaaaatcaaacattcatatccacaaaattttctgctaaatgactccacactcagccttctctaccctgaattgaattatcacccttttctccatgttttcagagttcttactgcccacagtttaatggtgtggcctttccacataatccacattaagttctgtgttcctgtgttgttgtggaactaaggacaacacacagtacttgaataagggtccggccttttgtttgttttagagaaagttgtattccacacacaacctaataatttcttataaaaattttaaactacaaagctacatttttacttgcttgtagccgtttttgtttgcctttgggattcgggctttggctgtgcccatgctaggatttagctgtgtcatttttatgatgtctgtaacaacccaacaaggtaactgaagctccagagttaaggtttcagatttctaaatgaaactatctttttcaattacatcctgacttgtatagacacagccagaaagaaactgttaatagccatccgtccatgtaactctgtattttactaagataccaatagctctttcatagacttgtgctacaagaaggttaaaagaccagttttattttcagcattcctcatgcatttcagtggtaaccaaaaaataatttgtcaattaatagttgtgtgccaagcactcctaatttgttttattgcgtgtgtgtgcatgtgtgtatgtgtatcacaggtaataaaggcaattggatgatatctgtaggaggaaaacaatgactaatttcttccttttgaaatctttcattgatgcacatttattatgtaagatgttctgtcttgatttctgttcttagtgatgattagtatatgaatatctttctgaatttttgtaattctcgccttcacactaggatgacagactcagctaatgtttccttgtcctgaaggtttgaatggagttgaaagttttacataagtgaaaaagaaagtttatcttgggagttgagttgtcaagagaattataatttntgaatttaagtggtattcttttctgtattaatatattagcagatatttgatcttaactacaacatagctttgtttgtaaacttaccagtatgtcttcattcttttcaatgtttcttgatagcacatggcaataccatcatcctaataacagaagatcttgcaaagaatcacagagcttaatgggtcaagaagttgaatttggggaaaatatcctgaaactcactttggtcaaatgattattgtgttgtcactggaagtactgtcaaagactttgggggtctaactaaaatggccaaagttccaacttccttaaatttcagacctgactgtaatggcctcaagatagagagatacccttgtaagagtaaagaattaagatgatagtcaacccaatatttctactacattctttaaacaggaaattaaacactgcaaaaggagtgttcgtggcagtgttcctctgacccctgacctgtcatgagttttctctgctctgacattccttatacatccagtgaacaaagctggaatagaaaacctgtttaaaaccatcacaacagcaatatttttattctgggccacctctcgactggcactcatcccatggtaaaatattcaagtaactaagacaacagcatggcatttatttgtgtgagtgtttatatagaaatgaacatagacctggccagtaaaaggctgtgaggaggcttaaagtacctagtttgagtggagttatcaagtgaggtccaggtagcctgcaacactggaaatgagttctgggtaagtgagttataagagtacatgctctagtaactctggtagtcactgtgactcgggcatgtttccctgaagttaaaatagtttttagaactttttgtttaattctgaagaaaacaatatatatggtttacttctcgaacattggttatgacaagggccataaattgctaatataaagaagttagtagtatcgagtggatacaatgaatggggaatcacatgtgtagagccccaacttagattgccttctgggaaatcccgcgatactaaaatccagtgagctttgggagatcattccctaaaggtatgtgggttgtctgaagtcagaaacatatttacaaagtccttctacccactatcaaaaatgaactgatctgcattcagcaggaaaaggggaagacaggaatgtaaaactactagatcatatggtattgtgattttctttcccctgctaggaaaaaattgcactgaaatgctgacaaaaaataatgaaatgaagtggcttccaaaatatgcactgatgttatcctttgtatttataggcacagttatcttactgaaaatgcatgcatggtgaattaaaataaaagggggaacaatgcacaaat

SEQ ID NO: 114084 - DNA, 387 bp, Homo sapiens
aggctaacaatatgcagttccgtactttctcgaaatgctggacagcggcagcaagcaaaacctcccagtcagccaagtgatcatgagggtaaacaaccaatactctacaatgtaactgtgatgccagcattttttggatatagtgttttttggttttccatcccatcatgtctacaaaacacccagtcttgacttacaatgcttttaacttatgggtttctcaggacataaccccatctaagtcatggagcatctttatatagtctgtcttagcctgagtttcccagaaagtagaagtttagacaaaatcctgaatgcaggatttagttggtgaagtgatcctgaggagcagattaaaaatggggaaggaaggaagaaaaatacaaa

SEQ ID NO: 114085 - DNA, 422 bp, Homo sapiens
tctcaaccttccataagaacccttagcactgaggcttgatagggagctctgtcgtcttcaggcaaaacttcttagaattcatcccaactgattactacatccaggtaagaagacttattggatgagaaatgtgtgctggggatgttcttccagttcttgctaacagatgtggaatggttactgctaaagactcataaccttggcagctctgcaagaactcagcctgtgcaaatgtgggggaaagagattctcatccatatgagattttccatggattcataatctgagactgcttgctgaaacaaatgatctgttcgatgccacttgggggtagcagttttaatcatatgagaaaatggtggctgacagtgaaatctgaaccaggagtacagagctccctgcatcccccacaccttccccca

SEQ ID NO: 114086 - DNA, 272 bp, Homo sapiens
tccacagatgccttgtgggaaagttacaacaatcctcaattctttgacaacagaattgatccatgcccagctgtccaaagcttccatccagatgtgcactccagcattaggttcacttgctaacctttttttcattaactgcacagtctctgcaggtaaataaacctcaaaatattttagccatctgttgttccaatggctcctgggattggaaacatggaaatctccgaaactacttgagtgagcacaggcaactttatggctatgtggat

SEQ ID NO: 114087 - DNA, 841 bp, Homo sapiens
gtatccagcatctacaaggaacttaagtttacaaaaaacaaatgaaccctttaaagtgtttgcaaagaatgtgaccagattcttttcaaaagaagacatacacgttcttcttttgagaattgtcttctcatgtccttagcccactttttgatgggactgtttatttttgtcttgctaatttatttgagttcattgtaggttctggatattagtcctttctcagatgtatagattgtgaaaattttctcccagcctgtgggttgtctgtttattctgctgtttcttttgctgtgcaaaagctctttagtttaattaagtcccagctatttttgtttttattgcatttgcttttgggttcttggtcatgaaatccttgcctaagccggtgtctagaagggtttttctgatgttatcttctagaattgttatagtttcaggtcttagatttaagtccttgatctatcttcagttgatttttgtataaggtgagagatgagaatccaatttcattctcctacatgtggctttccaattatcccagcactatttgttgaataaggtgtcctttccctactaaatgtccaaaaaacatgtgaaaaaatgctcagcatcactaatgatcagggaaatgcaaatcaaaaccacaatgcgatattaccttactcctgcaaggttggccattgttgttggcctggatgactattggtaggaatgtaaactagtacaaccagcatgaaaaacagtgtggatattccttaaagaactaaaagtagaactactgtttgatccagccatcccactactgggtttctacccagagaaaagaagtcattatacgaaa

SEQ ID NO: 114088 - DNA, 686 bp, Homo sapiens
gtggggagagtggctgcaggtggcctggttggggaaggtgtagacagggaaccagcgaacagttgagaatgcatgcctgccaagcgaccaagagtgagcagtggacagatattcttctacgtcggtttccacaaaggacctctttcagtaactgccctggggtccccgtgacccctccagtttccctgacttgctaggagagctcccgggacttaggatatggtcctgtcactgctatgactcattgcaatgagaggtgcatggcgaagtccaggaacccctcctcagagtcacatgggaggctgaatttcccagcacatgctgtgaccccatgtgtgacatgctgtctgttagggaggctcgttagagacccttcccagggctttactcggggctggtctcataggctgcctcgcttggtgccaccaagattccagccttcagaggaaaggcgctgttctgcacagaccatgtggtgctcacagctgttccggcacagcgaaccaccctcccggttagggcatggtgggtgggagcactctggaaacccgcattcccagaccacaccccgggacctagctcaccacaggcctgcctaagagtggacggctccaggctgcagtgtgaactcttttctgcacaattactaagaggcaggaaagtcataaagacgttggtgaggaaaa

SEQ ID NO: 114089 - DNA, 735 bp, Homo sapiens
ccctatactcccataattccttaagctgtatcagttcatgaagtcatttgtattaatagtcaatttaaaatgttagctcttagattaaattagtttagttagttggtttgttcaaaacaggaaattgctggtaggagagaggggttgagagaagcatgggatgagactaagagtttaagaactggaaaaaatgaggaaaggtattttggagtatatgacatttcagagaataaacaacttgcaagggacaaaggacaattcagtggagaatgagagtgaggtttggctggcccagtggggattagggtatataggcagccaggttggagtagttagtcctggtacagatgaataatatcactgatgaccagctcagaatgcacattccattggtggtgacccaactgcaacagcataattaaacaaaacaaaacaaaacaaacaaacaaaaaactaacgaaacattatttcttttcaggtggatctcttctggtttagcaaggaagaaaatatttctcagggtttatacctgcttgcaagttgggaattccagaaatctcttactttctagaccagtgcagtaccctattttgaaaaggcagagggattaattttcaaatttatgtgtttacactggtttgatttcaatggccccagggtgacttgaataattgaaaagtaatattgttcctagaaacttttggaagacaaaaaacattaaaaaaatattttgac

SEQ ID NO: 114090 - DNA, 424 bp, Homo sapiens
gtccgaaattcccgggtggtctactactattaaattcgcggccgcgtggacgtatttcgacataatcagcaagtaaaatactaaattactctgacaatgctatcttatgaaataaaaggtgatacaaatgtgtaaataacagcccagtatccagcattgcctacatagtgatcaaatttttgcagcccaacgtttcagtgggtaagatgtgcaaaaacaaaataagagatagcaaaacccacaaaacagcccatgaatctgaatgcttgaattatggtcatgaattcagctcaatcttgagcagtgaggccaaactgagaggtgtcctgacttgagtttcgaagtcacggaagattcagagcaggagacagacattcagagctggagtttaggatgttagatggcagcgtcgacggctggaggt

SEQ ID NO: 114091 - DNA, 385 bp, Homo sapiens
gatcattctcattaattttacttgttgattatgttgaaatactaaattactctgacaatgctatcttatgaaataaaaggtgatacaaatgtgtaaataacagcccagtatccagcattgcctacatagtgatcaaatttttgcagcccaacgtttcagtgggtaagatgtgcaaaaacaaaataagagatagcaaaacccacaaaacagcccatgaatctgaatgcttgaattatggtcatgaattcagctcaatcttgagcagtgaggccaaactgagaggtgtcctgacttgagtttcgaagtcacggaagattcagagcaggagacagacattcagagctggagtttaggatgttagatggcagcgtcgacggctggaggt

SEQ ID NO: 114092 - DNA, 1073 bp, Homo sapiens
tgaatcggttcccgggtgatcctcgcgcctgccgctgctcggccgccgccgctgacgaggagctgcagcgcgccgggccgaggcctcgagccgccccgggagctggagctgaaggcgccgcgcggagcgcgcacctcagccctgagcccggcggcggcaggcgtcgctgtcttttctccttttccccaatatggcagcggcggacggcggcgggcctggtggggcctctgtggggactgaggaggatggcggaggcgtcggccacaggacggtgtacttgtttgatcggcgcgaaaaggagtccgagctcggggaccggcctctgcaggtcggggagcgctcggactacgcgggatttcgcgcgtgtgtgtgtcagacacttggcatttcacctgaagaaaaatttgttattacaacaacaagtaggaaagaaattacctgtgataattttgatgaaactgttaaagatggagtcaccttatacctgctacagtcggtcaatcagttactactgacagctacgaaagaacgaattgacttcttacctcactatgacacactggttaaaagtggcatgtatgaatattatgccagtgaaggacaaaatcctttgccatttgctcttgcggaattaattgacaattcattgtctgctacttctcgtaacattggggttagaagaatacagatcaaattgctttttgatgaaacacaaggaaaacctgctgttgcagtgatagataatggaagaggaatgacctctaaacagcttaacaactgggccgtgtataggttgtcaaaattcacaaggcaaggtgactttgaaaggttagaaaaccttacttttttttttttgtgggtagctatgtattttagtaaggataaaaaactggtatgcctttggatgcatatgatacattggaggttttactgttactcacatatttatttaggttttatattatagaatttttatgattgatactcagaaatagaactatgtaatattgtgcctttccattaaacagctcattttgcatttcctgaggtatgtaggagttgatatgttgggt

SEQ ID NO: 114093 - DNA, 687 bp, Homo sapiens
tttggttttttgtaatcttctactttcccttaacagtacattgttaacgtgtcatatcatgaatgttctgcaatataatctgttgttgcagtgacttattggctataatataaattgtgtagtttgtgttctgttgttgaacatttagattttttttctgtatttttgccactggaaggaatgctggaatgatgaacattcttgcacaccttggtacatgtctctgaatatttccttaagttgaattgtgagaaatggaatttctaggctaaaggacatgaagaattctgaggcttttgatacatactgctgctgaagtgcctttcagaaaattgtattaatttgcacttccatcagtaatgtataagtgagcctgttgaatcatttttttcatgtttaacttttcatgttttaagtattgatttgacttttcctgtctttttgaacttattttgtttcatagctttttgatgaaacacaaggaaaacctgctgttgcagtgatagataatggaagaggaatgacctctaaacagcttaacaactgggccgtgtataggttgtcaaaattcacaaggcaaggtgactttgaaaggttagaaaaccttacttttttttttttgtgggtagctatgtattttagtaaggataaaaaactggtatgcctttggatgcatatgatacattg

SEQ ID NO: 114094 - DNA, 1361 bp, Homo sapiens
tgaatcggttcccgggtgatcctcgcgcctgccgctgctcggccgccgccgctgacgaggagctgcagcgcgccgggccgaggcctcgagccgccccgggagctggagctgaaggcgccgcgcggagcgcgcacctcagccctgagcccggcggcggcaggcgtcgctgtcttttctccttttccccaatatggcagcggcggacggcggcgggcctggtggggcctctgtggggactgaggaggatggcggaggcgtcggccacaggacggtgtacttgtttgatcggcgcgaaaaggagtccgagctcggggaccggcctctgcaggtcggggagcgctcggactacgcgggatttcgcgcgtgtgtgtgtcagacacttggcatttcacctgaagaaaaatttgttattacaacaacaagtaggaaagaaattacctgtgataattttgatgaaactgttaaagatggagtcaccttatacctgctacagtcggtcaatcagttactactgacagctacgaaagaacgaattgacttcttacctcactatgacacactggttaaaagtggcatgtatgaatattatgccagtgaaggacaaaatcctttgccatttgctcttgcggaattaattgacaattcattgtctgctacttctcgtaacattggggttagaagaatacagatcaaattgctttttgatgaaacacaaggaaaacctgctgttgcagtgatagataatggaagaggaatgacctctaaacagcttaacaactgggccgtgtataggttgtcaaaattcacaaggcaaggtgactttgaaagtgatcattcaggatatgttcgtccagtaccagtgccacgcagtttaaatagtgatatttcctattttggtgttgggggcaagcaagctgtcttctttgttggacaatcagccagaatgataagcaaacctgcagattcccaagatgttcacgagcttgtgctttctaaagaagattttgagaagaaggagaaaaataaagaggcaatatatagtggatatattagaaacagaaagccctctgattctgttcacattacaaatgatgatgaaagatttctacatcatcttatcatagaggagaaggaaaaagatagctttactgctgtggttatcacaggggtacaaccagaacacatacagtacttgaaaaattatttccacctttggacacgacagttagcgcatatttatcactactatattcatggcccaaaaggaaatgaaatacgaacatcaaaagaagttgaacctttcaacaatattgatattgaaatttctatgtttgaaaaagggaaggtacctaagattgtca

SEQ ID NO: 114095 - DNA, 675 bp, Homo sapiens
gactggcttttcactatactcttgtgttctctgatgcacagaatttttacatttttatgtagcctaatttatctactttcacttttttgcctatgctttctggtgtcatagccaaaaaatcattatcaaatctagtgtcatgaaccttttcccctatgtttccttatagaagttttatagtttgggtcttgtgtttaggtttttgatccattttgagttgatttttgcatatcgtgtaagattagagtccaactgctttcttttgcagtatccagtatcttttgcagtatgttttgttggtacccagctctcccaacaccatttgttaaagaaaaaaaccatacagatttaagggaaactcagaccacatagctataaacctggagttcctctcatactttggtccaaaccataatagatttagaaagaatcacgactaaagttctcaactgggggctcttttctcctggcgagaacatttagcagtaggtggggacatttttggttgtcacatcttggggtgggagtgggggtagcagttgttactggaatctagtgagtagaggttacgaatgttgctaaataccctgcaataaacagctccctaaagcaaagaagtatctggcttcaaatgtcagtagtgctgaggttgaggaaccctggcctagagtatag

SEQ ID NO: 114096 - DNA, 667 bp, Homo sapiens
tagaaaccgaagctgccaggccaaagtgttatgacaagtatgggccagtgaagggtcacaccaggaacaggtggagagtcacttctgccatattctgtgagtgcatctgtcacaggacctacacagattcaaggaggtggagaaatagactgtactcttgatgggagagtggcaattctctgcagcctgtcatgagggatccactcccacggcccaaacacctcccagcaggtcccatctccaacactggggatcaaatttcaacatgagatttggggaggacaggtatccaaactgagtcaactggtctcattgtcaagagtcctgagttctatagtgttcccgcaacacacacattgctgttttctgtgtgaccctgacaattcacttaacttctctgggactttaatatctgatttgtaaaagggaggctatctggcccttctcatagaagtgttacgacaattaatgaggttataataataaaaggacttggcagagggtgagagtgagtattcatttttaaggaggatgttaattttgagaaatacccaatctgtgagctatttaaatatctagaagtaccaaggaactaaacatggctccatctttccagtgttcatcctgtaacccagtgctatggtttgaatgtggccttcaaaaccca

SEQ ID NO: 114097 - DNA, 104 bp, Homo sapiens
attgcttacgaagaaatttagaaaatatgcttcattgagtgataatgagaatataactttgtaaatttgtggaatgcgcctaaggtattgcttagagcaaaatg

SEQ ID NO: 114098 - DNA, 134 bp, Homo sapiens
tcaaaagagtgatggtgtcattgatagagagatacagcctgctgaagaggggcaggagctttcagcgtggagggtaaggttggagaggagatcctgagtttgcttctagatgtgatgaatttaaaatgatggta

SEQ ID NO: 114099 - DNA, 421 bp, Homo sapiens
tgcctgtgtcatgggcttcatgaagaattccagttactatctgaaagtttaattgcaaggtttggagctcaagatgttacttatcctcatgggcagtacctgttacttccccactgtaaaatatgctagctcaggtcacaaggaactttgagtgctaggatagtaccccacggtccagttccccagaacttcttcccagtgtctccacagccactcacacagcctgagcaggtcttgccactggcagctctcttcccctacttcctccaggccaggggttggcctgattctgcttagagcctgcatgcggctccctcagagccttggggtggccaatctttgctgcttcccagaaccaccttgtactcttccatgcagagccctgttgagtcaccatgccttcctccagctgctgccacag

SEQ ID NO: 114100 - DNA, 397 bp, Homo sapiens
gagaaacatttctgggtaggttaatttattaacactataaggcatggtaggcatggtaaaggaaagacaacccctgccttcatagagctgacagtcctcctgggatatcggatggacagatgtgaaacaattagagaaggacaatttgctaaacttataggggcatgatagaaattctgagagggaagaaacccacatgaactggggtagtgagaacatgcttcctggaaggagtggatatggaagaacactgtgaaggatttgaggggaggcacaaaagagcgtgttttgggggcaatagggagaaggcccagtgagttggagtacaagagagttgcttggatatgccaggaatacttcacatgtgatcttctaagggagtgttgaggaacatggg

SEQ ID NO: 114101 - DNA, 478 bp, Homo sapiens
ctgtagctgactctagaggatacactcgctattcatctcacccatggaaatttgaaaagatcaaaaatatcaatgcaggccacatatgctcatggttttagacaaaaccaaaacttcaggaaagttttcagatattaaagctacagcaggcagcaggaagtctttaagaggtgctggtgatgagaacccaataaataaattttaaaataaagccagaacagaaacactgagttgagacagttcctgcatgagcccactttggctgcgaaacgccaaggccaccaagtaattgaccttgctcttttttttcataggtttttgtggaacaggtggtgtttgattacataagttctttaatggtgatttgtgagattttggtgtagtcatcacccaagcagtatgccctgtacccatgaccttgttcttaattctgtacatagctcgcccttctgcctactacagtcggtgtcctgttctc

SEQ ID NO: 114102 - DNA, 726 bp, Homo sapiens
gggacaacttcaaaacaacgctggtgctcattctgtgtaacttgaagacaaggactgtgccacgctgcactggctttggtatgtggggaagtaggatcccccaggcaggagggatacggctggtacagggtggagggagaggagagctggaagccaggcttcaaaggctgcaggcggaagcactgcttccccaggtgtggcccgggcagggcaggttgcaggtgtgccggagtcacagggcagctgaggaaggggaagggagacttccagcactcagctgacttaagggagttgtcaggtggcctttgctcacggttggcgcaactgagccaagctggcaaagctgctgcttcttcctgtcaaacttcccttcagagatctcttcctgttgctcagaaggagcctggacttagaaactcatacaacaggctgtaggtagcccaggagagccagagctttggggtgacgctggcctgggttgaaacctgcgtagccttctgtgctctgaggccttggcagggttcctagacatttctgagcttcggttttctcatctgaaaatgaggtgattaggaaggatgaaatacgatgatgtacgtgaaagcacagagccaagagcctggcttgtagagaaggtgctctctaggcggtgccccctctgtaagcatcgtcccttagcctcctgcctgttctagtcctctagaacactcaggcgcttggagggtc

SEQ ID NO: 114103 - DNA, 358 bp, Homo sapiens
caaaaacaaacaaaaacaggatctagcacagtgcgtcctggtccctagtaaacattcagtaattcatagttattccatcctatgtttaccggcacattgtaggtgatcaatagataattgttcaaggagtgattcaggtcttaggactgagataaagagatggacacggccgggcgcggagactcactcctgtaatcccagaactacaaaaattagccgggcataatggcgcgcgcttgtagtcccagctaggcagaagatttgcttgaacccgggaggcggaggttgcagtgagccaagatcgcgtcattgcactcccgcctgggcgacagagcgagactctgtctcacacacatac

SEQ ID NO: 114104 - DNA, 296 bp, Homo sapiens
tatgaagaattccaagggacatccaattttcgggttgaaacagctgcctcaagagtggaagaagttgaggaaagaaaaatgcttggctctgatttacaagtcccctgcaaaggggcagctggagggtagcctctagagatgagaatgtctgctgctcttctctctctgggctgctgctttcttccaaagagtcactgttgcccaggaggaaggacttctcagccctcacggtattattcaatccacaggaaataagcaaatacaaagtagccagctcacagaaagtaatctgagtt

SEQ ID NO: 114105 - DNA, 349 bp, Homo sapiens
aaaacataaatatacaaaataacactgtgccaaatctttactttttccttagctgtcaccctctttcttcctccatctcacaatagactgcttagaggaagattgtcatttttgacttgtgacctattagttctcagttcatttaaaatctggcttctagttcacctctgatgaaatagttcacggaaagtttacctgttactctttatctctcaaatttgataattatttttaagtgtttatctcccttgaatcttaattacatttctgatctaactcttcctcatcaaaattccccttcctggttccctctataatttataaagccttcaatgagtcaaactcttaa

SEQ ID NO: 114106 - DNA, 604 bp, Homo sapiens
cagttgaaggtcttcatgatgtcttcctccctctgtcagtcttcatagttttatatagatttgcttaacctatgaatttggctggacattgacttaatcagacaccagctaacataatacattgataatttttaattgactcaataccaaccctctactgtgtgcaaagcaccaaagaaacatggactggctgattttcagaactgaaaggaatttaacagataatcttgtttcactcccaggaagtgctagggaagttcagtgacttgaccaaaattacacagctttcaaagggtagagcaattaattcctgctgtaaacagtccaggctggaatgactgagaaagaagaaattgaagtttgaaagatggataaattagacttagcagaaagttgagggagtttatttcagatataatattaacacaatagtactttggcagataacctttgaaatggaaatgtttaattattcttaccacactctagttgctagacagccagcattggctaggataaaggatagagccctcctcagggagttggtttgtagcacagtctgggaaacaatcggtgctctcatttcaaggacagagtgaaatga

SEQ ID NO: 114107 - DNA, 590 bp, Homo sapiens
gaaaattaaggataactgcaatccaccacaccgagctttccattggatttggtcgtatctgttttcagttattcttgttttcattgtgtgatgacacgatgttgaaacacaattttgttatccttctcttttttttcagttaatccttcccaaacatttcctcatatttaaaaatatatttccaaaacttcattgtaatggctgtagggtgtttcatcacagaagtcacctgaatttatctagctcggcccttattatggataatttaggttatttcccttttctttttctatttaaatagcattgtgatgaaaattcctaggtttgaagcctatattcacaggcattactatttccttaggtgtaaaattttcatcagagagtaagaacctttctctgggctgtgtataaatataactcagttgctctctagaaagatcgaatgtagttactgtgaatatgggttctgagatcagaaaaaaacaaggtgtcgtcctaggtttgcagttctggatctgtgatcagccctgtgacattgagtaaattacttaacttcttcaagcttcagcttccgtatctattaaatggag

SEQ ID NO: 114108 - DNA, 752 bp, Homo sapiens
agaaaattcactttactttttaattatttcatcataacaacttgatttggtggggggcattacttgtttatttcaccagtctttcactgtcagtcaggtgtttaacacagtgataaatgttactggggacccagaatgggtgtaaaactgtttgccattaagttgtttgtagtccatgcctatgtcctgaatggtaatgcctaggtcttcttctagggtttttatggttttaggtctaacgtttaaatctttaatccatcttgaattgatttttgtataaggtgtaaggaagggatccagtttcagctttctacatatggctagccagttttcccagcaccatttattaaatagggaatcctttccccattgcttgtttttctcaggtttgtcaaagatcagatagttgtaggtatgcggcgttatttctgagggctctgttctgttccattgatctatatctctgttttggtaccagtaccatgctgttttggttactgtagccttgtagtatagtttgaagtcatgctgctataaagacacatgcacacgtatgtttattgcggcattattcacaatagcaaagacttggaaccaacccaaatgtccaacaatgatagactggattaagaaaatgtggcacatatacaccatggaatactatgcagccataaaaaatgatgagttcatgtcctttgtagggacatggatgaaattggaaatcatcattctcagtaaactatctcaagaac

SEQ ID NO: 114109 - DNA, 451 bp, Homo sapiens
taaaaaagtgagattaatagttatttttggtaaagaagagaattattattagaaaaggcatgtatagctctcttggggtagctgctaaatttctttttcatttttgccttctactgtattaagctatgcatttgttttgtgtggttttctttgctatacttaatcattaaaaaattcttgatacctttgtcaagtaagtaccatgaaattttaaagtaagttataaaagaattgtcactggtcaggtgcagtggctcatgcctgtaatcccagcactttgggattagcctggcgtgatgactcttgcttatagtcccagttactcaggaggcttaggcaggagggttgcttgagctcagaagtttgaggttatagtgaggtatgatcataccagtgcactctagcctgggtgacagagcaagacattgtctctaaaaataaaaaaacattt

SEQ ID NO: 114110 - DNA, 385 bp, Homo sapiens
gcccgggcagacaggagtatcctttcttttaatttatcaacaaaacttaaaagacaaacaaaaatgtatctgtaaaatataaaaactctatagatgcactagaggtgaatcaccacattttattcaagtatagagtataccatctctactatgaaatctaagaaactcacagcttaaaaaggaatttcatagatttaggtagatgaagatcatcattatacagacgacaacaacaaagtagagactgcttcagtctcaccaagtgacctggaatcataagatttgtacttgggttttataactcctcattctgttttcttactcttttgagacaaggtctggcactatcgcctagactggagtgcagtggcaggatcttggctca

SEQ ID NO: 114111 - DNA, 605 bp, Homo sapiens
gttatcatattaatgatgatggcagtattataaaatgttttccacctgcttgtgacagtacacttggtccagcatactacaaacctcaatttgtaagtataatgtatttcatattgacaattggaaaattgtttatgatttacatatgggtttctttttttcctggcttatttctccaagaaaaaaatgattacacgttttagttaatggaacactaattgtggtaacaaatagacccccaaattttagtggtttaatacagtagaattatttttcctcattcacatggacattctcgttaagtgactttccttcatgctgagattcagggacacaggattattccagttgtgcttctgtcatcctctagggccttgttgtcaagtgtatcaagctggcagaagaggatggggaattatgcttggaagtttttgtaggccaggcttggagctatagccagtcacatggccatacttaactgccagggagaatgggaaatatagtctgtgtatctcagaagaagaaggaatgggtataaattattaggagtctctgccacagtgtataatcataaataatacatagatattatttttcttaatttg

SEQ ID NO: 114112 - DNA, 447 bp, Homo sapiens
tcctgttttcatttttacttgagaacatgttctcagactcggtgcccagctgacgttacctgtgcattgcccgaggcacacacctggccggggctgtgtctcgggggcttcagaagaggaaggaagggctgccaggcatctggcccttccacgtttccctggtggagggattaggccttgggcaggagtcttggcttgtcttaatggatgagcttgtgtctctcagtcagctctgccttggtgttaagctctggactgactctgacctctgagtggcagaggagaggacggtgatttagaatcagtcatgcagaccagggcactcagcgggtcttgggtaaaaagtggtggcaatcgattgcttgcccttttgggagaactgtgtggattgactcctctgaagacctctttgttttgattttatcttgagactttgtagaagcaaaa

SEQ ID NO: 114113 - DNA, 3930 bp, Homo sapiens
  misc_feature (662)..(662): n is a, c, g, or t
aaaacattaacacactgagaaaggctgcgtttgaaccaacctaacttttacattatactgacatcattcccctatgtacaaattgcatacgacctactttgcaaaggcaatggtcatagtaactgtacgatggtgagtggggttgttaaatgcagaccagatactgctgtaatagggctgtgactcaggactatcattccagttgcctgatatgaaaaaggacatgaaggagaaggttttatgagaactctggcaaagacccatgaaaccactcttctttgccctccagaaaacctggtaaaactgaaagtaagccagcagccccacgggtttgggattgatccagaagactgaaggaataaaaacaagctaatatatttctatcccctcccttctaaggcctgtagttggttccattatgatgagacagcagccgatgcacgtaaaaacagaggccatgcatctacacaggggtgttgaggattgaatgagattaggtctgaaagaacacacagtggagacagtgttgtcattgtggggacaaagatttcttttcacaatttgagtgacacttgtcatttctataggcagttaagagacaataactgcatactgttggccgctgtacctttcctgtgcactgagtccctgagcatattcgngagtctttaaaagtacattctagtcaatgtagaaaacagatagtaagggacatgactctacctagattaagctcagttttgaagcagggcctagaggatttagaagtgacagagtcctggattaggtgacatttgataagagctctatccctaacttcctcttaattctggacaagccactccccgctctggctgtagttcccccatctttaaaatgaaacagttgaatcagacaactacaaaaggacttgccaggccttctgtctcagatcctgtgttgttgaagggatgtctgaggccagagatgcagtttacttctgagcaattacagttgtatttcttgtgttcagcctagccctttaccaagctttgttgaagaaatggagcaagatccttgtcctttgcttcggtggtttttaaaacttggatgcctaaagaaaccaggaaggtcatatcagtgagcaaagtacaaaatgtataagcaagacacagtgcaccatgacgctgagagtggcaaagtaacagtccaaccatgcatcagggagtggtggggactgtggcgtgctggcaagcatagccttgtgggattctgcattggacagctcttacaatttctggagagaaatcagaaattcaggtctacatgttgaatcttttaatattgaaatgttcacttggcaatgtgtaaacatcatttgggtcaaagcccatctgtgaaccaagttagtcaaagacaacttgggcatttggacctcagctttatagtctatataagggttggtaaactatggcccacatgctaatctgacccacctcctgtttttgtgaataaagtttaaatgaagatgcagtcacacctatgtgtttaggtattgcctgtggctactttcacactacaacagcagggttgagtagttgtgacggtagttgagacagtgtggccctgtatttattctctggacctttatggaaaaaggttgctgacccttggttcatgtcaatgactcatatggagcagcaggaaacattctgaatttggagctgaatgaccagggtttgacgcctggctcagggaactctagtaacagagtagagagtgtttctcttttctccttttggaaatgatcctgaagcaacaaatggaacaaatggaaatgcaaatgccatctttgatggaaccatagcttctggaacctcatatgtggggaagtgcagtaaaggtcaaaaatgggtgcaggatgtctccaaagggaaataaaatgcccatggctgtaaagctcagacagagcaaacaaagcagaattttctacaccttctgtggtgggctcagatggcaagacctatagttcctctcatggagcaataagaacaagtgcattggctggtgtcttagtctgttcatgctgctatagcagaataccatagattgggtggcttgtaagcagcatacttttatctctcacagttctggaggctgggaagtctgatacccaggtgtaacagatttggtgtctgctgaggacctgttttcttgttcatagatggtgccttcttgctgtgtgcttgcgtggcagaaggggctagggagctctctgagatctcttttataagggtactaatcccattcatgagcactccaccctctaagacctaatcagttctgaaagacgttacttcctaagaccatcacattgggggctaagatttctatatatgaatttcggggggacacacattcagaccataacaactggtgtgggagccttcccagatctagttttgcacaaagtgaaatcagggaagtctggggtgaacaaggtctcacatggacaagctatattttcaaaaagcagtctactagagaggcaaagtggagaaaaggggctgtgttatgtgccagcctgtggcatctgatcttaacaagaaagaagtaaaggccaaaagaactgactctcactcacaagcctgttttctaagaactagattactcttttggacactctggtgcacgaatcttgtataaatagatggttcaggaagaactcatcacattcagagatgagtaataattagtaaggaccagtgcaagctctatctcaagatcctccaaaaatgaagaaagtaacagatgaaaaatatgcgcaagaaaacatttgccataaatcagatgaaaatgtcaacagtacataatgccttggactaaggaaaaaaataattgagcaatcacacctctaaacaagagtataaagttgagatacaagaactcaggagaggtggtaacatgacagaagagagtgaaacctgatatgatgagctccacaaagtagatagattaacaaataaacccatctaaaaagtgaagtatgcaatggaatgattatgacagggaacacagaaaacacagtaagagatatggaagatgagattgggaaaagcaagataaattaatgtaaagagagagagagaaatattagaacatgatacagaggacagataaggggatccaacatacacataattggtgtccctggagataagaatgaaaataattaaataaaaaaaatttaaggcacaattccagaactttctaaaaataagatttgaatttatggactgaaaggaagtacagtgagtggctgagaaaatattgatatggtgaggtcaacagaaagacatagagaagtactaatttcctcataaatcaagaacccccaaaaaaattcaatagaagaatggataaaggatgtgatgaggagatggtttacataaaaggaaatagaaatatcttttaaacacataaaaactcaacctcactcataataagaaaactccaagttaagatactgttttttatctatcgtataggcaaggactaaaatagctgatattaccatgatggtgcaggtatgagggaaacaagaactctcagaaacatggctatggatttcacttctaatccttgtctgatggaagtacacaagtaagaggccaggtgtggtggctcatgcctgtaatcccagcactttgggaggccgagattggcagatcacttgaggtgaggagtttgacaccagactggccaacatcacgaaaccccatctctactaaaactacaaaaattagccaggcgtggtggtgcatgcctgtaattttaggtacttgggaggctgaggcacgagaatcgcttgaacccaggaggtggaagttgcagtgagccgagatcacgccactgcactctagcctgggtgacagtgtgagactctgtctc

SEQ ID NO: 114114 - DNA, 538 bp, Homo sapiens
agcggcgctccgaggatccctcgctatcatcggcaccaggaaaacacaatccctgctttcataagatttacgttctagtgggggaaacaagaaatcttagtgggcaaatacagggtggtgctttagggacaaataggaagggcatccaacacagatgtggggaaggagggcagttagggaaggatactcaggggaaagagaatggaatctcaaacacagaatgagcaagagttcctagatacaggttggaaacttgggaaagagatctaaaatggggatagagcttttagagtcatcattatacatccacagtaaatagtagattcagccatggatcatgttgccttgcacagaataataagaaacaccaacatttaagagaagagcagagggaataaaggctgcaaaggtgagtgtttagaaagaaaggagtactcaacagtaacacatagatacagaaagtaaagaagaaaaggactagccaggcttattggcgtgcacctatagtctctgttactcagaaggctgaagcaggatg

SEQ ID NO: 114115 - DNA, 530 bp, Homo sapiens
tctggtggtggggcaggagatgtggccacaaaggaaggtggggatagtccggggatggcaaggaaggagaaccacaagagagggcagtcctgagggttcactgtgacagaggccaaagggttcccaaaattcgaggcctgggagctgcttccatggacttggcaactggaagcttctgatgccctaggacagaatagtttctaagaagagtgagggcagaatggtgggttagggcagcggtccccaacctttttggcaccagggactggtttcgtggaagacaatttttccatggaccagggtgggggtgaggggatagtttcgggatgaaactgttccacttcagatcatcagccattagattctcataaggagcacacagtctagatcccttgcatgcacaggtcacaatagacttcacactcctgtgagaatctagtgccaccgctgagctgacagaggcggagctcgggtggttatgctcccttgtcagccgctcccctcctgctgtgcggcccagttcctagcag

SEQ ID NO: 114116 - DNA, 91 bp, Homo sapiens
aggcaggagaatcacctgaactccagaggtggaggttgcagcgagtcaggatcgcagcactacactgcagcctgggtgacagtgagactcc

SEQ ID NO: 114117 - DNA, 433 bp, Homo sapiens
ttgccttactgtttagggacaggaaggagacctgagggggtctgactgttttattcagagtttgaaacagttctcctgttctcagcccctgcctctcaactcttgtctgcagtggttcctggtgcctcccacttccctgcgtgctccgggcttttgaagcactggcttgctttttgtggcttttccctctgcagccataaacttcaactttccttctttgctgagtcagttacttcttaccttcctgctcaacctggtctttcagatttctgttgacatccctcatctactgcctttttccttccccttactctttgtctttatgcatgtacacttttactgttcccttatagtcattctagtgaaccctcaggaagatgcaaagaagtatatgttcattttgccatgtttatccacaacccccaaataccat

SEQ ID NO: 114118 - DNA, 332 bp, Homo sapiens
tctgctgcaattgtgtaagatttgtctgcaagccttaattttctcattacctactttttataagtcaggcacaaataattggaactgcttatatagggaaaattgttgaggctttaaaatgtctcaacgccaaatgagaagaaagagaatacatattctttagtcttaatttggttccccaggagcaaacttgaatcctgaaacaagaattcaaactcacagagtttattttgtagggaggaagggaatgaagagaacacaggtaggggagaagagaaataagacaaggaagaggagaaaattaataaagataggcttctcaagccaattac

SEQ ID NO: 114119 - DNA, 656 bp, Homo sapiens
gttaggcagtgaatgaagagtccgggagatgataaccacctcaacgttcccatttaaatgtcactgttactgggccctttttaattctattccaggacgtgtacctaccaataatttttactttagaagtttcttggtgtggtaggaggagtttgatgatgaaaccatgcatccatatatatagaaacaagtggatatattatcagtatggatggaaatatattttacaggttaaatcattctaaaaatatttttatcaaataccttattctgatattgcttacatctgggtttaaatccatactttcctggagaaacatgttatcttttactcttgtctcagtaggtgccaggcattcaaatgctgtttttccagctcaaaggaattaaggacccaaaggcatttaccattgatatataggaagagtggcaacaataagtcacgctacagtgtgtagaaaagtagaaagcatccctaccaatccttaaaatgtttggctgagagctatacactgggtggcaggagaaactgattaaccttttactcctaagaagattcctcaggcatagagtatggttaatgccgtgagacatacagtatttaataggtgttcagcatctcagaaaaaaaaaataatagttattttaggaatatc

SEQ ID NO: 114120 - DNA, 249 bp, Homo sapiens
attgctgggtcctggctatttctgtattcctaccaatatgctttttccccccatcaggcagataaaatcttgttgtatttgaatgactggatctatgtaatcaccaagatccactatgtacagacgagagagggagacctttatttcttagtttcttcctcctgggacagtcttaatgattttctcttggcccagaggcactctccgtggaactacagtgctttcctggtcttagagccatgtgccctg

SEQ ID NO: 114121 - DNA, 247 bp, Homo sapiens
gccctaaaaatgagatggtaaagactgtttattaacatgccttctcactgtttagagagtcagtttctcgcataaactgtaatttagtcctttgaagactttgagaccttctcttgtgttctttaatggtctaattatgaccatgtgggaaacacctagtcaaacaaatgaagtcaggaaattccgggttcctttttagtcagttccaaagacctattgtgcttacatttcttccacggagatgcca

SEQ ID NO: 114122 - DNA, 514 bp, Homo sapiens
ctacataatttagaacaagcttgtccaacccacagcctgtatgtggcccaggacagctttgaatgcagcccaacacaaattcataaactttcttaaaacattatgagattttttttttcttagctcactatttttcatagtagaaagaaacagggattgtaagtcgcccagcattggagccactgccccaagactgcctagtaggcagctccctttgggcaattgtctgcctcctggaaagcttcctgccaaagctgccctgagaatctgggatggaggtgtggccatgtggtctgggtcccctgggctgcgtggcagcagcatctcaggagttgagtcctcttttctaaccttgcgctgctgcattggcttagctacttagctggcatggtcagacaaggggagcacgcccgtgagtgtgtccacatgggccggcggactatcagaaacgccctgttgaacaaatgtgtccaggatagagggatgtgactgtgtatagctgatgaggggaaca

SEQ ID NO: 114123 - DNA, 100 bp, Homo sapiens
tacatttatcttatctctagaaatacaatacataactgaaagctcaaggccaactatgccaagggtggccaataataaaactgggcctgataaaaattaa

SEQ ID NO: 114124 - DNA, 139 bp, Homo sapiens
acctgtgttacagagaaatatactggttatggacaaactccatgtggacaactctatcacccagaagccagagtttgtattcctcgatgctgtggttatatagtttgccaattgcaacttgcagagaggggcggagcag

SEQ ID NO: 114125 - DNA, 387 bp, Homo sapiens
tgtcactatagaggggagttgggtggggagtggttaatgtatttttcctctttttcgatacttaaaagaggcaatatttgggagctggagcaagacgactgaatatagcccttcagtgatcatttcccctcaggatgaccaaattgagcaactattcatgcaagaaagcaccttcatagaaaccaaaataggtgacaaccacagtacttggtttgactatattatcaaggaaagagtcattgaagagggtagaaaagacagtcttgcattgcctacagcacccctccctgaaccccatgtagtatagcatgaagacagaatctgtgtacttaggcaagaaagaccaaagtgagagtggacctttggaactcagtgctgtcctgtcac

SEQ ID NO: 114126 - DNA, 184 bp, Homo sapiens
atcgaatcgagccggtcccctagttttagaagttcaatagcacttgggcctctgccctcatcactctcgctgatgttactaatgacctctcctaattgtcttatcaccactgtatccttattccattggccttctctgagtatctatctgatatggctcatcatgctctccttctagaattaga

SEQ ID NO: 114127 - DNA, 482 bp, Homo sapiens
ctaggtgcttcacaagtgtattctcctctaatcctcacaacaaatatatgaggtgctattatcccctttcgcaaatgaggaaaataaggcacaaagcttcagtaatctgaattcccaggtcacataactagtatgtagagaagctgggaatcaaacccaggcagtgagcactttctagaatgctgtgcagttccacttccccagctaagcccttgcttacccagagtccattgtgatttaatatcaagtgtgtctatgcccgttgtatgtgttattgtaattcataatgtaattaaatactatacacattgatgaacaggccaggtgagatggctcacccttgtaatcctagcactttgcgaggccaaggtgggaggattgcttgagcccaggagtttgagaccaccctgggcaacatagtgagaccccatgtcaatgtaaaagaaaatttatctttaaaaaaaaataaattgatgaactga

SEQ ID NO: 114128 - DNA, 1191 bp, Homo sapiens
gggaacagaggaagcacattaacatatactgagtacccagtgcttgttctttggctcctttgttgccccatatgccatcagactcttctgggattgccctaccaatggagagctgtctcacctaggaccacccctcttcccaatgcagtccatttccagtgactgattattgcaggagtttaaagacctgacatctcatcccaatttgggactaccctgaaaggctattgtagctccagactccccgcataggaacagctccccgtaggtcagctcttgctgtacctgcatcacagcttatttcttccctctgcccacaccctcctcctccttccacaggtgttgataccaagcgcacttcctaacaaacataccacctgcctcagagtctgcttcccagggaacccaacctgcgacctaagtatatttcacaataacaacacccagggtactgctctaggacaaataagatgatgtgtgtgaaaacatttgacaggtaaacataggcagtctaatttagtgtttaagaatatcatctttgaagacagatgagccaatctttggttgtgaacttcttagaacctttagtcaggttacttaatggttccacatttcatttttctaatctttaaattaaggatgagaatacctacttcatgggggtgctttgaggattgaaagagagataatacatgtaaagcacttagaatggtgcctggtacatgtttggtgttcagtacaatatgtatatctctataatatatgtctactatattaatataattgtattttgatgactttgcatcaatcattttatgtatcagttttactttccatgaaatacagattttttttctatatcaagtgtatagttataacaatgtagttgaaattgagttctgcaaaggaaaatatagattctaagattgcattatcattgtcattttgctgttaaaattgtcagcaaaatcttaactctgatcccattatccatggctactcttcaatattgtattggcctattcagttgccctatctccatagcagccaaatacattgtcatcattacctattcctgtagcaacatgatttttaatatttcttggataatgaaaagtagttatcaatacatggtatttcatttcctggggatcttagtaccttctggaaatggccattttcaaatacaac

SEQ ID NO: 114129 - DNA, 379 bp, Homo sapiens
  misc_feature (17)..(18): n is a, c, g, or t
ggtgttagaggatccgnntgcatctgtgctcggaatgtgaccttttttggaaatatagtctttgcagaagtaattagttaagatgaggtcatgttggagtagaatgggctgttcatccagtatgactgatgtccttataagaggaggagaaaagatacacaaagagaggagaacaccaagtgaagacagagatacagaggaagaacttgtatgacagcagaacatgtgtgacagcagaggggagaccggagtgacatgtctacaagccaaggaatgcaaacgagcacctgcaacgccaaaacccaggagaaaggcgggaacagattcttccttagattctccagaaggagcctccagaacgatcagagaataaatacca

SEQ ID NO: 114130 - DNA, 2270 bp, Homo sapiens
agcggagcggaagcgacgaagggacgggacccgggagcctggacgagtccgagcgcgtcacctcctcacgctgcggctgtcgcccgtgtcccgccggcccgttccgtgtcgccccgcagtgctgcggccgccgcggcaccatggctgtgtttgtcgtgctcctggcgttggtggcgggtgttttggggaacgagtttagtatattaaaatcaccagggtctgttgttttccgaaatggaaattggcctataccaggagagcggatcccagacgtggctgcattgtccatgggcttctctgtgaaagaagacctttcttggccaggactcgcagtgggtaacctgtttcatcgtcctcgggctaccgtcatggtgatggtgaagggagtgaacaaactggctctacccccaggcagtgtcatttcgtaccctttggagaatgcagttccttttagtcttgacagtgttgcaaattccattcactccttattttctgaggaaactcctgttgttttgcagttggctcccagtgaggaaagagtgtatatggtagggaaggcaaactcagtgtttgaagacctttcagtcaccttgcgccagctccgtaatcgcctgtttcaagaaaactctgttctcagttcactccccctcaattctctgagtaggaacaatgaagttgacctgctctttctttctgaactgcaagtgctacatgatatttcaagcttgctgtctcgtcataagcatctagccaaggatcattctcctgatttatattcactggagctggcaggtttggatgaaattgggaagcgttatggggaagactctgaacaattcagagatgcttctaagatccttgttgacgctctgcaaaagtttgcagatgacatgtacagtctttatggtgggaatgcagtggtagagttagtcactgtcaagtcatttgacacctccctcattaggaagacaaggactatccttgaggcaaaacaagcgaagaacccagcaagtccctataaccttgcatataagtataattttgaatattccgtggttttcaacatggtactttggataatgatcgccttggccttggctgtgattatcacctcttacaatatttggaacatggatcctggatatgatagcatcatttataggatgacaaaccagaagattcgaatggattgaatgttacctgtgccagaattagaaaagggggttggaaattggctgttttgttaaaatatatcttttagtgtgctttaaagtagatagtatactttacatttataaaaaaaaatcaaattttgttctttattttgtgtgtgcctgtgatgtttttctagagtgaattatagtattgacgtgaatcccactgtggtatagattccataatatgcttgaatattatgatatagccatttaataacattgatttcattctgtttaatgaatttggaaatatgcactgaaagaaatgtaaaacatttagaatagctcgtgttatggaaaaaagtgcactgaatttattagacaaacttacgaatgcttaacttctttacacagcataggtgaaaatcatatttgggctattgtatactatgaacaatttgtaaatgtcttaatttgatgtaaataactctgaaacaagagaaaaggtttttaacttagagtagccctaaaatatggatgtgcttatataatcgcttagttttggaactgtatctgagtaacagaggacagctgttttttaaccctcttctgcaagtttgttgacctacatgggctaatatggatactaaaaatactacattgatctaagaagaaactagccttgtggagtatatagatgcttttcattatacacacaaaaatccctgagggacattttgaggcatgaatataaaacatttttatttcagtaacttttccccctgtgtaagttactatggtttgtggtacaacttcattctatagaatattaagtggaagtgggtgaattctactttttatgttggagtggaccaatgtctatcaagagtgacaaataaagttaatgatgattccaaaaaaaaaacacaaaacagaacaagagacacacacaacgaaacgacaccagacagacacaagacaaaccccccgggagggaacacgcacaagggagccaacccagaaggggggacaccacacacacagttgcccacaagaggagcaaaccacgccgggcacacacgacgacccaccgacagaagaaacgcacaccag

SEQ ID NO: 114131 - DNA, 1345 bp, Homo sapiens
agcggagcggaagcgacgaagggacgggacccgggagcctggacgagtccgagcgcgtcacctcctcacgctgcggctgtcgcccgtgtcccgccggcccgttccgtgtcgccccgcagtgctgcggccgccgcggcaccatggctgtgtttgtcgtgctcctggcgttggtggcgggtgttttggggaacgagtttagtatattaaaatcaccagggtctgttgttttccgaaatggaaattggcctataccaggagagcggatcccagacgtggctgcattgtccatgggcttctctgtgaaagaagacctttcttggccaggactcgcagtgggtaacctgtttcatcgtcctcgggctaccgtcatggtgatggtgaagggagtgaacaaactggctctacccccaggcagtgtcatttcgtaccctttggagaatgcagttccttttagtcttgacagtgttgcaaattccattcactccttattttctgaggaaactcctgttgttttgcagttggctcccagtgaggaaagagtgtatatggtagggaaggcaaactcagtgtttgaagacctttcagtcaccttgcgccagctccgtaatcgcctgtttcaagaaaactctgttctcagttcactccccctcaattctctgagtaggaacaatgaagttgacctgctctttctttctgaactgcaagtgctacatgatatttcaagcttgctgtctcgtcataagcatctagccaaggatcattctcctgatttatattcactggagctggcaggtttggatgaaattgggaagcgttatggggaagactctgaacaattcagagatgcttctaagatccttgttgacgctctgcaaaagtttgcagatgacatgtacagtctttatggtgggaatgcagtggtagagttagtcactgtcaagtcatttgacacctccctcattaggaagacaaggactatccttgaggcaaaacaagcgaagaacccagcaagtccctataaccttgcatataagtataattttgaatattccgtggttttcaacatggtactttggataatgatcgccttggccttggctgtgattatcacctcttacaatatttggaacatggatcctggatatgatagcatcatttataggatgacaaaccagaagattcgaatggattgaatgttacctgtgccagaattagaaaagggggttggaaattggctgttttgttaaaatatatcttttagtgtgctttaaagtagatagtatactttacatttataaaaaaaaatcaaattttgttctttaaaaaaaaaacctcgttccgaatt

SEQ ID NO: 114132 - DNA, 990 bp, Homo sapiens
  misc_feature (37)..(37): n is a, c, g, or t
  misc_feature (794)..(794): n is a, c, g, or t
ccccggctgcaggaattcggcacgagtcctgttgctntgcagttggctcccagtgaggaaagagtgtatatggtagggaaggcaaactcagtgtttgaagacctttcagtcaccttgcgccagctccgtaatcgcctgtttcaagaaaactctgttctcagttcactccccctcaattctctgagtaggaacaatgaagttgacctgctctttctttctgaactgcaagtgctacatgatatttcaagcttgctgtctcgtcataagcatctagccaaggatcattctcctgatttatattcactggagctggcaggtttggatgaaattgggaagcgttatggggaagactctgaacaattcagagatgcttctaagatccttgttgacgctctgcaaaagtttgcagatgacatgtacagtctttatggtgggaatgcagtggtagagttagtcactgtcaagtcatttgacacctccctcattaggaagacaaggactatccttgaggcaaaacaagcgaagaacccagcaagtccctataaccttgcatataagtataattttgaatattccgtggttttcaacatggtactttggataatgatcgccttggccttggctgtgattatcacctcttacaatatttggaacatggatcctggatatgatagcatcatttataggatgacaaaccagaagattcgaatggattgaatgttacctgtgccagaattagaaaagggggttggaaattggctgttttgttaaaattaccttacggccttaagganattgttacctaccattattaaaaaatcaacttggtcctattctgggtgcctggaggttctcaatgatatatgttgccgaacccactgggtataatctaaatcgctgaaatatgaattccttaaaccttggttattcggtaagattgtgaattcctgatgaatgaacctttatacccggtgtggaggttgtccatca

SEQ ID NO: 114133 - DNA, 825 bp, Homo sapiens
agcggagcggaagcgacgaagggacgggacccgggagcctggacgagtccgagcgcgtcacctcctcacgctgcggctgtcgcccgtgtcccgccggcccgttccgtgtcgccccgcagtgctgcggccgccgcggcaccatggctgtgtttgtcgtgctcctggcgttggtggcgggtgttttggggaacgagtttagtatattaaaatcaccagggtctgttgttttccgaaatggaaattggcctataccaggagagcggatcccagacgtggctgcattgtccatgggcttctctgtgaaagaagacctttcttggccaggactcgcagtgggtaacctgtttcatcgtcctcgggctaccgtcatggtgatggtgaagggagtgaacaaactggctctacccccaggcagtgtcatttcgtaccctttggagaatgcagttccttttagtcttgacagtgttgcaaattccattcactccttattttctgaggaaactcctgttgttttgcagttggctcccagtgaggaatttgagtgtagatgttaaagagatttcaaacacattgtggggaataccgacgaaacaccatatcgccagcgtctgagaactgccagagcaataatacacaatacacagaacatcaccgcccactaatacacaaagatggaacacagtaatttgaacctaatgccagatcaattcatggttcgatcttagatcaccaaaaaatcaatcattctatgcaggtggctataggaacattgcgagatgctttttccgggggggcaagcctcagacttgttttttgtggtagggt

SEQ ID NO: 114134 - DNA, 1177 bp, Homo sapiens
  misc_feature (652)..(653): n is a, c, g, or t
  misc_feature (660)..(661): n is a, c, g, or t
  misc_feature (1177)..(1177): n is a, c, g, or t
aaaaaaccgcataagccaaaacatcaaagcaaaacagtgccctagtgccgacgggcacgagaacatttagaatagctcgtgttatggaaaaaagtgcactgaatttattagacaaacttacgaatgcttaacttctttacacagcataggtgaaaatcatatttgggctattgtatactatgaacaatttgtaaatgtcttaatttgatgtaaataactctgaaacaagagaaaaggtttttaacttagagtagccctaaaatatggatgtgcttatataatcgcttagttttggaactgtatctgagtaacagaggacagctgttttttaaccctcttctgcaagtttgttgacctacatgggctaatatggatactaaaaatactacattgatctaagaagaaactagccttgtggagtatatagatgcttttcattatacacacaaaaatccctgagggacattttgaggcatgaatataaaacatttttatttcagtaacttttccccctgtgtaagttactatggtttgtggtacaacttcattctatagaatattaagtggaagtgggtgaattctactttttatgttggagtggaccaatgtctatcaagagtgacaaataaagttaatgatgattccaaaaaannaaaaaannaaaaaaaaaaaaaaaaaaaaaaaaaaaaaaaaaaaaaaaaggggggggggctaaaaaatcccccggggggggcccacaaaatatagcgcgcgcacacaccaccagttttcgtgtgtgaacaaaggggggcccccacaaagggggagggagctatatatataataagcaagaggacagaggggcagcgcgtattaaacaaaggctgcagaggggggaaaaaaccgtggccacgggggacaattttttgggaaggaagagaacctttctacagttgggggggggagggagacaatatatggggagaaaacaatcctctcccaagaaaaaattataaaaagcgttatagagggggaataataaacaaattttataaagagaggggtaaaataagtggggtgtgaaacaaacaagcggagatattcgcgatggagtggataaggaaaatttgcgtgtatacaagggataatagtatttaaaaaaaaattttttatcccaggaggcgcttaaaaaaaaagn

SEQ ID NO: 114135 - DNA, 232 bp, Homo sapiens
gcggccgcctactactactactactgctcgaattcaagcttctaacgatgtacggggcatgaatataaaacatttttatttcagtaacttttccccctgtgtaagttactatggtttgtggtacaacttcattctatagaatattaagtggaagtgggtgaattctactttttatgttggagtggaccaatgtctatcaagagtgacaaataaagttaatgatgattccaaa

SEQ ID NO: 114136 - DNA, 2604 bp, Homo sapiens
  misc_feature (2079)..(2080): n is a, c, g, or t
  misc_feature (2087)..(2088): n is a, c, g, or t
  misc_feature (2604)..(2604): n is a, c, g, or t
agcggagcggaagcgacgaagggacgggacccgggagcctggacgagtccgagcgcgtcacctcctcacgctgcggctgtcgcccgtgtcccgccggcccgttccgtgtcgccccgcagtgctgcggccgccgcggcaccatggctgtgtttgtcgtgctcctggcgttggtggcgggtgttttggggaacgagtttagtatattaaaatcaccagggtctgttgttttccgaaatggaaattggcctataccaggagagcggatcccagacgtggctgcattgtccatgggcttctctgtgaaagaagacctttcttggccaggactcgcagtgggtaacctgtttcatcgtcctcgggctaccgtcatggtgatggtgaagggagtgaacaaactggctctacccccaggcagtgtcatttcgtaccctttggagaatgcagttccttttagtcttgacagtgttgcaaattccattcactccttattttctgaggaaactcctgttgttttgcagttggctcccagtgaggaaagagtgtatatggtagggaaggcaaactcagtgtttgaagacctttcagtcaccttgcgccagctccgtaatcgcctgtttcaagaaaactctgttctcagttcactccccctcaattctctgagtaggaacaatgaagttgacctgctctttctttctgaactgcaagtgctacatgatatttcaagcttgctgtctcgtcataagcatctagccaaggatcattctcctgatttatattcactggagctggcaggtttggatgaaattgggaagcgttatggggaagactctgaacaattcagagatgcttctaagatccttgttgacgctctgcaaaagtttgcagatgacatgtacagtctttatggtgggaatgcagtggtagagttagtcactgtcaagtcatttgacacctccctcattaggaagacaaggactatccttgaggcaaaacaagcgaagaacccagcaagtccctataaccttgcatataagtataattttgaatattccgtggttttcaacatggtactttggataatgatcgccttggccttggctgtgattatcacctcttacaatatttggaacatggatcctggatatgatagcatcatttataggatgacaaaccagaagattcgaatggattgaatgttacctgtgccagaattagaaaagggggttggaaattggctgttttgttaaaatatatcttttagtgtgctttaaagtagatagtatactttacatttataaaaaaaaatcaaattttgttctttattttgtgtgtgcctgtgatgtttttctagagtgaattatagtattgacgtgaatcccactgtggtatagattccataatatgcttgaatattatgatatagccatttaataacattgatttcattctgtttaatgaatttggaaatatgcactgaaagaaatgtaaaacatttagaatagctcgtgttatggaaaaaagtgcactgaatttattagacaaacttacgaatgcttaacttctttacacagcataggtgaaaatcatatttgggctattgtatactatgaacaatttgtaaatgtcttaatttgatgtaaataactctgaaacaagagaaaaggtttttaacttagagtagccctaaaatatggatgtgcttatataatcgcttagttttggaactgtatctgagtaacagaggacagctgttttttaaccctcttctgcaagtttgttgacctacatgggctaatatggatactaaaaatactacattgatctaagaagaaactagccttgtggagtatatagatgcttttcattatacacacaaaaatccctgagggacattttgaggcatgaatataaaacatttttatttcagtaacttttccccctgtgtaagttactatggtttgtggtacaacttcattctatagaatattaagtggaagtgggtgaattctactttttatgttggagtggaccaatgtctatcaagagtgacaaataaagttaatgatgattccaaaaaannaaaaaannaaaaaaaaaaaaaaaaaaaaaaaaaaaaaaaaaaaaaaaaggggggggggctaaaaaatcccccggggggggcccacaaaatatagcgcgcgcacacaccaccagttttcgtgtgtgaacaaaggggggcccccacaaagggggagggagctatatatataataagcaagaggacagaggggcagcgcgtattaaacaaaggctgcagaggggggaaaaaaccgtggccacgggggacaattttttgggaaggaagagaacctttctacagttgggggggggagggagacaatatatggggagaaaacaatcctctcccaagaaaaaattataaaaagcgttatagagggggaataataaacaaattttataaagagaggggtaaaataagtggggtgtgaaacaaacaagcggagatattcgcgatggagtggataaggaaaatttgcgtgtatacaagggataatagtatttaaaaaaaaattttttatcccaggaggcgcttaaaaaaaaagn

SEQ ID NO: 114137 - DNA, 2027 bp, Homo sapiens
agcggagcggaagcgacgaagggacgggacccgggagcctggacgagtccgagcgcgtcacctcctcacgctgcggctgtcgcccgtgtcccgccggcccgttccgtgtcgccccgcagtgctgcggccgccgcggcaccatggctgtgtttgtcgtgctcctggcgttggtggcgggtgttttggggaacgagtttagtatattaaaatcaccagggtctgttgttttccgaaatggaaattggcctataccaggagagcggatcccagacgtggctgcattgtccatgggcttctctgtgaaagaagacctttcttggccaggactcgcagtgggtaacctgtttcatcgtcctcgggctaccgtcatggtgatggtgaagggagtgaacaaactggctctacccccaggcagtgtcatttcgtaccctttggagaatgcagttccttttagtcttgacagtgttgcaaattccattcactccttattttctgaggaaactcctgttgttttgcagttggctcccagtgaggaaagagtgtatatggtagggaaggcaaactcagtgtttgaagacctttcagtcaccttgcgccagctccgtaatcgcctgtttcaagaaaactctgttctcagttcactccccctcaattctctgagtaggaacaatgaagttgacctgctctttctttctgaactgcaagtgctacatgatatttcaagcttgctgtctcgtcataagcatctagccaaggatcattctcctgatttatattcactggagctggcaggtttggatgaaattgggaagcgttatggggaagactctgaacaattcagagatgcttctaagatccttgttgacgctctgcaaaagttagtcactgtcaagtcatttgacacctccctcattaggaagacaaggactatccttgaggcaaaacaagcgaagaacccagcaagtccctataaccttgcatataagtataattttgaatattccgtggttttcaacatggtactttggataatgatcgccttggccttggctgtgattatcacctcttacaatatttggaacatggatcctggatatgatagcatcatttataggatgacaaaccagaagattcgaatggattgaatgttacctgtgccagaattagaaaagggggttggaaattggctgttttgttaaaatatatcttttagtgtgctttaaagtagatagtatactttacatttataaaaaaaaatcaaattttgttctttattttgtgtgtgcctgtgatgtttttctagagtgaattatagtattgacgtgaatcccactgtggtatagattccataatatgcttgaatattatgatatagccatttaataacattgatttcattctgtttaatgaatttggaaatatgcactgaaagaaatgtaaaacatttagaatagctcgtgttatggaaaaaagtgcactgaatttattagacaaacttacgaatgcttaacttctttacacagcataggtgaaaatcatatttgggctattgtatactatgaacaatttgtaaatgtcttaatttgatgtaaataactctgaaacaagagaaaaggtttttaacttagagtagccctaaaatatggatgtgcttatataatcgcttagttttggaactgtatctgagtaacagaggacagctgttttttaaccctcttctgcaagtttgttgacctacatgggctaatatggatactaaaaatactacattgatctaagaagaaactagccttgtggagtatatagatgcttttcattatacacacaaaaatccctgagggacattttgaggcatgaatataaaacatttttatttcagtaacttttccccctgtgtaagttactatggtttgtggtacaacttcattctatagaatattaagtggaagtgggtgaattctactttttatgttggagtggaccaatgtctatcaagagtgacaaataaagttaatgatgattccaaa

SEQ ID NO: 114138 - DNA, 1921 bp, Homo sapiens
ttactgatctgttttcttttcaggtgttttggggaacgagtttagtatattaaaatcaccagggtctgttgttttccgaaatggaaattggcctataccaggagagcggatcccagacgtggctgcattgtccatgggcttctctgtgaaagaagacctttcttggccaggactcgcagtgggtaacctgtttcatcgtcctcgggctaccgtcatggtgatggtgaagggagtgaacaaactggctctacccccaggcagtgtcatttcgtaccctttggagaatgcagttccttttagtcttgacagtgttgcaaattccattcactccttattttctgaggaaactcctgttgttttgcagttggctcccagtgaggaaagagtgtatatggtagggaaggcaaactcagtgtttgaagacctttcagtcaccttgcgccagctccgtaatcgcctgtttcaagaaaactctgttctcagttcactccccctcaattctctgagtaggaacaatgaagttgacctgctctttctttctgaactgcaagtgctacatgatatttcaagcttgctgtctcgtcataagcatctagccaaggatcattctcctgatttatattcactggagctggcaggtttggatgaaattgggaagcgttatggggaagactctgaacaattcagagatgcttctaagatccttgttgacgctctgcaaaagtttgcagatgacatgtacagtctttatggtgggaatgcagtggtagagttagtcactgtcaagtcatttgacacctccctcattaggaagacaaggactatccttgaggcaaaacaagcgaagaacccagcaagtccctataaccttgcatataagtataattttgaatattccgtggttttcaacatggtactttggataatgatcgccttggccttggctgtgattatcacctcttacaatatttggaacatggatcctggatatgatagcatcatttataggatgacaaaccagaagattcgaatggattgaatgttacctgtgccagaattagaaaagggggttggaaattggctgttttgttaaaatatatcttttagtgtgctttaaagtagatagtatactttacatttataaaaaaaaatcaaattttgttctttattttgtgtgtgcctgtgatgtttttctagagtgaattatagtattgacgtgaatcccactgtggtatagattccataatatgcttgaatattatgatatagccatttaataacattgatttcattctgtttaatgaatttggaaatatgcactgaaagaaatgtaaaacatttagaatagctcgtgttatggaaaaaagtgcactgaatttattagacaaacttacgaatgcttaacttctttacacagcataggtgaaaatcatatttgggctattgtatactatgaacaatttgtaaatgtcttaatttgatgtaaataactctgaaacaagagaaaaggtttttaacttagagtagccctaaaatatggatgtgcttatataatcgcttagttttggaactgtatctgagtaacagaggacagctgttttttaaccctcttctgcaagtttgttgacctacatgggctaatatggatactaaaaatactacattgatctaagaagaaactagccttgtggagtatatagatgcttttcattatacacacaaaaatccctgagggacattttgaggcatgaatataaaacatttttatttcagtaacttttccccctgtgtaagttactatggtttgtggtacaacttcattctatagaatattaagtggaagtgggtgaattctactttttatgttggagtggaccaatgtctatcaagagtgacaaataaagttaatgatgattccaaa

SEQ ID NO: 114139 - DNA, 1944 bp, Homo sapiens
agcggagcggaagcgacgaagggacgggacccgggagcctggacgagtccgagcgcgtcacctcctcacgctgcggctgtcgcccgtgtcccgccggcccgttccgtgtcgccccgcagtgctgcggccgccgcggcaccatggctgtgtttgtcgtgctcctggcgttggtggcgggacctttcttggccaggactcgcagtgggtaacctgtttcatcgtcctcgggctaccgtcatggtgatggtgaagggagtgaacaaactggctctacccccaggcagtgtcatttcgtaccctttggagaatgcagttccttttagtcttgacagtgttgcaaattccattcactccttattttctgaggaaactcctgttgttttgcagttggctcccagtgaggaaagagtgtatatggtagggaaggcaaactcagtgtttgaagacctttcagtcaccttgcgccagctccgtaatcgcctgtttcaagaaaactctgttctcagttcactccccctcaattctctgagtaggaacaatgaagttgacctgctctttctttctgaactgcaagtgctacatgatatttcaagcttgctgtctcgtcataagcatctagccaaggatcattctcctgatttatattcactggagctggcaggtttggatgaaattgggaagcgttatggggaagactctgaacaattcagagatgcttctaagatccttgttgacgctctgcaaaagtttgcagatgacatgtacagtctttatggtgggaatgcagtggtagagttagtcactgtcaagtcatttgacacctccctcattaggaagacaaggactatccttgaggcaaaacaagcgaagaacccagcaagtccctataaccttgcatataagtataattttgaatattccgtggttttcaacatggtactttggataatgatcgccttggccttggctgtgattatcacctcttacaatatttggaacatggatcctggatatgatagcatcatttataggatgacaaaccagaagattcgaatggattgaatgttacctgtgccagaattagaaaagggggttggaaattggctgttttgttaaaatatatcttttagtgtgctttaaagtagatagtatactttacatttataaaaaaaaatcaaattttgttctttattttgtgtgtgcctgtgatgtttttctagagtgaattatagtattgacgtgaatcccactgtggtatagattccataatatgcttgaatattatgatatagccatttaataacattgatttcattctgtttaatgaatttggaaatatgcactgaaagaaatgtaaaacatttagaatagctcgtgttatggaaaaaagtgcactgaatttattagacaaacttacgaatgcttaacttctttacacagcataggtgaaaatcatatttgggctattgtatactatgaacaatttgtaaatgtcttaatttgatgtaaataactctgaaacaagagaaaaggtttttaacttagagtagccctaaaatatggatgtgcttatataatcgcttagttttggaactgtatctgagtaacagaggacagctgttttttaaccctcttctgcaagtttgttgacctacatgggctaatatggatactaaaaatactacattgatctaagaagaaactagccttgtggagtatatagatgcttttcattatacacacaaaaatccctgagggacattttgaggcatgaatataaaacatttttatttcagtaacttttccccctgtgtaagttactatggtttgtggtacaacttcattctatagaatattaagtggaagtgggtgaattctactttttatgttggagtggaccaatgtctatcaagagtgacaaataaagttaatgatgattccaaa

SEQ ID NO: 114140 - DNA, 1656 bp, Homo sapiens
ggcacgagcggcacgagctcggcagttccttttagtcttgacagtgttgcaaattccattcactccttattttctgaggaaactcctgttgttttgcagttggctcccagtgaggaaagagtgtatatggtagggaaggcaaactcagtgtttgaagacctttcagtcaccttgcgccagctccgtaatcgcctgtttcaagaaaactctgttctcagttcactccccctcaattctctgagtaggaacaatgaagttgacctgctctttctttctgaactgcaagtgctacatgatatttcaagcttgctgtctcgtcataagcatctagccaaggatcattctcctgatttatattcactggagctggcaggtttggatgaaattgggaagcgttatggggaagactctgaacaattcagagatgcttctaagatccttgttgacgctctgcaaaagtttgcagatgacatgtacagtctttatggtgggaatgcagtggtagagttagtcactgtcaagtcatttgacacctccctcattaggaagacaaggactatccttgaggcaaaacaagcgaagaacccagcaagtccctataaccttgcatataagtataattttgaatattccgtggttttcaacatggtactttggataatgatcgccttggccttggctgtgattatcacctcttacaatatttggaacatggatcctggatatgatagcatcatttataggatgacaaaccagaagattcgaatggattgaatgttacctgtgccagaattagaaaagggggttggaaattggctgttttgttaaaatatatcttttagtgtgctttaaagtagatagtatactttacatttataaaaaaaaatcaaattttgttctttattttgtgtgtgcctgtgatgtttttctagagtgaattatagtattgacgtgaatcccactgtggtatagattccataatatgcttgaatattatgatatagccatttaataacattgatttcattctgtttaatgaatttggaaatatgcactgaaagaaatgtaaaacatttagaatagctcgtgttatggaaaaaagtgcactgaatttattagacaaacttacgaatgcttaacttctttacacagcataggtgaaaatcatatttgggctattgtatactatgaacaatttgtaaatgtcttaatttgatgtaaataactctgaaacaagagaaaaggtttttaacttagagtagccctaaaatatggatgtgcttatataatcgcttagttttggaactgtatctgagtaacagaggacagctgttttttaaccctcttctgcaagtttgttgacctacatgggctaatatggatactaaaaatactacattgatctaagaagaaactagccttgtggagtatatagatgcttttcattatacacacaaaaatccctgagggacattttgaggcatgaatataaaacatttttatttcagtaacttttccccctgtgtaagttactatggtttgtggtacaacttcattctatagaatattaagtggaagtgggtgaattctactttttatgttggagtggaccaatgtctatcaagagtgacaaataaagttaatgatgattccaaa

SEQ ID NO: 114141 - DNA, 1969 bp, Homo sapiens
gtggcacatttagtcaatattgaaaccaaatgtattgctgcttcaaatacatgaatgaccaccagaaaatggtttgtgctagatatagtgttgtgtccatcaggtttaagttattttccactgaggcatgatgggagatacagacttggcttaccagggggctgtttaatcttctgtgccctcaaaagggcttgtttggaaatgatttcgggcttctaaatttccatagaaagtgctggaaaaaagtttaaggcttctttttaaataccatctgaatgatttttcttcccactttggttcacataataattgcgttcttactcttaaatttcaggcagttccttttagtcttgacagtgttgcaaattccattcactccttattttctgaggaaactcctgttgttttgcagttggctcccagtgaggaaagagtgtatatggtagggaaggcaaactcagtgtttgaagacctttcagtcaccttgcgccagctccgtaatcgcctgtttcaagaaaactctgttctcagttcactccccctcaattctctgagtaggaacaatgaagttgacctgctctttctttctgaactgcaagtgctacatgatatttcaagcttgctgtctcgtcataagcatctagccaaggatcattctcctgatttatattcactggagctggcaggtttggatgaaattgggaagcgttatggggaagactctgaacaattcagagatgcttctaagatccttgttgacgctctgcaaaagtttgcagatgacatgtacagtctttatggtgggaatgcagtggtagagttagtcactgtcaagtcatttgacacctccctcattaggaagacaaggactatccttgaggcaaaacaagcgaagaacccagcaagtccctataaccttgcatataagtataattttgaatattccgtggttttcaacatggtactttggataatgatcgccttggccttggctgtgattatcacctcttacaatatttggaacatggatcctggatatgatagcatcatttataggatgacaaaccagaagattcgaatggattgaatgttacctgtgccagaattagaaaagggggttggaaattggctgttttgttaaaatatatcttttagtgtgctttaaagtagatagtatactttacatttataaaaaaaaatcaaattttgttctttattttgtgtgtgcctgtgatgtttttctagagtgaattatagtattgacgtgaatcccactgtggtatagattccataatatgcttgaatattatgatatagccatttaataacattgatttcattctgtttaatgaatttggaaatatgcactgaaagaaatgtaaaacatttagaatagctcgtgttatggaaaaaagtgcactgaatttattagacaaacttacgaatgcttaacttctttacacagcataggtgaaaatcatatttgggctattgtatactatgaacaatttgtaaatgtcttaatttgatgtaaataactctgaaacaagagaaaaggtttttaacttagagtagccctaaaatatggatgtgcttatataatcgcttagttttggaactgtatctgagtaacagaggacagctgttttttaaccctcttctgcaagtttgttgacctacatgggctaatatggatactaaaaatactacattgatctaagaagaaactagccttgtggagtatatagatgcttttcattatacacacaaaaatccctgagggacattttgaggcatgaatataaaacatttttatttcagtaacttttccccctgtgtaagttactatggtttgtggtacaacttcattctatagaatattaagtggaagtgggtgaattctactttttatgttggagtggaccaatgtctatcaagagtgacaaataaagttaatgatgattccaaa

SEQ ID NO: 114142 - DNA, 2011 bp, Homo sapiens
agcggagcggaagcgacgaagggacgggacccgggagcctggacgagtccgagcgcgtcacctcctcacgctgcggctgtcgcccgtgtcccgccggcccgttccgtgtcgccccgcagtgctgcggccgccgcggcaccatggctgtgtttgtcgtgctcctggcgttggtggcgggtgttttggggaacgagtttagtatattaaaatcaccagggtctgttgttttccgaaatggaaattggcctataccaggagagcggatcccagacgtggctgcattgtccatgggcttctctgtgaaagaagacctttcttggccaggactcgcagtgggtaacctgtttcatcgtcctcgggctaccgtcatggtgatggtgaagggagtgaacaaactggctctacccccaggcagtgtcatttcgtaccctttggagaatgcagttccttttagtcttgacagtgttgcaaattccattcactccttattttctgaggaaactcctgttgttttgcagttggctcccagtgaggaaagagtgtatatggtagggaaggcaaatctgttctcagttcactccccctcaattctctgagtaggaacaatgaagttgacctgctctttctttctgaactgcaagtgctacatgatatttcaagcttgctgtctcgtcataagcatctagccaaggatcattctcctgatttatattcactggagctggcaggtttggatgaaattgggaagcgttatggggaagactctgaacaattcagagatgcttctaagatccttgttgacgctctgcaaaagtttgcagatgacatgtacagtctttatggtgggaatgcagtggtagagttagtcactgtcaagtcatttgacacctccctcattaggaagacaaggactatccttgaggcaaaacaagcgaagaacccagcaagtccctataaccttgcatataagtataattttgaatattccgtggttttcaacatggtactttggataatgatcgccttggccttggctgtgattatcacctcttacaatatttggaacatggatcctggatatgatagcatcatttataggatgacaaaccagaagattcgaatggattgaatgttacctgtgccagaattagaaaagggggttggaaattggctgttttgttaaaatatatcttttagtgtgctttaaagtagatagtatactttacatttataaaaaaaaatcaaattttgttctttattttgtgtgtgcctgtgatgtttttctagagtgaattatagtattgacgtgaatcccactgtggtatagattccataatatgcttgaatattatgatatagccatttaataacattgatttcattctgtttaatgaatttggaaatatgcactgaaagaaatgtaaaacatttagaatagctcgtgttatggaaaaaagtgcactgaatttattagacaaacttacgaatgcttaacttctttacacagcataggtgaaaatcatatttgggctattgtatactatgaacaatttgtaaatgtcttaatttgatgtaaataactctgaaacaagagaaaaggtttttaacttagagtagccctaaaatatggatgtgcttatataatcgcttagttttggaactgtatctgagtaacagaggacagctgttttttaaccctcttctgcaagtttgttgacctacatgggctaatatggatactaaaaatactacattgatctaagaagaaactagccttgtggagtatatagatgcttttcattatacacacaaaaatccctgagggacattttgaggcatgaatataaaacatttttatttcagtaacttttccccctgtgtaagttactatggtttgtggtacaacttcattctatagaatattaagtggaagtgggtgaattctactttttatgttggagtggaccaatgtctatcaagagtgacaaataaagttaatgatgattccaaa

SEQ ID NO: 114143 - DNA, 1933 bp, Homo sapiens
agcggagcggaagcgacgaagggacgggacccgggagcctggacgagtccgagcgcgtcacctcctcacgctgcggctgtcgcccgtgtcccgccggcccgttccgtgtcgccccgcagtgctgcggccgccgcggcaccatggctgtgtttgtcgtgctcctggcgttggtggcgggacctttcttggccaggactcgcagtgggtaacctgtttcatcgtcctcgggctaccgtcatggtgatggtgaagggagtgaacaaactggctctacccccaggcagtgtcatttcgtaccctttggagaatagagtgtatatggtagggaaggcaaactcagtgtttgaagacctttcagtcaccttgcgccagctccgtaatcgcctgtttcaagaaaactctgttctcagttcactccccctcaattctctgagtaggaacaatgaagttgacctgctctttctttctgaactgcaagtgctacatgatatttcaagcttgggagagacaacatatcttccaagaacacaagcctgggcgtaagaaccaccctggccatagtcctaacttggctgttgatttctttctgtctcgtcataagcatctagccaaggatcattctcctgatttatattcactggagctggcaggtttggatgaaattgggaagcgttatggggaagactctgaacaattcagagatgcttctaagatccttgttgacgctctgcaaaagtttgcagatgacatgtacagtctttatggtgggaatgcagtggtagagttagtcactgtcaagtcatttgacacctccctcattaggaagacaaggactatccttgaggcaaaacaagcgaagaacccagcaagtccctataaccttgcatataagtataattttgaatattccgtggttttcaacatggtactttggataatgatcgccttggccttggctgtgattatcacctcttacaatatttggaacatggatcctggatatgatagcatcatttataggatgacaaaccagaagattcgaatggattgaatgttacctgtgccagaattagaaaagggggttggaaattggctgttttgttaaaatatatcttttagtgtgctttaaagtagatagtatactttacatttataaaaaaaaatcaaattttgttctttattttgtgtgtgcctgtgatgtttttctagagtgaattatagtattgacgtgaatcccactgtggtatagattccataatatgcttgaatattatgatatagccatttaataacattgatttcattctgtttaatgaatttggaaatatgcactgaaagaaatgtaaaacatttagaatagctcgtgttatggaaaaaagtgcactgaatttattagacaaacttacgaatgcttaacttctttacacagcataggtgaaaatcatatttgggctattgtatactatgaacaatttgtaaatgtcttaatttgatgtaaataactctgaaacaagagaaaaggtttttaacttagagtagccctaaaatatggatgtgcttatataatcgcttagttttggaactgtatctgagtaacagaggacagctgttttttaaccctcttctgcaagtttgttgacctacatgggctaatatggatactaaaaatactacattgatctaagaagaaactagccttgtggagtatatagatgcttttcattatacacacaaaaatccctgagggacattttgaggcatgaatataaaacatttttatttcagtaacttttccccctgtgtaagttactatggtttgtggtacaacttcattctatagaatattaagtggaagtgggtgaattctactttttatgttggagtggaccaatgtctatcaagagtgacaaataaagttaatgatgattccaaa

SEQ ID NO: 114144 - DNA, 1171 bp, Homo sapiens
  misc_feature (45)..(45): n is a, c, g, or t
  misc_feature (47)..(48): n is a, c, g, or t
  misc_feature (66)..(66): n is a, c, g, or t
aacaaaacacgatatgttgctactatccaatttctgcctcccccntnnaaagagggcaggagaaanccgtcctagtagtccaccacaaaaatctaagaacccagcaagtccctataaccttgcatataagtataattttgaatattccgtggttttcaacatggtactttggataatgatcgccttggccttggctgtgattatcacctcttacaatatttggaacatggatcctggatatgatagcatcatttataggatgacaaaccagaagattcgaatggattgaatgttacctgtgccagaattagaaaagggggttggaaattggctgttttgttaaaatatatcttttagtgtgctttaaagtagatagtatactttacatttataaaaaaaaatcaaattttgttctttattttgtgtgtgcctgtgatgtttttctagagtgaattatagtattgacgtgaatcccactgtggtatagattccataatatgcttgaatattatgatatagccatttaataacattgatttcattctgtttaatgaatttggaaatatgcactgaaagaaatgtaaaacatttagaatagctcgtgttatggaaaaaagtgcactgaatttattagacaaacttacgaatgcttaacttctttacacagcataggtgaaaatcatatttgggctattgtatactatgaacaatttgtaaatgtcttaatttgatgtaaataactctgaaacaagagaaaaggtttttaacttagagtagccctaaaatatggatgtgcttatataatcgcttagttttggaactgtatctgagtaacagaggacagctgttttttaaccctcttctgcaagtttgttgacctacatgggctaatatggatactaaaaatactacattgatctaagaagaaactagccttgtggagtatatagatgcttttcattatacacacaaaaatccctgagggacattttgaggcatgaatataaaacatttttatttcagtaacttttccccctgtgtaagttactatggtttgtggtacaacttcattctatagaatattaagtggaagtgggtgaattctactttttatgttggagtggaccaatgtctatcaagagtgacaaataaagttaatgatgattccaaa

SEQ ID NO: 114145 - DNA, 530 bp, Homo sapiens
agcggagcggaagcgacgaagggacgggacccgggagcctggacgagtccgagcgcgtcacctcctcacgctgcggctgtcgcccgtgtcccgccggcccgttccgtgtcgccccgcagtgctgcggccgccgcggcaccatggctgtgtttgtcgtgctcctggcgttggtggcgggtgttttggggaacgagtttagtatattaaaatcaccagggtctgttgttttccgaaatggaaattggcctataccaggagagcggatcccagacgtggctgcattgtccatgggcttctctgtgaaagaagacctttcttggccaggactcgcagtgggtaacctgtttcatcgtcctcgggctaccgtcatggtgatggtgaagggagtgaacaaactggctctacccccaggcagtgtcatttcgtaccctttggagaatgtgagtatttattataaaaaattaaagggatgcattttacattttcccttgtcagctgtcattatgaattgcattctaaacatacttctc

SEQ ID NO: 114146 - DNA, 2075 bp, Homo sapiens
agcggagcggaagcgacgaagggacgggacccgggagcctggacgagtccgagcgcgtcacctcctcacgctgcggctgtcgcccgtgtcccgccggcccgttccgtgtcgccccgcagtgctgcggccgccgcggcaccatggctgtgtttgtcgtgctcctggcgttggtggcgggtgttttggggaacgagtttagtatattaaaatcaccagggtctgttgttttccgaaatggaaattggcctataccaggagagcggatcccagacgtggctgcattgtccatgggcttctctgtgaaagaagacctttcttggccaggactcgcagtgggtaacctgtttcatcgtcctcgggctaccgtcatggtgatggtgaagggagtgaacaaactggctctacccccaggcagtgtcatttcgtaccctttggagaatgcagttccttttagtcttgacagtgttgcaaattccattcactccttattttctgaggaaactcctgttgttttgcagttggctcccagtgaggaaagagtgtatatggtagggaaggcaaactcagtgtttgaagacctttcagtcaccttgcgccagctccgtaatcgcctgtttcaagaaaactctgttctcagttcactccccctcaattctctgagtaggaacaatgaagttgacctgctctttctttctgaactgcaagtgctacatgatatttcaagcttgctgtctcgtcataagcatctagccaaggatcattctcctgatttatattcactggagctggcaggtttggatgaaattgggaagcgttatggggaagactctgaacaattcagagatgcttctaagatccttgttgacgctctgcaaaagtttgcagatgacatgtacagtctttatggtgggaatgcagtggtagagttagtcactgtcaagtcatttgacacctccctcattaggaagacaaggactatccttgaggcaaaacaagcgaagaacccagcaagtccctataaccttgcatataagtataattttgaatattccgtggttttcaacatggtactttggataatgatcgccttggccttggctgtgattatcacctcttacaatatttggaacatggatcctggatatgatagcatcatttataggatgacaaaccagaagattcgaatggattgaatgttacctgtgccagaattagaaaagggggttggaaattggctgttttgttaaaatatatcttttagtgtgctttaaagtagatagtatactttacatttataaaaaaaaatcaaattttgttctttattttgtgtgtgcctgtgatgtttttctagagtgaattatagtattgacgtgaatcccactgtggtatagattccataatatgcttgaatattatgatatagccatttaataacattgatttcattctgtttaatgaatttggaaatatgcactgaaagaaatgtaaaacatttagaatagctcgtgttatggaaaaaagtgcactgaatttattagacaaacttacgaatgcttaacttctttacacagcataggtgaaaatcatatttgggctattgtatactatgaacaatttgtaaatgtcttaatttgatgtaaataactctgaaacaagagaaaaggtttttaacttagagtagccctaaaatatggatgtgcttatataatcgcttagttttggaactgtatctgagtaacagaggacagctgttttttaaccctcttctgcaagtttgttgacctacatgggctaatatggatactaaaaatactacattgatctaagaagaaactagccttgtggagtatatagatgcttttcattatacacacaaaaatccctgagggacattttgaggcatgaatataaaacatttttatttcagtaacttttccccctgtgtaagttactatggtttgtggtacaacttcattctatagaatattaagtggaagtgggtgaattctactttttatgttggagtggaccaatgtctatcaagagtgacaaataaagttaatgatgattccaaa

SEQ ID NO: 114147 - DNA, 1691 bp, Homo sapiens
  misc_feature (1489)..(1489): n is a, c, g, or t
  misc_feature (1496)..(1496): n is a, c, g, or t
agcggagcggaagcgacgaagggacgggacccgggagcctggacgagtccgagcgcgtcacctcctcacgctgcggctgtcgcccgtgtcccgccggcccgttccgtgtcgccccgcagtgctgcggccgccgcggcaccatggctgtgtttgtcgtgctcctggcgttggtggcgggtgttttggggaacgagtttagtatattaaaatcaccagggtctgttgttttccgaaatggaaattggcctataccaggagagcggatcccagacgtggctgcattgtccatgggcttctctgtgaaagaagacctttcttggccaggactcgcagtgggtaacctgtttcatcgtcctcgggctaccgtcatggtgatggtgaagggagtgaacaaactggctctacccccaggcagtgtcatttcgtaccctttggagaatgcagttccttttagtcttgacagtgttgcaaattccattcactccttattttctgaggaaactcctgttgttttgcagttggctcccagtgaggaaagagtgtatatggtagggaaggcaaactcagtgtttgaagacctttcagtcaccttgcgccagctccgtaatcgcctgtttcaagaaaactctgttctcagttcactccccctcaattctctgagtaggaacaatgaagttgacctgctctttctttctgaactgcaagtgctacatgatatttcaagcttgctgtctcgtcataagcatctagccaaggatcattctcctgatttatattcactggagctggcaggtttggatgaaattgggaagcgttatggggaagactctgaacaattcagagatgcttctaagatccttgttgacgctctgcaaaagtttgcagatgacatgtacagtctttatggtgggaatgcagtggtagagttagtcactgtcaagtcatttgacacctccctcattaggaagacaaggactatccttgaggcaaaacaagcgaagaacccagcaagtccctataaccttgcatataagtataattttgaatattccgtggttttcaacatggtactttggataatgatcgccttggccttggctgtgattatcacctcttacaatatttggaacatggatcctggatatgatagcatcatttataggatgacaaaccagaagattcgaatggattgaatgttacctgtgccagaattagaaaagggggttggaaattggctgttttgttaaaatatatcttttagtgtgctttaaagtagatagtatactttacatttataaaaaaaaatcaaattttgttctttattttgtgtgtgcctgtgatgtttttctagagtgaattatagtattgacgtgaatcccactgtggtatagattccataatatgcttgaatattatgatatagccatttaataacattgatttcattctgtttaatgaatttggaaatatgcactgaaagaaatgtaanaaccttngaaaagtccgtttgcgaaaagtccgggttttttaaacttccaatgtttctcttaccgtaagggaaacacttggggctggtcgacacacgtgttctccgttaacccacaagaagtttcgcacagtggtaatccgacaagagagaacaccgggacgcacgcaaacaccggttactcgttcttccagctgttttcggc

SEQ ID NO: 114148 - DNA, 2021 bp, Homo sapiens
agcggagcggaagcgacgaagggacgggacccgggagcctggacgagtccgagcgcgtcacctcctcacgctgcggctgtcgcccgtgtcccgccggcccgttccgtgtcgccccgcagtgctgcggccgccgcggcaccatggctgtgtttgtcgtgctcctggcgttggtggcgggtgttttggggaacgagtttagtatattgcggatcccagacgtggctgcattgtccatgggcttctctgtgaaagaagacctttcttggccaggactcgcagtgggtaacctgtttcatcgtcctcgggctaccgtcatggtgatggtgaagggagtgaacaaactggctctacccccaggcagtgtcatttcgtaccctttggagaatgcagttccttttagtcttgacagtgttgcaaattccattcactccttattttctgaggaaactcctgttgttttgcagttggctcccagtgaggaaagagtgtatatggtagggaaggcaaactcagtgtttgaagacctttcagtcaccttgcgccagctccgtaatcgcctgtttcaagaaaactctgttctcagttcactccccctcaattctctgagtaggaacaatgaagttgacctgctctttctttctgaactgcaagtgctacatgatatttcaagcttgctgtctcgtcataagcatctagccaaggatcattctcctgatttatattcactggagctggcaggtttggatgaaattgggaagcgttatggggaagactctgaacaattcagagatgcttctaagatccttgttgacgctctgcaaaagtttgcagatgacatgtacagtctttatggtgggaatgcagtggtagagttagtcactgtcaagtcatttgacacctccctcattaggaagacaaggactatccttgaggcaaaacaagcgaagaacccagcaagtccctataaccttgcatataagtataattttgaatattccgtggttttcaacatggtactttggataatgatcgccttggccttggctgtgattatcacctcttacaatatttggaacatggatcctggatatgatagcatcatttataggatgacaaaccagaagattcgaatggattgaatgttacctgtgccagaattagaaaagggggttggaaattggctgttttgttaaaatatatcttttagtgtgctttaaagtagatagtatactttacatttataaaaaaaaatcaaattttgttctttattttgtgtgtgcctgtgatgtttttctagagtgaattatagtattgacgtgaatcccactgtggtatagattccataatatgcttgaatattatgatatagccatttaataacattgatttcattctgtttaatgaatttggaaatatgcactgaaagaaatgtaaaacatttagaatagctcgtgttatggaaaaaagtgcactgaatttattagacaaacttacgaatgcttaacttctttacacagcataggtgaaaatcatatttgggctattgtatactatgaacaatttgtaaatgtcttaatttgatgtaaataactctgaaacaagagaaaaggtttttaacttagagtagccctaaaatatggatgtgcttatataatcgcttagttttggaactgtatctgagtaacagaggacagctgttttttaaccctcttctgcaagtttgttgacctacatgggctaatatggatactaaaaatactacattgatctaagaagaaactagccttgtggagtatatagatgcttttcattatacacacaaaaatccctgagggacattttgaggcatgaatataaaacatttttatttcagtaacttttccccctgtgtaagttactatggtttgtggtacaacttcattctatagaatattaagtggaagtgggtgaattctactttttatgttggagtggaccaatgtctatcaagagtgacaaataaagttaatgatgattccaaa

SEQ ID NO: 114149 - DNA, 1243 bp, Homo sapiens
  misc_feature (1235)..(1236): n is a, c, g, or t
agcggagcggaagcgacgaagggacgggacccgggagcctggacgagtccgagcgcgtcacctcctcacgctgcggctgtcgcccgtgtcccgccggcccgttccgtgtcgccccgcagtgctgcggccgccgcggcaccatggctgtgtttgtcgtgctcctggcgttggtggcgggtgttttggggaacgagtttagtatattaaaatcaccagggtctgttgttttccgaaatggaaattggcctataccaggagagcggatcccagacgtggctgcattgtccatgggcttctctgtgaaagaagacctttcttggccaggactcgcagtgggtaacctgtttcatcgtcctcgggctaccgtcatggtgatggtgaagggagtgaacaaactggctctacccccaggcagtgtcatttcgtaccctttggagaatgcagttccttttagtcttgacagtgttgcaaattccattcactccttattttctgaggaaactcctgttgttttgcagttggctcccagtgaggaaagagtgtatatggtagggaaggcaaactcagtgtttgaagacctttcagtcaccttgcgccagctccgtaatcgcctgtttcaagaaaactctgttctcagttcactccccctcaattctctgagtaggaacaatgaagttgacctgctctttctttctgaactgcaagtgctacatgatatttcaagcttgctgtctcgtcataagcatctagccaaggatcattctcctgatttatattcactggagctggcaggtttggatgaaattgggaagcgttatggggaagactctgaacaattcagagatgcttctaagatccttgttgacgctctgcaaaagtttgcagatgacatgtacagtctttatggtgggaatgcagtggtagagttagtcactgtcaagtcatttgacacctccctcattaggaagacaaggactatccttgaggcaaaacaagcgaagaacccagcaagtccctataaccttgcatataagtataattttgaatattccgtggttttcaacatggtactttggataatgatcgccttggccttggctgtgattatcacctcttacaatatttggaacatggatcctggatatgatagcatcatttataggatgacaaaccagaagattcgaatggattgaatgttacctgtgccagatgatctcctcggaatcatcgtgggnnatacggt

SEQ ID NO: 114150 - DNA, 1979 bp, Homo sapiens
agcggagcggaagcgacgaagggacgggacccgggagcctggacgagtccgagcgcgtcacctcctcacgctgcggctgtcgcccgtgtcccgccggcccgttccgtgtcgccccgcagtgctgcggccgccgcggcaccatggctgtgtttgtcgtgctcctggcgttggtggcgggtgttttggggaacgagtttagtatattaaaatcaccagggtctgttgttttccgaaatggaaattggcctataccaggagagcggatcccagacgtggctgcattgtccatgggcttctctgtgaaagaagacctttcttggccaggactcgcagtgggtaacctgtttcatcgtcctcgggctaccgtcatggtgatggtgaagggagtgaacaaactggctctacccccaggcagtgtcatttcgtaccctttggagaatagagtgtatatggtagggaaggcaaactcagtgtttgaagacctttcagtcaccttgcgccagctccgtaatcgcctgtttcaagaaaactctgttctcagttcactccccctcaattctctgagtaggaacaatgaagttgacctgctctttctttctgaactgcaagtgctacatgatatttcaagcttgctgtctcgtcataagcatctagccaaggatcattctcctgatttatattcactggagctggcaggtttggatgaaattgggaagcgttatggggaagactctgaacaattcagagatgcttctaagatccttgttgacgctctgcaaaagtttgcagatgacatgtacagtctttatggtgggaatgcagtggtagagttagtcactgtcaagtcatttgacacctccctcattaggaagacaaggactatccttgaggcaaaacaagcgaagaacccagcaagtccctataaccttgcatataagtataattttgaatattccgtggttttcaacatggtactttggataatgatcgccttggccttggctgtgattatcacctcttacaatatttggaacatggatcctggatatgatagcatcatttataggatgacaaaccagaagattcgaatggattgaatgttacctgtgccagaattagaaaagggggttggaaattggctgttttgttaaaatatatcttttagtgtgctttaaagtagatagtatactttacatttataaaaaaaaatcaaattttgttctttattttgtgtgtgcctgtgatgtttttctagagtgaattatagtattgacgtgaatcccactgtggtatagattccataatatgcttgaatattatgatatagccatttaataacattgatttcattctgtttaatgaatttggaaatatgcactgaaagaaatgtaaaacatttagaatagctcgtgttatggaaaaaagtgcactgaatttattagacaaacttacgaatgcttaacttctttacacagcataggtgaaaatcatatttgggctattgtatactatgaacaatttgtaaatgtcttaatttgatgtaaataactctgaaacaagagaaaaggtttttaacttagagtagccctaaaatatggatgtgcttatataatcgcttagttttggaactgtatctgagtaacagaggacagctgttttttaaccctcttctgcaagtttgttgacctacatgggctaatatggatactaaaaatactacattgatctaagaagaaactagccttgtggagtatatagatgcttttcattatacacacaaaaatccctgagggacattttgaggcatgaatataaaacatttttatttcagtaacttttccccctgtgtaagttactatggtttgtggtacaacttcattctatagaatattaagtggaagtgggtgaattctactttttatgttggagtggaccaatgtctatcaagagtgacaaataaagttaatgatgattccaaa

SEQ ID NO: 114151 - DNA, 1841 bp, Homo sapiens
agcggagcggaagcgacgaagggacgggacccgggagcctggacgagtccgagcgcgtcacctcctcacgctgcggctgtcgcccgtgtcccgccggcccgttccgtgtcgccccgcagtgctgcggccgccgcggcaccatggctgtgtttgtcgtgctcctggcgttggtggcgggtgttttggggaacgagtttagtatattaaaatcaccagggtctgttgttttccgaaatggaaattggcctataccaggagagcggatcccagacgtggctgcattgtccatgggcttctctgtgaaagaagacctttcttggccaggactcgcagtgggtaacctgtttcatcgtcctcgggctaccgtcatggtgatggtgaagggagtgaacaaactggctctacccccaggcagtgtcatttcgtaccctttggagaatgttgacctgctctttctttctgaactgcaagtgctacatgatatttcaagcttgctgtctcgtcataagcatctagccaaggatcattctcctgatttatattcactggagctggcaggtttggatgaaattgggaagcgttatggggaagactctgaacaattcagagatgcttctaagatccttgttgacgctctgcaaaagtttgcagatgacatgtacagtctttatggtgggaatgcagtggtagagttagtcactgtcaagtcatttgacacctccctcattaggaagacaaggactatccttgaggcaaaacaagcgaagaacccagcaagtccctataaccttgcatataagtataattttgaatattccgtggttttcaacatggtactttggataatgatcgccttggccttggctgtgattatcacctcttacaatatttggaacatggatcctggatatgatagcatcatttataggatgacaaaccagaagattcgaatggattgaatgttacctgtgccagaattagaaaagggggttggaaattggctgttttgttaaaatatatcttttagtgtgctttaaagtagatagtatactttacatttataaaaaaaaatcaaattttgttctttattttgtgtgtgcctgtgatgtttttctagagtgaattatagtattgacgtgaatcccactgtggtatagattccataatatgcttgaatattatgatatagccatttaataacattgatttcattctgtttaatgaatttggaaatatgcactgaaagaaatgtaaaacatttagaatagctcgtgttatggaaaaaagtgcactgaatttattagacaaacttacgaatgcttaacttctttacacagcataggtgaaaatcatatttgggctattgtatactatgaacaatttgtaaatgtcttaatttgatgtaaataactctgaaacaagagaaaaggtttttaacttagagtagccctaaaatatggatgtgcttatataatcgcttagttttggaactgtatctgagtaacagaggacagctgttttttaaccctcttctgcaagtttgttgacctacatgggctaatatggatactaaaaatactacattgatctaagaagaaactagccttgtggagtatatagatgcttttcattatacacacaaaaatccctgagggacattttgaggcatgaatataaaacatttttatttcagtaacttttccccctgtgtaagttactatggtttgtggtacaacttcattctatagaatattaagtggaagtgggtgaattctactttttatgttggagtggaccaatgtctatcaagagtgacaaataaagttaatgatgattccaaa

SEQ ID NO: 114152 - DNA, 1299 bp, Homo sapiens
tggcgtgaatcgagctcggtaccatctcgtgaccggcgttatggggaagactctgaacaattcagagatgcttctaagatccttgttgacgctctgcaaaagtttgcagatgacatgtacagtctttatggtgggaatgcagtggtagagttagtcactgtcaagtcatttgacacctccctcattaggaagacaaggactatccttgaggcaaaacaagcgaagaacccagcaagtccctataaccttgcatataagtataattttgaatattccgtggttttcaacatggtactttggataatgatcgccttggccttggctgtgattatcacctcttacaatatttggaacatggatcctggatatgatagcatcatttataggatgacaaaccagaagattcgaatggattgaatgttacctgtgccagaattagaaaagggggttggaaattggctgttttgttaaaatatatcttttagtgtgctttaaagtagatagtatactttacatttataaaaaaaaatcaaattttgttctttattttgtgtgtgcctgtgatgtttttctagagtgaattatagtattgacgtgaatcccactgtggtatagattccataatatgcttgaatattatgatatagccatttaataacattgatttcattctgtttaatgaatttggaaatatgcactgaaagaaatgtaaaacatttagaatagctcgtgttatggaaaaaagtgcactgaatttattagacaaacttacgaatgcttaacttctttacacagcataggtgaaaatcatatttgggctattgtatactatgaacaatttgtaaatgtcttaatttgatgtaaataactctgaaacaagagaaaaggtttttaacttagagtagccctaaaatatggatgtgcttatataatcgcttagttttggaactgtatctgagtaacagaggacagctgttttttaaccctcttctgcaagtttgttgacctacatgggctaatatggatactaaaaatactacattgatctaagaagaaactagccttgtggagtatatagatgcttttcattatacacacaaaaatccctgagggacattttgaggcatgaatataaaacatttttatttcagtaacttttccccctgtgtaagttactatggtttgtggtacaacttcattctatagaatattaagtggaagtgggtgaattctactttttatgttggagtggaccaatgtctatcaagagtgacaaataaagttaatgatgattccaaa

SEQ ID NO: 114153 - DNA, 557 bp, Homo sapiens
tggggagggaggcgctagaggaatctggggctattgccaagtcccctatcgttcacatgttcctggagaaggagtttggatactgacaaatcctgcatcagggagggctacctgagtccagagatctcatcctgagcctgtctgcttgcctggaaccacaggcaaaaagagtttcagggcagccggaataggacaacatgttcctagtataactaaaatggcctttatcaagttgctttaaagaggtgttctttgactgctgaaagaaatcatagatgacacaaacaaatggaaacacatcccatgctcatggatgggtagaatcaatattgtgaaaatgaccatactgccaaaagcaagctacaaattcaatgcaatccccatcaaaataccaccatcgttcctcacacagttagaaaaatcaattctaaaattcatttggaaccaaaaagagagcccatggagccaaagcaagactaagcaaaaagattaaatctggaggtatcacactacctgatttcaaactatactataaggctatagtcaccaaaacagcg

SEQ ID NO: 114154 - DNA, 602 bp, Homo sapiens
tggggagggaggcgctagaggaatctggggctattgccaagtcccctatcgttcacatgttcctggagaaggagtttggatactgacaaatcctgcatcagggagggctacctgagtccagagatctcatcctgagcctgtctgcttgcctggaaccacaggcaaaaagagtttcagggcagccggaataggacaacatgttcctagtataactaaaatggcctttatcaagttgctttaaagaggtgttctttgactgctgaaagaaatcatagatgacacaaacaaatggaaacacatcccatgctcatggatgggtagaatcaatattgtgaaaatgaccatactgccaaaagcaagctacaaattcaatgcaatccccatcaaaataccaccatcgttcctcacacagttagaaaaatcaattctaaaattcatttggaaccaaaaagagagcccatggagccaaagcaagactaagcaaaaagattaaatctggaggtatcacactacctgatttcaaacgctagggtaatgcaagtcacagacactatgattgtatcgacgcgtcaaatccaaagcggcagactggatcggataga

SEQ ID NO: 114155 - DNA, 325 bp, Homo sapiens
ttttttttggaatgtggcttacatacttgtcccctttgaactgtcctttgcatttgattggcttaacataattacagtaatatatatttactctattcacaatccatctttcctctttatcattttagtttttctcttccaaatttacactattaccagctaatgaattatataatttgagccatgtgccatggctcatgcctgtaatcccagcactttaggaggctgaggtgggaggataacttgaggccaagtatttgagacaaacccgggcaaaacagactctaaaatatatattttttaagccaggaatggtagggtgcac

SEQ ID NO: 114156 - DNA, 626 bp, Homo sapiens
  misc_feature (583)..(583): n is a, c, g, or t
ccccgtgacctgccagaccaccgtgtgccgccccgtgacctgcgtgccccgctgcacgcgccccatctgcgagccctgccgccgcccggtgtgctgcgacccctgctccctgcaggaaggctgctgccgccccatcacctgctgcccctcgtcgtgcacggctgtggtgtgcaggccctgctgctgggccaccacctgctgccagcctgtgtctgtgcagtccccctgctgccggcccccctgcggccagccgaccccttgcagcaccacctgcaggacctcctcctgctgagccaccacctgctgccagcctgtgtctgtgcagtccccctgcggccagccgaccccttgcagcaccacctgcaggacctcctcctgctgagcagtgcactgactgcccggaacgcgtaactcaccttctgaaaaagtcacactcccatttctctactttaacaaacctcctgccctgagcccacaaaaccccacatcaaccaagcagggaaccgagcactgggctcatctattaagacctgggccttctgaagtctgtaaaagaagcaatttccttcttcttaagatttcntggcatgtttattttctaataaatatctgttctttggccttgc

SEQ ID NO: 114157 - DNA, 408 bp, Homo sapiens
aatgtaatcactagctttgatggtaactgtaattatgtagaaatccaaaaactcagtcgtcattttaactggcttatcaggattagtggagggagaggaagaaaatattgcatatatacctggaatgtcattgtcttgtgttcattttactttgacctcttatttaatttgcttttcacatgtgtgtacctgaatatgactggaaactcagtgcattttgttaaaatattctcttctggttctaaattgaatcgtatagtgtggttaatttataatcttatgaatctgcatattgaataattgtgcaacaaataaataacaaaaaaaatctggcctatttgattttctggtctgtttcagcataaataaaaagaacatggaaaaaaatagttgaatctaaatagaatc

SEQ ID NO: 114158 - DNA, 342 bp, Homo sapiens
tgtagcctcagggcatggctggcagtgagcagagttcctgttgcagtgacgctggcacagctgtcagtgtgcccagccacactgtgccacgtgtttgcacgtgtgccctggtacatggggccagctgggggagcggggcctcaggctgacctgggacgagccagctcgctccagttggctggccgtgttcacggtgcccgtggagggtcctgtttgctggtgtgtcttgccctgcttgctcctccatttatgtttgtagtggtggtgggaactctgacgtctggagcccctggtgtatccccatcatctccccaagcagtcacaggtggtttctgaggtctg

SEQ ID NO: 114159 - DNA, 366 bp, Homo sapiens
cactatagctctgggactaggcagacctggggtcaagtcctttttccttggcccagaaatttcatcttgagcctcagtttctttctctttaaaatggggctagtgggacctacccctaggttctatatggagattatatgatgtaatgatccaacctgtacttgggaagcacttagtcaattgccactactgtttctcagcagatcttccagtaacaactaccaccacctgttgagtacccagtggtttatacacacaagcttattggatacccagggcaagctaaaggagttgttcttgttctattgtgattctcattttataaaaaagaaaactgagatttcaagaagtgccgtgtaccttgct

SEQ ID NO: 114160 - DNA, 355 bp, Homo sapiens
aaaaaatacaaaaattagccaggtatggtggcaggcaactgtaatcccagctgctcgagaggctgaggcaggagaatagcttgaacctgggaggcagaggttgcaatgagccgagatcatgccattgcactccaacctgggcaacaagagcaaaactctgtctaaaaaaaaacatatatcaactttgaaaaaatacatatattttaataagagttaggcttttaggaaatttgtgaaaaattatttggaaagagtaatattccaatactgagttgtaagcaatttataaaacattgatcagagactccagtgttattttgcactatgaaaacacaaggtcagaaatatagtagga

SEQ ID NO: 114161 - DNA, 493 bp, Homo sapiens
gcctgggcgacagagcaagactctgcctcaaaaaacaaaaacaaaacaaacaaacaaacctgaacggtccttgtgccatagaatgaggtcattctggaggttttgggaatgtacacccatgtaagaaccttgtgttttcctgtgtgtagagagtgtgtccttttggacaaaggagccactgatgttctagggactggtgattttcatctaccatgtcattgcctttaatatcagggatcatggggaggtaggctctgagaatgtgcctgtaacaactggagcttttgtgagtaagaggggagtgtttccttgctacctagtgggtcctgcatggtggcacacaaattaactcagaaccccagactctttagatgtaccaggaccagaagtttctggttggggctacagttacccccaaatcacctggctacggcaaagcattggtattcctcccaatttttgaagatgataatcttctagaggctgtggcacc

SEQ ID NO: 114162 - DNA, 427 bp, Homo sapiens
tatgtgggctttgctttttaaaggatttttaaagtattaattgattcataagaaatatttgtaacatttcattagtttgatacttttaagtccttgtttggagttaacataagtatttatgtgtgtatgtgtgtgtatatctgagagagataaatagagagagaaagaaagagagattctaagtgtctctaactttgtttttagttttcttttgctatattctagctttgtgtgttatagtcatagaatagtgtctatactgtgatttatcagaattttggagtgtctaaaaatgagataatttttaaagtgttacacttacataacttcaaagaaaggacaaaacagaagttatagagaatgttatgaaaacatgggatacaactacagcactgcagtggaaatttgttttaaatattttcatttc

SEQ ID NO: 114163 - DNA, 403 bp, Homo sapiens
catttgaagaaagggctgtccccagggccacagctgcctctgcagggctgaagaaaggaagacaaaaaaagtcaggcttcatacttcgaaggaaagggctgaaatggcaagaccaagtgaggctttaaaggaaattaagtgtaggtctggcaaaaagggtacgaagagctctgctcaccctgtggccaccccaggcctgggtaattacttcacgtggattagacctatgcttcacggcccaacaagaggctttaaaagagcccatgctttaggctacagaccctcgaataagctcactctcgttgagccttttctttttggctgtgggtccaaggagaaatggttggctcctttgagtcctttcctccctaaggtgcttatgtaatactaagagatcaaatga

SEQ ID NO: 114164 - DNA, 410 bp, Homo sapiens
gcgggcacctgtagtcccagctactcgggaggctgaggcaggagaatggcgtgaacccgggaggcggagcttgcagtgatcccagaatggcgtgaacccagaaggtggagcttgcagtgagccgagattgtgccactgcactccagcctgggcaacagagcgagactctgtctcaaaaaaataaataaataaaataaaaataaaaaattaagtaaatgcaaattacttttaagtatataaaagcatattcaagttcaaccataataaaactacaaataaaactctatcaatactctttcacctattagaatagcatctttaataacacaaacttcagcaaacatatagagaaataggtacttccattcatgcatctgcatgattggagtataaattagcacatatttatc

SEQ ID NO: 114165 - DNA, 756 bp, Homo sapiens
agagaataaagttttataaagataattaaaatgacctaaaatcccaccagccaagacgaccactgaagacattttttttaaacaaagatattttgataaatatgctttaggttctgcttctatgtctggtttcatggttttttattttttttaccccaaaatttggcttatttagagcatggtatcctggaatctaattttaaaactttttccattaagcatttttcaagttacctaataattattttaatcactatatggtttgcaatctattgttaaccataatttatttaaccaacctcctattgcttgacatttacagtatatacaaattgttttaaaaaaattcttgaaatacaaagccttttcttgattcattacattttgaccattccttaagaagaagaagtgaatactctaaccagatctaagtgaagttttaaaaacagtgtgtgtttgtataaatcttcaagcgtagtgttatacaatttaattgtgatgtgttcctagatcagaactaccctacggagagtccagatttggtgtttttacagccttcctttgcagaaagttagatcgagaaattcataagcagtactactttctctgggcataataaactagtttttctaacttgtttatatgtttaattattttaaaagtcaagaaactgaagcctaaatattcaacacatagttgactaaatgggaggaattcctggaggtgttcatttagaaaatgtggattttaagatat

SEQ ID NO: 114166 - DNA, 390 bp, Homo sapiens
cctcggcccatgttgttacagttgatgagccgacattgacacatcatcacctaaagtcatagtttacactagggttctctcttggtgttgtacatgctgtgggtttggacaaatgtataatgacatgtattcactattatggtgtcatacagaataatttctgtgcccatttcaacctaggggatctcccctcctgcatccatgatacaggttgagtatttcttatctaaaatgcttgggaccagaagtgttttggacttcaaattttttcagattttggacctttgccttacttaccagttaagaatccctaatttgaaaatccaaaatgctccaataagcattttccttgagcatattttttggtggtcaaaaagcttcaaattctgg

SEQ ID NO: 114167 - DNA, 321 bp, Homo sapiens
ccactttgccattctgcattcaggcaaacattactaatcaaccacggtgctaccgcttaccccttccttattcaggggaggcattgttaatcaatcacaacactggttccacaactctcccctcctgcatccatgatacaggttgagtatttcttatctaaaatgcttgggaccagaagtgttttggacttcaaattttttcagattttggacctttgccttacttaccagttaagaatccctaatttgaaaatccaaaatgctccaataagcattttccttgagcatattttttggtggtcaaaaagcttcaaattctgg

SEQ ID NO: 114168 - DNA, 881 bp, Homo sapiens
aatttctgatgcctttgaattgcccaggaggtttctggatagaaccatggagctaagtgaagtctagactgaaaattaaagctgttaagtgtgaagtgtgtagggaaaaattaaagtcttgagtattcatgaagtaaacttggaagacagcctaagtgtgtgcagtgaagaattccagtttatttttgactaggtagaggaagatgaactggataaggaggagttacacagttaccagcagggtgttgcgctactgaagatgagtaaggcttcatggaaagagtggtgaataatgtccagttgctgtataagaattaggtggaaggattagcacatattaatcatctaaaaaacaaatacattaatatcttcaaagtctgatttgggagaatttgttttcattgttttttttcaaacaggaactgaacaataccatcatttacagttacgggctatgggtggtcacttaattggtgtgatttgagactgagaacctcctgttccacaaatctatacttcatcctctactaatgcttgaaaagtcattgatagaaatctgttttaaagcatatattcctgggaagagtaatatgtttagaagatacataattctcagctgtgccaaaatttagaattaactgaggagttgtgtactaaaaatgctcaagattatattccatggttctgaggtggggccttggcacatgcatttttttaaaagctcccctaggtgattctaatgtgccattgttgaaaaatcattgacagcatcctattaacacagtattgactcataacgttttgtttagatgacatgtgggtaggacaggacacctatttataaaacagtggttggtaatggccattgagtagggaggatt

SEQ ID NO: 114169 - DNA, 569 bp, Homo sapiens
tctccagtggcattggctgattgggttgccaggctcaggtcactgacaggctctggcttccgagtatcccgccattctcctgcctcagcctcccaaagtgctgggatacaggcatgagccactgtgcccggccccagagtctcatatgttttactttataccatcttgattttttgttattcttagggaagttttcatttattcaagattatatttctgttttttatagttagatttttaatgtatctagaatttagttttgtgaatatcataaaattaggatcttactatattcctttaaaatggaaagccagtcgtcccaacactattggttagaccaggagtcagcaaactacggccaacatgttttgttaataaggttttattggaacacagccattctattgtcattgtcaatgactattttcatattatgccggcagagttgagtagttgcaacagaaactattaatatatggtccacaaagcctaaaatatatgtctgtttatggaatttcttttatttctttatttgcttaatgtgttcttctctcatcatctcacactgt

SEQ ID NO: 114170 - DNA, 370 bp, Homo sapiens
gtggcaagaggccatgggccggataagggggctgtgctccagcctgactcaggcacacgttggttgagtaaccaaggcaagccctgtgctcttccaggccttgatttcttcctctttaaggaaaagaaattggacctgatgcttcctaaagtcttggccccaggacagggaaggaggctcactccctgaaagtgttcactcaggccaggtgcagtggctcatgcctgtaatcccagcactttgggaggccaaggcaggtggatcacttgaggtaaggagtttgagaccagcctgggcaacatggtgaaaccctgtctctactacagatacaaaaattagcctggcatggtggctcatgtctgtagtccca

SEQ ID NO: 114171 - DNA, 767 bp, Homo sapiens
ggctcacgcctgtaatcccagcactttgggaggccaaggcgggtggttcacaaggtcaggagttacagacaagcctggccaacaaagtgaaaccccgtctctactaaaaatacaaaaattagccaggtgtggtggcacgtgcctgtagtcccagctactcgggaggctgaggcaggagaatcgcttgaaacccttgaacccaggaggtggaggttgcagggagctcagaccatgccattgcactccagcctgggtgacggagtgagactccatctcaaaaacaaacaaacaaaagaacaaaatttgaaatcatcatcactaaataaccactaataccatacatccgaaatacttttatccaactgttttctttatattttctttaaataatttatttccctccacatttataaaacaatcatatatccctaaataaacataaggttccaagaaacaaccttctatctgtgaccattctctcaaacagcctctacagcttggtattcttattctatgatagtcagagcattatataaatactccaattgtaatagctacagagctctagacttgcacataacacctaataaaaatactaacagctactactgaattcattcaagacattctaaatatattatctcattttgttttcacaagatccttgaatagcaagtattgtttccttctttcaaaagatgaagaaattcacattgtggtgtccttttggttaataaaggctttattagaacaggagaacacatctg

SEQ ID NO: 114172 - DNA, 694 bp, Homo sapiens
gtaaggacacaagcctgagcgggtcctggcagctggtgtgcaactttcaggggagccacgtttgaggatgacactgacatcagagggaacaataaagagacagaaggaaaatgggtcactggcaatagccccaggctcctggaccagccagcccagacatctgccccacctctgggctttccagttgaatgagccaatcctttcccctaaaatttatgtctatttgagttggtgtttttgttacttgcaaccaagtaactgactggtcctgaggctttcttcaggtctctgggccgccccaggagcctctggttaaatgcccactttttgcctaaattgctgcagtacaggaatttggccaatgactcaacttgccgaacttgcccaccgcctccccagctctagaatggggataattatatacacttgattgagctgttaaatggattaaaagtgatttaaagactgtctagcacactgtaaattctcaacacgttagcaattactattcgaaagcactgaagggtagctgaaaagtcccaatcccagtgagcaatcagccacatccctcccctgtcttgtttgtagttcctttgttcaggtcaacaagtcccctcctcacaaacagtcccagagaacagctaacccagtttctgtcagaagggtggcaaatctggcctgggggtgggggtgg

SEQ ID NO: 114173 - DNA, 201 bp, Homo sapiens
ttgcaaggtggaggaaggaataggatcatgagtcgaaacagaacatgtgctcctccccatttccctcaaacctcagcatcagcctggcccattctgttttctactaacttccatgatagagccagagtgggccaggaagcacatactgacagtgggaaggagatatcaggaaatcttgttctaatccctagagcagagctg

SEQ ID NO: 114174 - DNA, 435 bp, Homo sapiens
ggccaccagcgttccccgcaatccctgtcctcaggcataggcccttctgctcttcccactgtagagcagcacccatccccaccaaacctcacttctgggtgtgacttcataggctgtcgtgttctgcagtaccctcgagtccgaggctgttgagtctgaaggatcctcagaagactggcctctttctgatggtttatggactatggcaaagatgaggaaatggtatttggagaccacatactgggccctaggggtgctctttgcaactgcaacaaacatggacagaattgggaaatttgtttttaatggtaaaaatacatgatgaacagtaccacagagattttatttgatcttactgatcttatgccatactaaaaatctcacttcccaaccacaccaagctaattcattctatacatacaacaaagctaatac

SEQ ID NO: 114175 - DNA, 591 bp, Homo sapiens
gggtctaccttgtttctagcccggaaccctagggcaagagacaggggtgtagtgaggggaccctagaagcctcaggcatctcagtgcctcgttgctcccattatagtaaggaaagaacagcacacctgggtcagagtatattcagcttaggagggaccttgagggtcacagagtccagtgctccatccaaaggttacaggctgaaagacactgggtgggtgagtgtgtgggtcacccaggcattagtgggagacactcagaattattggattttttggagaatagtgtaatcataggagcgcttccccttggccatctcaaaggccagaagggaagcctaagctttagcacctgaccacgctgtgctctccaagccactgatcacagcctcccattccacacttcctcttacaccatctgttcatgagatctgtccagacatccaggctgatccatgaagaatgaatgtcttcagcctctgtgtctcaacctggctgtcacttagtctggatggcctgcccagagggaaccaagccctgtgcccagagcatgtgggagagatgtggagagtcagacaaggtcagggccttg

SEQ ID NO: 114176 - DNA, 166 bp, Homo sapiens
tggatgtctactgcacatctcaaacaggtccaaaactgagcttctgtttcctccccactcaaactgggactctccccatcttcccaattttagtaggcaaggcctaacctacagtcacttgctcaagccaaaaccttcaggtgatcctcaattcctcttttttcct

SEQ ID NO: 114177 - DNA, 702 bp, Homo sapiens
ccactagtctctttccctccacaagggagaggctggctgagctgtattaacctctgtatgctgcaccatgagtcctggagcagtagcaggtcaggtcacccagctctctctctttcccagtgtcctccaggcatctagagtatgctgtgttccatcagcactccaagacaaagcagaaacgagtccctcagacagcctcccaaaagggcagaatgttggacacactttgctcttctcttttcccctgtataggagaggccgccaagatgtattggcctctgttggactgcagatcctctacagcagcagcaagctgccatgcttttgttctcagtagtccccaggcatctatggtatatcaagcctttcaatgctcaagacaagagaaacagtcccctgggaagccccctgaaaaactggaaattggattcaggctccaactctctccctccccagggaaaggcaagagccaggtgttttctcccacttgtttcacactgagctggggcaatgggtatggtgacagagtacatgccaatcccagtctcctcttttgttctgagtggtccctagactgatacccttttcagtcagttcctaaattcaggcaagagagaaactaatccctcaggcagccccctgaaaagtctgcacattgggcataggtattagtcttctctttgcctccccagggagaggtca

SEQ ID NO: 114178 - DNA, 430 bp, Homo sapiens
atttttaaaaattaatgcaacaatgagagatgattgttgatgctcattattaaatcatttattcatcccacacaatgattcagaattattcatcaagcttgctggaaggaagctgggttttacctccacggtggtttggggagagatgtgctctttaaaagggtattttataacaacacaattatcataattaaaagttaccctgatattctgatgagcttttgacatatttttgagtactggcatttcagcacaaggagataaatgagactgagacagtagtagggaataatattgccatggggggaagaaaacaaaggcaatattaaataccagctgccatcgtcacccccaattttatcccagcctttaagttaatgaattttacaaaatatcacttgaacttctggctctccaaaatgagttccaa

SEQ ID NO: 114179 - DNA, 144 bp, Homo sapiens
gtcagtgtctggcccttagaggtgccttgactcctgtgagggctgagctgggtcacagaccctggtggggacacctcaaattgttgtggcatcagcctgtcaggggcccaggagaggcaccaagccactggggagcacgaggta

SEQ ID NO: 114180 - DNA, 126 bp, Homo sapiens
attctccttctttctgaaacgccatccaagacacagtccatttctcaagctttccttaatccaagtatgcttgcattctataaacctctctctgctgcccttcagcttttcatggtgtcaactgaa

SEQ ID NO: 114181 - DNA, 257 bp, Homo sapiens
tctggatcagagaccttcaaaccatgctgctcccctccagggataccccctgcccgccctgcagtccagatcatagactaccatccacagcccctccagccccggacccccacctcagccagagacccctgggccctgccacctcccacttcaggggaaccccccccggcactgggggatcctcctaggagtcgacccttggcaggcatttcaaggctttgggcacttgggccgtccggttttaccaacggttcttg

SEQ ID NO: 114182 - DNA, 755 bp, Homo sapiens
taagttttgtttttcctacactgcttttctttttttttttcagatggagttcccctcttgtcatccaggctggagtgcagtggtgcgatctcagctctctgcaccttctgcctcccaggttcaagcgattctcctgcctcagcctcccaggtagctgggattacaggcacccaccaccacactggctaatttttgtattttttagtagagatggggttttgccatgttgaccaggctggtcttgaactcctgacctcaggtgatccacccatctcggcctcccaaagtgctgggattacaggcatgagccacgatgacagggctacactgtgtttttcttaaagggacacatctgcatattgtcctcagtcacaggttactatacaacatggtgactatggttagtaacaatgtcttgtgttttgaaaattgctgagagtagattttaaatattccaatcagaaaaaattataaatatgtgaggtaatgcatatgttaattagctcatttgagccattccacaatgtatatatattttgaaacatcatgttctacatgataaatatatccaatttttatttgtcaattaagaaaataaaggaaaaaagtaccacttaaataaaacttgcttaaaaacacctattaagctagacatggtggaagaaattggcaaaaatgtaaaatatctttcttctcactaaacatttttagtttggaatcaaatagccatttaattaaagcattttatttaccta

SEQ ID NO: 114183 - DNA, 850 bp, Homo sapiens
gtgactcccccaggttgcccgtcaaggccgtgctgtgaccgttctcccggccccagaactcatggtttctccaccagcttgtcacctcaaagagtaaaggccagagaaagacctgttgagaattcagatgtggtgttgattttttttcttggtcatatatttgcaatatttgtccttcagctttgcatttgtatccacgagtgacagtggtgtgtagggtttttttggtggagtaccgttttcctcaggtttaggaataaatgttatgcttgcctcataaaaggaagtaggaagtttacttcatttcccatggccccctccccgtgtcttctcctcccactggcccgagtttacggcactgagaaagggtgcgtgcccacgcgtaccacacaccccagagcacgaaggctgagaatgtaaccgaggtttccaggactccaaagcccagtgccttctgctacgcacttgagtgtctccacttttgataaacacataactctcatgtcctttttccctggtacttaaaatttcaaggtaaagtagattccttagttatctgcaaagagaaaatttaattttgatcatgaaaactacaaatccttacttggatcatgagaaataaaaagtctgcaaactcacccattcactgggtcaaaaagccttgcctgtgccattttgtttttcctttcgagaagataaagatggcaagaaaagcaaatagaaaaaagaaaatattaaaaggcacatatcaaatataaactcccacaccccacaaagtgggagtccagctttctcaagtgtgaaaaggctaaacgctggagaccacctggccacacagcctcaactcagc

SEQ ID NO: 114184 - DNA, 243 bp, Homo sapiens
gagtgggggctgaggcaggagactcactcgaacctgggagacggaggttgcagtgaggcgagatcgcaccactgcgctccagcctgggcggcggagtgagactccatctcaaaaaaaaagttcactccgaatgcgttagaggtctgaatgtaagggcgaagactatgacactcttagaagaaattataggattaaatgtgacaattgggttaggcagtgttttcttagatacactgccaaaaa

SEQ ID NO: 114185 - DNA, 192 bp, Homo sapiens
cacaaagcactcacctggagccctggacttgtcatttgtaaccagatgatgccctcttcagctttactcttctccagttctctgagactgtgaggtccgggcactgtccattccaactccgacatgtcagccatggctgaatcagtgcttctccatccatcttcttttcacatcggaattgctagaggagct

SEQ ID NO: 114186 - DNA, 181 bp, Homo sapiens
tcacaaattaatgcatgttgcagttattaatgtacatatcctaggttcctgacaggacggcaagctcccagattttatgtgactttattctgcctcccttttcacaccctcacagtgagcacctggtacatatgggcatgttaaagcctgttaggtgaatgaataaactgatggatgaaat

SEQ ID NO: 114187 - DNA, 650 bp, Homo sapiens
gggctgctgaagagacagaggtctggatgcttgtccagcgtcacacagtgggaagggttggcaccaggattcaagccctgattgaccagctctggatttgtgtcctagcatggagacaggcatagtgtaaactcagtgcctcatcccccaacccagctggcaggagaggctctgcccccacctgggctgggcaggggtgccggagagcgaacccccaatacctggggctggcctgatgtcaggagacccgtcactgccccttcctaggacccaagctgtccgcttccctccccaggccctgctgtccttgtctgcaatggaggagggtggctctgtggcccctgaggccccctctcctcgggcctgctgaaagagcactgtttcggggccatcgtggcgatgctattcacccatttgtttggcaaatgtttactggagacatggctggcctgtgccttggggccactacagggacaggacctccaggaccctcctcccggctcgggcccagcagagacggtggacagacccccaggatccgggcccagcagagacggtggacagacccccaggatccgggcccagcaggggcggtggacagacccccaggatccgtgcccagcagtgacggtggacagacccccaggatc

SEQ ID NO: 114188 - DNA, 494 bp, Homo sapiens
tcattgcttaggctggagtgaaatggtgtggtctcggctcactacaacctctgtctcctgggttcacgtgactctcctgcctcagcctcccgagtagcaggtattacaggcatatgccaccatgcctgactaattttctatttttactagagacggggtacctccatgttagtcaggctggtctcgaactcccgacctcaggcgatccacccaccgcagcctcccaaagtgctgggattagaggcctgagccaccatacccagcctctatgtagctttgtaaaaaatccttgtagctgtctcttttaggaataaaatgggaggcaggtttgtctgacacagttcccagcctgacttttctctttggcttagtaatttttaagcttctttcacaaccttctgacagacataatgctttgacacactgatattggtttatatagattttccaaaacagtaaagtccaagggtctatcctgaactgggttagcggag

SEQ ID NO: 114189 - DNA, 417 bp, Homo sapiens
ccccaacccagcatgatttgtactgagcaagaggattctaagggctttgtgtagcccacgcaaggcagaggaaagggtacaggggctgcccttgtcccccagctgccagagactggatcctcacatggagccccgcccggtttgtccccaccagggcaggacttggataaaaagtctcaggagaacaaagaccacattttcccctgtgaagcagagaggccactgccggggaaacaatggccttgctgcggatcaaaggagctgggcctgtgctggggacaaaagctgagtccctgcttgataagactgacaaccggctcttcccctccttttagaaaagtctccagagagtccaccccaccttcccagcctcacttcttttcagctaagttccctagaggggtgggtggagagcgg

SEQ ID NO: 114190 - DNA, 273 bp, Homo sapiens
ccttcttgatgggttttggtccattgttttccattcacattcaaggagactgggtctagttctcccttgaagacagaatattgggaaaatttttttggaatttctagaattaagttttagaattaaacacatccctaaaacttctaaagaaggtaatgtagtcaaatggctaagaagggttttcttagtccaagatttatctcctcatttactggttaattatacaggctctggcattattgagatctaaatttgaatctcaactccgctatt

SEQ ID NO: 114191 - DNA, 331 bp, Homo sapiens
atgctgggattacaggcatgagccaccatgcctggcctgttcctgttaacttttattcaagtattttagggtcttctgagtgcagagcatgggggcattgggaaaatacaaaaagatatttattcttttgtttgttcttcaccagctctataaccatccctatgcttagtcctgtaatactgagatgcataagacatcatccctgtctccaaggatcttaggtctataaaatgcaattcctgctctcagggagcatactgtctagttacgtcactatattagtcagcagtttttcagtggcaaatgacagaaacccaactcgagctggctt

SEQ ID NO: 114192 - DNA, 155 bp, Homo sapiens
agcgagggcacctctggaatgagggtcttatgacttactttaggggaaggtcagaaaattgttttatggcctgtttcaggggagaagggtgggaggaggtcagaaaccttcctgcttctgctactttctcaaataccaaggtaccatattttggg

SEQ ID NO: 114193 - DNA, 281 bp, Homo sapiens
gagatgggtttccaacttggggactccctgggttgggaggagaattgaggagaggagatggagaagagacatgggtcagaggtgaagccaaatgtgctggttggactgagagactgggatacaaagagagggaagctgcttgagagctggtacaagagggaaatggtgaatttgattttgaatctggcaggaggattgagtgtttggtgacacagcccaaagagaattccaacacacagatgtaaaattccatttagacgagagagcaatcctgcagttag

SEQ ID NO: 114194 - DNA, 446 bp, Homo sapiens
gcaaatattgctaagcaacggtgtacttgagagagcatttttaggagcagagccaggggagttatgcctgggagcactcactgcttcttatggctcagtacaagggaagagattcaaagttctttcctgtaagggccgccattgcagccgccagcacacgagacagtgacctagtggcaccgattagggctggcaaggggatgtgtgaaaacaggaaagcttttttgccatgtgggaaggcagtaagacatgttcacagaggtgagtgccccacagtgtacagctgccccacagtaagtatgcagcagctggaggttcaggtggggaggatggagggtagggaaataagtgagaggtgaggccacaagagaaagttgatgtgtcttgtttctcttcccccttctcttcttttcttttgcccccctgtgttaggggctaacatggaa

SEQ ID NO: 114195 - DNA, 366 bp, Homo sapiens
gagcttgggcttaattccaggtatagtagagacctgccaaagggccctaaagtggtggatggcagtaagtctcactagctgaactgtagaatctcctttgtttttgtaaaattcatattttactctgatttcctttaggctctaagtgaagtgtacagatcttaactgtataggtctgtgagttttgtcaaatgacggatgcgtacctgtgtgtaatccacaccatgaggatatgggacatttccatcagcccagatatatccacagtgcccctttgcagtcttcctagtcaaccactgttctgattcctgagccagcctttgtaactgctcatgaaaatgacacatgtgcattgttattacagtg

SEQ ID NO: 114196 - DNA, 377 bp, Homo sapiens
tgaactgaatgaacagtgcatttggcattgactatcccccactggatgtccttagtggctgtacgtgtacagagcagaaggggaacaaccagggcaatctgggcttctgaatggttccattcattccatggaggcataacctcctgcctgacagccttcccacatccatttccatttcctccctcgttccccacagctctgcaacttcagccttccatcctcctgccatgtgggctatatccaatccaagtttatttaggcacagtctctttcttcatacacatgtgtatgttgggtttttcaaggcatccagcattctttcctcaacagctaccttttttccacaattgacagcatttggactcaaacagaaaaaa

SEQ ID NO: 114197 - DNA, 323 bp, Homo sapiens
gctcccgcttccacactcagtgcccttctcactttgttcagtcttgggttgcactgggttgctttccccatcacctacgataaatgatgaatgccctctgcatcccagccttgccagacaccctgccctggcccttccttcctcagcaatgccctccttgggcccttcctgggctctgactctccacaccgggcttcactcccaccccattgctgcaggttcacgctgttgagtctctgacgctctggtaccaggccatacatggatgtcctcaccttgctcaggctctgacactcacactgggcaaccttcctacacagatg

SEQ ID NO: 114198 - DNA, 379 bp, Homo sapiens
atttttagcaagtcattcttcaccaacttttccttccatctgatgccctactttggtttaattgaaattcattagagacttaaattttatgtaattaacagaaaacttaagaaatgcgcagtagctgtgtcagtagttataggctgcaagtggttactctttaattgctgtcataatggcccattagtcatgcctctgaagaggtgtcagatgcttttttctctttctgaaacatctgtgttatttaataaattgaataagcaagcagagtttgcacagaatactaagtaagttgaataatcacctttctagagacattctttgaagtaatactactctgtgtgcaacatttttgtgctacccttagtaataaaacttg

SEQ ID NO: 114199 - DNA, 248 bp, Homo sapiens
aatatcaaggcaggctcaagtatttccaagcatgcttttagtgcagaaagacacatggggcaggggaaggggaaaagggtggcgagcagagctagcagtttatctctatggtgggatgggacacgtctccggaaagacagcagagggtttggtagagggaagcagagatcctgaaacgacatgagatctttgttgtaaataacgtctttctgggtctggcgtggtggctcacgcctataatcccagca

SEQ ID NO: 114200 - DNA, 412 bp, Homo sapiens
ccctgtcttggcagaaactggggtcctttggcgatttagcctgaaaagcagcccaaggctggagggcttatgtatgctggggtgctggggaatgcagggtctcctgtacttgggaacgccatcaccccttctactcccacacacagcacagggctccatcacaccagcctccccgacacccccttccttctcacacacccgagatgccaaactgctgccaacagttatcttgctcgtctctgtcccacagctggggcctgcagcaggtggcacttcacatcactcacttgatgaggctccctcatcaagaccctcccatccctgtaacctggccctttcctctcctcttcctttatttttcctgcgtcattgtcattatctttttctcaccctcccaactatctcacaccat

SEQ ID NO: 114201 - DNA, 314 bp, Homo sapiens
caacatctcattattattatgaatttagttttgaacccaccgatcccttgaaaggatctcaggaacgcccagggctccctgacccacactttaagaactactgcaatagacaaactcctaccttataatcaaggagataaacaagaactagaaaagaaaaaaaaaataggctgggcaccgtttttgtaattccagcactttgggaggccaaggcggatggactgcttgaaatcaggagctcaagaccatcctaggcaacatcacaaaaccctgtctctacaaaaaatacaaaaattagccaggcatggtagcat

SEQ ID NO: 114202 - DNA, 323 bp, Homo sapiens
ttggtgtcttcagagaactggaaaatgacttgatgtggaaaatgcacacattttgtgccagaaatgttgtgagtagggaaaaagttttgtttttagggtcacgactcaaagactttgtaacatcctcagtgaaaattcctggctaccaatggccactcttggtcattcccaactgtcctttagacagtgtccaatcacctggctcttcatcgtgccagggtgcaaagcctttctactctctatgtccaactgttaagctcttccctccgtcttatcctcaaactcacaatcctaaacccaataaaacaaagcactgcctgccc

SEQ ID NO: 114203 - DNA, 414 bp, Homo sapiens
agtgcagtggcctgaccgtgatgtaaccgagtacccctactttcctaagagatggtttaattatttctctctctcttctttttcccccagttccccacttcccctttagaaatgcaaatatagcctgttatctcccctttagcagactctccctgtagggcaagttcatctacccgctaacatgcccagcccttagagacttcttatttatgtctcctaagttaaaaaataaataggcagttgccaatgaggattggagggctgatacaagaagtccacagaagttgggtgtcctgggcatggtgacatacacctttaatcccagtgccttgggagaccaaaatgggaggattatttgaggccaggagttgcagatcagcctggtcaacatagagaaactccatctctaccaaa

SEQ ID NO: 114204 - DNA, 742 bp, Homo sapiens
gagctggagaggagctgaatcccaggtcagtgattaactagctatataaatttggcacatgatttaatctttctaatctcaatttccttctgtgtgaagttgagataatatttcttatctttctgggttatttgtcaaatggcaagcaatatttgtaaagttcctgattcataataaaagatcttcaaatagtaactcttgtttggatttccttacctaaatcctttatctgagccctttccagcattctatttttcagcaagatatgtaaatggcttaagaaaattggctcatacattagatatttttaaatcaagttttcctgtgtatcctgtgacttaatcttctagatctatcttatatatcatcattgagaatgaaatatataagaatagattatcaaaactacagaattgtttttatattattgaaatttaaaatatttgggtaattctctatgctagtaaaaaattaataatataaatcttccatcatatcccactgctgcttgagctcttttacaaaaagtttttgaaggagataaggtgatattattaataccaccttgcagaagaaaagaaattgggacccttaacaggtaaaaggatttaatctaagttacataatcagtactggatgtgctgacaagacatctcagcctctggcattcttcacatgttatataaatggcatagtattgggtctctaacttttaaatttaccaatagcataattttgtgta

SEQ ID NO: 114205 - DNA, 429 bp, Homo sapiens
gggattataggcgtgagccaccacgcccggctgagatactttctctaaataaaaatgctcttgctgtacttgaaaatattattaagctgaggatttcatgggtctgagaggactgtgcgtctgactttgtataagttgtcctaccatcagtggagtttgtaagcattgttttttttttaagacagagtgtcactgtcgcccagattcgagtgcagtggcacaatcgtggctcattccaacctccacctcctgggttcaagtgattcttgtgcctcagcctcccaagtagctgggattataggcgtgcgtcaccatgcccagctaatttttgtatttttttagtagagatggggttttgccatgttgcccaggctggtcttgaactcctggcctcaagtgatccgctcacctcggcctcccaaactgctg

SEQ ID NO: 114206 - DNA, 411 bp, Homo sapiens
tgctaattaaagataattcactcttggctgtatgtggtggttcaaagtaatccctgcactttcggaggctgaggtgggaggttcatttgagctcaggagttagaaaccagcctgggcaacactgcaagacctagtctctattaaaaatcaaaaaagttagccaaggcatggtggtggcaggcgcttgtagtgctagtgactcaggaggctgaggtgggaggatcccttgaacccaggaggtcgaaactatagtgagccgtgattgtgccactgcactcttgggcaagagagtgagaccctgtctcaaaaataataataataataataataataattcactctttagtattttgatgtaatttagaatttgaacaacctcatttatatgtctcttagctgttgatttagtta

SEQ ID NO: 114207 - DNA, 406 bp, Homo sapiens
ccgggctgagagagactgccttagtggcaaggtgaggaaaaagcagtgcctgccctgagtttgccaacccatggggcaaatgcagctgtcaccctttcacaccccaggagaaactgaggaactcacctagggccacaggcttgcaggtgtctgagctgagctaggaaccctagcccaacctcactgcaaaacctagattccttctaccagagcaacggtcttcagactgttttgatcacatatcctactggtgtgcaatttttatcacaaaccctcattgaaacgtgtctgtttataaattatatacttattctgttgccaatcactacaatgcatatgagtatgcttaatctctcttttttcttttcttttctgtttccttcttccctccctccttccttccttt

SEQ ID NO: 114208 - DNA, 710 bp, Homo sapiens
agatgagtggtatttataaagaaataggtcaaaaagggaaatgtatcaatgcatagccctgtggttggtaattgtgtatgctcagctttataactgcagtcatttgaaatactttaagaacaaccagtgtcttccactggcttcactcagatgctaatctctggaaacacttgcacagacacactcaaaacactaataagtttctaggtgttccttaatccaatcaacttgacacctaaaattaagtcccaaagaacacctcttatcaactcagcacccatacatacctccttaaaccgtacttaatttccaaataaagacaatgagaaagttgtagttctacctatcatgatgccagtatcctctgattgtgatttttgggattttagacattatggattttagattaggcattttgatcttttgggatttcaccattcaggattaaggtgttcgagattgtgtcttacaggattataaaccaaatccctttttgggattgggtttgttttgccccagtcagccttattcttcagagattcttccagtttgttgctgtatcaatagttcacttttattttattttgttttatttatttatttgggatggagtctcgttgcccaggctggagtgcagtggcgccatctcagctcactgcagcctctgcctcctgggttcaagcaattcttctgcctcggtctccctagta

SEQ ID NO: 114209 - DNA, 826 bp, Homo sapiens
agcatgtatttatagagagaatggagggattctaaggagggagcaaagtgactataacaagattagggacaagagacttcaaccagagagttctgtgatcaattccccgagatctctgcatcttctgagttttctgcttagaatcagggaagctcagtgcttgacaggaacgagcagtggcactctcagtttcactgtgttacaaaggagccctgaggaagggaggccgctggctgcccaggtgccctggggggaaagggacttctgctgctgcagagagtggcacccggtggggccaggggctctgggatggtccgtaaagctccccaggacttctttgaaggatgctttacagaatgtttctgggagaccagcctcaaggtcaacccatcacaaacgtgaggaccaggaaggaaccatggccagggttctccatttgctgtagagtatctggtgatacagtgagacactaaagagtcatcagccagttcatctttcctctgccaataagagtggatagaacaggaatgaagtgttactggtggtatttcaggcatcaggagccttggaaaatcatcgtaggggcccatgcctgtctgtccctaggcacctgggcagtgccacagaggcccgcccacgactggccaggggacagaactccagtagtgcatccctgtacaacctgcacataacggttatgtatgttcacctaaaggagagaatatactttctattcctattgcacaaaaaccttgtaaactttgagaggtgctgaaaaagccaattctgcaagctctcctagaggactgacattgtaacattagag

SEQ ID NO: 114210 - DNA, 191 bp, Homo sapiens
gacagagagatggagacagagagatagagacacagaatcggcgggggcgcggtgcagagagagacacagagagagagtgtgagccgtgctgaggggtgggcccccaggagcccaggggcgccccaccagcaccagcccaaaaaggtgggcatgaccctctgggaagcctttctgtggacccggtctcagag

SEQ ID NO: 114211 - DNA, 1203 bp, Homo sapiens
acaattctcttactaaaagtattgtaggcaggcttgctttctgaaggctaatcactatttggctttgtggaaacagaactttcctcccatggtcacagactcaggagatggcgttggcaaaatcacttggtcccactgggattctttgactcctgatcttgaaaattatgataataaatgcatcttagatattcctatgtaattagtgatgatgatcgctgtataatatattcaaaggaatgtattattttaccataaaataatgtgctacgcataaggtagtccttatctagaaagactatttttatttttgtttttttgtttgtttgttttttatttgtttgtttttgagacagagtctggctctgtcgcccaggctggagttcagtggtccaacctcggcccaccgcaacctccacctctgagttcaagctattctcctgcctcagccacccgagtagctgggattacaggcacatgccaccatgcctggctaatttttgtatttttagtagagatggggtttcaccatgttggccaggctggtcttgaactcctgacctcaagtgatcctctcgccttggcctcccaaagtgctaggattacaggtgtgagccaccgcgccccgcctttttattttgttttacaatacaacaaaaaatttttagttttacaataaaagagaatctgattattggaaatagacctgaatagctttttgaaatatttatagttctagtatttaaagagaaacctgaaattataaagctgagttaatttctatacctgaaatgttcatttgtctgctgaattcagggagcatttgagatgtcacattttggaactttgatttaaatagttcagtattcccaaggctgagttccatgaccctggaatgagaaatatccactgtacctctggttctgaagagtctatagtcggccaacactgtgaatgtgtggaggactaattgtcactttcatgttatttgccaccctgacagctgagacactgcttttcagcattttagttaagatttgctttttaactgtgcaataatcattttattttggcattataaaataaaaatcacaacttctgcttttcttatatgctttgtgtgttatcacacaaatattctcaaatattcataagatattttaaataaatcattgtgaattagtcaatatatcaagttgctta

SEQ ID NO: 114212 - DNA, 612 bp, Homo sapiens
gcccaggctagagtgcagtggcgtgatcatggtttgttgcagtctcaaagtcctgggttcaaaggatccttccacgtcagcctcccaagtagctgggactacaggcacaccaccacacctagctaatttttttatttttatttttgcagagacaaagtcttactatgttatccaggctggtgtggaactcctgacctcaagcagtcctcccacctcagcctcccaaattgctgggattatagatgtgaaccactgtgcctggccaataaccacctttaactctatactttaagtttacctggttttgacatttatagaaattgggacatgcctaggattggaattactgcttcatgtgatatgcatattcaacattagtagattttcttttccttccttccttctttccttccttccttcctcctttccttccttcctttccttccttccttccttccttttctttctttccttttcttttctttctttccttcttttctttctttttttttcttttctttctcacagggtctcactctatctgggctagtcccaaactcctcggcttaagcaatcctcccacctcagcctcccaaaatgctgggattatca

SEQ ID NO: 114213 - DNA, 352 bp, Homo sapiens
gcggccgctctctgaagaacctccgagtacgaggtaagcccgctgcaaccctcactccccaccgcccggcgcccgccacccctggcacttgccttcccctggccctgggttggggagcgagccggggcgctggccggagccagggcagccgcagctggcctgcgagccaatcctaattggggctgtgtgtctgtttcgcgcagggcggaatgacagcggcgaggagaacgtcccgctggatctgacccgaggtaacgcggggcgccgcgggcgccgcgagggcgcgctgctggggaggagccgggtccggggctgggggccagaggcaggggcgggccccgcacgggaccgg

SEQ ID NO: 114214 - DNA, 856 bp, Homo sapiens
agcgggttgtgactgaaacccgtcaatatggcggcgatcggccgcggccgctctctgaagaacctccgagtacgagggcggaatgacagcggcgaggagaacgtcccgctggatctgacccgagaaccttctgataacttaagagagattctccaaaatgtggccagattgcagggagtatcaaatatgagaaagctaggccatctgaataactttactaagcttctttgtgatattggccacagtgaagaaaaactgggctttcactatgaggatatcataatttgtttgcggttagctttattaaatgaagcaaaagaagtgcgagcagcagggctacgagcgcttcgatatctcatccaagactccagtattctccagaaggtgctaaaattgaaagtggactatttaatagctaggtgcattgacatacaacagagcaacgaggtagagaggacacaagcacttcgattagtcagaaagatgattactgtgaatgcttccttgtttcctagttctgtgaccaactcattaattgcagttggaaatgatggacttcaagaaagagacagaatggtccgagcatgcattgccattatctgtgaactagcacttcagaatccagaggtggtggcccttcgaggtggactaaacaccatcttgaaaaatgtgatcgattgccaattaagtcgaataaaatgaggccctaattactacaattttgcaccttcttaatcatccaaagactcgacagtatgttgcgagctgatgtagaattagagagaattatagcacctatactgtgttcactacagacctttccagatacaggtgaaggacagttcaggaaacggga

SEQ ID NO: 114215 - DNA, 521 bp, Homo sapiens
caagattgcaccactgtactccagcctgggcaacagagaccctatctcaaaacaaacaaaaaagtgtatgtgtgtgtgttcggtgtatgtgtaaagagagagagaggcagacaaaaatgttaaactattaacagttgtttaggtgaaggatacattgggtattcattgtaccacttttccaacttgtctgtatggaattttttcaaaaagaactggagggataagaaaagagtaaatgggaagaaaggaaatggaaacaataactaaagggtctgcatgtcttgcaaagagaagcaatgaaatggggcattggagggaaatatgagagtcaaggttttcattttttgtttgaattctgtagagaatgcagctgatagtcatgatccaatacagaggaaaaactgatctagcagagagagggaactgacgatgtagtttctacttacacatcaaagtctggctccttaataacaaggaagttattatttctaataattccatccaaaaataaattgttaaaa

SEQ ID NO: 114216 - DNA, 909 bp, Homo sapiens
gtggactccacagagagtaaacacaaagactttacatgctaacgttcaaagacagtttaccccaacatcattcattgttttcattattccagaggtcatgggggcttcagaaaaccaacacaatctgaaagaattgcttcttgatttcagcttttcaagtttgattgttttaacaactagaaagtcatttgaaacaacccagacttaactttgctactcagagatagcattagtttttcaatccacatttgacccaagggtgtactgaccagtgggcacagggaaggagtgggagtaaggactgtggcttctaattctggtcttgttttgccctataaagtgtgttagatcagcctcagtctccctatataagacacaattaggccgggcgcggtggctcatgtctgtaatcccagcactttgggaggccgaggcggaggatcacctgaggtcaggagttcaagaccagcctggccaacatggcaaaaccccgtctctacaaaaattagctgggcatggtggcgcacgcctgtaatcccagctactcaggcagctgaggcaggagaatcacttgaacacgggaggtggaggttgtagtgagctgagatcaggccattgcactccagcctaggtgacagagcgagactctgtctcaaaataaataaataaataggacacaattaaatcaattggtgttcttaaacaaaatggcctaagggtcagaaaactgaaaagcgggtagctgctccagtagtcccctctccatgactcctgggtattgccagctttgggggatgggaaagaggtagggcttgaccagaattctccagcatgtacagtcctattcatacacatgcatgcacatatgtgcacacacacacacgacacacgtacactctagtgataaca

SEQ ID NO: 114217 - DNA, 739 bp, Homo sapiens
aggctgctttccaatttttcctggttttattgtcctagaaatagagaaaagcacagtatagcccagtatgacaacttaagagtaaataatcacatatgaaattgttcaaaatcttacctttttattccatacaaatcactttacaatcaaattattgtcaactcttattttgatttcgataggcttcctagtgctcatggttataatttataacatccctaattgtgctgtttagcctgtctcaccctatatgtaagtctcctcataatttcttatctaaagatgtgacaactcatttgtgtgcctctcatggcaaattcatattgctaaacattcatataatcatagaattgtaagatactttattttgtataatcctttcattgtaatgtgtttcttttttatgtcaaatgtgatttttgagtggtctggctgcaaagtatagtgggcttttctgtgtatttttatcaaatcctgcttttagattccagattatacttatttgaggaaagttaaaaattgacaaaactattcgcataacagaggaacctccactttatttttactaaaataaattttaaaacacttttgttttccctttatattctaagttatgtaaatttcatttctttgaaatatattattttatttgagctttgttatgttacctttgtagaccttgttttaaaaaggatcctcaggtttttagagtattgagtatttgatatcttttctgatg

SEQ ID NO: 114218 - DNA, 718 bp, Homo sapiens
gggaaaacaaagtacttatttattttaccaagtaacatgaacattaccacttttcctttatggtatttttctatattttctgaagttttatatgcttttcttttatatgtgctactctaattaagagtatacacaaaattttatatcctttttccaactcgactatttcatcctgttattacattgtctttattctttttagtggctaagttgcatttcatcaaataatatttcaacagcagtataatattataatataatctttattactggatgtttaccttgctcttgattttttttttttttttttaagacagtgtctcactctgtcgcccaggctggagtgcagtggtgtgatctcaacttactgcaacctctgcctcccaggtttaagcgattcttgtgcctcagcctccggagtagccagaattacaggcacgtgccaccatgcctggctaatttttttgcattttttagtagagatggggtttcaccatgttggccaggctggtcttgaactcctgatctcaggtgatctgcctgccgtggcctcccaaagtgctgagattacaaactgtgagccaccagcctggccctctgttaaactttctcaacagggaaaatccatgagttatatttaaagaccataatataagcagatatagtttccaacttcactgggttagagtagaatatggcactttcaacgaaaaacaaa

SEQ ID NO: 114219 - DNA, 372 bp, Homo sapiens
actgggtactggctgggatttgccctttcagaggtgggggcaggaggacttcccctcccctggaccctgtctgatctctccttaagtaaacagaatctcaccctttgggaatttggccgtgatcctgtgtgctccaggggcttctggtgagaaacttaggaggactaggggagggaggaagagctgggaacagactgcaccctagttggggacagaggaggtagagaaggaccaagctagggaccttttaaccctcaggattttgtcattcagaagctgctgcccctgccagaactgatccattaaaacacagggcagagggcataggtgtgtggtacctccaagcctcccaacagtcaggtcagatatctg

SEQ ID NO: 114220 - DNA, 484 bp, Homo sapiens
ggcattctatggtcttatctagcaccaaagcctgaggagatccctgctgtcttcagctgtctgtccacactggttagggatgaggtgctcatttactgaactggcatggtatcttcagttcctttgtccctgctgcttctatccaaccctctgggtagtggaatgtttgccaagactaggcaaccagcttcccccggcccatcacagagtcttctttgggtcctgatatgaagaaatgctcatgtctctgccactgaaaggaagtatagaccctgacctctattctcttgctgccctaaaatgccctccattcccatccagggacatctggcttgatttcatcaatgaatataatccttttcagaatatatgggctgggcacagtagctcgtgcctgtaatcccagcactttgggaagtcgcaggaggattgcttgaggctaggagttcaagacaagcctgagcaacatagcaagacccaattt

SEQ ID NO: 114221 - DNA, 582 bp, Homo sapiens
ggcatcttccaagctttgaagtaccagaaagcagaagtgtctcttgctagctcgattgaagcctgtcgccatgttatgagctgccctatggagagacccagatatcgagaaactgagggaggcctccagctaacagccagcaaggaactgaggtccttattccaaatgagactcttactctgggactccaagagggattgaattctgcctaacaatcacttgggcgagctaaaaagttgatcatacctggtggagccctgagtgatcactgccccagctgacgcctccactgcagcctcagggagactctgacgctgggggcttggccacacagtgcctgggttcctgactacagacttcatgagatcatcagagttctttgtttcaagctgctaggctttgagttaatttgttgtgtcttttaagataatgaatacttcatccagtccaatttctgtattctcaaagagctgatggagacctggagaacgtcagtccttttcctacgctctcacacactcggaccagatttgaagccaggcccctgaatttcctggcctgggccctcccatctctttgaat

SEQ ID NO: 114222 - DNA, 270 bp, Homo sapiens
aatcaatctacaccctcaagcagttgtagtctgctggaatgacagacttaaaaatgcttataactaaaatattttatgtgcaggactagggttttaagctaaaaggctgctttttaaattgtgaaatataaagtacatgtagaacaatgcataaaacatgtcaacagttaaacagatagttatgggattatactttgtgtatttttatgtttgcttcttttattcaacattctgtggttcatctgtgttgcttgtagcatcatcattact

SEQ ID NO: 114223 - DNA, 374 bp, Homo sapiens
acctgcaaaacggcaggcatggcactaggtactagagacacagctgttagcaaaacagacaaaattccttgccctccatgggcccacatgataataacaggacccacactgtaaacgaatacttgaatcatgcaagctactgtctgtgggcgctttagatatgttgaacactgagtcctcatgaaaatcctaggaagaaagcggtataatgtaacctgtcactagcccagatttctcttcagtgataactaaggatgagaaatttgccatcaaagtgttgcacttttctctgaggcccttggacatgatttcagcactgatgatttttctcttgtaactcctcaggcatttctcacaagagtggcaaagataca

SEQ ID NO: 114224 - DNA, 428 bp, Homo sapiens
gcatttataatagccaaaatgtggaaacaacccaaatgtccatcagtggttaagtggataaataaaatgtgatatgtccgtataatggaatattattcagccataagaaggaatgaagtactggtacatgctgtggcatggatgaaccttgaaactattgtgagagaagctagtcgcaaaggaccacacatcttatgataccattcatatgaaatgtcccaaataggcaaatgaataaagacagggagtggttgctagggtttcatgggttggtagattaggaagtgatgactaagggggccgggtatggtggctcacacctgtaatcctagcactttgggaggccaaggctggcagatcacctgaggtcagcctgggcaacctagcgagatctagtctctataagaaaaaataaaccgggggcagtg

SEQ ID NO: 114225 - DNA, 610 bp, Homo sapiens
gggaacagtttgtctttgggatatgtttgcctttgtcttacaatataaggtgggagatgctgtgagcatgtgtttggagttggaggaaggtgaagaagttggaatggtcaaaaactagaagcccaggtggtttcactatattttcctttcttcttcatcagggaagttaattaatgctaggcttctagtacaatttcgtatggaaaagggaacttcacatttgaatttttctcattaaaaaaaaaaggtagggctgggtgtggtggctcatgccttgaactcctgacctcaggtgatcctcccgcctcagcctcccaaagcactgggattacaggcataagccactgcgcccagccaaaagtgggcaagtttctagaccactttcactttggcctcactgttctcatttgcacatgaggacaataatagtacctttgtagggttgccatgagcattacatgagataacccatgtagaacatttaaacggtgctgggaacatcactcaggaacccgtgagcagggagaaaacattcattcactcactcattcattcatttattgagctagtgtacatggagtacctactgaatgccagccactgtgcacag

SEQ ID NO: 114226 - DNA, 394 bp, Homo sapiens
ctttcaggcaacatctgccaagcgcggtttgtgaggaagagaagcagaggaacacgtcatggagacggaccgagttgaaggagccagggatggtgacaagcggaaggaagtgtgttttgtccccatccagggaagcttttgtttcatgagacttacttgcgcacgtctggtagctgccctggacattcatggactttcgttttcactcagattttgtggttcacgtgacacaaagcatgaggacatcactgggcgagagggccaggtcaccccactgccgaggggcacgccccagctgtgcaccgctagagtgggcttgtccagtcctcggacacggggacagggtgtgcccatctcatgtaagacatgaataatagtagaaatttctgttgca

SEQ ID NO: 114227 - DNA, 385 bp, Homo sapiens
ttcgggaagaaaggaaaacacaggaggaagagaagcagaggaacacgtcatggagacggaccgagttgaaggagccagggatggtgacaagcggaaggaagtgtgttttgtccccatccagggaagcttttgtttcatgagacttacttgcgcacgtctggtagctgccctggacattcatggactttcgttttcactcagattttgtggttcacgtgacacaaagcatgaggacatcactgggcgagagggccaggtcaccccactgccgaggggcacgccccagctgtgcaccgctagagtgggcttgtccagtcctcggacacggggacagggtgtgcccatctcatgtaagacatgaataatagtagaaatttctgttgca

SEQ ID NO: 114228 - DNA, 403 bp, Homo sapiens
tcattcctcatggcaacagccccatacaaccagcaactcagaaaccccgatctgtgaccacatcctcccattctttcttgtaccttctccatttcttcagcctttatgaaataagcacccgcctccatcagacgtcttcatgctctggattccctgttatgcctccacttgtgctcagcgatccttttactggtctttatttgactgcccatgttattcctcccaaacaaggctcttcactttgttttttttaacccttctcagctatgtattctaaactcttactctttgtaagtaatattttattttaccacaaaggcatccccagcttcctcccattcctaacagggaaagggtactccaccttctttcctaacctgtcttctttaatccctttcatccg

SEQ ID NO: 114229 - DNA, 571 bp, Homo sapiens
aacaatgtactttcttcattgttgtgtttcagtaatggagaaagtacattgttcaaaataaaccattgtactttgagaggataggaatgaattttgtctataaagacaacttacctggatagaatttcagtaacttgaaaagcgaagcaagacagaaaggtgaggcaagatttgaatgagggcaaaatgaaagaccaacaacagtattgtttttgcaggacacaaaggaactttctcatacagattttggaagtgatctggaaataggcgagtatgggaggctaaacagtcggctcactagctagaagtttaatgcttctcaaaagcacctgataaattatttttttgactgacatacaattgacatacaataagctgcacatatttaaagtatacagtgtttcagttttgacacgtgcatccacctatgaaactgtcaccacagacaagatagtaaaacatatgtatcactgcccttaaattgggaacaagacaagtatgtccatttgtaccactcctgttcaacattgtgctggaattcctaccaagcacaagaaggcaagaaaaagaa

SEQ ID NO: 114230 - DNA, 292 bp, Homo sapiens
agcattttatctgcattttaataccatttaatcctcactattattatgcccattttacagctaggagaactgagtcacaaggacacaagtggaagttcttgaattaaaaccaaaataagcctaattctaacagctgagctctttgccaatttattttaagtctcatttccctgctgaccaactctcccttcgtcttgcttcaaaaaccacactaatttcttcttctcctattttcttttttttttctgagacagggtctcactcccatcacccatgcgtggattgccagtgg

SEQ ID NO: 114231 - DNA, 491 bp, Homo sapiens
cggcacctcctggcactccctttcagtccaggcagccagttgctgctttgcaggaattgagcagaaatgcactcggaatcgcgggcaggaaaagaagggaggtcggaggctttggatggtccccgaagtcgccgcctagttgagagctgtagagttggtgccactgcccctgttggagtgggcagttgtagttcttgtttcagaactagtggtcagcagttttctttgccggctgttgcaaggctggtggttctggcgttttccgcagtgtgttgggaggagtgtgagatgccgcggtgcagttgtgtgcggcccctgtggccctctgctgttgcgttagccattgtctaacacgtgtgaccgcatggatggtgtcctcatttaatttgaattttcaccagcactgcctaggtagccagaaccataaggtcctgaaatgccgtactattagctgggtccaaaattgagaagaattgagtagtgtaaatgtt

SEQ ID NO: 114232 - DNA, 443 bp, Homo sapiens
  misc_feature (321)..(321): n is a, c, g, or t
gggattgttaaaaggtgaacatttacttaatactatattttcaatagaaaatgacagtttgattttaaaaaaagcaattttgacacttcagaacatccattgaaatcttataggtttaaatactgaatgtgtaaaatatttagctgtataaaatataatagattaaaaaaatagaatgtttatgccctcctccccaatatttatattccttaaatctttcttttcttttcttttgttctcttcctttcccttcccttcccctcccctccctccttccctcccttccttctttctctttctttcgaaagaaagagaaagaangaagaaagaaaagaaaagaaaaagaaaatagtgaaaacgtcctctcacaggcttcattgccattcctcaaaatgtagcctttttatcaggttattttctatctttatagaccggggatcctc

SEQ ID NO: 114233 - DNA, 337 bp, Homo sapiens
  misc_feature (191)..(191): n is a, c, g, or t
agaccaacctgggcaacatagcaagaccctctctgtacaaaaaaatacaaacaaacatggggactatataaaacatgggtagtggataggagttaccattaaaaaaaaataaaaagccctgtcttgtctccaccagtgctctgtggatcctcatctccttggtcaaagccaggtcatgggcaccttatggntacacttcagaagcggaaaagagcatgaagtgtgtgctgcttatgtgtccatgcctggaagtggccacaccgcttctgctcactcttagaacttttagagcaggtggctatttaagcacagttatgattcaaaggagtcccgggtt

SEQ ID NO: 114234 - DNA, 680 bp, Homo sapiens
aacagaaattgacaattaattgaatgtggtgtagtcaggaagaggaagagtccaaaataatttctcagtttttaaattgagtaattggacagctcaggcagtgtgaaacagaaagaataacaagtttgggtgggaattttaggcctgtgtgataatcaaattagagatacttattatgcagttatctgtgtggttatgtagatctgagtatcatgtaaatttagaaaatattaacatatatatgatagctaaagctatgggggtaaataaggcattgcatggctaacatcctaataggggattctacagcaggataatatcagtgaacctaggagagggaaacaatgagggattatctgccttgttttccatttagagtccatctccagcattaatataatcaactactattgaataagcacttgataatatgtaagatgatgtgctaagtttctatcatgctgagaaaggaatgatacttgccttctgggatctttgtccagctaatgaaataaggaatgctctctattatatatgtaggtacatatgtatatacatgtgaaatccactaattcaattaatgccacagtggtgctggccacacctggaggaaggaaactgaaaggaaatctaagttctttattgtgtaataaagggtatcaagagtaaacagaggaaca

SEQ ID NO: 114235 - DNA, 812 bp, Homo sapiens
attcttttgtattggatattcagtggtcctagcatttaatgtttgtttttattattattattattattttttgagacagagtcttgctctgtcacccaggctgaggtacagcagcacaatcacagcttactgcagccttgacctcccaggctcaagcaacgctcccacctcagcctcccaagttgctggaactacatatgtgccccaccaccctggttaataatattttttttagagatgagatctcactatgttgcctaggctggtctggaactcctgggttcaagcgatcctcctacatcaccctcccaaagtactggaattacaagcatgagccaccacgcctggcccaacatttgtcgttaagactattttccctccacagaactgtcttgccacctttgctgaaaatcagttcaccatatatataagagtgtatttctggactctcagttctattctgttgatctctgtgtctgtgttttgtttgtttgtttgtttgttttttaagaggtggagtctcgctctgttgcccaggctggagtgtagtggcgtgatctcggctcactgcaacctccgcctcccgggttctagcaattctcctgcctcagccttccgagtagctgtgactatagttgcatgccgccacactcggctaattttttgtatttttagtagagacggggtttcaccatgttgcttatgctggtctcaaactcctgagttcaggcaatccacccaccttggcctcccaaagtgctgggattacaggcatgagccactgtgcccggcctgtgtcggtctttatgcca

SEQ ID NO: 114236 - DNA, 250 bp, Homo sapiens
tcaaggccgtgatgtctttgaaaacctgtaagggagagaatccttccttattcctaacttctggtggtttactggcaatttctggcattccttggcttgcaccggtagcatttcaatctacttgcattatcacatggtattctcaccttgtgtgtctgtgttggcatgacatctatttagtatattacatgtaaatgtttttccattatgctttttggttcatattttctgttggaggcagtgtccttcg

SEQ ID NO: 114237 - DNA, 515 bp, Homo sapiens
ttagtccagatacagctgcaggacagctccaagaagtcagagaagcgcgatttctagccagtcaaatgggaatcattgctacattccgatcatgggcaggtattattaatttatgtaaacctggaaattctgggatccagtctctaataggagtactttgcataccaaatatggaaataaggcgaggtctacttgaagtgctttatgatatatttcgtcttcctctacctgttgtgactgaggagttcatagaagcactactcagtgtagatccagggaggttccaagacagttggaggctttcagatggctttgtggcagctgaggcaaaaactattcttcctcatcgtgccagatccaggccagacctcatggataattatttggcactgatactctctgcatttattcgtaatggacttttagagggtctagttgaagtgataacaacagtgatgataatatctcaggagagctaatctttaggagagcttttacatatggcaatacttctc

SEQ ID NO: 114238 - DNA, 647 bp, Homo sapiens
ctttttcctgattcagaagaggatatctgttatcaagctgtaagtactctgcaggataatctttttttgttattatttaaagggcttttagaaacatcaccagtcacttatttttccttttgaagacaacaataatcatgttctgtggcaaaaggagctggtccgaaacctagaatgataatgaaagtttgcaaatatcaaatattatttcatcactattagccatttacagatgtgaagagaaatgagcttgaaaagtagtttgatgttttcaaccacacttttaatctttagatttgaaaacagaaaaggaagtctggagattagggtaatatattcaattcttccaccattttttaatttttgatttttatttttgagacaggatcttgctctgtcacccaggtggagtgcagtggcatgacctcccttgctcaagtgatcctcccacatcatcctcccaggtagctgggatgacaggaccgtgccagcacacccagcaaatttttgtattttttatagagataaggttttgccacgttgcccagtctggtcttgaactactgggttcaagcagtcgcccgccttggcctcctgaagtacagagattacagtcatgaaccaccacagtcagccctctactgaca

SEQ ID NO: 114239 - DNA, 625 bp, Homo sapiens
tcctgcctcagcctcctgagtagctgggattacacgtacccaccacaatgcccagctaattttttggtaattttgatagagacggggtttcaccatgttggccacgctggtcttgaactcccaacctcaggtgatccacctgccttggcctcccaaagtgctgggattacaggtgtgagccactgcacccagcctacttcatattttttgaactgacagagtggaaactgtaattagaagggagaaatgtaattttggatatcagagaactatggtaaattgggcagccagtgtagggctagtgcagggtactatggtgtggggagccttagagaatctgagggtagtgaaattaggggagaggagcttgtgcacaaaagtgcaatattgcaaaacacaaattgtttcattaaattactagggatggtactttaggcagtggccattttaggggaagtaaaggcattttttcttcaattctgtcatctaatgacctctcacttacttgctctgaactcattcattcttcagtggagtctcattttccaaatttgggggactagtggtggagttaaagattaggttgaatttggaaaagataaaagtgagtcaagtttatggaaag

SEQ ID NO: 114240 - DNA, 393 bp, Homo sapiens
gggatttattcagagaaatggttacatatgtgacagaagaagttgagaagcccatgaggggcagggagaccccagtcagaagtcattgacacctccaggcaggagggacaaaggacaggggtgatgtcactacagcctagaagaaggcagaatcacagggggcctgtccagcaggccctggagctgcatctggaagtgctgcccccacctccaactggtgcaccgctggcctggccagagtccagccagcagccagctgacctgggaacctaggagacgtcagggatcagctccctgcaggaggccgtggagcagaggaagggcaaggaagggatgcgaggacaaaccggtctggacttgcacaaaggaacaggcactgtggatccggaaaac

SEQ ID NO: 114241 - DNA, 785 bp, Homo sapiens
aaaaaagtttctaaacatctaactgtcaaaacaagaatactgggattacagacgtgagctatcacgcccagcctggtttttcctctttgagtaagctaagccgtgggagggttttgagcagaggaactacacatctgccattatttaaaggagtattctgttaatggtagaatataagtggtggatgcagaagtgattgctgtaaaattctttcaactttgctgtgtgtttgaaatttttcctaataaaataatagtttaaactggttattgtgaatagactttaggggagcaaaggtgagagcaggaagaccagttaggctataacaataattcaggtagcagtggaagtggtaggaagtggttgggagcagatgtggtgtttgaattacaagtcagtaattcagaggaaataccaggtaggaaatacaaatgtatgaatccacctaaagattaggaaaacaaggacaaatgtcttgagaattaaaagaaaatgctcagaagtgtaccctaaagcctcttactcatgcttttgttctaggctggttttggttgtagatagttatcagttattatatactgccattcagattatttatatgtattactgtccacaactcacttgtgttctaaagggttttttttaataatgttcttgtcttcccaagcagattacatgctttttgagaaaagatctatttttttgtatacaccccgcaatgccatattcctagaaggcattttcaatgttcacagaataaaaatatttgaatacagaaaaaaaaa

SEQ ID NO: 114242 - DNA, 367 bp, Homo sapiens
ccttacattttaaccccttctccgctgcctttttttccccaacactctgccatctgactatctaatctgctgtctctcatgtccccacaccccgaatcccccagtagcattcaactctgtgttttgtcccacactgcctccccagcacccagggcagtgctagaaaggccagcccagatggcattcatatccttggaaggtttgggaggtcaaggtgggaggatggcttgaacccaggaattcaagaccagcctcggcaatgtagtgagacccccatctctacaaataatacaaaattagccaggcatagtggtgcgcgcctgtagtcccagctactcaggaggatgaagtgggaggatcagttgag

SEQ ID NO: 114243 - DNA, 302 bp, Homo sapiens
tttcaacttttcttctcattctaatcatgttttcacataacatattaagaatagaagatatctgttcaacttctttacactctgaaaaagcagataatttccacaacataattatgcttttatttgggatactggtttctccaaaagcttaccaatccattctgaaaaccagtactgaaaatcaatcttgccaggcgcgatggctcactcctgtaatcccagcacttcgggaggccaaggcggatagatcatttgaggtcaggagaccagcctggccaacatggtgaaaccccatctctact

SEQ ID NO: 114244 - DNA, 333 bp, Homo sapiens
cttccttattgttaaagcttctcctccagtaacacatcagtactgactgcattcagaacactagctggttgttcatttgaaacagataagaaagttttagttgtaaagtggctggacttgctatttcaatatccttcttacattctgtgagaagataatgtgcttactaagcatttagcttcagctgttagcagggcttttggattgagagatgagtcttagaaagtgatctttgggaatatagggtcgagttggctctgattgtctttgtggttgaaactttgacatgtggaagaactctgtttcgagaggaagcatttagagaagaagact

SEQ ID NO: 114245 - DNA, 254 bp, Homo sapiens
ccctctgctggcctcaccgatgacttacctcatgatgagaccgagaccatcatccctgagggtgtgacttcctgttcatcacagcttctctggccagattgccgtatctgtctttttgcaattgtcacaattgggtgaagaattaccaagacctacttaactagattatctgggtgccacgaatattcactgctccattgcataacaccacttttgccttttcatcaacatgaaggtcaattaccattgccaag

SEQ ID NO: 114246 - DNA, 667 bp, Homo sapiens
gttgggtgaaactgaatcaccagatggtgaatgtgtgggcagtagcaaccctaataaccttttcaatacatgctcacagaagccaatccttgtccagattttagggctactgcagtagactgacctggtcccatctggagcaatcagacacaattccagtaagaatgggatgctacaatctagataactgcaaaagtgcagctcagtctggggaacccagcttaccttatgtaattgctttttttttttcgagacagggtcttgctatgttgcccagagtacggtggcataatcaaacctcacttcagcctcaaactcctgggctcaagcaatcctcccatctcagctcccccaagtagctgggactacagatgtgcaccatcacacccagctattatttttatttttggtagagatggggtctcactatgttgcctaggctggtcttgaacttctgggctcaagggatcctcctgcctcagcctccgagagtgctgggattataggcatgagccaccatacttggcccatttagcactttaaaaagtgtttataggccatttcccaatttctcgccactgtaagcatgttattcctgttttacagatgaagaacctagctcagggaggttaagtagtttgaccaatgtcacaaagcatgtgaaaaa

SEQ ID NO: 114247 - DNA, 302 bp, Homo sapiens
cactgggtgaagtcctggtgcatcatctgatgaactattgtcagctgctacaaaacaacgtaaagaaagcgggagcagggccaggtgcagtggcccacgcccgcccgtaatcccagcactttgagaggctgaagcgggcagatcacctgaggtcaggagtttgagaccagcctgaccaacatggcgaaaccccgtctctactaaaaatacaaaaaaattagccgggcgtggtggtgcatgcttgtaatcccagctacttgggaggctgaggcaggagaattgcttgaacccgggaggcagag

SEQ ID NO: 114248 - DNA, 654 bp, Homo sapiens
gatgagttcgtgggaaacagggaagagggcgatagagcctgggaaggacagcaacttgcagggaagggatgactatagtctacctggtgtagaggagctaagataccatcccccctagaaaggatttctcttgagatacgccaggcaacaaggggatatgaacacaaccactgcgctggcacactttgattcttagtctcaaaatgcttatccacaggatgtaaagctatggcttgccgggagggaggatctcgtggtagctgtgagtgtcagtgtgggctctggagctaaactgccttggtttgaatcccagcccatcgctcactgcctgtgtaacctggggcaacaggcttgacactgcccctcagttgtctagtctgtaaactgcggacggtaagcagacctaactcctaggaccgtcccgaagaatgaataagacaatacatagaaaccactcagaccagatgctggcacattaataaaccccatttctcatcgttatggatgtgataatttggtctgttccatctccctttcctttagggaacctcctttctcccagtctgcaccaattcaacccaagcctctgaatctaaaaggggagctgacgcctcccatgctacggagacaggcacgtgactcagtcacagccaa

SEQ ID NO: 114249 - DNA, 224 bp, Homo sapiens
gagcaggccacatgggatggtctggacaggctctgcagcacagcagccttcatgagaaacaggcagaagggcccgggcatgagaagctactgcaaacaaaaagcagcagcagctataaagggcttgttcccaagcaacatgaatcatctctgaactggtctggtccaatccctatagtctaactagcaaatatattttttaaaatattagcaaacacacacact

SEQ ID NO: 114250 - DNA, 848 bp, Homo sapiens
gtccactatataaaaatgaaaacaaaaactcacatttatcgaacacttgctataagctaggcactgtgccaaatgctttatatgttttagttcatttcaataatccatgaggtaggctttattattactcccactttatagatgaggaaatgggggtacaggtggttaaataatttcctccaaggctacaacctggtgagtggcagatttgggataaaatgccatacttgaatagctccaacagttgtccttcaaacaagttactaatttttaaattataaactcataaaatattgtttagttctcttattatctagctcttacttattaaacctgagagtgtcagcaaggtgggatgggaaaggaaacatcctcctttcctaatactctgttattttttgtgagttcaagaggtgtagaggtagaagtaggtatagccaaaaagacattacaaatattgcaaaaagaccattggttgttatagtgaacagcattgttggaaggtgatggctctccctcctcctccccatttcattggcgtaacgtaacagtgtattctgtacataatttaccaaataaacatttattttaatggttacttattatctagatatttcctcaacacttaaattcataaattaagaccatgtaaggtatgtctagagaatggagttggagtaaccaaagaacatctgtgatcttttaaagcagctcaggttgtggcaaattccatgtatttggatttgagcaaaaaggttctaagagcgacttaaggtagcttggtaggccttaatgggcattggaatgtattaaatcttacttcgaatgggaactggtttttagaacag

SEQ ID NO: 114251 - DNA, 1825 bp, Homo sapiens
tgtttggtatagaagtgttggaacgtacacctctttcttaaaccatcctgacaaagggaaagggaaaaatacatttcccgtgaggcgttgtgactagaacagctggaggtggacggcagagtgccgcgacgactgccaggagttgtagttctccccggccgcgtcactgcggtgtcgcccacccttcttccccgggcaggccgcggtttcctttgtggacgtggcgaggagtgcccgcggcaccccgtgcactcattggccccgccccgtgagacgctcgtgcgagctcattgggcggggggcggggctctgcgctgccagaggcggggcctgactggagagcggccgaattgggcacatttgcgggaacgcagagcggagcgtggagagcggagcgaagctggataacaggggaccgatgatgtggcgaccatcagttctgctgcttctgttgctactgaggcacggggcccaggggaagccatccccagacgcaggccctcatggccaggggagggtgcaccaggcggcccccctgagcgacgctccccatgatgacgcccacgggaacttccagtacgaccatgaggctttcctgggacgggaagtggccaaggaattcgaccaactcaccccagaggaaagccaggcccgtctggggcggatcgtggaccgcatggaccgcgcgggggacggcgacggctgggtgtcgctggccgagcttcgcgcgtggatcgcgcacacgcagcagcggcacatacgggactcggtgagcgcggcctgggacacgtacgacacggaccgcgacgggcgtgtgggttgggaggagctgcgcaacgccacctatggccactacgcgcccggtgaagaatttcatgacgtggaggatgcagagacctacaaaaagatgctggctcgggacgagcggcgtttccgggtggccgaccaggatggggactcgatggccactcgagaggagctgacagccttcctgcaccccgaggagttccctcacatgcgggacatcgtgattgctgaaaccctggaggacctggacagaaacaaagatggctatgtccaggtggaggagtacatcgcggatctgtactcagccgagcctggggaggaggagccggcgtgggtgcagacggagaggcagcagttccgggacttccgggatctgaacaaggatgggcacctggatgggagtgaggtgggccactgggtgctgccccctgcccaggaccagcccctggtggaagccaaccacctgctgcacgagagcgacacggacaaggatgggcggctgagcaaagcggaaatcctgggtaattggaacatgtttgtgggcagtcaggccaccaactatggcgaggacctgacccggcaccacgatgagctgtgagcaccgcgcacctgccacagcctcagaggcccgcacaatgaccggaggaggggccgctgtggtctggccccctccctgtccaggccccgcaggaggcagatgcagtcccaggcatcctcctgcccctgggctctcagggaccccctgggtcggcttctgtccctgtcacacccccaaccccagggaggggctgtcatagtcccagaggataagcaatacctatttctgactgagtctcccagcccagacccagggacccttggccccaagctcagctctaagaaccgccccaacccctccagctccaaatctgagcctccaccacatagactgaaactcccctggccccagccctctcctgcctggcctggcctgggacacctcctctctgccaggaggcaataaaagccagcgccggga

SEQ ID NO: 114252 - DNA, 2051 bp, Homo sapiens
tgtttggtatagaagtgttggaacgtacacctctttcttaaaccatcctgacaaagggaaagggaaaaatacatttcccgtgaggcgttgtgactagaacagctggaggtggacggcagagtgccgcgacgactgccaggagttgtagttctccccggccgcgtcactgcggtgtcgcccacccttcttccccgggcaggccgcggtttcctttgtggacgtggcgaggagtgcccgcggcaccccgtgcactcattggccccgccccgtgagacgctcgtgcgagctcattgggcggggggcggggctctgcgctgccagaggcggggcctgactggagagcggccgaattgggcacatttgcgggaacgcagagcggagcgtggagagcggagcgaagctggataacaggggaccgatgatgtggcgaccatcagttctgctgcttctgttgctactgaggcacggggcccaggggaagccatccccagacgcaggccctcatggccaggggagggtgcaccaggcggcccccctgagcgacgctccccatgatgacgcccacgggaacttccagtacgaccatgaggctttcctgggacgggaagtggccaaggaattcgaccaactcaccccagaggaaagccaggcccgtctggggcggatcgtggaccgcatggaccgcgcgggggacggcgacggctgggtgtcgctggccgagcttcgcgcgtggatcgcgcacacgcagcagcggcacatacgggactcggtgagcgcggcctgggacacgtacgacacggaccgcgacgggcgtgtgggttgggaggagctgcgcaacgccacctatggccactacgcgcccggtgaagaatttcatgacgtggaggatgcagagacctacaaaaagatgctggctcgggacgagcggcgtttccgggtggccgaccaggatggggactcgatggccactcgagaggagctgacagccttcctgcaccccgaggagttccctcacatgcgggacatcgtgattgctgaaaccctggaggacctggacagaaacaaagatggctatgtccaggtggaggagtacatcgcggatctgtactcagccgagcctggggaggaggagccggcgtgggtgcagacggagaggcagcagttccgggacttccgggatctgaacaaggatgggcacctggatgggagtgaggtgggccactgggtgctgccccctgcccaggaccagcccctggtggaagccaaccacctgctgcacgagagcgacacggacaaggatgggcggctgagcaaagcggaaatcctgggtaattggaacatgtttgtgggcagtcaggccaccaactatggcgaggacctgacccggcaccacgatgagctgtgagcaccgcgcacctgccacagcctcagaggcccgcacaatgaccggaggaggggccgctgtggtctggccccctccctgtccaggccccgcaggaggcagatgcagtcccaggcatcctcctgcccctgggctctcagggaccccctgggtcggcttctgtccctgtcacacccccaaccccagggaggggctgtcatagtcccagaggataagcaatacctatttctgactgagtctcccagcccagacccagggacccttggccccaagctcagctctaagaaccgccccaacccctccagctccaaatctgagcctccaccacatagactgaaactcccctggccccagccctctcctgcctggcctggcctgggacacctcctctctgccaggaggcaataaaagccagcgccgggaaaaaaaaaaaaaaaaaaaaaaaaaaaaaaaagatacttgagtagagtttatagaaaccattccaggtaccctctctccagcttttcttttccaggatttatctcctcaccttccttttgctgtagttcttcaagctaggaagactggatttccctctggtgttttagctgccagtcatggtatgaactagaactcacccccaagtaaaagctgtacaaataagaaa

SEQ ID NO: 114253 - DNA, 1473 bp, Homo sapiens
  misc_feature (27)..(27): n is a, c, g, or t
  misc_feature (30)..(30): n is a, c, g, or t
  misc_feature (33)..(33): n is a, c, g, or t
  misc_feature (53)..(53): n is a, c, g, or t
ggcacgagcggcacgagcgcagaacgnacncgngtagagcggagatctgggantaacaggggaccgatgatgtggcgaccatcagttctgctgcttctgttgctactgaggcacggggcccaggggaagccatccccagacgcaggccctcatggccaggggagggtgcaccaggcggcccccctgagcgacgctccccatgatgacgcccacgggaacttccagtacgaccatgaggctttcctgggacgggaagtggccaaggaattcgaccaactcaccccagaggaaagccaggcccgtctggggcggatcgtggaccgcatggaccgcgcgggggacggcgacggctgggtgtcgctggccgagcttcgcgcgtggatcgcgcacacgcagcagcggcacatacgggactcggtgagcgcggcctgggacacgtacgacacggaccgcgacgggcgtgtgggttgggaggagctgcgcaacgccacctatggccactacgcgcccggtgaagaatttcatgacgtggaggatgcagagacctacaaaaagatgctggctcgggacgagcggcgtttccgggtggccgaccaggatggggactcgatggccactcgagaggagctgacagccttcctgcaccccgaggagttccctcacatgcgggacatcgtgattgctgaaaccctggaggacctggacagaaacaaagatggctatgtccaggtggaggagtacatcgcggatctgtactcagccgagcctggggaggaggagccggcgtgggtgcagacggagaggcagcagttccgggacttccgggatctgaacaaggatgggcacctggatgggagtgaggtgggccactgggtgctgccccctgcccaggaccagcccctggtggaagccaaccacctgctgcacgagagcgacacggacaaggatgggcggctgagcaaagcggaaatcctgggtaattggaacatgtttgtgggcagtcaggccaccaactatggcgaggacctgacccggcaccacgatgagctgtgagcaccgcgcacctgccacagcctcagaggcccgcacaatgaccggaggaggggccgctgtggtctggccccctccctgtccaggccccgcaggaggcagatgcagtcccaggcatcctcctgcccctgggctctcagggaccccctgggtcggcttctgtccctgtcacacccccaaccccagggaggggctgtcatagtcccagaggataagcaatacctatttctgactgagtctcccagcccagacccagggacccttggccccaagctcagctctaagaaccgccccaacccctccagctccaaatctgagcctccaccacatagactgaaactcccctggccccagccctctcctgcctggcctggcctgggacacctcctctctgccaggaggcaataaaagccagcgccggga

SEQ ID NO: 114254 - DNA, 1622 bp, Homo sapiens
tgtttggtatagaagtgttggaacgtacacctctttcttaaaccatcctgacaaagggaaagggaaaaatacatttcccgtgaggcgttgtgactagaacagctggaggtggacggcagagtgccgcgacgactgccaggagttgtagttctccccggccgcgtcactgcggtgtcgcccacccttcttccccgggcaggccgcggtttcctttgtggacgtggcgaggagtgcccgcggcaccccgtgcactcattggccccgccccgtgagacgctcgtgcgagctcattgggcggggggcggggctctgcgctgccagaggcggggcctgactggagagcggccgaattgggcacatttgcgggaacgcagagcggagcgtggagagcggagcgaagctggataacaggggaccgatgatgtggcgaccatcagttctgctgcttctgttgctactgaggcacggggcccaggggaagccatccccagacgcaggccctcatggccaggggagggtgcaccaggcggcccccctgagcgacgctccccatgatgacgcccacgggaacttccagtacgaccatgaggctttcctgggacgggaagtggccaaggaattcgaccaactcaccccagaggaaagccaggcccgtctggggtgaagaatttcatgacgtggaggatgcagagacctacaaaaagatgctggctcgggacgagcggcgtttccgggtggccgaccaggatggggactcgatggccactcgagaggagctgacagccttcctgcaccccgaggagttccctcacatgcgggacatcgtgattgctgaaaccctggaggacctggacagaaacaaagatggctatgtccaggtggaggagtacatcgcggatctgtactcagccgagcctggggaggaggagccggcgtgggtgcagacggagaggcagcagttccgggacttccgggatctgaacaaggatgggcacctggatgggagtgaggtgggccactgggtgctgccccctgcccaggaccagcccctggtggaagccaaccacctgctgcacgagagcgacacggacaaggatgggcggctgagcaaagcggaaatcctgggtaattggaacatgtttgtgggcagtcaggccaccaactatggcgaggacctgacccggcaccacgatgagctgtgagcaccgcgcacctgccacagcctcagaggcccgcacaatgaccggaggaggggccgctgtggtctggccccctccctgtccaggccccgcaggaggcagatgcagtcccaggcatcctcctgcccctgggctctcagggaccccctgggtcggcttctgtccctgtcacacccccaaccccagggaggggctgtcatagtcccagaggataagcaatacctatttctgactgagtctcccagcccagacccagggacccttggccccaagctcagctctaagaaccgccccaacccctccagctccaaatctgagcctccaccacatagactgaaactcccctggccccagccctctcctgcctggcctggcctgggacacctcctctctgccaggaggcaataaaagccagcgccggga

SEQ ID NO: 114255 - DNA, 1621 bp, Homo sapiens
tgtttggtatagaagtgttggaacgtacacctctttcttaaaccatcctgacaaagggaaagggaaaaatacatttcccgtgaggcgttgtgactagaacagctggaggtggacggcagagtgccgcgacgactgccaggagttgtagttctccccggccgcgtcactgcggtgtcgcccacccttcttccccgggcaggccgcggtttcctttgtggacgtggcgaggagtgcccgcggcaccccgtgcactcattggccccgccccgtgagacgctcgtgcgagctcattgggcggggggcggggctctgcgctgccagaggcggggcctgactggagagcggccgaattgggcacatttgcgggaacgcagagcggagcgtggagagcggagcgaagctggataacaggggaccgatgatgtggcgaccatcagttctgctgcttctgttgctactgaggcacggggcccaggggaagccatccccagacgcaggccctcatggccaggggagggtgcaccaggcggcccccctgagcgacgctccccatgatgacgcccacgggaacttccagtacgaccatgaggctttcctgggacgggaagtggccaaggaattcgaccaactcaccccagaggaaagccaggcccgtctggggcggatcgtggaccgcatggaccgcgcgggggacggcgacggctgggtgtcgctggccgagcttcgcgcgtggatcgcgcacacgcagcagcggcacatacgggactcggtgagcgcggcctgggacacgtacgacacggaccgcgacgggcgtgtgggttgggaggagctgcgcaacgccacctatggccactacgcgcccggtgaagaatttcatgacgtggaggatgcagagacctacaaaaagatgctggctcgggacgagcggcgtttccgggtggccgaccaggatggggactcgatggccactcgagaggagctgacagccttcctgcaccccgaggatgaggtgggccactgggtgctgccccctgcccaggaccagcccctggtggaagccaaccacctgctgcacgagagcgacacggacaaggatgggcggctgagcaaagcggaaatcctgggtaattggaacatgtttgtgggcagtcaggccaccaactatggcgaggacctgacccggcaccacgatgagctgtgagcaccgcgcacctgccacagcctcagaggcccgcacaatgaccggaggaggggccgctgtggtctggccccctccctgtccaggccccgcaggaggcagatgcagtcccaggcatcctcctgcccctgggctctcagggaccccctgggtcggcttctgtccctgtcacacccccaaccccagggaggggctgtcatagtcccagaggataagcaatacctatttctgactgagtctcccagcccagacccagggacccttggccccaagctcagctctaagaaccgccccaacccctccagctccaaatctgagcctccaccacatagactgaaactcccctggccccagccctctcctgcctggcctggcctgggacacctcctctctgccaggaggcaataaaagccagcgccggga

SEQ ID NO: 114256 - DNA, 608 bp, Homo sapiens
  misc_feature (8)..(8): n is a, c, g, or t
  misc_feature (67)..(67): n is a, c, g, or t
  misc_feature (74)..(74): n is a, c, g, or t
ccactttntctcgcccctcccattaccatcgcccttttttaatgccaagccaccttcttcactatanctacacntacaaggatgggcggctgagcaaagcggaaatcctgggtaattggaacatgtttgtgggcagtcaggccaccaactatggcgaggacctgacccggcaccacgatgagctgtgagcaccgcgcacctgccacagcctcagaggcccgcacaatgaccggaggaggggccgctgtggtctggccccctccctgtccaggccccgcaggaggcagatgcagtcccaggcatcctcctgcccctgggctctcagggaccccctgggtcggcttctgtccctgtcacacccccaaccccagggaggggctgtcatagtcccagaggataagcaatacctatttctgactgagtctcccagcccagacccagggacccttggccccaagctcagctctaagaaccgccccaacccctccagctccaaatctgagcctccaccacatagactgaaactcccctggccccagccctctcctgcctggcctggcctgggacacctcctctctgccaggaggcaataaaagccagcgccggga

SEQ ID NO: 114257 - DNA, 1425 bp, Homo sapiens
tgtttggtatagaagtgttggaacgtacacctctttcttaaaccatcctgacaaagggaaagggaaaaatacatttcccgtgaggcgttgtgactagaacagctggaggtggacggcagagtgccgcgacgactgccaggagttgtagttctccccggccgcgtcactgcggtgtcgcccacccttcttccccgggcaggccgcggtttcctttgtggacgtggcgaggagtgcccgcggcaccccgtgcactcattggccccgccccgtgagacgctcgtgcgagctcattgggcggggggcggggctctgcgctgccagaggcggggcctgactggagagcggccgaattgggcacatttgcgggaacgcagagcggagcgtggagagcggagcgaagctggataacaggggaccgatgatgtggcgaccatcagttctgctgcttctgttgctactgaggcacggggcccaggggaagccatccccagacgcaggccctcatggccaggggagggtgcaccaggcggcccccctgagcgacgctccccatgatgacgcccacgggaacttccagtacgaccatgaggctttcctgggacgggaagtggccaaggaattcgaccaactcaccccagaggaaagccaggcccgtctggggcggatcgtggaccgcatggaccgcgcgggggacggcgacggctgggtgtcgctggccgagcttcgcgcgtggatcgcgcacacgcagcagcggcacatacgggactcggtgagcgcggcctgggacacgtacgacacggaccgcgacgggcgtgtgggttgggaggagctgcgcaacgccacctatggccactacgcgcccggtgaagaatttcatgacgtggaggatgcagagacctacaaaaagatgctggctcgggacgagcggcgtttccgggtggccgaccaggatggggactcgatggccactcgagaggagctgacagccttcctgcaccccgaggagttccctcacatgcgggacatcgtgattgctgaaaccctggaggacctggacagaaacaaagatggctatgtccaggtggaggagtacatcgcggatctgtactcagccgagcctggggaggaggagccggcgtgggtgcagacggagaggcagcactgaaaatgtgggtgaggcttgtggactggaggtctcacagtggacagggcagagacccactgtctggggaacccccagtgtcaggatctgtccatctgttctctttgatcagtttcccagagagaaattcaataaggtcctgccagcaaggtgcagaggctcatgccctgtaaacaggtgaacctttctgtgtttgtacatactagtgtatgcgagacgtgtgtgtgcgtctgtgtgccgtccatctgcgtgccgcagccgcg

SEQ ID NO: 114258 - DNA, 1182 bp, Homo sapiens
tgtttggtatagaagtgttggaacgtacacctctttcttaaaccatcctgacaaagggaaagggaaaaatacatttcccgtgaggcgttgtgactagaacagctggaggtggacggcagagtgccgcgacgactgccaggagttgtagttctccccggccgcgtcactgcggtgtcgcccacccttcttccccgggcaggccgcggtttcctttgtggacgtggcgaggagtgcccgcggcaccccgtgcactcattggccccgccccgtgagacgctcgtgcgagctcattgggcggggggcggggctctgcgctgccagaggcggggcctgactggagagcggccgaattgggcacatttgcgggaacgcagagcggagcgtggagagcggagcgaagctggataacaggggaccgatgatgtggcgaccatcagttctgctgcttctgttgctactgaggcacggggcccaggggaagccatccccagacgcaggccctcatggccaggggagggtgcaccaggcggcccccctgagcgacgctccccatgatgacgcccacgggaacttccagtacgaccatgaggctttcctgggacgggaagtggccaaggaattcgaccaactcaccccagaggaaagccaggcccgtctggggcggatcgtggaccgcatggaccgcgcgggggacggcgacggctgggtgtcgctggccgagcttcgcgcgtggatcgcgcacacgcagcagcggcacatacgggactcggtgagcgcggcctgggacacgtacgacacggaccgcgacgggcgtgtgggttgggaggagctgcgcaacgccacctatggccactacgcgcccggtgaagaatttcatgacgtggaggatgcagagacctacaaaaagatgctggctcgggacgagcggcgtttccgggtggccgaccaggatggggactcgatggccactcgagaggagctgacagccttcctgcaccccgaggagttccctcacatgcgggacatcgtgattgctcttttcttttccaggatttatctcctcaccttccttttgctgtagttcttcaagctaggaagactggatttccctctggtgttttagctgccagtcatggtatgaactagaactcacccccaagtaaaagctgtacaaataagaaa

SEQ ID NO: 114259 - DNA, 300 bp, Homo sapiens
ctgggtgctgccccctgcccaggaccagcccctggtggaagccaaccacctgctgcacgagagcgacacggacaaggtgcagtgacggggcctcggcaggagcgaggagcgggtgggcattgcgggccagactccagaaaggagcaagacctgggcctggagctcagggtcccttttaggtgggataaaaaaagagggacagagagagggaggaaaagagagggcacggagccccagaaagagagggggacagagacccagagacccaaagagagaaggacagggaccaagacggggaca

SEQ ID NO: 114260 - DNA, 2649 bp, Homo sapiens
tgtttggtatagaagtgttggaacgtacacctctttcttaaaccatcctgacaaagggaaagggaaaaatacatttcccgtgaggcgttgtgactagaacagctggaggtggacggcagagtgccgcgacgactgccaggagttgtagttctccccggccgcgtcactgcggtgtcgcccacccttcttccccgggcaggccgcggtttcctttgtggacgtggcgaggagtgcccgcggcaccccgtgcactcattggccccgccccgtgagacgctcgtgcgagctcattgggcggggggcggggctctgcgctgccagaggcggggcctgactggagagcggccgaattgggcacatttgcgggaacgcagagcggagcgtggagagcggagcgaagctggataacaggggaccgatgatgtggcgaccatcagttctgctgcttctgttgctactgaggcacggggcccaggggaagccatccccagacgcaggccctcatggccaggggagggtgcaccaggcggcccccctgagcgacgctccccatgatgacgcccacgggaacttccagtacgaccatgaggctttcctgggacgggaagtggccaaggaattcgaccaactcaccccagaggaaagccaggcccgtctggggcggatcgtggaccgcatggaccgcgcgggggacggcgacggctgggtgtcgctggccgagcttcgcgcgtggatcgcgcacacgcagcagcggcacatacgggactcggtgagcgcggcctgggacacgtacgacacggaccgcgacgggcgtgtgggttgggaggagctgcgcaacgccacctatggccactacgcgcccggtgaagaatttcatgacgtggaggatgcagagacctacaaaaagatgctggctcgggacgagcggcgtttccgggtggccgaccaggatggggactcgatggccactcgagaggagctgacagccttcctgcaccccgaggagttccctcacatgcgggacatcgtgattgctgaaaccctggaggacctggacagaaacaaagatggctatgtccaggtggaggagtacatcgcggatctgtactcagccgagcctggggaggaggagccggcgtgggtgcagacggagaggcagcagttccgggacttccgggatctgaacaaggatgggcacctggatgggagtgaggtgggccactgggtgctgccccctgcccaggaccagcccctggtggaagccaaccacctgctgcacgagagcgacacggacaaggatgggcggctgagcaaagcggaaatcctgggtaattggaacatgtttgtgggcagtcaggccaccaactatggcgaggacctgacccggcaccacgatgagctgtgagcaccgcgcacctgccacagcctcagaggcccgcacaatgaccggaggaggggccgctgtggtctggccccctccctgtccaggccccgcaggaggcagatgcagtcccaggcatcctcctgcccctgggctctcagggaccccctgggtcggcttctgtccctgtcacacccccaaccccagggaggggctgtcatagtcccagaggataagcaatacctatttctgactgagtctcccagcccagacccagggacccttggccccaagctcagctctaagaaccgccccaacccctccagctccaaatctgagcctccaccacatagactgaaactcccctggccccagccctctcctgcctggcctggcctgggacacctcctctctgccaggaggcaataaaagccagcgccgggaaaaaacaaaaaaaaaaaaagaaaaaaaaaacaaaacacaacaaaacaaaaaaaacaaaagcaaacaaaaaaaaaaaaaaaaaaaaaaaaaaagaaaaaaaacaaaaaaaaaaaaaaaaaaaataataaagaaagggggggcgcgtcgatagaaaacttctctcccagggggggcgcccacaagatctccaccacgacccacccggtcgtcagctgtagaagccacaacggggcgcctcccagacaagtggcggcccgcacctaacataacaagcagcagcccggcgcgcccgcctacaaacaacacccactgtccgtagggcagagacaaaaacagcacgcgcccgtgcgagccgcatatgcagaggaacagagaccccaaccaactccgtccgggcggagacgacacagataagcgcgaccacaccccacacccaacgaggaacgatcagccgcgcccgcacggcgcaaaaaataaccaacacccgagcgcgctagcaggtctacacacacccaccgcagtatccagccctgcgcggcaaaagaagacgccacgccgacaggcaccatagcgacaaaaacataccacgcgaggggcgacaaagaacaaaaccccccacacagcaacactgagcgacgacccaaacgacacacgagccagctacgacacagcccagcacacagaccggacaggcccaccgagcacgacaccagcagaacggcccaccaacgacgacacgcactacacgccccgccgcacaccgaacgcgaccgcgccagcgcccggcacacaccgcgaccacgccccaccgacccgcgagcacc

SEQ ID NO: 114261 - DNA, 1411 bp, Homo sapiens
cctctaagcatcccgccctcttttcccccatcgcccgccctttttgagcccgaaagcttgcagccaacttccaactccctgtcctgtcctagggaccgatgatgtggcgaccatcagttctgctgcttctgttgctactgaggcacggggcccaggggaagccatccccagacgcaggccctcatggccaggggagggtgcaccaggcggcccccctgagcgacgctccccatgatgacgcccacgggaacttccagtacgaccatgaggctttcctgggacgggaagtggccaaggaattcgaccaactcaccccagaggaaagccaggcccgtctggggcggatcgtggaccgcatggaccgcgcgggggacggcgacggctgggtgtcgctggccgagcttcgcgcgtggatcgcgcacacgcagcagcggcacatacgggactcggtgaagaatttcatgacgtggaggatgcagagacctacaaaaagatgctggctcgggacgagcggcgtttccgggtggccgaccaggatggggactcgatggccactcgagaggagctgacagccttcctgcaccccgaggagttccctcacatgcgggacatcgtgattgctgaaaccctggaggacctggacagaaacaaagatggctatgtccaggtggaggagtacatcgcggatctgtactcagccgagcctggggaggaggagccggcgtgggtgcagacggagaggcagcagttccgggacttccgggatctgaacaaggatgggcacctggatgggagtgaggtgggccactgggtgctgccccctgcccaggaccagcccctggtggaagccaaccacctgctgcacgagagcgacacggacaaggatgggcggctgagcaaagcggaaatcctgggtaattggaacatgtttgtgggcagtcaggccaccaactatggcgaggacctgacccggcaccacgatgagctgtgagcaccgcgcacctgccacagcctcagaggcccgcacaatgaccggaggaggggccgctgtggtctggccccctccctgtccaggccccgcaggaggcagatgcagtcccaggcatcctcctgcccctgggctctcagggaccccctgggtcggcttctgtccctgtcacacccccaaccccagggaggggctgtcatagtcccagaggataagcaatacctatttctgactgagtctcccagcccagacccagggacccttggccccaagctcagctctaagaaccgccccaacccctccagctccaaatctgagcctccaccacatagactgaaactcccctggccccagccctctcctgcctggcctggcctgggacacctcctctctgccaggaggcaataaaagccagcgccggga

SEQ ID NO: 114262 - DNA, 1609 bp, Homo sapiens
tgtttggtatagaagtgttggaacgtacacctctttcttaaaccatcctgacaaagggaaagggaaaaatacatttcccgtgaggcgttgtgactagaacagctggaggtggacggcagagtgccgcgacgactgccaggagttgtagttctccccggccgcgtcactgcggtgtcgcccacccttcttccccgggcaggccgcggtttcctttgtggacgtggcgaggagtgcccgcggcaccccgtgcactcattggccccgccccgtgagacgctcgtgcgagctcattgggcggggggcggggctctgcgctgccagaggcggggcctgactggagagcggccgaattgggcacatttgcgggaacgcagagcggagcgtggagagcggagcgaagctggataacaggggaccgatgatgtggcgaccatcagttctgctgcttctgttgctactgaggcacggggcccaggggaagccatccccagacgcaggccctcatggccaggggagggtgcaccaggcggcccccctgagcgacgctccccatgatgacgcccacgggaacttccagtacgaccatgaggctttcctgggacgggaagtggccaaggaattcgaccaactcaccccagaggaaagccaggcccgtctggggcggatcgtggaccgcatggaccgcgcgggggacggcgacggctgggtgtcgctggccgagcttcgcgcgtggatcgcgcacacgcagcagcggcacatacgggactcggtgagcgcggcctgggacacgtacgacacggaccgcgacgggcgtgtgggttgggaggagctgcgcaacgccacctatggccactacgcgcccggtgaagaatttcatgacgtggaggatgcagagacctacaaaaagatgctggctcgggacgagcggcgtttccgggtggccgaccaggatggggactcgatggccactcgagaggagctgacagccttcctgcaccccgaggagttccctcacatgcgggacatcgtgattgctgaaaccctggaggacctggacagaaacaaagatggctatgtccaggtggaggagtacatcgcggatctgtactcagccgagcctggggaggaggagccggcgtgggtgcagacggagaggcagcagttccgggacttccgggatctgaacaaggatgggcacctggatgggagtgaggtgggccactgggtgctgccccctgcccaggaccagcccctggtggaagccaaccacctgctgcacgagagcgacacggacaaggtgcagtgacggggcctcggcaggagcgaggagcgggtgggcattgcgggccagactccagaaaggagcaagacctgggcctggagctcagggtcccttttaggtgggataaaaaaagagggacagagagagggaggaaaagagagggcacggagccccaagctcagctctaagaaccgccccaacccctccagctccaaatctgagcctccaccacatagactgaaactcccctggccccagccctctcctgcctggcctggcctgggacacctcctctctgccaggaggcaataaaagccagcgccggga

SEQ ID NO: 114263 - DNA, 703 bp, Homo sapiens
cacaaatgattgcttataagtcaggttttgttactaattccatcgaaacagaagaggacgctgaggcgagagagagggtagtgagttgctcaagggcctggttcaggaagtatcagagccaggatcagcccccagctccactagacccccagagctgcccctgaccttgtcccctctgtcccggcccccagcggatctgtactcagccgagcctggggaggaggagccggcgtgggtgcagacggagaggcagcagttccgggacttccgggatctgaacaaggatgggcacctggatgggagtgaggtgggccactgggtgctgccccctgcccaggaccagcccctggtggaagccaaccacctgctgcacgagagcgacacggacaaggtgcagtgacggggcctcggcaggagcgaggagcgggtgggcattgcgggccagactccagaaaggagcaagacctgggcctggagctcagggtcccttttaggtgggataaaaaaagagggacagagagagggaggaaaagagagggcacggagccccaagctcagctctaagaaccgccccaacccctccagctccaaatctgagcctccaccacatagactgaaactcccctggccccagccctctcctgcctggcctggcctgggacacctcctctctgccaggaggcaataaaagccagcgccggga

SEQ ID NO: 114264 - DNA, 1217 bp, Homo sapiens
cccagagcttgcccctgggacttggcagcaacattgggctgacccaccctggcctgttcccaggaatttgctgatgcccttgactacacacaatgaagtgagaattcaaaagccacgttagttcagcctcattggaaacgggagggagggtcagtgtatgccgaatggagaaaggaggaatttggtagggaaggaaacctttcatttcaagttttaaagtatgaactcaacagtagactcagagcttctacatatgagtctttttagccatcctctttcaaatctaggtgaagcttgtttcttacattagacacatttgtgaaaaggctttatgtaaatattgatttttctatatcaagttacatattataaatccaagagttcctcactgtgtaaaagaaccctgtgaccagtcactttttgaagggcataaatctgtcgatattatagattactcccaattcatgttatctaaagtcattttgatgtgttgagctttcttaaaatgaaacaagcattttttttttaaatgggaaagagactccagagaaatggggtcagtgttcctacaagcatgtatttttgaggtagtctgtattagattttcctgaattccattcagtaatgctcaagtgtttaatgacctcataatgtgttcactttgaatttaagggtaattgaaagaagccttctttagatttctttccatcttctgtatcttctctgaaatgtttagcctagctgttctttgtcctgcagttagtgacagaattcttagggagcttgtaaaaaacacctactgtgtgtcattgttggtttagagacttaactcataaatcagctgtctctaggctagtttcagaatttaggctttattcagattaggaaataattcttggtttcatgtttcaaaaacatagccaactaagtgtttctcagatgctgatcatgaattctctttagtattcacatgacattcttcacttcctcttccattctgcacgctgcattgcccattgcacctcaaaatggagggagttagaagaaagaaaaagaactgaaactttagctgagtgcaatggtggacgcctgtagtcccagctactctggaggctgaggtaggaggatcgcttgagcccaggagtttaaggctacagtgagctatgattgcagcactgtactccagcctgggcaacagagtgagaccctgtctcttt

SEQ ID NO: 114265 - DNA, 317 bp, Homo sapiens
gtaatcccatgcccacaatcattttggcctgggtcctactggcagggcacattgctacatttaaattttagtttcagagccactttgacctgtatctgtttaaggaaatttatatttccattgggaccgattaatttgttagactctgtagctttatgtaaaaatgggaaaaagttaagaagagtagagggttgggaaagtatcctatgagaagttgcctcagatatcagatgactggcatccaccttattcaaatggcctgttatttgccataaacataatcacacctaaaccatcgtgaggagctttgtcgctct

SEQ ID NO: 114266 - DNA, 155 bp, Homo sapiens
ctgcatgggcacgtgtggacctgctagaacaccccacatccactgcacgtgctgcagggccacaggaggcacagcgcaggggcacacaggtggcacatgcagctacaggcatcggtgtgaactgatcagctggcacggccctggggcagggcaga

SEQ ID NO: 114267 - DNA, 385 bp, Homo sapiens
ctaaagcaacacttatgaaggctaatataagagaaaaggtatattcagctaagaaactcacataaagtacagactaaagtattttgaaaacttggggattctcttagagactgttccaatcatatttagtccccaaaagaaaaaaaaattacatttaattaaaaaggtataatgagattattgaccagaggaccaatctctaatacaggtatactactaagctatttcttccactcttaaagaattcatggtcccaaatgtggctgggccttaaaactaaatcagcaatacttcattccctttgcttttctcctctgcaaatattccatacttttaccactctcttaagctttcaacctcatctcttttcttctaactctcagaa

SEQ ID NO: 114268 - DNA, 813 bp, Homo sapiens
gtcatgaagggccgccatcctccggagaggccaggatgggcaggaaacgccagcttggcacccaccgtccagagcatgcctcctgctctccctgcctcagtccccacagctgccgcccattcacagagcaaaaggctcacgtgaaaagactcaccacaattttccaaggaatggagtttattaaaatactgctggaggcttttggctggaatgttttttctccttgtaaaacgggaactatagcagtgttgtctataggaaagctcagaatacgctcagaaacatcagtcacaacagagactatgtaggggctggtgcatattaccagtgattccatccattccgcggctcctgctccagagataacattcggctcagaggagaaaacttccaggcagaccctaggatgggtaggagagaggaagccaagtttccccacccttaacataaacccacggggaactctggtggaaaaagcatttttttaatgttaaaatgtcttgcatgtgggcatgttatggattggaatacaatttattttttaatttttttcttacgagatggggtctagttatgttgcccaggctggtcttaaactctgggttcaagcgatccttccacctcagcctcccaagtagttgtaacttcagatgaatgccacatttccagagagaaaacaatttttaaataagacaaaacatacaatgctctccttgaggcaggcacctgtggattttcccctaaaaccccagaaatgtgtatttgctcttctttcttcctctattgacatgagtactttggggaaagaatgag

SEQ ID NO: 114269 - DNA, 339 bp, Homo sapiens
tgtgttcttcaaatatttagagatgactctgatatctcactctgtcccatatatctcagttcctctcagaggaggatctccaggaccagacatgatgctcacaggggaaggagtctctgatttctcatcacagacgccagctcaccagctgagcagctggtggcttgcaggctgaagcaatcccaccaatgagtcttgaacagctcccgacaatgtcagactatgcagtatttgatttttttttccatattttcacatgacaatcaacagaagttgagaaccaaccgccctcttagacaaataaattatccagttcaacaccatcctcaccaaccctaa

SEQ ID NO: 114270 - DNA, 609 bp, Homo sapiens
ggtttggcatgttaggagttaggctcagagaggtcagtcaccagctaatcagtgtggagtcaagtctaaatggaatatattttttattatgagatacttaggatgagaataaatggtgaataagggaaatagtaggacaaagacgtggtgccatcacagctcagtgcagccttgacctccaaagctcaagttgtcctcccacctcagcctcttgagtagttggggctacaggcaggtgccaccccatgcctagctaatttttaaatttttttgtagacatagggtctcactgtgttgcttaggctggtcttgaacacctggcctcaagccattgtcccaccttggcctcccaaagcaccgagattacaagtgtgagccaccatgcctgaccaaagactgtcttaagcagaaatgaaatccagttgttaacaaaaaagtgcttatatttcatgcctcttacaagtggaaaacaggtcttacagcatttaagagatttaaacaaaaagttcatgaataccaagattaaatattaaggttgattttgttattgattgactgaatgtttttgtggattaaattgctacatgttttaaaatgttatttataatg

SEQ ID NO: 114271 - DNA, 537 bp, Homo sapiens
gagactatagaggaccccgcgacacgagcacagtgctgggaatacagacgtgagccactgcgcccagcctccatattctaactacctcagacttcagggaaaactatttttaaaaacacatgtgggttttataaaaaccggtaagtttatgaaacttttacattagccctagccctcagtctccaagtccagtgtttatctcttaggttgtatagggatagttgttaggtcttaatttgcaggagtaacaatttgaatccagttaagcccacataaaaagtaaatgaaaaactaagagactcttccatttatggggatgacttgtattacatcctacagataccagaaaaatgttactgtaaggtgcgctctttttgaaatcttaagatgaagtcctttccagttacagaatttttgatgtaacacatcaaaaattgtttccctccaattaactgtaggaacagtaaactgtagcacagttttaaaacttacatagagagaagacagagaatctccctaaagcccaatgattaaaca

SEQ ID NO: 114272 - DNA, 579 bp, Homo sapiens
tggctggctccccgtcccttgtccgtgccgatagagcatctgctgggagccaggagctgctgcaggcacggggggcagtgggtgaggcgtgcagtcccagccgtcctgagcttagtgggagcctcgagccttcatcatgcagtgtatttgtttctgttgtgatccagctgatccattgatcagtggggttggggacgcttctgttctgctcatttattgctgtgtaacaaaccacctctaagtgagggctttaaaacaagatcgttcatttcttttgcacatgggcattggggtacctgggcgcagctacgcacttctcacctggggcctcatcagtcagatggggccaggttgggttagccccaaggcttctcgcattggcctaagaggcctcagacaatgagggctttggcggctggggctccccagccacacccttcacctcgtggcctccaggtagcctgtccacctgccaagaacacacacacccagccccacaggtcacccctcacctgctgctgctcctctctctccctgcacgctccaaagtccccagaagcctgagactcccagagcaac

SEQ ID NO: 114273 - DNA, 752 bp, Homo sapiens
gattgtcgggaggaccctgggcaaagacgcctaccctgccatgctgcgccatctgccctccaggctgccagtcaagatgtggggcaggactttggagaaacagtcatggagggacagcagtcagatcccctcccccatgtcttatccgtagacttgaccacatcgtgatgacggtgaagagcatcaaagacagcaccatgtgtaattccaagatcctgggcatggaggtcattgacctttgaaggtaagcacttccccaaatgccaaaattcaggtgggctaaaatttgttgataacactttaacatataacttaactctaagatggaaaaccacaggaaatctgagagaacaatataaagagatcaagtagaggagattccaagactgaatattgggacttccagagagagaatggcgaaaccagagaggcggccattcatcatagaaacaatgcaagataactttgcagtctctacatggcaacggtgaaccaagtatccagcatcgttgacagctctagacatcggatcccttctaaacattcatacgaacatcaacactgaaacacggtagatcctaaggagctttcatcagcagatgcaccaagccgaatttatcctacccacgcgacatccctacaacggaactactccggcaatctgcccaaggagaaccacgagaccacacagcatacacccggaacacctttccagaatcctgagggcgacaacctttcgacctaagaaatct

SEQ ID NO: 114274 - DNA, 228 bp, Homo sapiens
aaagaaagacagacagatagatagattacagatagataatagatagataggaacacaggaagatggatggatagataggaagatagatagatagatagatagatagatagatagatagatagaagacagatatagatagattgatagatatagatagaaagaaaaagaaagacagacagacagatagatagattacagatagataatagataggaacacaggaagatg

SEQ ID NO: 114275 - DNA, 871 bp, Homo sapiens
cagagaacctggcatttatacccttgtatcaagcagggatatgacttgaccttgaggaggggacttttcatgcagctgaggcatctccccaatggctgactgctggggctggcctccatgtcactttcagaagctgggggacaaggtctttagttttggaaaaaggatctggggctgcatcatagggtccactacaaaatatgcgcttgaatggcttttcttttttcttttttttggaggcagagtctccctctgtcgcccaggctggagtgcagttgtgcagtcacagctcactgcagacttgacctcctgggctcaagtgatcctcccacctcagccccccaagtagctgggactacaggtgtgtgccacaacacctggctaatttttgtattttttgtaaagatgggtttttgccatgttgcccaggctggtcttgaactcctgggctcaagcaatcctcccacctcgaaattccaaagtgctaggattacactatgcctgaccttgaatggcttttcaaacttctggaaagacagtggaccttgggtgatatttgtgtgtaaagaagctgatgaagctgatgcactgcgggctgaggtggaggggtaacccactttcttatttttccctgggtgcaaattctttagaaaacagccaaagtcataataaaaggggagtactgatgaagatgtgggaagactgacattttcgtattttgcttttggtgggggttggatttctaatttcagaaagtaatttggtaatatctattttaaaaagaacacatcaccatttccaagcaattccatttttgtagattttcttcagaaaagaaaggtcccttgtgtaaggatgtatctataaaaat

SEQ ID NO: 114276 - DNA, 440 bp, Homo sapiens
tgggattgagaagtgggggaagggaaaagggggaagaaagtagctggtggcaacaaaacatagcaacaaaaacagatctttttcctcacagttgctggggtttctttaccagtatgaggtcagccaaatcctaggggaccctggccttttgtgactctggcctcttagttctctatctcaagggagcagccactcccgtgccattgcagacttcctgtagtggtccctcacactaaaagggaaagcatttcctgccaacttctgttgtgggtccaagcaggaagcccttcctaacagtgccactgtcttggctccacctggactcgcttccattggctagtgcctgtcctctagctcgtgaactgatcagatccagggacttgagagagcagaaaagcttcgaaggccctgcccagtgtctaggattgtatgtttagggc

SEQ ID NO: 114277 - DNA, 347 bp, Homo sapiens
ggcaaagagcaccctcctgattcatggggtgatgaacagttgttaaaaaagtgctaaaggtggcaacatccaactgagtcactcttgcggtgtaattagaagacctaccaaggggaagcttttgcaaagggcaagagtggctaacctgaggcgtcaccagcagcactgccatagcatccatcactggacactgggccaaggcccctactcacatgggctcctttaacccttccagcgacactgtgaggcaggtatcactaaccccattttacagttgaagaacctgaggctcagagagattgaagaaactttctgaggttgaactctaatgacaggccctgaaactg

SEQ ID NO: 114278 - DNA, 421 bp, Homo sapiens
acacagtgtactgtcctaaggatgacactgtgacactataatatttatactgcatgttttattccacactttttattcctactttctaatattaaaaatgaggaagtgaaataaatttcttacacatttcttaaaattttgccaataggtaagtaaatgttaaaaatttaaaattaattttgttctgagtctaacaagttatagtgaataggtgaacttagtggtagattaagggatctcatgggatattccagtgtcagcataaatcattagaagtcagaggagtcaaatggaatcccatgtgcaataacatctaaaagacatgaattcaggaactaaaattatgaaattcttaaaacgtagagaatatttgtaatctgcaaattatggatttttttaaggacaagaaggtgtaaaaatg

SEQ ID NO: 114279 - DNA, 383 bp, Homo sapiens
taatatcaatatttcagaaattgcatgctttatgtgaaggccctggagatttttcaatgattttgctatttataatatgttcttttttttttttctttcttgagacaggttctcactctgcctcccaggctggtgtgcagtggcgtgatcatggctcactgcagccttgacctcccaggctcaagcaatcttcccaccttagcctcccaagtagctgggactgcaggtgcacaccaccacacctggctaattttttaaacctttttataggatggaatctctccatattgtccagactggtcttgaatttctgtgcccatttcattgaaatgggcacagaatttctaattaaagtcttctcctgctctgtttgcaattatacg

SEQ ID NO: 114280 - DNA, 709 bp, Homo sapiens
gtgggctcatgcctgtaatcccagcactttgggaggctgaagtggacagattacttgagcccagcctgggcaacatagtgaaactccatttctacaaaaaatacaaaaattagcagggtgtgatggcacacacctgtagtcccagccacccaggaggctgaaatgagaggatcacttgagccctggaggcagaagttgcagtgagccaggatggcaccactgtactccagcctgggtgacagagtgagaccctgtttcaaaataataataagaagaacacaagaaggttaagtctagtcccaaagaagagagaacactgtcaaagctggtttctgaaaactggtaccaaaatctacatttgtttatttaggctactataacagaataccacaggctgggtggcttaaacaacagatacttacttctcacagttctggaggctagaagtccatgagaaggtgctggcaaatgcagtttctggtgagggctgtcttcccgacttgtagatgaccacctccttactatgtcctcacatggcctttcctcagtgcatgcatgtggagagagggacagagtgcaagctctctggtgtctcttcttataaggacaccaattgtatcagatcagagccccacccttatggcctcatttaaccttaattatttccttagaggccccatctccaaatacagctataggcacatgggag

SEQ ID NO: 114281 - DNA, 299 bp, Homo sapiens
ctcaagcaatccttctgcctcagcctcctaaagtgctgggattacaggcatgagccaccacatctggcctagaataaatgtattttaaaacaccttttttgcacaatgttgggctcactcatgtttagtaaatggcaggaacaccagtgctgctgatacacagtccactggaatttcagttttcctagttccgtgcatccaggtatttgtcgagttcctgtggcttttccgtcagctccatcagctcctctccagccccactgctgtgctttaaagcaactccaggtttacttgttctg

SEQ ID NO: 114282 - DNA, 359 bp, Homo sapiens
ctatttgccacaatgtgttaaatttcactgtaagtcttatattacagtatgctttactgtgctctttaaatactcacgtaattaaattatgaaatcttttccaaatatttattaattttatcctttgtattctcagtttctctctgggaatcttattatatcagaccattaacatattgattctctagtctatataggagggcagcttttctgatctatattccgtatctttgcatatccaggatgtattcttaatgtactcctttaagccttctattgagtttttcttttctgtcatttgtaatttccaaaagcacattcttgttctctgaatttttcttgaataccactattatttt

SEQ ID NO: 114283 - DNA, 133 bp, Homo sapiens
ccgagatcacgccactacactgcagcctgggcgacagagcgagactccatctcaaaaaatagataaataaataaaaatttaaaaattttttaaaaagccatatgtagtcagacacttccaaatttatatctca

SEQ ID NO: 114284 - DNA, 428 bp, Homo sapiens
catccctattttactaatgaggagaccaaggctttgagaggctgagtgacttgtccaaaatgaggcaagtagcaaaaccaagaaaacccaagtctacctgaagcactcagtcttaacctctaaccctttacctcctgcaccctcagccttagtgtggaaggagcatagaattcaaggaggtgaaaggaggaagcacggattggctgggaaaggaggaagagctcatgttctggatgtcccaaaggtgtttcaatctgattatataaccctcacctcaccttttcctcttttccccaaggctgtctccacatgttttcacaagacagctggagcatcctgcaccttctgctacaagtggcgcattcactaggagatggtgggctcctccctccactagggacagagggagagcttcctaggcacaatga

SEQ ID NO: 114285 - DNA, 202 bp, Homo sapiens
tgtgggaggccctgacccacgctgtgggttcctaggatcctgtcttggtctttcttatccagctggaagcaagttgaagcaaacattgtttctctggacgtgatagagccctgagttcacctctccccagccagtccttattttactgagggtcgggggagagcggtcaaggaaggcagctttggagaagggtggacttgac

SEQ ID NO: 114286 - DNA, 462 bp, Homo sapiens
acatttcactcctttgcgagagaggagtcgggggtcgggtgcccatcaaaattggggctgcggctgggggctagcatctctgaacctgcagctgcaaagggataattttggaattggtttacgttaaataaaacacaaaaggcctttcctatcccctagcttgttgagtgttcccttagagaaatgggaactgcggatctccttgcttgagacagcaatccatgctgtgactgtggaaggcttctcttggcgagaattgtgtgtgcaaagggaacggtggagggtgggaacgaatttgtaagcgaagagaaaacgattgtgagatcttgatggtcgctgcagagtaacttcagcgctgagttcgtttgaaaccttcggtttgttaagattcagaataaccaattgctttgtctgttaaatctcccgatttctgttaggaaaataaaagcctcatttcttaat

SEQ ID NO: 114287 - DNA, 305 bp, Homo sapiens
tctgaattaaggtagtggctgtggggacaggagcctgggaggccgggtggagtcagaatggagagactggttggcaatgagggaacaggaggaggaggaggaggagttacgagtggcttgaggtgtcacttaccagacatttgggggatgggggatagccatgattgttgagcaactggtttgggaagagctagcattgatccctgctgttctgtgctagcagaacctatcagcatcttctgggcaggaaactggctccatgagactggcttagggagaggctgctagtcacctaatctgcagag

SEQ ID NO: 114288 - DNA, 398 bp, Homo sapiens
taaaatgagccaccagtgttttacaaagttgaataaagcataagagattagtctgccctcaggggctggaaggggcagaacctgaaaggacactgtgtgctcctgggctggttcgagctgaggctgtgctgtttggaactctgctgtgtttgttgtgtgaagcacagtctgtgtgcttcctttccttggtcccagacctttgctgcttaagctgtggagttgtcctggtctgctcactccaacctccctgaccgatgctgacaatggcatctcccctacagctcacagccctgtagtcacctcaccttcttgggggctgtcaggcctctgagcccaagccaagccatcgcatcccctgtgacttgcacgtatacgcccagatggcctgaagtaactga

SEQ ID NO: 114289 - DNA, 377 bp, Homo sapiens
aaaggaagatatccacctattcaaatcctgcctgttttcctccctctagcttcattctatagccttggaaggttcgtcctggcctgttcaagcctgttttcctctctctagcttgattccacagccttcgaagtttcttcctggcctgttcaaacacaagctcatggagctgcaccagactcttaccacatttgtcattggaaccaagtaatgcaacatcacatatgattatatgcgtgttctttttttaaattttatttctcacagccttggaagctgggaaatgcaaaatcaaggcctggcaggggctggcttttgagacagctaggtgttagctgttacttcctatggaggaaggggcaaggaacctctcttgt

SEQ ID NO: 114290 - DNA, 151 bp, Homo sapiens
cacttacatatgctttcatgtcttagctgacatgacacaatggttgagtgctggacaagcatctctccacatgacttgtccatgtagctagcttaactttcccccacagcatgatactctaaggggattaagactacttacattgtaatta

SEQ ID NO: 114291 - DNA, 351 bp, Homo sapiens
aaattgaacaaaatataagcactggcacctccccctcttttaagggaccatggcattcaacaagtgttttggtaatgagccactaccatatgctcgacaccgtaaggcatgtggagatgacaaaacacactcttgatctgctttaaatctggtaaagaagtccgggggtgtttgcatcccaagtagcacagcatggggcccagcactaggctaaacacgggtggcaggcatttggaggagagagcaatcatgagatctaagggaaggcttccagaggagggcatgctaacaggggctctcaaatctgaagcacgagcaggcgcttgagaggcagccaggcaaggaggggcg

SEQ ID NO: 114292 - DNA, 319 bp, Homo sapiens
attaaggaactcgttccaaaccacacagccaggaagcagccgttcagggattcgaacccacaccgtcggccgggcgcagtggctcacgcctgtaatcccagcactttgagaggccaaggtgggcagatcacctaaggtcagaagttagagaccagcctggccaaaatggtgaaaaccccatctctactaaaattacaaaaaattagccaggcgtggtcgtgggcgcctgtaatcccagctactcaggaggctgaggttgcagcgagctgagatcgcgccactgcaccccagcctgggtgatagagtgagattcagtctc

SEQ ID NO: 114293 - DNA, 771 bp, Homo sapiens
aaagggaaagggtcttccaggtgggacaaacggtgttcagagattggaatgaacctggcataccgggccaacactcagtgggagaggactagctggagtagaacattccttttgaggaactgagaaaggcatcatcactgattataacaggcacagagaatgcaacagaagagcccaacctcctcctctcaattctcaattgaaattgagattgatgggattcccgtaatcccacctttcacttttactccaccccatcaagaggacagggttctgattcaaccttgggcttctgatcttggggggtgggagcttggagtcataactaattatctgctctatttgaaaacactgctgggactggactgtgttggggacctgaacctgcaacctgtgaccttactccccactcgagctggcctttgaacctgctttgtcactgagaaatgatgaaaagctcagaagtcagacccacttgaattcaattactggcacttctactcaccaaccaagtgctcataggcaagtaatttaactcctccaaacctcagtttacccatctacaaaatggggatgataatagcactggcctcatagaatagttatgatggttcaatgggataacagttgcaaggggcttggcatagttcacagcaaaatgaaatgaataatctattcattatgttattcccctatcacactgaagctgtttgcaggtgcactgctgttattgtatctgcttccttctgaattaaaaaatttttaaatata

SEQ ID NO: 114294 - DNA, 145 bp, Homo sapiens
atttttgacaattttccagatttttgaggtgggaactgagattattggtttctgaggttttctctttttcagtgtatacattttgtactatgcatagtagttcaaattactcctttagctatgtgccaaacattttgatatgttg

SEQ ID NO: 114295 - DNA, 266 bp, Homo sapiens
atggtttggggccactcttttataagactgttttcgtcacgctgataaaaatctgttatctgaaacagtgtcattcactggtttttgttattgctggttctattccctttgtacccgtatacactgaaaaagtacaaatctcaaatccaggttgagtaagacagtttctaccacctttgtggacatctcacctccttatccctattgcagctaaggtgttacttaggaaaagtacttctccctagagctttgttgctaattgccaa

SEQ ID NO: 114296 - DNA, 661 bp, Homo sapiens
gtagagacagagtttctccatgtttggtcaggctggtctcgaactcctgacctcaggtcatccacctgcctcggcctcccaaagtgctgggattacaggcgtgagccaccgtgcccagcctggtttattattttgatttgcctggtgagtccaacactacgctgggctcagagtgtagcactgaagcagcaaaagaactagcacagcccactccacgtttgcttaaggggcctttccccactcctgcacataggctaggatgattttagagcactgaagtaataacgcaaaaacagcaatcatgtccttcttgaaaccaactctgggatgaaagaggaaatgtgtaaacagctaactaggttttattaaagatttgcggccgggcctggtggcttatgcctgtaatctcagcactctgggaagcggaggcaggcggatcacttgaggtcaggagtttgagaccagcctagccaacatggtgaaaccctgtctctagtaaaacagcaaaattagccgggcgtggtggtgagcgcctataatcgcagacactcgggaggctgaagcaggagaatcgcttgaacccaggaggcggaggttgtggtgagctgagatggcgccactgcactccagcctgggcagaaagagtgaaactcttgtctca

SEQ ID NO: 114297 - DNA, 271 bp, Homo sapiens
gttcatcagaaaacctcggcacaaatgtattacatgaatcattatccatctgtcttgcaggaagacctaagtagtgaaaatgagaatgagaactcccactaataagtgagattctcacaggggggaataaggaaggagaccacctctcttattgtctcatacctcagaaaaagaaagaggaagtaaaagttaaagaaaggcaaaaatgaaatcaatagtcagacagcccagcgccacaccccaggcctggtctggtagttaaaaatcaacc

SEQ ID NO: 114298 - DNA, 110 bp, Homo sapiens
caaacaaggtaatatcatatactgaaaataagatgatgtgacagcaattgaaggcactacttgaaataaagcgaagccgggtgcagtggctcacgcctgtaattccaaca

SEQ ID NO: 114299 - DNA, 307 bp, Homo sapiens
tcagaatgtaatatcaagggattggagatgtcagtatgtcttattactgatgatgttgactttaattgtgtggttaaggtagtttatgctgcatttggccagtgtaaaattactgtaattaacaaatatcttaagcttcacaaatcttgtttcttctcaaactttcacccattgatttttagtatctgccagatactaaatcttgtctacaacagttttttctgtggaattctgctgtaagaaaggatgtttcattctctctcatctatttaatcagttatttattcatatcagtatggattcatgg

SEQ ID NO: 114300 - DNA, 134 bp, Homo sapiens
acacattccaacacacctagacagcaaatctcccagtggagatgacagacatgctatggccagtatattcttgttttcttgtcatgctcattctgaaaaggcacgtgagatactactggggacaggaggaaaac

SEQ ID NO: 114301 - DNA, 431 bp, Homo sapiens
tataagtttccagcactttttatgtagtgtttcagccatgtttactgtttgataatttcattttacttggtccctggtattgtacaagagaaggtccttggcattcttacaaggcagtatgtgaaatgaaataaaaaggatgcaccggctgaagacacggctgcacttgagccaaatgatggggttccctaagagggatgccaagccaagctgcttcggtgatgagtcacgccatattcaattgaccaatgaaggttggaacagtaatcacagggtgcaaaaacatatcagaaaatgcacatggtgctgtgtaaaatgggtgctatgacactcacaggatactctcaagtgacaaggtcccccgtgaaaacccttggggctgtgagcccacctgaggggaggggaggctgaaggctgcttggccaatgctt

SEQ ID NO: 114302 - DNA, 181 bp, Homo sapiens
agttaccctggagagctgagtgtctcttgggggctgctgcgctggacgggaggtgatttgaagagggccggggagaagaatggtggtccctcgcctctttagcctacattcacagcccaaacacctcctcttctctatgctggttttcgatacagcaagcatggttcagcagtgggcagtg

SEQ ID NO: 114303 - DNA, 734 bp, Homo sapiens
gttgaagtgtgaggatatttaataacgttactagcaaagatgagtttatttctttaatttttcttgcttttctaccaagctcatttataatagttaaaatcatatatattcatatctttcttttccttcccttcttgttcagggtagctgcttagtcagtaacatggtagtatggagagaatacagaggcagaagaagatagtttcaactcctttttagccatttagctctgggatctaggattaatttacttaatcctggggagaaggagttgtttaaatattgtcctaaggattaaataaaaaactattagaatattttatagtgtctttcttgcacatagatctgccaaaactgatcgacttcccatcaaaataaattcttttatacaggatacaccaattgtttccatcttaaaactttggggaaagttgggtcagacggccagggtcatgtcttagcattgagttgctaattccaagagatcattctaacgaaatcatctctctgaacaaaagaaaaagcctgcagcttccctcagtaactgaaggtttggttagaatccctgcacaccacaggaataatttattctcattttgaccatgcaagattctaactgcctgggaaggaagctgctgagtacagaaagaggcagtgtactctggtataaagaggctttttacataaataggtcccattccaaattttaactttagcatttgccactgaatgaa

SEQ ID NO: 114304 - DNA, 530 bp, Homo sapiens
aggagaacggcagcctttcaaaacaagatgtcaagagactgaaaaaaaaatggtacattgggtttgaagtcaggagcagaatggaattccaaagttgtgctggtgatatgtgaaaggagagaaaaattaagtgtgaggtcaaaaaagaatcgatgacaatgaggtagaatagaacaaaatttgggaatcgatagggaaatacaagatcaccatgtggttgaaggaaagggggttttgtaggaatttgatggatatgagacgctgttggaggacaggtgagattgctgggccatcctggaagcctcaactcagaccttcactctgatctcaacccaggtgaagagctgccaggatgaggtacacaggcaaaatgccaagtgatcacagctgaattattccaggagggagagatttcagttactatttttttaatacctaaaacatggtcttaaaacaggactcctggtaaataaagcagataaaggatgcttcattagctgactttagcagagtggcctttcagaaaagta

SEQ ID NO: 114305 - DNA, 266 bp, Homo sapiens
ctacttagtaactgatactctaaacaacatgaatgaatctcacaacatagctgaataaagaaagccaaaagaagggtatatactatattatttcaattatataagtaagattctaggaaatgcaagctaatctgtagagacaggtagtagatagtgttacctgaggacaaagaaggggattataaacaggtataagaaaactttggccaggcacggtggctcacatctgtaatcccagcactttgggaggtcgaggtgggtggatc

SEQ ID NO: 114306 - DNA, 411 bp, Homo sapiens
gtctgctctgccagggcactggggcgaatgtattctctgtagaggctgactgaagatgccagggaattggggactcagctatggcagagggcagagcagaagcactgtatttgaagagcggtattaagtaaaagttcacaagccaagcaggctcccctccttacagttcaccgtcatcaggaatacctaaaacaagaaacacagtcacttctatctggagaaactgacaagtctaaaagaaaatactgacagaaaggactcatcaacaaaatcgctgggtccccacctaatcatcctatagcaaggcaagacctgacaatcaacaaaccctgctcacatgcactgaactatcagtcggccttttggtttctcactttcacatatgagtgaacagtcatggatcaccagaga

SEQ ID NO: 114307 - DNA, 396 bp, Homo sapiens
cttgaggatccccccgctgtacagttgcgctgtctaactgagagacctgggttacatttcagcatcccccatgtgattccctgctgtccacaccagcaagtctctgagtgcaacccgcagccacgtgcatcataatcagctgagctgctggtgaaggggtagattcctgggcctcacccctgacagatcctatcccagcccctgcgggaggggcccaggaatgcagccagttcaccagctgccctgccaaagcctggcaatctctgggcctagaggcttgagaacggtcaagcagctcgccctggctcccctgggagccaccctagcctggaacgctgcacaccagacaggggtggtagagctcctggccattcccaaatgccccacacccagcag

SEQ ID NO: 114308 - DNA, 417 bp, Homo sapiens
tgaatgagacaagtctagactaaggctagatccagccttaatactgtcccaaaaacacttcttggtatgtaagcctaaatatctcttgacacttaatatcacatgcaggtctttaagctgaggaataattcaaaacaacaatattatcttcacacacatttgtttactacggcaccatttatgctagcaaaagaaaaataaaagcagcagcagcaacatcacttccaaggatagcgtttggcataattaaagtacggaacatccaataagcataactagtcattggaaaactagagagaaaagtaaaacagcattatataaacttgctgcatcctacatagagtgtgtctacctatggacaaagatgaggtgggaatttacttataggcaaatacctgagttatggtaatggggtaa

SEQ ID NO: 114309 - DNA, 601 bp, Homo sapiens
aattttttgcatatgactccaaacccacaggtaactaaaggaaaaataaataaatgggattgcaacaaactaaaaaggttttgtacaacaaagaaaacagttaacaaagtgaagagataacccacagattgggagaaaatatttgcataatgtactctaataaggggctaatgtccaaaatatataaaggagttgcacgattaattagcaagaaaacaaataactaaattcaaaaataggcaaagaacctaaatgaacatttctgaaaagatgacatatgaaggaccacaggtacgtgagaaaaaaatgctcaatctctaatcatccgagaaatgcaaattcaaaacaaaatgagaggttacctcacacttggtacaatggttactatcaaaaactcagtagataagaagtgttgggaaagaagtggagaaaaggaaactcaactacattgttagtggaaatgtacattagtacagccattatgagaaacagtatagagattcctcaaaaagctaaaaatacaattaccctatgatcctgcagttcggcatctggatatatatccaaaggagttgaaatgtataaatcaaaaagagttgaa

SEQ ID NO: 114310 - DNA, 239 bp, Homo sapiens
gaagaggcctcaaggtcagcgtctgctgctgaattactgcaacagcaccatgcagggataactcgccgattggccttccacctgccaggctgcacatgctcaccagcccagggcatggcccctcccagaacctggtccttgatccagcctcatgccctccactgaaatatgttgggaacaccccactctttcccctatattcatgacatgttcattccccgtgaaatgtgtattcttta

SEQ ID NO: 114311 - DNA, 279 bp, Homo sapiens
agggctacagcctgcctttcaccggatcaagaacaaggagactcagcccacagcctggggtacgatcagtcctggtgacaaaaaaccctggcagcctgggacggcgtctgaggcaccttacggctcttagggggctcctgagatgtccacagcctctttcagttgtaccctttcctgaccatctagcaaaacactttctttcccctgaaaagctcctgggtaggaaagcagagagacatatgacccggcaaggcagcccgccccagcgaggagaaggga

SEQ ID NO: 114312 - DNA, 569 bp, Homo sapiens
ccggtaccctgctcgtccctctctgggattcggagatgctcctgctcaacctcccgggtggctgggatgcaggcgcctgccgacatacccggctaatttatgtatttttggtggagacgggggtttcaccgtgttggccaggctggtctcgaactcctgacctcaggtgatccgcccccaccttggcctctcagggtgctgggattgcaggtgtgagctaccatgccaggcatgttccttcatcacaatctcccatagtgccctgtacttcctgaatcagcattatcttaggcaacctctgaaggtctacatagattctctcattcactccttacaacaaaggtgttgattcctattttacagataaagaagcaggcacagagaggtctagtaatttggcccagtctggctccagggcccacactcttaaccacaagggtgtatttgcctcatgctgcttttgggactcttggttaaacatatgtcctcacttctatttgaagtccagtaagggtagtgagtatatctaacttaatcaccactgaattcctagctggcagagaggggcg

SEQ ID NO: 114313 - DNA, 233 bp, Homo sapiens
gccatttctctttatggagcatgtgcagtgttgagaatacgtattttgatgcagtacgtgtagtacagctctgaattgtgtcctttaactttgggtaagttctttttttagtagaccttgcttcttcggaatatttcttttcttatagtgcctaacacaataattatgcccaaattagacaaattaacatttgagtgttcacagatttattactgtatttaaaccattgatct

SEQ ID NO: 114314 - DNA, 428 bp, Homo sapiens
gccagcacctatcacccaagaaaaaagggaccaaagcaaagccaggagtcccagctgagctaatgatcctatcaacaattaaatgaaacacagccaacataaacgtggctactcacacaccatctcgaccactttattttgtaggtggtactgagagtgatcagaggcagacgaggacatgcttaaatacaagggcaagcctgcctggtatgctcgctgggaaagcctcaagccaagacctcagcaactgctgaggtggttatttagacttcacacaaaattctgcgttaggaggatacctccctgacatccactcttgatttaaatcttccaaacagatcaatttgggaggcagaggctgcttgtgtaggtgtttccatatctattttgatttgtgctagaagcaatgagcacgtctagaaaaagaa

SEQ ID NO: 114315 - DNA, 578 bp, Homo sapiens
ggtctggaagcaacttttatttggagaactagacttgagtacgttcaactgaaagccaatgcaagcttctgttcctctaaaatgatgtcttttgcctaagaatagacccctctttcagtctaaaaaccagataaactgtcctacagtgattcaaatagccagcggcctcactccccccaaacttgactaacaacacagcaatataattctaccgtttaaaacttggctgacccaaacgtgaactttcaaagaaaataagagtcattactaaaagagattccatttctttctggggcctaagttaagatgactttccagaactttgaaaaaacttactctttcaatggccacttaattgtgtaacaaagtaaacattcacaagggaggcaaaatataacattccctatgtttagatttttcaaatatctttaaggggtgcattttctttgttgggttgtcatatgtagtttggagtaatttaccaggttctacccaaaagttgtatcatgatcaaggatcgcttgaacccaggagcttgagaccagcttgggcaccatggcaaaaccctgtctctacta

SEQ ID NO: 114316 - DNA, 812 bp, Homo sapiens
tgttcttggctcactgcaacctctgcctcttggattcaagcgattcatgtgcctcagctgcctgaatagctgggattacagatgttcaccaccacacctggctaatttttgtatttttagtagagacggggtttcactatgttgaccaggctggtctcgaactcctgaccataagtcatccgcctgcctcagcctcccaaagtcctgggattacaggcgtgagccactgcgcccagctgcaggcttgctttttaaaactcttttctgcacacttttcctgtgcagaagagtacaaaaataattttgtacttttcctattttatatttatatttgaaagggattactttttccaacattttatttgctttatcatatctttccattaaatgagattacttttagacaaaaaaaattctttaagaaaaacattataatatttccattgcctgttgaaaataatgagttatctaggaaaacctgctgataagtataaattgctacttaactttttaggaaagcaacattaacccttgatatactatcagtgctaattggatccagttttagttttttgctttcttttttttgtaaagattgatatttccttatttgttatttgtagttatttgtaaagactgatacttccttatttcttagaggtcttcaaaagaacaaaaagaaaaattaaaaaaattaaaacaagctgagtgtagtagtaggcacctgtagtcccagctactctgaaggctgaggtttgcttgagcccgggagttcgagactagcctgagcaacgtcgtgagacccgtctctc

SEQ ID NO: 114317 - DNA, 641 bp, Homo sapiens
taaaactgaaattcgtgctatatctgctgttttacaacacaatcttgtcagagattgtgctcttattctctttccttagagaatgctctttcttcagattgtcatagatcttgcttttccattttatttttattttttaattttttattttttttcgtatttttaatagagctggggtttcaccatgttggctaggctggtcttgaactcttggccttaggtgatgtgcctgcctcagcctcctagagtgctgggattacagacatgagccactactccaggcctactttttgtattttttgtagaggtggattttgtcattttgtccaggctggtcttcaactcctgagctcaagcaatccacctgtctcagctggcctcagcctcccagagtgctgggattacaagtgtgtgagccattgttcttgtcctttttttttttctttttttttcctcgaggcaatgtctcagtgtgcctcccaggctggagcgcagtggcattatcacagctcgttgcagcctcaacctgctaggctcaagtcatcctcccacctcaggctcccaactactctgaaggctgaggtttgcttgagcccgggagttcgagactagcctgagcaacgtcgtgagacccgtctctc

SEQ ID NO: 114318 - DNA, 714 bp, Homo sapiens
ctgagatgtgtccagaattgctagctacccagctagaaaagctaccgcaaggtcatctcgggaaaagggaaccacaaatgtcccagttaagaggatggatagtttcccagggttggagtcctttcttttcctagtcacccccaaacacttaagaggcctatgggatgggcaggggagcagggagagcctcactcctctcccatctgttgggagagcctcactcaccaaaacagcgttgccttgtctgtgtcatatgcatcatgtgagtgcatgaagtcccttgctccagggacttcccattaggcctggagtgtctcccatgcaaagagcccgctcctctgttcctgggacacacctctggcagtcccagaggttgcccattcatcttgacttctggaaagaagcctatagtgagaaaggagcatgtagtcagaaaccaccaagtgcagcatagttctacataactcacagcattcagtagttttgtgttgttgcttttctttctttttccatacagtagttcatctgatatgtgcagttacgcagcacctgttaagtcagagggctgggatggtgaggtcgccctgtaaactctgggcaaattactccatttctgagccatcttttgccatctgttagaatttctgatcaggatttaatcggggttggttgtgaaagagtatatgaacatgctttgataaagaagaaaataag

SEQ ID NO: 114319 - DNA, 2487 bp, Homo sapiens
  misc_feature (1345)..(1345): n is a, c, g, or t
  misc_feature (1371)..(1371): n is a, c, g, or t
aaaatttttaattaactttttttaaattaaaaaaaattattaattatttttaatagacaggatcttgctatgctgtccaggctggtcttgaactcctggtctcaagtgatcctcctgccttggcctcccaaagcgctggtattacaggtgtgagtcactgcacctggccaagtttattttttctgtatacatttcttcagccacttcaatcaaacatttaattaacatgctataatgaatgacttttcttactaggctaacaaatgaggcacttggaaacttactttagttacagcctcactttctttttttgtgaggaaattctgtgttgacatactctttaatttctttttaccttttctgactgattttctgtaatttgggaatattgtgatgactgcttattctaataatattaacatatagcattcttttagcacataaatagtttcatttgcatagtaagcgccaggctttgccatcgaatttgataaaataatccatgcttcatggtaccttagagatgggatattttaagtccaattctctctctctctctctctcatttttttctttttggagacagggcctggagttacccatgctggagtgcagtggtgtgactgtagctccctgcagcctcgaactccttggcctcaattgatcctgccaccttaccttctgagtaactgggactacagtgtgtgtcaccacaccttttttttttttgacatgagggatatatgctggtaataaaaataaaattttggggtatggcaataggcatgctactcaaaatgctgccaagttacaaagtgtaactatgatttgtaatggatagcagcagtgacaagtgatgagaatggtctcttgtcatgactactctgttatagtgtaaaagcagccatagacagtagataaatgaataagtatggctgtattccaataaagttttactcatggacactgaaatatgaatttcatataattttgtgtcacaaaatattaaattttttttctagccattaaaaatgtacaaagcataattagctgtggactgtacaaaagcaggaagcaggttggacatggcttttgggccatagttggccaacccctgctagagaacatctatacatagcagccttttgagtagttttgttcatctgaggtcatgaaaaggaattagtattggcagggtgcggtggctcacgcctgtaatcccagcactttgggaggcaaaggcgggcagatcacctgaggtcaggagtttgagaccagcctgaccaacatggtgaaaccccgtctctacaaaaaattagccgggtgtggtggcgcatgtctgtantcccagctactggggaggctgaggcnggagaatagcttgaacccaggaggtggaggttgcagtgagccgagattgtgcattgcactccagcctgagcaacaggagcgaaactctgtctcaaaaaaacaaaaaacaaaaaaacaaaaaaacaaggtggcacagctggcttgagcaactgaactggaaacaagatgcaggaccccaacgcagacactgagtggaatgacatcttaacgcaaaaagggtatcttaccccccaaggaaagtctgaaagaattggaagaggaggcagaagaggagcagcgcatcctccagcagtcagtggtgaaaacatatgaagatatgactttggaagagctggaggatcatgaagacgagtttaatgaggaggatgaatgtgctattgaaatgtgcagacagcagagactggctgagtggaaagcaactaaactgaagaataaattttgagaagttttggagatctcagggaaggattatgttcaagaagttaccaaagctggtgagggcttgtgggtcatcttgcacctttacaaacaaggaattcccctctgtgccctgataaatcagaacctcagtggacttgccaggaagtttcctgatgtcaaatttatcaaagccatttcaacaacctgcatacccaattatcctgataggaatctgccccgatatttgtttacctggaaggagatatcaaggctcagtttattggtcctctggtgtttggtggcatgaacctgacaagagatgagttggaatggaaactgtctgaatctggagcaattatgatggacctggaggaaaaccctaagaagccgattgaagatgtattgctgtcatcagtgtggcactctgtcctcatgaggagggacagcgattctgagggtgactgaggctacagctgctatcacatgccgaactttcttgtgacaaatgtctggattttttaaaaaaggaaaaagcaagaatgaatccttctggtttttagttttgtataaattatgtttcaaatctttacattttggaaataatcattgctggaaattctgttaaatattttggaacttttttttaaattatagtatttcctctaaaaaaattaaaaccagccattagtaaaaaaa

SEQ ID NO: 114320 - DNA, 2077 bp, Homo sapiens
  misc_feature (1345)..(1345): n is a, c, g, or t
  misc_feature (1371)..(1371): n is a, c, g, or t
aaaatttttaattaactttttttaaattaaaaaaaattattaattatttttaatagacaggatcttgctatgctgtccaggctggtcttgaactcctggtctcaagtgatcctcctgccttggcctcccaaagcgctggtattacaggtgtgagtcactgcacctggccaagtttattttttctgtatacatttcttcagccacttcaatcaaacatttaattaacatgctataatgaatgacttttcttactaggctaacaaatgaggcacttggaaacttactttagttacagcctcactttctttttttgtgaggaaattctgtgttgacatactctttaatttctttttaccttttctgactgattttctgtaatttgggaatattgtgatgactgcttattctaataatattaacatatagcattcttttagcacataaatagtttcatttgcatagtaagcgccaggctttgccatcgaatttgataaaataatccatgcttcatggtaccttagagatgggatattttaagtccaattctctctctctctctctctcatttttttctttttggagacagggcctggagttacccatgctggagtgcagtggtgtgactgtagctccctgcagcctcgaactccttggcctcaattgatcctgccaccttaccttctgagtaactgggactacagtgtgtgtcaccacaccttttttttttttgacatgagggatatatgctggtaataaaaataaaattttggggtatggcaataggcatgctactcaaaatgctgccaagttacaaagtgtaactatgatttgtaatggatagcagcagtgacaagtgatgagaatggtctcttgtcatgactactctgttatagtgtaaaagcagccatagacagtagataaatgaataagtatggctgtattccaataaagttttactcatggacactgaaatatgaatttcatataattttgtgtcacaaaatattaaattttttttctagccattaaaaatgtacaaagcataattagctgtggactgtacaaaagcaggaagcaggttggacatggcttttgggccatagttggccaacccctgctagagaacatctatacatagcagccttttgagtagttttgttcatctgaggtcatgaaaaggaattagtattggcagggtgcggtggctcacgcctgtaatcccagcactttgggaggcaaaggcgggcagatcacctgaggtcaggagtttgagaccagcctgaccaacatggtgaaaccccgtctctacaaaaaattagccgggtgtggtggcgcatgtctgtantcccagctactggggaggctgaggcnggagaatagcttgaacccaggaggtggaggttgcagtgagccgagattgtgcattgcactccagcctgagcaacaggagcgaaactctgtctcaaaaaaacaaaaaacaaaaaaacaaaaaaacaaggtggcacagctggcttgagcaactgaactggaaacaagatgcaggaccccaacgcagacactgagtggaatgacatcttaacgcaaaaagggtatcttaccccccaaggaaagtctgaaagaattggaagaggaggcagaagaggagcagcgcatcctccagcagtcagtggtgaaaacatatgaagatatgactttggaagagctggaggatcatgaagacgagtttaatgaggaggatgaatgtgctattgaaatgtgcagacagcagagactggctgagtggaaagcaactaaactgaagaataaattttgagaagttttggagatctcagggaaggattatgttcaagaagttaccaaagctggtgagggcttgtgggtcatcttgcacctttacaaacaaggaattcccctctgtgccctgataaatcagaacctcagtggacttgccaggaagtttcctgatgtcaaatttatcaaagccatttcaacaacctgcatacccaattatcctgataggaatctgcccacaatgaggtgatttcttcacgatgaggtgatgggatcctctagatca

SEQ ID NO: 114321 - DNA, 372 bp, Homo sapiens
gtatacacccttctaaggtctgttctggcccttccctagggagtgccttcccctctacctgccaggtcccatagataaggatgtcctcccctgcaggcgcctggcctccatcacagcatgcccactctgtgcccgctgcaacctcctctgactctcccactagaccggtgcctggtacacatgctcctgcgtgcatgaacatcggtcagctatgggtcctcaagatgacaaaaccccctgctcctgtgtcctcacggggatctgcaccagcactgggctgaacactctccctgcaatctgtcagtcacgtcttctgtagcattttctttctggcaacaacggttggggtcattaaaagtgtctttgaaatgc

SEQ ID NO: 114322 - DNA, 691 bp, Homo sapiens
gtgaaaataaaatatacttaatggattggcagtcttttacgttagctcagctggtgtctgagtgcctgtttgtattcccacgtactttactaggccccagggatagaaagatgaataaaactcagtgcctgcgcttaagtcaccctcagattggtgaggaacacaggtggttttgtgagcgtcagggaaatgtggcaagtctcactcaacagaggttgcattgggcacagaggatgggtaacgaagttccctgggtgacatgaaactgaagttggcctaagggatgaggaagcattggctggataggcagaggtctttctagttacaagctccgaaacagcatgggatatagttctggagctaccagcaagagggggctgctgtgttaaaacctcgtgagggccaagtgtggtagctcacacctgtaatcgcaacactttgggagaccgaggcgagagggtcacttgaggccaggagtccaagaccaacctgggcaacacagggagaccacatctctacaaaaaataaaaataagtagctggatgtggtggcacatgcctgtggttccaggtacttgggagtctgaagtagggggatcgcttgggcccaggaggttgaggctgcacagtgagccatgatcacaccactgcactccagcctggatgacaagtgaggccctgtttcaaaaaaa

SEQ ID NO: 114323 - DNA, 584 bp, Homo sapiens
cctggcttgctcaggtctgtaatcgcaacactttgggagaccagagcaagcaggcacaggtggttttgtgagcgtcagggaaatgtggcaagtctcactcaacagaggttgcattgggcacagaggatgggtaacgaagttccctgggtgacatgaaactgaagttggcctaagggatgaggaagcattggctggataggcagaggtctttctagttacaagctccgaaacagcatgggatatagttctggagctaccagcaagagggggctgctgtgttaaaacctcgtgagggccaagtgtggtagctcacacctgtaatcgcaacactttgggagaccgaggcgagagggtcacttgaggccaggagtccaagaccaacctgggcaacacagggagaccacatctctacaaaaaataaaaataagtagctggatgtggtggcacatgcctgtggttccaggtacttgggagtctgaagtagggggatcgcttgggcccaggaggttgaggctgcacagtgagccatgatcacaccactgcactccagcctggatgacaagtgaggccctgtttcaaaaaaa

SEQ ID NO: 114324 - DNA, 654 bp, Homo sapiens
tttctctcacagaactgtaactagtccgagataagttagaggatggaaaagagtagaatggtgcaagaaattataggaactaagattagaaaaagagtcaaggaattcttaatggagcttttatatactatgctacaaaaattgagtttattctggaaataatgacgatgcatcaaaaggttgaaagtggttggaggataaattggatggaacataaaaatattttttaattggaaaatatgaaaatgaggagaatcataaggagggattccaggcaaggaaagcttgtatccaatgcatgttgctgacattatgctctgcagattctcattacaccaagttcttctgtgttcatctgcttcctcaaggccattatccattgcatctgtctcagctcagctgatgctctggcagtggttctctgcgttgagcattgctgccacacacctttggtctttaaacctgaactggaatgaagcttaaactgaaatgtagagggcaaatggtgtgcaaaacaaactttaagtagtagtgattaatctttccaatgaatttttctgtttttagcccattaattttcaataaacattaatgaagtacttatcatgtattagccactatgttacctccaaaaataaagatgatagataaacg

SEQ ID NO: 114325 - DNA, 412 bp, Homo sapiens
ggagaccggtggtgcagtcttggctcactgcaacctctgccttctgggatcaagtgattctcctgcctcagcctcctgagtagctgggattatagacatgcgccaccgtgcccagctgatttttgtatttttagtagagatggggtttcgccatgttagccaggctggtctggaatcattttaaaaccaaaaggtttgtatttaacttacttactaagattattgtattccgccagatgcggtggctcacacctataatcccagcacttcgggaggccaaggtgggcgaatcactagagcccaggagtttgagaccagcctgagaaacatggtgacaccctctctctacaaaatataaaaaaattatccaggtgtggtggtgaatgcctggagtcccaactgttcaggagtc

SEQ ID NO: 114326 - DNA, 350 bp, Homo sapiens
gtttcagtgagccgagatcataccactgtactccagactgggcgatagagtgagactccatcttgaaacaagcaaacaaacagacaaatatttagtgggtgtatatctcctttatgggccttccctgactgctctttctaaaattctatgcccctattcctttaccttactttattttccttagtaacacttttctatctggcactaatatgtatttgtttattgtgtgtcacctctccagatcataagctcctcaagggcagggactttgttggtcttgtccatctctgcatccgcagagtgacaattgtgcctggcactggatatacatttattaaatgaatgaatga

SEQ ID NO: 114327 - DNA, 205 bp, Homo sapiens
tatgacttgaaatacaaaatacagaaaaatagtaagagagctactgtcaatcatgagacagagaaaatatctatattccttgaatttgacttccagtttattacttttagctaagacaagccacgtcttgaaatcaagtcatctttgatttttcccttttcttttgccactaccattcacagttgtcactacctaagtattaaag

SEQ ID NO: 114328 - DNA, 552 bp, Homo sapiens
tgtggtgttctagaggatccttgcgatcatcggcaccgagttggcaggccagatttggatgagtcttctgtccaccattcaaaatgcacgccctctgttcctggagaaagcagtgctgggaagcttcgtcccgggggatttcctctccaaggcctttttcatttggaaaacccacaaagctcctaccaatggcttgcctttgtctgtctccccattaggttgggacctgaagagggcaccccttagcctagcacagggcctggtgcatagagctggtcatcccgcactgccctgcagagcacatgaatgcgggagtcggacgcactggccagcaaccgcagcagcaatgacaaacatctccccaaggccaggaccaagggaaagccacgtggatgggaaacccaccctccttggctctagggtgcctcgagctcaatattcctgcaggtaactgcccgtcgaccccttgctgatggcctctgccagagcagaagggagagggtctagcgggaggtggtctgagcaggtgcatggagcctccagcctgtcttt

SEQ ID NO: 114329 - DNA, 414 bp, Homo sapiens
cacacacacacacaccactctgagtacacatcttcacaaataatagtcatccctttgtcattgccgccaatatccaggcgaggtatcgggagacccccgacctgcggcttgctgcccctcctgctgcctccaaagcagctgagcacaaagttggggggggggtgccgctgagcaggaggcagctcctttggcaccccaccccaccacagtgccgaggtaagtgtcgcgcagggccggggagggaacagcagcaggaagaggggacctacggagcgcacagcagcactaggggaggctcgcttccttcctgacgcctctacacggaacatggatttgagtcttactaaaactgtgtacagagacaaaaagcccactcagcacaaacagagttgtctgttgttagccttcaaaatc

SEQ ID NO: 114330 - DNA, 522 bp, Homo sapiens
atcttgtttacactctccttgagtacctgcaaaactataatgatagtagagtgaaggaagagctgacgaaaaaagttaactttcaaatactttgactgtacccacctactaaaatctctctgtatgttatcaaattaatatttgttaatgaacacatagagatgctttaaaatttacataatggaatttatataattttttagattttttaaatctcatggtagattttttttggttaatgtgtacattgttctctaaaaactagatgtcaaggcccacctgttcccaaatcaagccctcaagcatgtccatttgcccacccaccatccagcagccccaggacttgctccttggagagcatgcttcccttctctctggcacaaatctctgctgtcctctggcaggcccttctctctggcacaaatctctgctgtcctctggcagatgacaggggacacattgtgactgacatcttattgagttacaggttctagattttaagcttcttttcttaaaaaaaaa

SEQ ID NO: 114331 - DNA, 302 bp, Homo sapiens
tcttggccacagggtgtaaaggaggctttggacttagtgatcccagaggttattccctgctctcatgccagtattcttctgcagctttcctcatcaatgtttatatatttctttcttttttctgaaacttgctctttcactctgtctctcccctagggaacactaaaaatagcctgtaggttaaggaatctccaaaacacaggtgtgatttgtttgaaattctgtttgactcatgtgtgttgagttacttctaaattcaaggtattgtgactacttgaatgatattttttagaaacaaaata

SEQ ID NO: 114332 - DNA, 383 bp, Homo sapiens
gggtacatgtgaaggtttgttatacaggtaaactcatctcacagggggttgttgtacagattgtttcattatccacgtattaagcctagtacccagtagtttctttttctgctcctctccctccctccaccctctaccctcaagtagaccccagtgtctgttgttccattcttaatatttataagttctcatcatttagctcacacttataagtgagaatatgcaatatttggttgttcctgtgttagtttcctttatcataaggaaagttatggggttatctcacagaactcaaggactgaaagttcagccaggctttggagttcttgaaactagtaaccgggaagcagtcagggaccaaggcaggatctctttttgtcttt

SEQ ID NO: 114333 - DNA, 156 bp, Homo sapiens
atgaatagattgcttaggaatttggtagctgtctctacttacaaatgaatttctattttcattaatataattttttataatagctatataaactagatcagtattgactttttttttttttttggttggaaagggggttggaattgcccccacagc

SEQ ID NO: 114334 - DNA, 304 bp, Homo sapiens
taatgctataacaacacatgctcacattcctatgtactgtcaaaggtttaatgaatttagtggtttttcttctaaaaccaggtttgacttaatatgactcccacatttattgtattaacaatagtttacttcttagacatgagtggaagtgcaaagtaaagtgctttactaaagtcaaaaatcagctgggcatggtggctcacacttgtagtcccaacactttgggaggccaaggcggacagattgcttgagcttaggagttcgagaccagcctgggcaacatggcaaaaccccatctctagaa

SEQ ID NO: 114335 - DNA, 260 bp, Homo sapiens
ctgccctgcttttaaaaaaaagaaaattagttttttagagatagggtcttctgattttgcccaggctggtcttgaacctctggcctcaagtgatcctcccatctcagcctcctaaagtgttgggattacaggattgagccactgcaccctgctttttgaaaacacttagaaagtttaagttattggaggaaattatatttgcataatcaaagaatttctcattctgcaaaaggaagcactcagtaataatagttaatatt

SEQ ID NO: 114336 - DNA, 430 bp, Homo sapiens
cttctatctcatcctgtgattagaatgtctaaccatctgggaatgcagcccagtaggtttcagccttattttacccagctcttattcaagatggagtgctctggttcagacgcctctgacactaacatacatggaaaatgcacttaaatatagccagaccagtaatatgataacctgtcttttgggcggggcaggcttaaaattgagtttttgactgtgtactcatataaagggaataccttcttgtaaactgactaaaatcaaagaaatggaatctctttagacgtttacattgttttatcttgtaaacaatcagggacagttacaacagagtgggacaaatgctagagtgggcagtgcgggtaagccagaagcccaggaggggagccttaagtcggggaaaagtgccccaggcagaaggagcagcagg

SEQ ID NO: 114337 - DNA, 389 bp, Homo sapiens
tactatgggcagatttagatattagtataatgtgctgggtaatatgaattcgtcaaagtaatagagtccattaatgtttatagaactgtctgttaacatgacatttggctcaaactagtaatgctacagagctacagaaacttgagccagcaatgtatatctgtaatactttttttctgcaattataatttgtgactttattgttggatacatccttgagactttttttccactccgccactcagtgctacaaagaatacatcactcttctactccagtttcccatgccagaaacagaagacttgtctttggcttccttcttgataattattggtattagattagagatggaaagtcaggagaatcccatcaattctgcctccacagat

SEQ ID NO: 114338 - DNA, 709 bp, Homo sapiens
ctcattttctccttttatcgtagaggtgttaacttttctttgcctttaaacgtagtgaaagtgtatcacagtgagaccttcttttcggggagttagagcaattttgagattggtggggaaaagccattaacacttttgttgataatctgaatctattggccaggtgtggtggctcatgcctgtaatcccagcactttgggaggccaaggcaggtggatcacttgaggtcaggagtttgagaccaacctggccaacatggtgaaaccccatctctactaaaactacaaaaatcagctgggagtgatggctggcgcctgtaatctcagctactcgggaggctgaggcgtgagaatcgcttgaacctgggaggcagaggttgccgtgatccgagattgcaccactgcactccagcctgggcgacagagcgagactctgtcttaaaaaaaaaaattctgaatctattgataatctgaatatctgatatatgtaaaccactcagtaacatcctgttgtcagagaaagctaaactaatcctgccctgagttttaagcctgcgcttacagttggacttgtgatttgatttgatctttgtgtttttttggggtattttgctccctagaactcaccccgaattattgtatatagtaatctgccgcagttttctaaagcaatttataaataaaaggaaaaattactacttttttagtga

SEQ ID NO: 114339 - DNA, 307 bp, Homo sapiens
agccaggcgtggtggtgcgcgcctataatcccaactactcgggaggcagaggcaggagaatcacttgaaactgggaggtggaggttgcagtgagccaagatcacaccattgcactccagtgtgggcagcaagagtgaaactcaatttcaaaaaaaaaaggaaaatgatgttcaggttctactgggagtcaatcacatgtgtccgtgtaaatcatggtagagacttaagtttttactctgagtgagttgggaactcattgaaagcttttgagcagaggttggaacataatataaatttgttttttaga

SEQ ID NO: 114340 - DNA, 292 bp, Homo sapiens
gaggcctggaatggagaaggggggtgtcagtgagatcagtggaggctgcagaggtccagcaatgctgaaggtctgaaatgaggcagtgatgggttgaagataagaggcagatattaaacttttatgaggtagaataggcaaatgttgatggcttagggaagtaggggggataagggatagggaagagctagagtgaatgagtcccagcttgagagactgggagagtttgttcactgagatccagatatagcccaataagatctatacccacctgcttgtgattcttattaag

SEQ ID NO: 114341 - DNA, 310 bp, Homo sapiens
ggacatttacatggagatctgaagagggaacagagtcttcctggtggaggtgaataatggttgggggtagaaggggaaaggtctcttaaaactgtacatgaagtatggattagagagactaagggcctcctttatggcagataggactttgccatcattatttcagttgtggacaggtgtttggggcttttcagatgcaagattcctagaagtcttacttctggaaaagtgtctcagattaaagtcacacttcctacaatttagatttcccagtttgacttttaagggaactccaacttcttgaaacttt

SEQ ID NO: 114342 - DNA, 457 bp, Homo sapiens
ggccgtgctcctcttccggggtgactctcacagctgtgttccttggggctcctccaacgtgaccctcctgtggcggccccaggcctggagccggtcatggctggatggggacggcctccggttcctgcctgcgtgtgtttcttgacgctgctctaaggtctcaccacagcctggcagtctcaagcagcacaaacttattaccctcctgtcctggaagacaaaactgaaaatcagtcttgctgggcgaaagtcaaggtctgggcagggcgggctcctgctgggggctcctcctgccttctcggacttcccaggctgcccaaggccctgggctgctgcccggtcctcccctcctggtctccactcagcatctgctctccgggtcctgctgctgctgtcacacttcctcccctgacccctccctcctgcatggagggaccctgagatgatgctgcatctg

SEQ ID NO: 114343 - DNA, 263 bp, Homo sapiens
agcttatttttaattttttgtagagatggggtttcaccatggtgctcagcctagtcttgaactctgggctcaagcaatcttcctgcttctgcctcccaaagtgctgtgattacaggcatgagccaccatactcagcctacaaacagatcttcatggctgaaattgcatgactgattatggttttaacagcaatggaaatttaggttctgatggtgttcctattcactttgctcctgctgagacttttgtactctctagagctg

SEQ ID NO: 114344 - DNA, 124 bp, Homo sapiens
acccaggagatgtcagaggtcatgcccatccccatctcaaagggggctctgggctctctgcctctcttcaggagtggagagggagaatggcctttgggccccagcagggactgctgagtgacac

SEQ ID NO: 114345 - DNA, 129 bp, Homo sapiens
aatcttagcaagcgagattctcagatacagagtctacgaacaatcagggctgcccgtagctgctgcctcccacaggaggtgcccctgggcagtccccaggccctgacctgcagtttctgtgaaaacacc

SEQ ID NO: 114346 - DNA, 735 bp, Homo sapiens
tatttgttctgtaaatgaatgaaactgtggagctgaaattcaggtctgttcaattctagccttccactatcccaggtgaacaatgcaagaccaagtgagataggttctgtgagtgggaggccaggagtttgctgtgaaattccacggaaagaacagacatactatatggggggttgaaggagggagcttgtgagcttgatcttgaaagatgagcagaattttaagaataagcaaaagggaaccacataactgacaaagcaggtgtgagtgagcatgacttacttggagagtggttaggtcagggttgttgggggagtggtggcagataagggaaataagagagggcatgataatgggaagatgaagtctaatttgggaccagattataaaaggcctttattttatgcttagtatcttgggttttattttgtaggcaatggggattctataactttttaagaaaaatctttttattataaaacacagatattgaaaaccacataaaataaatgtatagcttaatgaactcttataggcttaactcttgtgcaaccccgcccaagttgagaagtagttctttccagccatcccagaagtccatccaggtgttttgtcctaattacaacttccttccacaaaagcaaacactatcctgacttttatagtgtttcttcatagtttatctaccacatgtgcagcccctagataccctagttttgctcattaaaaaaaaaa

SEQ ID NO: 114347 - DNA, 148 bp, Homo sapiens
tccaggaattaggcaaatcaggattaggtcaggaagcaaggattgcctctccatgaaacctacacaaatctccatgccatggaaaagtaattagtaagtagatgagctcatttatgaagtcacctctcacggtgcctgatgcatatta

SEQ ID NO: 114348 - DNA, 343 bp, Homo sapiens
atgagacaccgttatagccgctgtgacagggaaatcgctggaggctttcacctcgaacgactggtggagattgctacactccgagaggggtctggtgcttagatggagaggggtcggcagagttgttctgctaagctgagcctctttcagggtagaaaccaaaggaatttggaggcaaggaggcatttaggcagatcacatctggagaaaatgcacccttccttgagtgcagtctggaaaggcttctggaaaggataggatttccagatatgtttaggtgggcacctagcaggactcagcagatattgagtgaatgcagatgtgtgtgccctgggcctgccag

SEQ ID NO: 114349 - DNA, 445 bp, Homo sapiens
atgtgaacaaatgaagagctgtttcttatgaatgagcagagaaagtggtttcttgagaacgaatcttctcatggtgaagatgctgtgaacactgttgaaatgtttgatatttaccagtttttacttaacaattgaatctattatttgtacagttcctagccataaaatactccagtattatattaaattatttttctctattttattcctttagacaaaagatttacaatagttcattgacttagttgataaagcaacagcagggtctgagatgactgactccaattttgaaagatgctctactgtgggtaaagtactatcaaacagcatctcatgctacagataaaccttttgtgaaaggaagagtaaatcaatgtggcaaacttcattgttgtgtaattttatgaaattgccacagccactccaaccttcaacaaccaccacc

SEQ ID NO: 114350 - DNA, 645 bp, Homo sapiens
actgttgagccttcctcatgaatggcacatcctgcgttaaggacattagggaaggttataaggaaacaattaagatatatgcccccttctttgcctaaaagtaactcccagtgtgcaccaatatattggctcctttgatagccatcattagaggatgcttcctgcaatcatcttccttcttaatcagtcaccaggcgtacttctcaaacaggaaaaaatggcttaaccacagcaagaagagacaaggggaggggagagtaaggaaaagattcctctacttttgagacggattgctttagaaagaaagcaaaacgtaatcatgttatccttggtctggaaactgaagaaagggcccccttactgcgtcaccccaaggaaagaagaaggacctgaaactcaacatccctatgcctttctagctgtcattcctagccattgtttctacatgtccacagaccccatgcctccatcctgagccttttggacttatagagtttaggttaagcaatatactatgaataggcacatgggttacagagaacaagagaaaaggatattctcttaggaagagccaagagagaaatgggacacaacagcatgacacagcggtcaacacaggccttggatcagttgactaaccttgaa

SEQ ID NO: 114351 - DNA, 249 bp, Homo sapiens
aagtaaaaaaaaaaatacagtcttatgtttttatgagatttggctgtaatttgttgtttaaataaccagctgaagctaacttgtaactttcagagctataatttccctaaattgtgaaatccaacaaacatattgaaaaatcaataaaacacaaaatattcagattaccaaatcattataaactaaacacttttgttagtataacccaagccaagcagttgaaccttgctaatactcccagaatccctt

SEQ ID NO: 114352 - DNA, 364 bp, Homo sapiens
gaaaatgagtaaaattttccaaaaagtcaaaatttacaatgtgtcaaacggaataattaaaataaatccacacgtagaaacattccacagaaattggaaaatatcacaagaaatcttaaaagctaccaaaaaagatagattactcatagagtaagactgacacagatgttcctccaataatagatgacgaagtatattaaaagtgttgagaaagtttaataggcaatccagctaaaagtaagggcaaaataaggacatgttcaaaaaagactcatagagtttattaccagagacctttattaaatgaactgctaaagaatgtactttagtaaaaatacaagtaagccctaaggaaggagaaaca

SEQ ID NO: 114353 - DNA, 130 bp, Homo sapiens
ccataaaatcatccagtactttttggggaaggagtggaatcttttactatattcaccatatttttctggttatgggtttactctatttttctacttcttcttgagggacaatttaggtaatttccatttc

SEQ ID NO: 114354 - DNA, 133 bp, Homo sapiens
actgcactccagcctggcgacagagtggtctcaaaataataataataatattaataataataattatggagcagtaaattagctactaatgctagatattctcttttggtaaaaatctgatttactttttggt

SEQ ID NO: 114355 - DNA, 169 bp, Homo sapiens
gggatacagcaatgagcgcaaagatctgatgctctctctgatactcgtggtctacttgagtagacaaaagtgaaacaagcgattccattaatcaatggatacttatgaagtataaaaatgaaagaaaagtgcacagtaatatgaaagacaataaaagaaaaacacattt

SEQ ID NO: 114356 - DNA, 308 bp, Homo sapiens
aaaagtaaagaatgatcatcactgttgaagaaatcaataaagaatggcaggaacataacagttactatggctgtttttatttgctttatagtttacattctaatctgctaatgtatacatactacttttataatcaggaagtttttaatttttaacacaaaaaattaacttttgtcttccctacatgaagattatattgttggacctgagctctgaatagttgtgactgacactgctaattaatcactatgtacttacaacatctcagagttctaatcccacctcacattcataaacagggtatgact

SEQ ID NO: 114357 - DNA, 787 bp, Homo sapiens
gtaagtaaaaaagcttcctttgtatacctggacagcaccagtgaataaggggttaataatactactaagcttatagaagggaagattggtttgcctttgttttcgggaaaaacttgatggtggctgaaaacatgatggctctgcttggagggaaatgcttgttttcctctctctaagtataaatgctcattcacacctttcctgactttttgagaggtggcaaaatgcccaagattgattgccagttacttgtgttacctgaatgaggcccttgtgagtctctgatctaggaaaaacaacttgaacactcctatcgttaggttctaatcagtttttgagattcctgttcatttcaactctcaactctcttttcataacaactacttattttagtgatttatttacatatctactgccttatgtcattttctacattctcttcccacacctactggtaccgacactgaagtttctttgtcacagaaacaaacccttggagtattttgcccttcgccttcacccactgctcaaatgaggaaatgcaacagggttggaaacttcacagagcatagtcatcatttgattatgaatttccaaacccttcatgtttgacactttctagaacatttcctgctggccccagacactgtgaagaccctacagcttaagatagtaggaatcaaaaggttgtgtattttgatacatttgctctactatctgaaaaataggcattgtgagaatatgttgcctttttaaaaaataacttctctttaaatagttacctagg

SEQ ID NO: 114358 - DNA, 522 bp, Homo sapiens
agtccattcatcattctccatttactataaacaatctttgatttcactaaccagttttttcatttagttttggttgactatacactcaaataagaatctgattaactctaggaaagcaactgacatctgttagcaataattcaggtagtgttccttgttttaaaagtatccaattgtgtgtgatggtgtacacctgtagtcccatctacttgggagactgaggcaggaggattgcttgagctcaggagtttgagaccagcctgggcaacataccaagacccaagcttcaaaaaaaaaaaaaaagtaaaaacatctgaaggaagagtcatatttttaaaactcaaacttgctttataaaaatagatctataacaaacttccttttgaaaattcattatgtcctttaaatgcaactcaagttttaaatatttttttttttgagccggagtttcacccttgttgcccaggctggagtgcaatggcgtgatctcggctcactgaaacctctgcctcccggggtcaa

SEQ ID NO: 114359 - DNA, 595 bp, Homo sapiens
gccggtggactcagaggtcagagaacagaactcaacactgcatggcttcccttagaacctttgcccaattctgaagctgtgggtggaagatgagaagccacacagagagcctccgaataacataggagcctcttggccatcttgaggtgctgatgagatgaggatcggcctgaccctcgagcccagcagagcagggcagcccagaagcagatgacactgtcccaaatgtgtggccaccctggagtcagctcagtccctgcacggtccaggggatccccctctactcggtctgcctggcggagcaaagggtgagccctctagaggaaaatgtcgccatcctagacctctgcagtctttcctatgcgttcagcaacagtttaccgggcatgccacgagacaggaccacagcaccgaaaaccacgagaaaaaaagagcagtagagccacagtgggagaggccgatgttatcagataaggagcctaaaataaggggaaaaaggaaaaattggagcatttcgccaggtaatttgaatctactaaaataatcaaatggaaattttaggcctgagaaatatagtaactaaaattcaggcctc

SEQ ID NO: 114360 - DNA, 1812 bp, Homo sapiens
  misc_feature (21)..(21): n is a, c, g, or t
ccggaaggcacggcgctcagntcaggaccgcgcgccgtggtctgaggtccgcggcagggtcccgcatggcggcgcacaggaagcacgtgtttgtggagaaggtgctgcagagactttttcctcctgttccaagtggccaaggaaagagggaaccccagacgctggccgtccaaaatccaccaaagaaagtgacctctgagaaagtgagccagaaacatgctgagcctttgacagacactggctctgagaccccgactgcccgacggctctacactgccagcgggcctcctgagggctacgtcccctgttggccggagcccagcagctgtgggagccccgagaacgcctccagcggggatgacacagaagatcaggatcctcatgaccagccaaagagaagaagaattaggaagcataaatcaaagaaaaaatttaaaaatcccaataatgttcttatagaacaagcagaattagagaaacagcagagtctgttacaggagaaatctcagcgacagcacacagatggcaccacaataagcaaaaataaaaaaaggaaactgaaaaagaaacagcaaattaaaaggaagaaagcagccggcttggcagcaaaggctgctggtgtcagtttcatgtaccagcccgaggacagcagcaatgaaggggaaggcgtgggagaggcttgtgaggaggatggtgtggacaccagcgaggaagacccgacactggccggggaggaagacgttaaagataccagggaggaagatggtgcggacgctagcgaggaagacctgacacgggccaggcaggaagagggtgcggacgctagtgaggaagatccgacaccggccggggaggaagacgttaaagacgccagggaggaggacggtgtggacaccattgaggaagacctgacacgggccggggaggaagacggtaaagacaccagggaggaggacggtgcggacgccagcgaggaagacccgacatgggctggggaggaagagggtgcagactccggggaggaggacggtgcagacgccagcgaggaagatgatacaattaccaatgaaaaggcacacagtattctaaattttttgaagtcaacacaggaaatgtatttttatgacggtgtctccagagatgcagcttcagctgccctcgcagatgccgctgaggagctgctggaccgcctcgcgtcacacagcatgctgccctcagacgtgtccatcctgtaccacatgaaaacgctgctgctcctgcaagatactgagagattgaagcatgctctggaaatgttcccagaacattgcacgatgcctcctgaccatgccagagtaatctcagctttctttagttactggatcacacatatccttcctgagaagagcagtgactaaaatggaatatctctttaagaacagctcctctttaacaaaaaaacttaaaagacaaatgtgagatgggcttagagttagttctctgggaacttgaaagacatttatgccatattatttattcacgtgtttgttcctggtgggcaagatgccatctgaggcttcagatgagaaattggggtaaaatggaaatttttcacttatttgcaattatatatatcttgaattactacataaaacttgattctgtttctctacttattgtaaaaattgaaaatggacattctgttaagttaaatgtatagtttgaagctcatatatttttatgaagttttgaatcaccttgtatctgaaagtctctgctttaagaatgctttctgggtattaaaatgttctagtttaagtagtttgaatatag

SEQ ID NO: 114361 - DNA, 1796 bp, Homo sapiens
tgctggtaccggtcaggagatgttagggatgtccgcggcagggtcccgcatggcggcgcacaggaagcacgtgtttgtggagaaggtgctgcagagactttttcctcctgttccaagtggccaaggaaagagggaaccccagacgctggccgtccaaaatccaccaaagaaagtgacctctgagaaagtgagccagaaacatgctgagcctttgacagacactggctctgagaccccgactgcccgacggctctacactgccagcgggcctcctgagggctacgtcccctgttggccggagcccagcagctgtgggagccccgagaacgcctccagcggggatgacacagaagatcaggatcctcatgaccagccaaagagaagaagaattaggaagcataaatcaaagaaaaaatttaaaaatcccaataatgttcttatagaacaagcagaattagagaaacagcagagtctgttacaggagaaatctcagcgacagcacacagatggcaccacaataagcaaaaataaaaaaaggaaactgaaaaagaaacagcaaattaaaaggaagaaagcagccggcttggcagcaaaggctgctggtgtcagtttcatgtaccagcccgaggacagcagcaatgaaggggaaggcgtgggagaggcttgtgaggaggatggtgtggacaccagcgaggaagacccgacactggccggggaggaagacgttaaagataccagggaggaagatggtgcggacgctagcgaggaagacctgacacgggccaggcaggaagagggtgcggacgctagtgaggaagatccgacaccggccggggaggaagacgttaaagacgccagggaggaggacggtgtggacaccattgaggaagacctgacacgggccggggaggaagacggtaaagacaccagggaggaggacggtgcggacgccagcgaggaagacccgacatgggctggggaggaagagggtgcagactccggggaggaggacggtgcagacgccagcgaggaagatgatacaattaccaatgaaaaggcacacagtattctaaattttttgaagtcaacacaggaaatgtatttttatgacggtgtctccagagatgcagcttcagctgccctcgcagatgccgctgaggagctgctggaccgcctcgcgtcacacagcatgctgccctcagacgtgtccatcctgtaccacatgaaaacgctgctgctcctgcaagatactgagagattgaagcatgctctggaaatgttcccagaacattgcacgatgcctcctgaccatgccagagtaatctcagctttctttagttactggatcacacatatccttcctgagaagagcagtgactaaaatggaatatctctttaagaacagctcctctttaacaaaaaaacttaaaagacaaatgtgagatgggcttagagttagttctctgggaacttgaaagacatttatgccatattatttattcacgtgtttgttcctggtgggcaagatgccatctgaggcttcagatgagaaattggggtaaaatggaaatttttcacttatttgcaattatatatatcttgaattactacataaaacttgattctgtttctctacttattgtaaaaattgaaaatggacattctgttaagttaaatgtatagtttgaagctcatatatttttatgaagttttgaatcaccttgtatctgaaagtctctgctttaagaatgctttctgggtattaaaatgttctagtttaagtagtttgaatatag

SEQ ID NO: 114362 - DNA, 1771 bp, Homo sapiens
  misc_feature (21)..(21): n is a, c, g, or t
ccggaaggcacggcgctcagntcaggaccgcgcgccgtggtctgaggtccgcggcagggtcccgcatggcggcgcacaggaagcacgtgtttgtggagaaggtgctgcagagactttttcctcctgttccaagtggccaaggaaagagggaaccccagacgctggccgtccaaaatccaccaaagaaagtgacacactggctctgagaccccgactgcccgacggctctacactgccagcgggcctcctgagggctacgtcccctgttggccggagcccagcagctgtgggagccccgagaacgcctccagcggggatgacacagaagatcaggatcctcatgaccagccaaagagaagaagaattaggaagcataaatcaaagaaaaaatttaaaaatcccaataatgttcttatagaacaagcagaattagagaaacagcagagtctgttacaggagaaatctcagcgacagcacacagatggcaccacaataagcaaaaataaaaaaaggaaactgaaaaagaaacagcaaattaaaaggaagaaagcagccggcttggcagcaaaggctgctggtgtcagtttcatgtaccagcccgaggacagcagcaatgaaggggaaggcgtgggagaggcttgtgaggaggatggtgtggacaccagcgaggaagacccgacactggccggggaggaagacgttaaagataccagggaggaagatggtgcggacgctagcgaggaagacctgacacgggccaggcaggaagagggtgcggacgctagtgaggaagatccgacaccggccggggaggaagacgttaaagacgccagggaggaggacggtgtggacaccattgaggaagacctgacacgggccggggaggaagacggtaaagacaccagggaggaggacggtgcggacgccagcgaggaagacccgacatgggctggggaggaagagggtgcagactccggggaggaggacggtgcagacgccagcgaggaagatgatacaattaccaatgaaaaggcacacagtattctaaattttttgaagtcaacacaggaaatgtatttttatgacggtgtctccagagatgcagcttcagctgccctcgcagatgccgctgaggagctgctggaccgcctcgcgtcacacagcatgctgccctcagacgtgtccatcctgtaccacatgaaaacgctgctgctcctgcaagatactgagagattgaagcatgctctggaaatgttcccagaacattgcacgatgcctcctgaccatgccagagtaatctcagctttctttagttactggatcacacatatccttcctgagaagagcagtgactaaaatggaatatctctttaagaacagctcctctttaacaaaaaaacttaaaagacaaatgtgagatgggcttagagttagttctctgggaacttgaaagacatttatgccatattatttattcacgtgtttgttcctggtgggcaagatgccatctgaggcttcagatgagaaattggggtaaaatggaaatttttcacttatttgcaattatatatatcttgaattactacataaaacttgattctgtttctctacttattgtaaaaattgaaaatggacattctgttaagttaaatgtatagtttgaagctcatatatttttatgaagttttgaatcaccttgtatctgaaagtctctgctttaagaatgctttctgggtattaaaatgttctagtttaagtagtttgaatatag

SEQ ID NO: 114363 - DNA, 1758 bp, Homo sapiens
  misc_feature (183)..(184): n is a, c, g, or t
  misc_feature (195)..(195): n is a, c, g, or t
  misc_feature (201)..(201): n is a, c, g, or t
  misc_feature (219)..(219): n is a, c, g, or t
  misc_feature (226)..(226): n is a, c, g, or t
  misc_feature (238)..(238): n is a, c, g, or t
  misc_feature (241)..(241): n is a, c, g, or t
  misc_feature (246)..(246): n is a, c, g, or t
  misc_feature (251)..(251): n is a, c, g, or t
  misc_feature (255)..(256): n is a, c, g, or t
  misc_feature (267)..(267): n is a, c, g, or t
  misc_feature (272)..(272): n is a, c, g, or t
  misc_feature (277)..(277): n is a, c, g, or t
catttacaatatactcatccggacaatgacaccataaacaatactaccaatcaatactcatcattaataatgatggatggctacagcaataaaactaggaatagccaccctttcacttctgagtcccagaggcttacccaaggcgtgggagaggcatgatgaggaggatggtgtggacaccanngaggaagaccngacacnggccggggaggaagacgntaaaganaccagggagganganggtgnggacnccanngaggaagaccngacangggcnggggaggaagagggtgcagactccggggatgacacagaatcaggatcctcatgaccagccaaagagaagaagaattaggaagcataaatcaaagaaaaaatttaaaaatcccaataatgttcttatagaacaagcagaattagagaaacagcagagtctgttacaggagaaatctcagcgacagcacacagatggcaccacaataagcaaaaataaaaaaaggaaactgaaaaagaaacagcaaattaaaaggaagaaagcagccggcttggcagcaaaggctgctggtgtcagtttcatgtaccagcccgaggacagcagcaatgaaggggaaggcgtgggagaggcttgtgaggaggatggtgtggacaccagcgaggaagacccgacactggccggggaggaagacgttaaagataccagggaggaagatggtgcggacgctagcgaggaagacctgacacgggccaggcaggaagagggtgcggacgctagtgaggaagatccgacaccggccggggaggaagacgttaaagacgccagggaggaggacggtgtggacaccattgaggaagacctgacacgggccggggaggaagacggtaaagacaccagggaggaggacggtgcggacgccagcgaggaagacccgacatgggctggggaggaagagggtgcagactccggggaggaggacggtgcagacgccagcgaggaagatgatacaattaccaatgaaaaggcacacagtattctaaattttttgaagtcaacacaggaaatgtatttttatgacggtgtctccagagatgcagcttcagctgccctcgcagatgccgctgaggagctgctggaccgcctcgcgtcacacagcatgctgccctcagacgtgtccatcctgtaccacatgaaaacgctgctgctcctgcaagatactgagagattgaagcatgctctggaaatgttcccagaacattgcacgatgcctcctgaccatgccagagtaatctcagctttctttagttactggatcacacatatccttcctgagaagagcagtgactaaaatggaatatctctttaagaacagctcctctttaacaaaaaaacttaaaagacaaatgtgagatgggcttagagttagttctctgggaacttgaaagacatttatgccatattatttattcacgtgtttgttcctggtgggcaagatgccatctgaggcttcagatgagaaattggggtaaaatggaaatttttcacttatttgcaattatatatatcttgaattactacataaaacttgattctgtttctctacttattgtaaaaattgaaaatggacattctgttaagttaaatgtatagtttgaagctcatatatttttatgaagttttgaatcaccttgtatctgaaagtctctgctttaagaatgctttctgggtattaaaatgttctagtttaagtagtttgaatatag

SEQ ID NO: 114364 - DNA, 1195 bp, Homo sapiens
tacccacaagtgggaatgagagcctggacttggaggtctcatgcatcctgggccatcagaaaaggctgtgatggtttctaaaagatcaggatcctcatgaccagccaaagagaagaagaattaggaagcataaatcaaagaaaaaatttaaaaatcccaataatgttcttatagaacaagcagaattagagaaacagcagagtctgttacaggagaaatctcagcgacagcacacagatggcaccacaataagcaaaaataaaaaaaggaaactgaaaaagaaacagcaaattaaaaggaagaaagcagccggcttggcagcaaaggctgctggtgtcagtttcatgtaccagcgaggaagacccgacatgggctggggaggaagagggtgcagactccggggaggaggacggtgcagacgccagcgaggaagatgatacaattaccaatgaaaaggcacacagtattctaaattttttgaagtcaacacaggaaatgtatttttatgacggtgtctccagagatgcagcttcagctgccctcgcagatgccgctgaggagctgctggaccgcctcgcgtcacacagcatgctgccctcagacgtgtccatcctgtaccacatgaaaacgctgctgctcctgcaagatactgagagattgaagcatgctctggaaatgttcccagaacattgcacgatgcctcctgaccatgccagagtaatctcagctttctttagttactggatcacacatatccttcctgagaagagcagtgactaaaatggaatatctctttaagaacagctcctctttaacaaaaaaacttaaaagacaaatgtgagatgggcttagagttagttctctgggaacttgaaagacatttatgccatattatttattcacgtgtttgttcctggtgggcaagatgccatctgaggcttcagatgagaaattggggtaaaatggaaatttttcacttatttgcaattatatatatcttgaattactacataaaacttgattctgtttctctacttattgtaaaaattgaaaatggacattctgttaagttaaatgtatagtttgaagctcatatatttttatgaagttttgaatcaccttgtatctgaaagtctctgctttaagaatgctttctgggtattaaaatgttctagtttaagtagtttgaatatag

SEQ ID NO: 114365 - DNA, 1083 bp, Homo sapiens
gacgggccaggggaggcgtctcaccagacagacgtgtagacgggccaggggaggcgtctcaccagacagacgtgtagacgggccaggggaggcgtctcaccagacagaggtgtagacgggccaggggaggcgtctcaccagacagaggtgtagatgggccaggggaggcgtctcaccagacagaggtgtagacgggccaggtttccacagtcgttcatgcagtggtattttgtgctgagctctgttctgattctctcttctggtagcttctcatctcccagatatgtcattctgtgtggaagcgtaggtttgagaccttccttaagagaggaaagcttatctttagtttatagaaataaaaacaaaactgtatttccaagcaaaactgactttatgtaggtgtctccagagatgcagcttcagctgccctcgcagatgccgctgaggagctgctggaccgcctcgcgtcacacagcatgctgccctcagacgtgtccatcctgtaccacatgaaaacgctgctgctcctgcaagatactgagagattgaagcatgctctggaaatgttcccagaacattgcacgatgcctcctgaccatgccagagtaatctcagctttctttagttactggatcacacatatccttcctgagaagagcagtgactaaaatggaatatctctttaagaacagctcctctttaacaaaaaaacttaaaagacaaatgtgagatgggcttagagttagttctctgggaacttgaaagacatttatgccatattatttattcacgtgtttgttcctggtgggcaagatgccatctgaggcttcagatgagaaattggggtaaaatggaaatttttcacttatttgcaattatatatatcttgaattactacataaaacttgattctgtttctctacttattgtaaaaattgaaaatggacattctgttaagttaaatgtatagtttgaagctcatatatttttatgaagttttgaatcaccttgtatctgaaagtctctgctttaagaatgctttctgggtattaaaatgttctagtttaagtagtttgaatatag

SEQ ID NO: 114366 - DNA, 876 bp, Homo sapiens
  misc_feature (21)..(21): n is a, c, g, or t
ccggaaggcacggcgctcagntcaggaccgcgcgccgtggtctgaggtccgcggcagggtcccgcatggcggcgcacaggaagcacgtgtttgtggagaaggtgctgcagagactttttcctcctgttccaagtggccaaggaaagagggaaccccagacgctggccgtccaaaatccaccaaagaaagtgacctctgagaaagtgagccagaaacatgctgagcctttgacagacactggctctgagaccccgactgcccgacggctctacactgccagcgggcctcctgagggctacgtcccctgttggccggagcccagcagctgtgggagccccgagaacgcctccagcggggatgacacagaagagaaaatgcccagagcaagccccaagcacagccttgcagctgcagagccgatggagcctccagggccctcaggagccagaggccaggagaagcaaggatgggacccctctctctctgaccctccaaggtcagtgtgggaacacggcacacaagaaggaagagcctttgagcttttttggttgcagttttaagcacagagatcaggatcctcatgaccagccaaagagaagaagaattaggaagcataaatcaaagaaaaaatttaaaaatcccaataatgttcttatagaacaagcagaattagagaaacagcagagtctgttacaggagaaatctcagcgacagcacacagatggcaccacaataagcaaaaataaaaaaaggaaactgaaaaagaaacagcaaattaaaaggaagaaagcagccggcttggcagcaaaggctgctggtgtcagtttcatgtaccagcccgaggacggccttcgtgcgcttcgggatcctctagaa

SEQ ID NO: 114367 - DNA, 372 bp, Homo sapiens
  misc_feature (21)..(21): n is a, c, g, or t
ccggaaggcacggcgctcagntcaggaccgcgcgccgtggtctgaggtccgcggcagggtcccgcatggcggcgcacaggaagcacgtgtttgtggagaaggtgctgcagagactttttcctcctgttccaagtggccaaggaaagagggaaccccagacgctggccgtccaaaatccaccaaagaaagtgacacactggctctgagaccccgactgcccgacggctctacactgccagcgggcctcctgagggctacgtcccctgttggccggagcccagcagctgtgggagccccgagaacgcctccagcggggatgacacagaagaatcaggagtcctcatgaccagcaacagaatagactcctgtaga

SEQ ID NO: 114368 - DNA, 368 bp, Homo sapiens
agtgaaccaagggttcacaccccagtgaaatacaaatattcagaattgagccactgtgttgccatactgattatgtaatgtgtgattaacaagtataatgtgtcactttcaacatcagtttcatgccaaagttgcattttattagattatttgggagttcactttgggcccaaaggctcgtgtctacataataataacttatgatttttctttttgtctttgttttattttttgttttgtgttttttgctttctagaccatgccagagtaatctcagctttctttagttactggatcacacatatccttcctgagaagagcagtgactaaaatggaatatctctttaagaacagctcctctttaacaa

SEQ ID NO: 114369 - DNA, 1494 bp, Homo sapiens
  misc_feature (21)..(21): n is a, c, g, or t
ccggaaggcacggcgctcagntcaggaccgcgcgccgtggtctgaggtccgcggcagggtcccgcatggcggcgcacaggaagcacgtgtttgtggagaaggtgctgcagagactttttcctcctgttccaagtggccaaggaaagagggaaccccagacgctggccgtccaaaatccaccaaagaaagtgacctctgagaaagtgagccagaaacatgctgagcctttgacagacactggctctgagaccccgactgcccgacggctctacactgccagcgggcctcctgagggctacgtcccctgttggccggagcccagcagctgtgggagccccgagaacgcctccagcggggatgacacagaagatcaggatcctcatgaccagccaaagagaagaagaattaggaagcataaatcaaagaaaaaatttaaaaatcccaataatgttcttatagaacaagcagaattagagaaacagcagagtctgttacaggagaaatctcagcgacagcacacagatggcaccacaataagcaaaaataaaaaaaggaaactgaaaaagaaacagcaaattaaaaggaagaaagcagccggcttggcagcaaaggctgctggtgtcagtttcatgtaccagcccgaggacagcagcaatgaaggggaaggcgtgggagaggcttgtgaggaggatggtgtggacaccagcgaggaagacccgacactggccggggaggaagacgttaaagataccagggaggaagatggtgcggacgctagcgaggaagacctgacacgggccaggcaggaagagggtgcggacgctagtgaggaagatccgacaccggccggggaggaagacgttaaagacgccagggaggaggacggtgtggacaccattgaggaagacctgacacgggccggggaggaagacggtaaagacaccagggaggaggacggtgcggacgccagcgaggaagacccgacatgggctggggaggaagagggtgcagactccggggaggaggacggtgcagacgccagcgaggaagatgatacaattaccaatgaaaaggcacacagtattctaaattttttgaagtcaacacaggaaatgtatttttatgacggtgtctccagagatgcagcttcagctgccctcgcagatgccgctgaggagctgctggaccgcctcgcgtcacacagcatgctgccctcagacgtgtccatcctgtaccacatgaaaacgctgctgctcctgcaagatactgagagattgaagcatgctctggaaatgttcccagaacattgcacgatgcctcctgatcaggatcctcatgaccagccaaagagaagaagaattaggaagcataaatcaaagaagaaactttaaaaatcccaataatgttcttatagaacaagcagaattagagaaacagcagagtctgttacaggagaaatctcagcgacagcacacagatggcaccacaataagc

SEQ ID NO: 114370 - DNA, 2011 bp, Homo sapiens
  misc_feature (21)..(21): n is a, c, g, or t
ccggaaggcacggcgctcagntcaggaccgcgcgccgtggtctgaggtccgcggcagggtcccgcatggcggcgcacaggaagcacgtgtttgtggagaaggtgctgcagagactttttcctcctgttccaagtggccaaggaaagagggaaccccagacgctggccgtccaaaatccaccaaagaaagtgacctctgagaaagtgagccagaaacatgctgagcctttgacagacactggctctgagaccccgactgcccgacggctctacactgccagcgggcctcctgagggctacgtcccctgttggccggagcccagcagctgtgggagccccgagaacgcctccagcggggatgacacagaagagaaaatgcccagagcaagccccaagcacagccttgcagctgcagagccgatggagcctccagggccctcaggagccagaggccaggagaagcaaggatgggacccctctctctctgaccctccaaggtcagtgtgggaacacggcacacaagaaggaagagcctttgagcttttttggttgcagttttaagcacagagatcaggatcctcatgaccagccaaagagaagaagaattaggaagcataaatcaaagaaaaaatttaaaaatcccaataatgttcttatagaacaagcagaattagagaaacagcagagtctgttacaggagaaatctcagcgacagcacacagatggcaccacaataagcaaaaataaaaaaaggaaactgaaaaagaaacagcaaattaaaaggaagaaagcagccggcttggcagcaaaggctgctggtgtcagtttcatgtaccagcccgaggacagcagcaatgaaggggaaggcgtgggagaggcttgtgaggaggatggtgtggacaccagcgaggaagacccgacactggccggggaggaagacgttaaagataccagggaggaagatggtgcggacgctagcgaggaagacctgacacgggccaggcaggaagagggtgcggacgctagtgaggaagatccgacaccggccggggaggaagacgttaaagacgccagggaggaggacggtgtggacaccattgaggaagacctgacacgggccggggaggaagacggtaaagacaccagggaggaggacggtgcggacgccagcgaggaagacccgacatgggctggggaggaagagggtgcagactccggggaggaggacggtgcagacgccagcgaggaagatgatacaattaccaatgaaaaggcacacagtattctaaattttttgaagtcaacacaggaaatgtatttttatgacggtgtctccagagatgcagcttcagctgccctcgcagatgccgctgaggagctgctggaccgcctcgcgtcacacagcatgctgccctcagacgtgtccatcctgtaccacatgaaaacgctgctgctcctgcaagatactgagagattgaagcatgctctggaaatgttcccagaacattgcacgatgcctcctgaccatgccagagtaatctcagctttctttagttactggatcacacatatccttcctgagaagagcagtgactaaaatggaatatctctttaagaacagctcctctttaacaaaaaaacttaaaagacaaatgtgagatgggcttagagttagttctctgggaacttgaaagacatttatgccatattatttattcacgtgtttgttcctggtgggcaagatgccatctgaggcttcagatgagaaattggggtaaaatggaaatttttcacttatttgcaattatatatatcttgaattactacataaaacttgattctgtttctctacttattgtaaaaattgaaaatggacattctgttaagttaaatgtatagtttgaagctcatatatttttatgaagttttgaatcaccttgtatctgaaagtctctgctttaagaatgctttctgggtattaaaatgttctagtttaagtagtttgaatatag

SEQ ID NO: 114371 - DNA, 1527 bp, Homo sapiens
tacccacaagtgggaatgagagcctggacttggaggtctcatgcatcctgggccatcagaaaaggctgtgatggtttctaaaagatcaggatcctcatgaccagccaaagagaagaagaattaggaagcataaatcaaagaaaaaatttaaaaatcccaataatgttcttatagaacaagcagaattagagaaacagcagagtctgttacaggagaaatctcagcgacagcacacagatggcaccacaataagcaaaaataaaaaaaggaaactgaaaaagaaacagcaaattaaaaggaagaaagcagccggcttggcagcaaaggctgctggtgtcagtttcatgtaccagcccgaggacagcagcaatgaaggggaaggcgtgggagaggcttgtgaggaggatggtgtggacaccagcgaggaagacccgacactggccggggaggaagacgttaaagataccagggaggaagatggtgcggacgctagcgaggaagacctgacacgggccaggcaggaagagggtgcggacgctagtgaggaagatccgacaccggccggggaggaagacgttaaagacgccagggaggaggacggtgtggacaccattgaggaagacctgacacgggccggggaggaagacggtaaagacaccagggaggaggacggtgcggacgccagcgaggaagacccgacatgggctggggaggaagagggtgcagactccggggaggaggacggtgcagacgccagcgaggaagatgatacaattaccaatgaaaaggcacacagtattctaaattttttgaagtcaacacaggaaatgtatttttatgacggtgtctccagagatgcagcttcagctgccctcgcagatgccgctgaggagctgctggaccgcctcgcgtcacacagcatgctgccctcagacgtgtccatcctgtaccacatgaaaacgctgctgctcctgcaagatactgagagattgaagcatgctctggaaatgttcccagaacattgcacgatgcctcctgaccatgccagagtaatctcagctttctttagttactggatcacacatatccttcctgagaagagcagtgactaaaatggaatatctctttaagaacagctcctctttaacaaaaaaacttaaaagacaaatgtgagatgggcttagagttagttctctgggaacttgaaagacatttatgccatattatttattcacgtgtttgttcctggtgggcaagatgccatctgaggcttcagatgagaaattggggtaaaatggaaatttttcacttatttgcaattatatatatcttgaattactacataaaacttgattctgtttctctacttattgtaaaaattgaaaatggacattctgttaagttaaatgtatagtttgaagctcatatatttttatgaagttttgaatcaccttgtatctgaaagtctctgctttaagaatgctttctgggtattaaaatgttctagtttaagtagtttgaatatag

SEQ ID NO: 114372 - DNA, 866 bp, Homo sapiens
  misc_feature (3)..(3): n is a, c, g, or t
  misc_feature (6)..(6): n is a, c, g, or t
  misc_feature (10)..(10): n is a, c, g, or t
  misc_feature (18)..(18): n is a, c, g, or t
  misc_feature (20)..(20): n is a, c, g, or t
  misc_feature (23)..(23): n is a, c, g, or t
  misc_feature (100)..(100): n is a, c, g, or t
  misc_feature (112)..(112): n is a, c, g, or t
  misc_feature (123)..(123): n is a, c, g, or t
  misc_feature (175)..(175): n is a, c, g, or t
  misc_feature (297)..(297): n is a, c, g, or t
  misc_feature (393)..(393): n is a, c, g, or t
  misc_feature (553)..(553): n is a, c, g, or t
  misc_feature (725)..(725): n is a, c, g, or t
  misc_feature (787)..(787): n is a, c, g, or t
ccntcntctnacggcgancnttnactcgccactgcacaccagtctcagactatctgtccccactcctccgccaggagtctccggatcctccacaagatcntctcaccccccntttcaggctgntcagatctcataaatatgtccatttttctacaactgggtgtggagcggctcntggtggagagtgtccacagccttgaccataagtcacctgcccctaaagagggtctgctactgggaagtgtgccgctatttcagaggatggacaccgactcacgtgacacacagcaagcagangtctgcgaacagtgtttctgcaggcaccaggtagatgtttcaactggtcactggaattcacaccaattttttgtgctatgagtggcattttaggtncgtgatctcatccaagccttccaaagctgagaagaagtccttcctcacagacaagaggacacagtctcagaaaggcaaaaccactgctataaagccacatagcaagcaaaccagaaattcaaatcatgttctggttggttgtaaggtctataatactttntctttttaaccttttacttcgaaataatatcagacttaaagaaaagttacaggaagagtacaaagcattcctacatgcccttcacacagcacccagatttcctaaaggttcactttttaccatatatgttttgtccatctgtctatccatcattattttctgaaccagttgngagtgagctgcagccctaatgtctctgtattcctatatgcgtctgtgtagcttcctaaaacncagggtttatcttacctgattatagtacaatcacggaaatcaacagccttgttacaacactattttatgcttttttttt

SEQ ID NO: 114373 - DNA, 620 bp, Homo sapiens
gcaccatgtgcggtaagcattaggtaattacatttcacttgtttaattaagtttcactttctggttgccttgagggaactgtaggaaaggattttgattttgtttttgtttttgtttttcctgatgctttttttcttttttcccctagctagaagctgaataattccacacagtgttgaaatggatatgctgtgtttgtgttggccgaattaagcatctataatcatgtatttcctctcttttgtctatttgtgtcacagtcttaatatgtgggatagaaattttgtttagtggagacataattttttgattgtcttagggcttatttaaaccagctcatctccattataatgtgtttctgtactttactcatcagcttggcactgactccactattgttttcttcaaatactgtgtattttccctgaaagtccaagtagctgacaattttgctacctctgcaaggaaatctgctttattttctcctaggttttacacatatataaaactatacattagggacatactgttcctcagcaggctacatggcctttcattcactctcttaaaaatatctgtggacctattatgtgaaataatgtatgatttgctcaatggga

SEQ ID NO: 114374 - DNA, 493 bp, Homo sapiens
gtgatctagaggatctgcacactgggttcgagttctacacaaagccattcaaggtacagagggaaaacagtaaataatcggaaaaagacatgctagtaacaccaaacaagcatgacctgaaacatggataagcccctggcttttagtaacaggaaactgacaggacaaaactatggagaggttcctgatagttggcatgactatggaggaggaggccctatcattctctcccacccaagacacacagttgccaaagcttgagagaaaatgtgcaggttctcaacagacctaggcaaaaggcagatggcctaaggatgaaggaatttagccatgaatgctgcttaactttaccactggagtatttggagtgtttcagcacaacttccgcaatgatgcaagataaacattgttttaatagagaccattgttccacttatgggttctgaagggaccaagattgaactacacagttaagtgaccatccgacgtatca

SEQ ID NO: 114375 - DNA, 288 bp, Homo sapiens
ctttttttttattctagttgttggaaatcttaagatgtagttttggcaaggtgcagtggttcacacccctaatctcagcactgtgggaggccaaggcaggaggattgcttcagcccaggagttctagagcagcctgggcaacatagaccctgtctctgcaaaaataaataaataaaacaaaattagctggttttggtggtgcacgcctgtggtcccagctacttgagaggctgcagtggaaggattgaatgactgtactccagcctgggtgacagagtgagaccctgt

SEQ ID NO: 114376 - DNA, 437 bp, Homo sapiens
ccctggtgccaaaaaggctggggactgctgacctacaagatatattagttatgactcttggtgcatactcttgacagaaatcccactcaacctagtataatgcagaggacagttcacggagcaactcaaataattgccacttttacaatattgaagcttcctacgggaaacataatacatctctcaatttatgtcctttaatacgattaaacatttttcttcatgtaggttctccagaattttggttatgcctatgcctagattatttatgattgttgttggtattgcaaatgtcctctcctattgattatttaatggtatctatggaaagtattgatttttgtgtatttgctctgtgcccacttgccatctaactggttgttatattttattgaacctttcaaaggatataaattatgctgattttaatgtcaaaa

SEQ ID NO: 114377 - DNA, 330 bp, Homo sapiens
gaggtgtagaatactctgtgacaagggctcacctaggctttacttattacagatgtgatggctgttggcaaacaaaacctccgtagagcttgggtggtagaaactgaatcctgacactgatatttcactgtctgtgccgaggggagcctgatatttctgtgtttcatactggctctacctggtgtaatcattcctcaaacctcaaaccaagaattctgctgagaaggcagtggacattgttagaggcagtctccccctgcctgtcgctccccatattccaaggaactggctggtctttaatcctgaactgaatcattggattaagtagca

SEQ ID NO: 114378 - DNA, 3326 bp, Homo sapiens
ggagcaggaaatgctccaccagcacagccgactcccgggaatcggggtctgaccgccaggatggaagtggggccagccaccgagaccttcgtgctggaacttcaatgtcttgaggatgggggcccagggcctgacaccctctcaggtggcagcggtgggagcgagagtcaggaggaggaagagcctcaggagaggaacagcagtccacagcggccagcagtctcggccccagtgggggccagtgaaatcgctgaggaaacccggccgggacaacgagagttgcaactgcagcagttagaacagcagcccgagccgcagcaacagccgcaacacgagcagctgcaacagccgcagccacacctagaactgcaacagcagccgcagcaagatgggcaacaacagctatctcaactacaacaggaaaaacaccaatccgtgcaccatcaggaactgaaaccagaactgcagctaatgcaccagcagcaacagttacagccacagcaagtgcaagagcaacagcggttgcagcagcagcaggagcagttacagacgcagcaagcacaagagcaacaggtattgcagcagcaggaacagctacagcagcaagtgcaagagcaacagctgttacagcaacagcaggaacagttacagcagcagcagctgtacaacagcaggaacagttacagcagcaacagtttcaacagcagcaggaacagttacagcagcagcagcagctactattgctgcagcagcagggacagttacagcagcaactgttgcagcagcagcaggcacagttacaacagcagctgctggaacagcagcaggcacagttacagcagcagctactgctgcagcagcaggaacagttacagcagcagcagcaacagcagctgttgcaacagcagcaggaacaattgcagcagcaacaactgcagcctcctcccctggagcccgaggaggaggaagaggtggagctggagctcatgccggtggacctggggtcagagcaggagctggagcagcagcggcaggagttggagcggcagcaggagctggaacggcagcaggagcagcggcagctgcagctcaaactgcaggaggagctgcagcagctggagcaacagctggagcagcagcagcagcagctggagcagcaggaggtgcagctggagctgaccccggtggagctaggcgcccagcagcaggaggtgcagctggagctgacccccgtgcagccggagctgcagctggaactggtgccagccgcagggggcggcggagcggcggtcccgggggctccggccgcggtcgtggtggctcccccgggctacgtggtggtgcaggagctcatggtgctgcccgccgtggcagcgccggccgtggtggccatcccgggcccggcaggcagcgcggcgttgacccctgcacggcagcggcggcggcggcgcgctcgggaccggccgaccatctgcggggagtgcggcaagggcttcagccgcagcacggacctggtgcgccaccaggccacgcacacgggtgagcggccacaccgctgcggcgagtgcggcaagggcttctcgcagcactcgaatctggtgacgcaccaacgcatccacacgggcgagaaaccctacgcctgctcctactgcgccaagcgcttcagcgagagctcggcgctcgtgcagcaccagcgcacgcacaccggggagcgaccctacgcctgcggggactgtggcaagcgcttcagcgtctcctccaacctgctgcgccaccggcgcacgcactcgggcgagcggccctacgtgtgcgaggactgtggcgagcgcttccgacacaaggtgcagatccgccgccacgagcgccagctgcacggcgcgggccgctccaggggcctcggcctgctgcgcgcctcgcggccggcggccctcggtggcccagcccgcgcggagcaggccgctacagccactgcgcccgcagacaaggcgctgtgagggccgtgatcggggctgcctggccgggaggggaccccccacccgcctccacctgaaaagctccttgacccgggttcatgggcgctggaggcgtcctggaatatccctggagtaaaaggcttccaccatcatcatcatcatcatctcccggattccctgagaaaataccaggttcacagatttcaccgccagaaaaatccatccgccaaaagagaagtggaccggggctgaaacagcacacgggacacgtttgtctgccctttgaggggtctgccaaaggttttccctccgggaaaactggacttactacgaacgaggaaaaacccccagtggcgagacgattaatgacactggccgaggactggacacccaccagggaatcaagacgtggtgagacacacgtggaaaatcttcgatcctggtgaaaatgatcgcaaggagaaattcggggaggaagcaaacttgtttgcactatgtagaaactgaccaaggcatcgaatcgtcctcagaggcatttgccttgaaaatactttccaagatgaaaattcatcagggtgggtataattctgatgaaaacgcctgtgttcatcaacacagggtcagagcgctcaccgggtcgatgtgcaaatccaagccaggaagtcctgctccgggtggaaggtaaaaccttccctccagggaaccaggggctccggcgggcatcggaggcagcttcttggcctctgctgctgtgtcccccagtccccccagcccgcattaatgtcctctggaataagagcctgtggctgaagcagagggccttctgggagagctctccaaggtctggaaggagggtcccccagaaggagctccggggtagccccactgtggcccccctggactccaccagcttcatgcttctcagatgctacccaggggccggcccggggagaccagggcagatttctcccgcaccaggctgtggaggtttggagggctgcctgagcagacactgtgccattgctggggctggggaaagaatatctgagacgacgtttgggagcaatgctctttaccacgttcaccaaatcgtctggggcaggggttgtgagctgcagcagttgctggtgccttgtgggaaggtggggcagggaggaggctgcccgccacctctgcccccagtcacttcctgcttgacctgactcttcacatgtggctgcttaattcctgcccctctccccccagctgcttctcctttactaacacacctgctacattttacacatgtgttggtaagtgagaaacagaaacgaaaaataaattaaaatgcagaaatacaaaagtccttgtctt

SEQ ID NO: 114379 - DNA, 2847 bp, Homo sapiens
ggagcaggaaatgctccaccagcacagccgactcccgggaatcggggtctgaccgccaggatggaagtggggccagccaccgagaccttcgtgctggaacttcaatgtcttgaggatgggggcccagggcctgacaccctctcaggtggcagcggtgggagcgagagtcaggaggaggaagagcctcaggagaggaacagcagtccacagcggccagcagtctcggccccagtgggggccagtgaaatcgctgaggaaacccggccgggacaacgagagttgcaactgcagcagttagaacagcagcccgagccgcagcaacagccgcaacacgagcagctgcaacagccgcagccacacctagaactgcaacagcagccgcagcaagatgggcaacaacagctatctcaactacaacaggaaaaacaccaatccgtgcaccatcaggaactgaaaccagaactgcagctaatgcaccagcagcaacagttacagccacagcaagtgcaagagcaacagcggttgcagcagcagcaggagcagttacagacgcagcaagcacaagagcaacaggtattgcagcagcaggaacagctacagcagcaagtgcaagagcaacagctgttacagcaacagcaggaacagttacagcagcagcagctgtacaacagcaggaacagttacagcagcaacagtttcaacagcagcaggaacagttacagcagcagcagcagctactattgctgcagcagcagggacagttacagcagcaactgttgcagcagcagcaggcacagttacaacagcagctgctggaacagcagcaggcacagttacagcagcagctactgctgcagcagcaggaacagttacagcagcagcagcaacagcagctgttgcaacagcagcaggaacaattgcagcagcaacaactgcagcctcctcccctggagcccgaggaggaggaagaggtggagctggagctcatgccggtggacctggggtcagagcaggagctggagcagcagcggcaggagttggagcggcagcaggagctggaacggcagcaggagcagcggcagctgcagctcaaactgcaggaggagctgcagcagctggagcaacagctggagcagcagcagcagcagctggagcagcaggaggtgcagctggagctgaccccggtggagctaggcgcccagcagcaggaggtgcagctggagctgacccccgtgcagccggagctgcagctggaactggtgccagccgcagggggcggcggagcggcggtcccgggggctccggccgcggtcgtggtggctcccccgggctacgtggtggtgcaggagctcatggtgctgcccgccgtggcagcgccggccgtggtggccatcccgggcccggcaggcagcgcggcgttgacccctgcacggcagcggcggcggcggcgcgctcgggaccggccgaccatctgcggggagtgcggcaagggcttcagccgcagcacggacctggtgcgccaccaggccacgcacacgggtgagcggccacaccgctgcggcgagtgcggcaagggcttctcgcagcactcgaatctggtgacgcaccaacgcatccacacgggcgagaaaccctacgcctgctcctactgcgccaagcgcttcagcgagagctcggcgctcgtgcagcaccagcgcacgcacaccggggagcgaccctacgcctgcggggactgtggcaagcgcttcagcgtctcctccaacctgctgcgccaccggcgcacgcactcgggcgagcggccctacgtgtgcgaggactgtggcgagcgcttccgacacaaggtgcagatccgccgccacgagcgccagctgcacggcgcgggccgctccaggggcctcggcctgctgcgcgcctcgcggccggcggccctcggtggcccagcccgcgcggagcaggccgctacagccactgcgcccgcagacaaggcgctgtgagggccgtgatcggggctgcctggccgggaggggaccccccacccgcctccacctgaaaagctccttgacccgggttcatgggcgctggaggcgtcctggaatatccctggagtaaaaggcttccaccatcatcatcatcatcatctcccggattccctgagaaaataccaggttcacagatttcaccgccagaaaaatccatccgccaaaagagaagtggaccggggctgaaacagcacacgggacacgtttgtctgccctttgaggggtctgccaaaggttttccctccgggaaaactggacttactacgaacgaggaaaaacccccagtggcgagacgattaatgacactggccgaggactggacacccaccagggaatcaagacgtggtgagacacacgtggaaaatcttcgatcctggtgaaaatgatcgcaaggagaaattcggggaggaagcaaacttgtttgcactatgtagaaactgaccaaggcatcgaatcgtcctcagacactgtgccattgctggggctggggaaagaatatctgagacgacgtttgggagcaatgctctttaccacgttcaccaaatcgtctggggcaggggttgtgagctgcagcagttgctggtgccttgtgggaaggtggggcagggaggaggctgcccgccacctctgcccccagtcacttcctgcttgacctgactcttcacatgtggctgcttaattcctgcccctctccccccagctgcttctcctttactaacacacctgctacattttacacatgtgttggtaagtgagaaacagaaacgaaaaataaattaaaatgcagaaatacaaaagtccttgtctt

SEQ ID NO: 114380 - DNA, 1870 bp, Homo sapiens
atacacaaatgtttatagcagctttattcataataatcaaaaactgaaaacaactcaaacatccatcaacaggcagatggataaacaaattatggtatgtccatgcaacggaatacaactcactgatgaaaaggaataaaccacaaatgcctgcaacgccatgatgaatctcaaaacatgctgagtgtagagaagccagacacaagagtagatactcctatacaattccacttacatggaaatctagaaaagacaattcgaatatatagtggcaaaaagcagaagagtggttgcctggaaccagggtgggaatgaagattaactgcccagaggcataaaaaatggggtggtgggggcggtgatggaaaagtgctatgccttcactgtacctttgtcaaaacttgttgaactgtatacttcaaatgggtgtgtgttttattgaaggtaaatttgaccccaataacatttatttttaaaaattaagagcaaacagaaaaagcttagactaggaatctttaatttgaactataattctgtctactgtttccactgaggtggtctttcagcaaatgactcagtagttttaagcctcagtttcttcagctgtaaagtgggaataacaacaggcaccccatggtgttgcctatgaaatgcagtgatgatgacctaatccttagtgagcgccctatgtgccaggcactgtgctgaatgctttgcagaaacgaattcatcttatcagatagttctgaacactgcaaagcactatacaaatgtaagttacaggaattcttgcactttgcaggtgcttgttaaattgtgaagaagaaagcaaaacataagtgtaaaggattaccaaactgcactagtatgaagagagccatgttcctcagctgtacagggctgatgaatggggaggaggcctgcgagcctaccaggagaaccggggagactctctgtctaccgagagcctggatatcctcccgagtggcccctcatgagactatctaccaacgtgtaacagactgtctgtgacaggccatgggcataatatgtattagtatctctaagaaagaggtggcttttcctatacaaaatttgttggtgacagttggtcaacacttatgtacctgataagccatgtgggtacagtcgatcctcagtacaaatggcagtggtatgctgggtagctaatgatgacagttattaccgttactactattattatcaatatcctgttttgcagaggaggaaaccaaaaccaagaaggattgttcctttccccaaatcccaagctagcaagatttcccgatcctccctccatgccctttcctaacgtctctgtgatttgggagcttctgagctggagttctgtaaattcccaaggaatgggcagttcagaaaaataccaaaaattctaacattattagactttaaagagatttattgattccttttgaatggcagcagatggaacattctggactggggaaggacagtctgtgatgtgaaacccttccccaaggtagacaacaaaagcgttttttaaatgaacacttagtagaacaatctagaagaggaaaaacctcataagtaggaagcctagctgggcggttgggagaaggagtataagtgatttattacagcttatgaagagactgtgtgtgggctgccagggtcccagctctttctcagccccaactgagaaagggtggggtggtttgcctctgcctttgctgtgggtcacaaaccttcagtggcccaaaaggtggcaagcctgacagatgacctggaaaaatcaaggatatcaatgttttaaatgcttttattcataagcagggtattggtggtgggtctgctgaaaaaaaaaaac

SEQ ID NO: 114381 - DNA, 429 bp, Homo sapiens
aggattgacataatccataggtgctcctaatgcagtagtctataatttgactttcttattacttttccccttaaaaattctaagacagcattgagtttttggtatcctcagaggaaaagacagttacctctaagatacctactttcagggcaggcgtggtggctcatgcctgtaatcctagcactttgggaggccaaagcaggcgaatcacctgaggtcaggagtttgagaccagcctggccaacatgatgaagccccgtctctactgaaaatacaaaaattagtcgagcgtggtggcaggcgcctgtaatcccagctacttgggaggctgaggtgagagaattgcttgaacctgggagggggagattgcagtcagccgagatcacgccattgcactccagcctgggggataagagcgagacttcgtct

SEQ ID NO: 114382 - DNA, 651 bp, Homo sapiens
ctataaaggaaacaacagagtgggagtcccccccgggtggccggcccgtctaaaactagtgattccccgcgggcgtccagaatttccgccccaacaaataaggaaacaaatgagttcttcaaaggagatttagtgttcaggaaaggattctatggaccctgagagggtttggagaagaggtgtgtaagcaagagttcattgcctaccgttttattacaccaggcatcgctaatgtagattgccactgttctagagaactttttgaaagatggtttgggaccacaaatacaacgaagatctcccaggatcatatagaccattccatttcccattaaggtctcctacttttctacccgccccataaacttcaagagtcactgcaagggcctggcacggtggctcacacctgtaaccccggcactttgagaggccaaggcaggcagatcacccaaggtcataagttcaagaccagcctgaccaacatggagaaacccctgtctctactaaaaatacaaagttagccgggcgtcgtggcacatgcctgtaatcctggctactcgggaggctgaggcaagagaatcacttgaacctcagaggcataggttgcggtgagccgagatcctgccattgcactccagcctgggcaacaag

SEQ ID NO: 114383 - DNA, 652 bp, Homo sapiens
ggctaaggcaggagaattgcttgaacctgggaggtggaggttgcagtgagcagagattgcatcactgcactccaacctaggcaacagagcaagactctgtctcaaaaaaaaaaaaaaaaaaaaaagagatttagtgttcaggaaaggattctatggaccctgagagggtttggagaagaggtgtgtaagcaagagttcattgcctaccgttttattacaccaggcatcgctaatgtagattgccactgttctagagaactttttgaaagatggtttgggaccacaaatacaacgaagatctcccaggatcatatagaccattccatttcccattaaggtctcctacttttctacccgccccataaacttcaagagtcactgcaagggcctggcacggtggctcacacctgtaaccccggcactttgagaggccaaggcaggcagatcacccaaggtcataagttcaagaccagcctgaccaacatggagaaacccctgtctctactaaaaatacaaagttagccgggcgtcgtggcacatgcctgtaatcctggctactcgggaggctgaggcaagagaatcacttgaacctcagaggcataggttgcggtgagccgagatcctgccattgcactccagcctgggcaacaag

SEQ ID NO: 114384 - DNA, 595 bp, Homo sapiens
gaaggaggcttatccaacactactgatctgacctactttttacttaggaaggtcatatttctctacactttgctcttcctgaggagatatacaacaacattgacagaaactgctggaatagtctgaactagaaaacgtgtaggctactttagagacttctgaaggcattctgaaaccccaagtcaggcacggtcagcaagagcattcaagatcctaggcaaaattgaaaagtaacagtttaacaccttcctcctcttccctgaacccaagaacttctttcctacaagctgccctgtcagaatctcccaccttaccaagaatgccttcctctcaaggatctgaggtttcctcataaaaattttccattttctggggaagaagtaaatttatgttgatttagcattaaaatatatgatcataaggtgtgaatgactggttaacaaccatgcatccccaaagagacaagttaacccaaatgatctctctaactgggggatctgtgaggacaacttgggaagaaggggaatggagattctcttttggtactccttccctacaccaggcaaacatataactaaatactagatactttaaa

SEQ ID NO: 114385 - DNA, 408 bp, Homo sapiens
gtccgtgagtatgggagcttctaagacttgggcagagctgctaaaggggcactggaagggaggactctggctctgtcactatctgatgaggacagcagcagagtgactacagcaagcatttacagagagtctattgcacatcaagcactgtactcttgatcttccatacccctctctaatccccatcatcacactgtaaactggtgttactattattgtcattattattctgtgtgttgtgatatgatttttctttttaattttagagacataatttcactctgttgcccaggctagttgccttcccttcctatttttttctccaatctgtcatttgtagcccctgtgcagcataattttccttctgttttgatttcttttctcaagagattcagctcccctactccc

SEQ ID NO: 114386 - DNA, 315 bp, Homo sapiens
caatccagttaagagtgggcaagatactcatatatgcatttcaccaaaggagataggcagatgtcaaataagcccttgaaaagatgttaatcattaggaaattgtgtagtaaaaccataaggagattccactacacagctattagagtggctaaaatggaaaatattgactataccaaatgttggcaaggatacagagcagctggaactgcttgtgggaatataagatggtatgactactttggaaaatagtttggcaggtttttttttttttttgagacgaagtctcactctgttgcccaggctggagtgcagt

SEQ ID NO: 114387 - DNA, 154 bp, Homo sapiens
tagaaacataccttaggataagaaccttagaataacttctagtccaaacccttgtttgacagtaagtaaaccaaaatttagagaactatctgttcatttcccatcacccccactctcgtagctagcatgtggcaggacttggattccgactgaa

SEQ ID NO: 114388 - DNA, 424 bp, Homo sapiens
tactggcatccattcctatgtcagaaaaataatttgcctttgctggactgacactatttgaagaaatgattattgggtatccagagggattttacttgatactgctaaatggtagttatatgtcaacatagtaattaactcatacatggagagataagaataatttggtttattatcaaatcgatattttgaaaccaatttattatattctcaggatgctagtgagaaacttcatctgttatccttttcgtctccttattttcttcatttaaaaatgttctattagtaattataaattaactttcagtttttattcttttatattggaatattaactaccaattgccaaactcctccacattttctgcaatgataagagaaatctaagcatatgggggtggagaaaactcttggatctgtcgat

SEQ ID NO: 114389 - DNA, 445 bp, Homo sapiens
cccagcactttgggaggctgaggcaggaggatcgcttgagcccaggagttcaagacaagcctgggcaacttagggagaccccgtctctaccaaaaatcaaaaaattagccaggtagagtggtacgtgcctatagtcccagttacccgggaggctgaggtgaaaggatcgcttcagcccagaagttcaagactgcaatgagccatgattgcgccactgcactccagcctgcgtgacagatcaaggccctgtctcaaaaaataattaattaaatacttgacccattgcacgatctttccatgcacgacagctgctcttctattattcttccaggatgaactgcacagcctgcccccttgggtttccaggttgtgggagatgagcaaaactgaatgacctcagtaggccaagagcaaaggatgtgggtccagacctggtggccagttg

SEQ ID NO: 114390 - DNA, 561 bp, Homo sapiens
tgggccactgacccaggaaacacatgtaaacatgccaactgtagggcctggcatgtaacaggtgccgaataaactaaatgttaaggattcatgtggttttattactccccttcctctcaacatgttcaggactctcatgcctcagcagtctgtgaacaccaaaaacaacttggagcaaaagtgtgaacaatgaaggttgattaccctcaaaaattaagtttggagatttttgtgtatttcaagcacgcatcagttccttccttgtactcgcataatattgggtttctcagaatctgttagttccaactgttaaatacagttatctggggaggaagggaattataagaaactaataccttcttccttatgtatttgtgcaatgtttgtagacacttatggcaaaggaggaaaagataaattacaagtacacagcatgaggccaggtgcggtggctcatgcctataagcccaggactttgggaggccaaggcaggtggatcacttgatgtcagaagttcaagaccagcctggccaatatgatgaaaccccgtctctactaaaa

SEQ ID NO: 114391 - DNA, 218 bp, Homo sapiens
gtattaaaaagcttgataatgacagtcatagtttcttctccactcatatcccaagcaaataatctgaaataaggacaaagatttgagagtaaaattgttcagctcagacatgttatttttgaggaaatttttttttaatttaacttggagattagttgaatgtaatgcattcatggttggggatattttatagctgttataaatggtgcgtacaaaag

SEQ ID NO: 114392 - DNA, 134 bp, Homo sapiens
tgttggtatggcagcctgcaccattccagttcccaggaatgggcttaggatcaaaggttgctatcactccgaagtcttcacatacacgatgtaagatgaaacaggtcacccagagatgatcttccatgctgatt

SEQ ID NO: 114393 - DNA, 305 bp, Homo sapiens
gtgagagtatgagaataaagattgtaaatgataagttggctgggcgcagtggctcacgtctgtaatcccagcactttgggaggctgaggcgggcggatcacctgaggtcaggtgtttgagaccagcctggccaacatggcgagaccctatctctactaaaaatacaaaaattagccaggcatggtggcgtgcacctgtaatcccagctacttgggaggctgaggtgggagactatcttgagcccaggaagcacgttgcaccactgcactccagccctccagccttggtgatggagtgagacactc

SEQ ID NO: 114394 - DNA, 430 bp, Homo sapiens
ccccgactagcccgacagctcgcgaacggtgtttcccccgactagcccgacagaacaagagaggtgcatgggatggtaaggttcagaggaactcccagaggtagcagttagaactcaccaaggctttctatcaagtccagagacccagagagtgggaagcaggtcaaggacacacacagcagagtcaaagtcggaggacatgacaagggaggagcccagagaagctgtcgggctagtcggggccccgactagcccgacagccccgactagcccgacaggcacctcatctcagttcagacctgatctttccctgggtcctgcagaggacaaccctcccactgttctctctcctccactgtcatctcttgctgcgattcctggtgcccacctccagcccagcctcctgtcgggctagtcgggggggtaccga

SEQ ID NO: 114395 - DNA, 282 bp, Homo sapiens
gggggagggggaattatttaagtggctattctgagtaatgctcccttgtttctagggggatggtagagtgggcagaaggatctcagaagatgctgatcccctaatcccttagaattcatagatatgttacattaaatgataaaagagactttgcagataccattaaggttacagaccttatgataggaagacgatattggaatatcctgatgggcccaatctaatcccatgagctcttaaagtagagaacattctcctactggagggagagcgatgtggaaa

SEQ ID NO: 114396 - DNA, 157 bp, Homo sapiens
gaggagacctgggtggcggagacgctgtgtggcctcaagatgaaggcgaagcgacggcgagtgtcgctcgtgctccctgagtactacgaggccttcaacaggctgcttgaggatcctgtcattaaaagactcctggcctgggacaaagatctgaggg

SEQ ID NO: 114397 - DNA, 755 bp, Homo sapiens
aggggaggacacaattcaatctataacaactatcactggctgattttggcagaggcctgtggcctccagtattttgagggagctgagggccactgatctctccatatgctctcaacatcatgggactagtaggatgaaagcaagcctcagaccagattctacctcaagcaggcacacaaacattcatgcagcttctacttggagcctgatgaagttcaaattgtttgtcctctgaggctctctttgcatggaaatttctcccatgacagatgagaaagttctggggcagcattcagctttctagttggattaggcaacagaatcctttgaaaatgtgtgtgcacagaccaggtggctctctgggccagtgtactctgaaagatgtgtgtcctggcctagctggttgaggaaaagcagggcaagcctagccaaatcacacatcttgaacagccctcattcgttatactaactttcccaccctctggtgtgtataggagataaagatggcagacgtgctattaggctgccaatgggagtgggctctgatatggtctttcaaatatgaatcacccctggcatgtgtgtttcctgtttaaggttctcaggtattacccaactgcaccaatattaaaatggacacataccgtgtcatgcagttggtgccgaagtgttttaagggaagttgtaggcaatgtgagtttatcagaaaacttcaccatatcagcattttgccctgagcttacaccattcccaga

SEQ ID NO: 114398 - DNA, 221 bp, Homo sapiens
cagttctaaggtctcctgctcccactttgtcctttctggcctcttgcttgtcctttatttccaaatgtgcacctgagtcccctgtgtgatgtacacccatttcccgggctgcagtgggggctactgtgggcatcaggggccgtgggcagggcctggggtggggacgcatcagggagacaggggaagaggaagtgcctttggtcctggggaaggttggcttg

SEQ ID NO: 114399 - DNA, 389 bp, Homo sapiens
cttttaaccaatgctgacactttattggacaggaaatgatgtatacttgagaaaaattatgcaaatgtaaagaatgtgaagaagccattaatatctgttcacatcttattcaatatcagagagttcatacttaatagaagcattaaagatgaaattactgtcaatagatttttcagaaaatataagcctttaaagtgaagaagagtatttattttgaagacaagcattaaaatatcaagagtgtaagctgggcatggtggctcaggcctgtaatttcagcactttggaggccaaggcaggtggtttacttgaggtcagaagttcaagaccagcctggccaacatggtgaaactccatctctacccaaaatacaaaaattaggtgggtgt

SEQ ID NO: 114400 - DNA, 377 bp, Homo sapiens
ggattgtctggaggtcatagtccaaaggaagggttgtaaatttagacattttttgaagattcacgtgtttggttcaatataaaagtatcattccccacccagacctgtcccagtgtctagggaaatgcaccttctcctgtgacattgcatatcatcttccatatcaggtaccctggtttgaaaaatcatacttttagaagaaattgccctttccattttcttaactgctctggagaccagcaggaattggagcagcctcattccgtgtcgaagaagacctatacggcttgcttctttttttctttttttcttttttttttttgagatggagtttcactcttgttgcccaggctggagtgcaatggcatgatctcggc

SEQ ID NO: 114401 - DNA, 171 bp, Homo sapiens
gggcagcaaaggcttggctgttacttcttgggagacaggggtcagggagtcttggtgaccggggccaggctctctagtggagcgactctccgtggaggaacagagcatccgatgcacactcagggacatttgcaagctgcagtttccctgtcatacgcccttagctgttgg

SEQ ID NO: 114402 - DNA, 230 bp, Homo sapiens
tggtttatcaattactatgagaggtatgttaaaatctctcactacaagtatggatttgtctatttttcctcctaattttgtaaaattttgctacatatgttttaaggtgatcttgctaggtcaatggaggtgaatgtatcttaatgaactgttccttttatcatatgtagtgactatttttctctttaaagtgtttttatacatgtattaaaaagtccattttgtctgtt

SEQ ID NO: 114403 - DNA, 564 bp, Homo sapiens
ctgttgcttgtctccaaacctactcttctatttactattttttgtgatgctggggctaggactgagcagatcacatctcttctttgccagtgaatcctgttaggttctgccaagaggagttactggagagagccagcaaggttggaggaggagaagggagggagaagcccatgcttttcagcttcctctttctgtcagagtctccatttatttctgggagcagcagctgaatccagtttgctattttgtcaatactcacaggaccacttcatcatacccacgcagagaggccagcacatagcaggaactctgctttagaggctggatcccagccaacctgagcttggaccctggcaccagctgagcatcactttcaccgacattcagctctgcagggtccctcatctacagagcccctaagtttgtaagttttaataattccaacctcttccctttgttcctcctgccctaggagtagtagctgcctcttgaaggtagaacctcctagtatattttgcctttccagttctttactacatagtacttccttaaattctctctgtt

SEQ ID NO: 114404 - DNA, 628 bp, Homo sapiens
ggcagataccttcatgaatattactgataaaacatgtcaaggggtcaaaccaggaaatggcacaagtgaaacttgcagaatatgatcatgccattcccctgcttaaggttcgtcagtagctccaaggataaaatcccagcttctgagcagggcattttcgaggtccttcttcatctgactgctgcctccttatgccatcaggcccttccccatgctgtttcctctgttgaggatgcagttcctccttttcttctctgctcagcaaaccctagtggtcttgtaagacaccacctcctcccagggccctttcactactcctctagggaagatcgacacctgtgagctcagggacctgtggctgcctccattaaagtggcaactgccaccttttatatatttgtctgcaccccctggtagatggagagctctttatgctagcgactttgtgtccctaacacccgacacggaacctgggacacagaaggctcggtgtgtgtttgtggagtgaatgagcacacgtgtgaacgagtgtcagtcattctttgctaccttctcaagtcttgggttgaatacattagttaaaagatcaattaaagtgaattgggaagcaaaaattacttctttgcca

SEQ ID NO: 114405 - DNA, 395 bp, Homo sapiens
aatctctgggttctcacaaaaccttttcttcaagctagtatttactgacaacatgcccaagcctttttaggcattctcctcctcacaaaaattctacaggcattactactatcaccattttccaaatgcaaaaactgaggcttagggaatgaaaataactctaagtcccaccagttaattactagtggagctgggattcgaactcgtgcttttaaattctacctatagtgtctgaaatgctgtgtggatttcctggatgcatgtctccctctacaagacagcagcactaaggggtggtctgtgtgggtgtgaaagaggtagggactgttagcataatattactccgcttccccctatcagccaactgctccgacccaggcagccaaaccaaaagc

SEQ ID NO: 114406 - DNA, 765 bp, Homo sapiens
gcttcattgtgctactcttcattgtgctttgcagctaccaccttctttataaattgaagttttgtggcaaccctgcatcaagcaagtaattggcaccatttttccaatagcatgtattcatttcatgtctctgtgtcacattttcataattctcacaatattttaagccttttcattattattaatgctagtggtgatcgatgatctttggtgttttgtactactgccattgttttggggtgccaggagccacaccatttaaggtggcaaacttaatatataaatgacgtgtgtgttctgactgctccactaactggctcttcccttgtctctctctctctttgcttgggccttcctattccctgagacatgacagtattgaaattaggccaattaatagccctacattccctcttctgagggttccagtgaaaggaagagttttacttatctcacttttaatcaaaaactagaagtgattaagcttagtaagcaaggaatgtcaaaggctgagataggctgaaaactcggtctctggagccaaacagttaaccaagctgtaaatgcaaaggaaaagttattgaaggaaattaagtgcccctccagtgaacccagaaatgataagaaagcaaaacagccttcttgctgagatggagaaactttgatctggatagaaaaaccagtcacaacaattattcccttaagccaaagtctaatccagagcaagaccttaactctcttaagttctgtgaaggctgagaggtg

SEQ ID NO: 114407 - DNA, 206 bp, Homo sapiens
atacaggtaagacttcaatctacacatttttaagaagctcaagatctttaatcaggacaaattctaggagatccacattgagacacagtatagtcaaactgacaaaaacaaagacaaagaatcttgaaagcagcaagagagaagtgattaacacatacaaaatatccccaataagattaagagccaaattctcatttgaaaccata

SEQ ID NO: 114408 - DNA, 153 bp, Homo sapiens
gtatgtataagactgagagcaaggctttgctcccagtgcctttgcatcagagagaaaggagtcactttttttatcatctgttgtccaaactcaaaacaaaacatagttgtaagtttatggactgattccaggaatctaaaaattttagattcc

SEQ ID NO: 114409 - DNA, 557 bp, Homo sapiens
ggtgggtgaccagagagtcctgtctatcctaggaggagaacattcagcccaaatcccagccccatcatgcacagatcagagccatttctgaaaatgtcgctgctgattctgcttttcctgggattggcagaagcctgtactcctcgtgaagggacaacattctggaccacgcatgtaaccttggccaccatgctgactctcctggatgggctgccatcagggatcataggtctcatgagcagactgtcaccggatgacggactgaaccccaacaggtgttcttgctgcatctatgcaccgccagaacccccacacctcccattcttcaaatggacgtacagctttctccttaagtcaataaacttgaaaaagttgctttataccgcttgagtaagtggtcagcctcataaggaggagacaactgtgaagataaatatcatgaaaacaaaacaagattaaattataactagacactgttttctgccaaggctctttgtgtgaaggttgttcccgctgttcggtggaaataaacactagcaagtgttatgagttaaaaa

SEQ ID NO: 114410 - DNA, 602 bp, Homo sapiens
tgcctcccgggttcatgccattctccaacctcagcctcctgagtagctgggattacaggcacccaccaccatgtctgcctaatttttgtatttttagtagaaatgggtttggccatgttgtccaggctggtcttgaactcctgacctcaggtgatccacccacctcagcccccaaagtgctaggattacaggcctgagccactgcgcctggccttgctatgattgatagaggtaggaaaggggattaagtgggaataatgaggcatcatgactgaggcattatagccacacttcctgaagaagagtttgttacatctgttgaactgggagaaatccattaattaggcatatttctttctgctgcatttgcacatcatgtgttatgtcttcttcctcaggtctcatgagcagactgtcaccggatggtaagtgtcaggattgtatcttttaaacctggtctttctcttgtccgcaaggtaatgtagacttattgagtcatttatgcttttaggtagagtctaaagaacacttcaggtattatccaagcacatgttttgtttgaactttgatgtaatgaaaatctttattgctatataaggtta

SEQ ID NO: 114411 - DNA, 342 bp, Homo sapiens
  misc_feature (260)..(260): n is a, c, g, or t
  misc_feature (282)..(282): n is a, c, g, or t
  misc_feature (306)..(306): n is a, c, g, or t
ggtgggtgaccagagagtcctgtctatcctaggaggagaacattcagcccaaatcccagccccatcatgcacagatcagagccatttctgaaaatgtcgctgctgattctgcttttcctgggattggcagaagcctgtactcctcgtgaagtcaacttgctgaaagggatcataggtctcatgagcagactgtcaccggatgagatcctaggcttgctgagcctccaagtactgcatgaagaaacaagtggctgcaaggnggaagttaaacccttctcaggnaccaccccatccaggaaaccactncccaagaggaagaacacgtggaactttcctgaaatg

SEQ ID NO: 114412 - DNA, 484 bp, Homo sapiens
  misc_feature (25)..(25): n is a, c, g, or t
taattttatgtatacggaacacaanaacttcgggcgacatcttgagtaaggcaaagtagaatttattgagtgacagaacggctcttggcagtgagaggggacccgaaggtgggttgctggccacgagcctgagtctatgggtttttgtgggctagaaatgggcaagtgcatgctgattggtctgtggctatgcttgacaaagcaccattcagaaataggcacgatagtgtagaggaccaatcgcggaagggtaggtatgtataaaataggtgaagggtaaggaccaatcaggagagagggtgccagacgagaatgggagctctcagtctggctcatggatttatccagaactcatagcttggttttcaggctttagactgtccttggcttgaaggttgagtttcaccagggacccctccctgtctgcctaggaatttacctgcctcctattgctatcactgtgttgcccaggctggtctgaaac

SEQ ID NO: 114413 - DNA, 343 bp, Homo sapiens
ttggtccaagccagggcaaaaacataaggaaaagaaataaaagagagaagaattaaaatggaagaaacacaactgttattatgcacagctgacatgatcgtgtttgacaaaaatctaaaataatcatcaaactattagcatccataagtgaagtttgcaaggtcattgaatgcaaggtgaaatacacaattctatcacatttctatacacaaacaataaaaaataaataaacagtgcagtagggaaaacgagactttcccgtaaatgccacagggtcaagcagatgtttatagttaatgaaaatactaggttgggcacagtggttcgtgcctgtagtcccagc

SEQ ID NO: 114414 - DNA, 393 bp, Homo sapiens
gcactccctcgtgccgcactccctcgtgccgcactccctcgtgccgcactccctcgtgccttgagtctttgcccagatatcatcctctcagcaagacttcctgggaccaccctgctgagaacgcgtgaacccttccgactcggcctccaggcccctctcccgggtctgttctctggagcgctctccccatccgcagtgggattcggtgcactcctctgttttgtctcctctgtctcctgccactggaacggaagctccaggaggacgggatttgcctgattctttgctgtatcccagtgaactgaatgagctgctcccagacagttagaatcgcagccggggcccaggcggctgactgcacagtgaggagccaggccggacaggccccaggcg

SEQ ID NO: 114415 - DNA, 209 bp, Homo sapiens
atgacacacacctctgaggcaggcacccagatcaagaagcagaaccttcttagcacgccgggacaggcctcgttttgatggataacacctggttttggactcgtgctctcatggaccacctccccattttgcacgcctcagcctaagctcaaaaccctcccacacaactgcaggtggtggacactccctgcctcacacccctgtgtctg

SEQ ID NO: 114416 - DNA, 288 bp, Homo sapiens
tgtgaggaagaaatcaagggggtttccacatttcttacttgagcaacagggtgggttggagtactagctactgaatggtgagggaaaggttttaaacacagaaagcttgtgttgcctatgaaatttaaagtggaggtggcaaataggcagttgagaatctggaactcagaaaagaggtctgatcaagcaaagcaactgtgggaattgctagcatggcatttatatttacagtcatctctctgatcagattaactagatatagagaagagtgccaaggacagagccctg

SEQ ID NO: 114417 - DNA, 1045 bp, Homo sapiens
caatatagcaagaccccatctctaaaaaagaaaatataaatttcattgtgatattctgaaatacatatttgatcttcaaccctgtttcctgacataataactcctaaaatcttaggctctccaaagtgatgtctttttgtatgctattgattggtttatggctggcagctcctaggtagcttcaggataggggtcagtcaccagaacgaccaaggcaggattagaggattgggactttctgcccacccctctcccaacctccagggagtggagaggggctgagagttaagttgatcacctatggccagtggtttagtcagtcatgcccaaataatgaagattccatcaaaacccaaagggacagcattcagagattttctagacatctgaacacacagagtttcctgaaggttgatgcacctagggagggcatggaagctccaagcgccttccctaatacttcgttctatgcatctcttcatctgtatcctttgtaatatcctttataataaactagcaaatgccattaagtttccctgggttctatgtactgctctagtaaattaatcaaacccacagagggggtcatgggaaccctaacttgaagcagatcagtcagaaattctggcagcctgaacttgtgatatgtatctgaagtcaggcagtcttgtgggactgagcccttaatctgtgagatctgacagtgtctccgggggaatcgtgtcggaacggaattggaggacacccagctggtgtctgctatagaactgattgttttcttggtgtgtgggaaaaacctccacacagttgaggacagaagtcttctgtgttgattgttgtggtgtgggagcagaggaggaacagtttgtttttttccccactcatggtgaactacacaatgtgaaatttaccatcttaactactgtatactacttttagtgtacggttcagtggcattaaatacgttcataatgtgtaaccatcaccaccagcagcatctctataattctttatctcttaaacctgaaactctgtacccgttaaa

SEQ ID NO: 114418 - DNA, 427 bp, Homo sapiens
tagaattaaatgtatatagtattgcgctatcattatttgtgtaaaagtaattttaatggacagataagacaatatttcatactattctgatcaaaatactgtgatcacacagtggttttcaaatatcacaggctaataactcaagactcagtatttatttagacatggttctaatgttggtaatgggtgtatatctttatttttaatagtcttaataataatttaaagttttcagggtcattttcttgtatcattagattttcatggctttacttttatagtggactaagatgaatgcgtgcaaggagtgacagtgccaccacatttcttatttccttatgatcacatgctcaggtttttgttgtttcagttttcttgaaaaatctgtgcttggtgcctttccattttgccaggagttaaaaataga

SEQ ID NO: 114419 - DNA, 140 bp, Homo sapiens
gggtcaaccctgacctgtctcctgagctggtggactacatctccaactgctgctacacacttccatttggagatatctaaaacaaaagtatttcctctctcctgaaaaatgttctacctactgaccttcctacttctgat

SEQ ID NO: 114420 - DNA, 787 bp, Homo sapiens
  misc_feature (398)..(398): n is a, c, g, or t
cctcgctctgttacccagggtgggttgcagtgagctgaaatcgcgtaccacactccagcctgggtgacagagcgagactgtgtttcaaagaaaaaaaaaaacaagcagccttttgcttggttggaatctgattttctgttgcgtgttccttgtagccatagatgtgattatgtccacaccgggctgccttaatctgtcctgcttggagagtgacttgtaagatgctgaattattcatgataatacagtgaatgttctgggtccatgtactcagataaacatgaagaaaataagcaaagaaaaatggagactgggaaagcaaagctgttttcatcctataattgaagtagtgtggagcattaacttgtggatgattcagagttaaaagataaaaagacnccagagttctcgctgaagaatgtgagaattcctgtgcatgttttttctgatgactatctaaaaatggtgccctgatgtaggttggggggaacattcttaaaaacaagggtgctatgtgcctgtaatccagcacttggggaagctgagtgggcagatcacctgaggtcgggagttcaagaccagcccggccaatacagtgaaacctcgtctttaccaaaaatgcgaaaattagccgggtgtggtggcacaagcctgtatgtagtcagctactcaggaggctgaggcatgagaatcgttgaattcgggaggcggagttgcagtgagctgagatcgcaccattgcacttcaggcctaggtgacacagtgagactgtctcgaaaaaaaaaaaa

SEQ ID NO: 114421 - DNA, 266 bp, Homo sapiens
tctgaccccaaatgactttaaccctgacaagagcacccaagactcactgtgggaatacagtttccctgtgattgcccaggagcaaaagtttcctttcaggagctcccccacatccgctggcaatgctgctgaagggttcccgctcacaggccaagctcacggaacaactggatcccaggcgtggagccacactggctgacatgttctcaagctgctagaacttttacgcttctgaaaccctcctgcatcattcctaggcctgcagt

SEQ ID NO: 114422 - DNA, 305 bp, Homo sapiens
tggtctccagcaccttggaacactcatgaagtctggattcaatatttggaaattggaagacagcatgaatgctaaaccagagatttacgacggatagcaccattgcaaatcacactcaaacaaaagtcaagatatgactttgggaatataagagaaagcaatttggaagatggagaaattaactcacattgttaaacaatcaacacaactcctgttctcacattgggggatttcttccagtcccttttctctatgtatcttaattactttcttctttttttttttttttgagacagagttgcatt

SEQ ID NO: 114423 - DNA, 435 bp, Homo sapiens
ctggcctgtaaaagctctttaagagattcaggtggacctctgggtaagcgtgactccttcactccaacagatggaaaccattatgctgtaatgtgctgtttaagggggaaagaccaaggactgaatttgctttgagatcaaagcatggattttgaaggcaaaatgatgatagatcccacgttaattattaggacgaagatagaacagacagcatcatagagatttcagcaagacaacaaacattcaataacaggaaaaggtcgggtgtgccaactgaaaatagcaatctaggatgctccatgctagggtgctctttggactagaaagccgtagaccctggacctaaatcagtaattttcaagcttgttggacccatgagcccaatttagtaggcagaaggtcctttggatcctttgctttaactagacacactca

SEQ ID NO: 114424 - DNA, 243 bp, Homo sapiens
agagaagggaggataagagagctctggagaatgacagaaggtgctggcttatgtagaaagacctcaccttgggcagattgtggtgaagttcctggactattgcaatttgagatttctagtgcaagaaccaagatgtcaaagcccagtgggagccagggccaggaatgagtttattttatttatttattttttgagacggaatctcgctctgtcacccaggctggagtgctgtggcacgatctc

SEQ ID NO: 114425 - DNA, 756 bp, Homo sapiens
cagtgcatgctatttcccatgcagtgtgcatgctctgatgtcactcctcagagggcgcagccttaggcatgtacacagtttctctgacctcccttcccagagatgactatacatagtccagttctcttggactatctctttccctgaatactcagttaagcttgaggctgatatcacatctaacttgtagcctcctccaattgctagctgattactacattgtttttgacaacactttgggccatacattgctccagtctgatccaattaaagttgggttcctttgcaagagtggtctttacatctggctttacccagggagaactcttcttggctatcttgttccccgattctctctatttttgtcaggtttgtcaaagatcaggtagttttaggtgtgcagttttatttctaggtactcttttctggcaagctgagaggcaaatcatgaatgaactcccattcacaattgccataaaaggaataaaatgcctaggaatatagctaataagggaagtaaaggacctcttcaagaagaactacaaaccactgctcgaagtcagagatgacataaccaaatgggaaaacattccttgctaacagataggaagaatcaatatcgtgaaaatggccttactgcccaaagcaaattatagattcaatgctactcccattaaactatcattgaagttcttcacagaattttaaaaagacctatctaaaattcatatggagccaaaatagagcccaaatacc

SEQ ID NO: 114426 - DNA, 427 bp, Homo sapiens
ccaccctactaggagagtagatataacacttccctgtcttgaccctttgattccatcttgaccctttgattccatattgaccctcccatgaatttgcagtcccaaattacactccctaactgcctcttccaaaccttaagttgttaattaatttcaaagacagacagcactccataatacaggtaccagacaaagaaataaacacatcctttctggaggaattcatttttatccaaaaacctgcaagagtttctatgaggaaaatgattatttcagagtttaaaaacaaagaaaatcatgaaatacacaaggaagcaatgcatcatgagtgagagctaggagagacaaaatcagcaaatgcagggttgaaaaggaatcatactggacttatcagacatagactgtgcttaacatgttataagaaatg

SEQ ID NO: 114427 - DNA, 173 bp, Homo sapiens
tacttacaaatgataaacaaacattcctttatatctttattatatcattatactatatttacttactccccctttaagagtaaacatgtcactgctttgagcaatgaaatacaagcaaaagtggtatgtgatacttctagtcaaaagtttcaagtgccatttatcatgtcctt

SEQ ID NO: 114428 - DNA, 592 bp, Homo sapiens
ggcagatcagcagaaggcactggaatacccacctgacaatgtacataacttgtactttaggttttgctcttctggggttgcgtgcgttatagaccgggttccaaaagaaaaggaggtgattgcaatgagatcagatcttttattacttgacaggaggttgtggagtgtcatgcaacctgaaatcaagccacaactgtatcattgattctgtgcaagttgatgcaaatatcttgtgttcacctctctgtcccaaccccctaaacagatgcttaaaagggcatccctggctgggcatggtggctcatgcttgtaatcccaccactttgggaggccaaggcaggcagattgcttgaggtcaggagttccagaccagactggccaacatagcaagtctgctaaaaatacaaaaatctcttccaaaaatacaaaaattagccagatgtggtgcatgcctgtagtctcagctactcaggaggctgaggcctgagaatcacttgaacctgggaggcagaggttacaatgagccaagattgcaccactgcgctccagcctgggtgacagagtgagacgctgtctttaaataaataaataa

SEQ ID NO: 114429 - DNA, 495 bp, Homo sapiens
gaaaatgacaaccagtattcacagtttgagataatggctgtctatgatgggatcattagctgttctgcttcataatttccagaaaattcataataaatgcaagtgcagcaaaatctgaaggagacagtttttatcctgaaattgtttttagaagccctgcccaaacagcttgtaggttaatagaggtgcaacagtaaggttggatgcaatcaactttgattgtgggcttctcagagttggttcgtctcgccttgagtttcctatacaagaatgcaattaaggaaacaaggcagcttaatgacgttaatgattgttattcagaatgtaaaggtgttgggattaatcacaaaggactggaatctggattcagggcgcaggccctttcttcaacatgtacttttttaggttctaccattctctctgggtttttggagtgacttctgagatatagaatagctaagcttatagataagttggttttctggagcatgggag

SEQ ID NO: 114430 - DNA, 2046 bp, Homo sapiens
  misc_feature (678)..(678): n is a, c, g, or t
agtgagaattatcaattgttaatgattcttaattaaacttcgagcacagtcttttaatcatatcaattcacctaatgatctatcatcaagcctacattgtcttatctattccaaaaaatacagtgagttgctttgtcttgcctaaattctgatgcatagggccctgcctgtaggattttactgagatcaccagagcaacagaacagggtacttagcctacttcagctcactactttcattgttaattacacaaaagtcctttgttacaatctgttatagaattttgtctggcatcaaccctgatccccattttagcaactatcttccttataattaaaacaacgacaacaacaaaaatgaggctactatgttctgaaatttattttaattccagtggaacttcagatttatgcatttatttacttgtttgcttgtttgtttagttgacaatgtttttacctgcaaacttacctttttttattttttattttttatttttttgagacagagtcttgctctgtcacccaggctggagtgcagtggtgcaatctcggctcactgcaagatccgactcccaggttcacaccattctcctgcctcagcctcccaagtagctgcgactacaggcgcccaccaccacgcccagctaatttttttgtatttttagtagagacgggntttcactgtgttagccaggatggtctcgatctcctgacctcatgatctgcccgcctcagcctcccaaagtgctgggattacaggagtgagccaccatgcccggcctgaaacttatcttcttttaaatgacttgactgactttgcaatttccttatccatttcgaattttgtaaaattattttttattattgactggctatcttctgaagtctggagattgttcttctagaccaaactagaaaaggtaaaaaagtaagagttaactttggggctgagattgaaatatgcttctaacacttacaggcagcaagacatttgcaagttaaacaagatctaagtgcttctgttctgttcccttgttgtaaaacggggaaaataatagcactttacccacagaactgtggtaaaatttaaatttgattcttgtaaagcactcaaaataatgcctcgaatatagtaaacattcaaaactattagataatttttttagtaacaacattagatactaaactcatgttgtttctctaaacaacttaaaatcaattttattggtattatcatttttatacaagttagctcatttgaaattataaatcagtcagtaagatcatatacatctgggccactggtatatatttaagttttatcatgcataaaattctcaacttcttctacagtttctggtgcaataaggcattttaggtctctggttgcaagacagacactgacctttgtggtgaagaacctaggttccatgtgagactgatgggctctaccacctgctagaggcttgctcttagacaagtgcattactattcagatggaattatgggcagttccctctttgggttgtggcacttgaagcctttttaatcccaaatgttttattacatttacagactcaggggcaaaaggtaagaattccatttattctcctttagatctttcattgtttttttgaggacaaggaagaaaatcttcacatccctgagctctagatattgatgtggtttatgtgtctgtgtagtctaatgcttgctggtctatttggaggctgctctccacgttctcacttttccctgcaggaaagtgttagatcagttatctccactaggactccaacagggttcaaggtctggttgcaaacatcttctctctagcccaggctatagctaagacttaagggcaaggtggccatattctagttgctacaatgcaagagaatctatttgtgcagaacagaacatactcataaggcacaaagaaacctattacattatagtcatcagatatagtagaatgagacttttataaatatttatttctgcaaatcctacagaagtaagtttttaaaagcaaaaaaaaaaa

SEQ ID NO: 114431 - DNA, 740 bp, Homo sapiens
gtcaaccaaaaattccttacctaacaaagctgccctttggaaatgagagataaaggctttgtcaaaaaaaacaaaagctaaggggttcaccaccattaacctgctttacaagaaattctgaagaagtttttcacactaaagcaaaaggatactaattactaacatcaaaacatacaaaaatataaaacttacttgtaaaagtaagtacacagtcaaattcagaatactctaatagtgtaatggtcagataaaaatcacttatatctctagtagaaaggttaagtgacaaaactatttaaaacacctacagctacaataatttgttaagaaaaaaatatataaaaatatgtaaactgtaaaatcaaaaacataaaatgtgaggagaggaagtaaaagtacagaattttgtgtaaaatcaaaattaagttgttatcagcttaaaatagcctgttataattacaagatgttttatgtatgcctaatagtaaccacagtgtaaaaacctatagtggatacacagcagacaaaagagaaataaaccaaagcatgctactacatcaaaccatcaaatcataaaggaagacatcgacaaaggaagaaatgaacaaaggatctaaaaaacacaccagaaaacaacaaaatggcagcagtaatatcttacctattaataattaccttgactgtaaatagattaaattctccaatcaaaaaagcatatatactgagtagctcaatgggtt

SEQ ID NO: 114432 - DNA, 350 bp, Homo sapiens
attgtgcagaggccacctacactcaacataagtccaacagatgtccctaaagtcagaggtccagaaagcaaaacctagaaagtttttttgaaaaatcaaaaccctcccacaagtgctacttctcatgaatagtggcaaggtgaagaatcctgaagtcattgtgtgtaacctattaaagtaaacattggtatttcagcattcaagaagatgtgtccacatcttagtgggaacaaggatataaactctacatgggtatgggttctcttttataatgttatgtgtctgtgagaatactggattccttgttttgctgctctgaattttgggctccttattggaaaatattgcgt

SEQ ID NO: 114433 - DNA, 638 bp, Homo sapiens
cagcaccagctttccctaagcaaagtgcaagcccactatctgtcagtcaaagttggggaaaacactagctcacaattcgttcaattattcaatacaaccctatggagcccgtaagcccaattcatacgtgtgccctgtccagaaagggaggcagcagtcccgcgtccaccacctgcagggtgctcaaccccctgctcagtcagaggccacactcggtcctggaaggcagctgaggatgctgaagaggtccaaagagcacattacatgaagaggacattctgcaagacaactgactaggcttttcaaaaaaggtcatcattggctgagtgtggtggagcatgcctgtagcactcaggaagaaaaggaggaaggatcacttgagcctaggagttagaggctgccgtgagctacgactgcaccattgtactccagcctcagtgacagagtgagactctgtctctttaaaaaaaaaaaaaaaatcacattattaaaacaagccagagaggactgttctggacggcaagggcctaaagaggcaaagccaagtgcagtgtgactattgattgaatcctagtacaaaaagctcagctataacatatagttttacgtcaaatgaataaattttaaaatgaactgta

SEQ ID NO: 114434 - DNA, 470 bp, Homo sapiens
ccacagggacctcttcctaagaaagcctgtgcattgtccaaggtttcccccaactgagacagcctgagatatggcctcatgggaagggaaagacctgaccgtcccctagcccgacacctgtaaacggtctgtgcttaggaggattagtgagagaggaaggcctctttgcagttgagataagaggaaggcatctgtctcctgctcgtccctaggattcgaatgtctcggtgtaaaacccaatcgtacattctatttactaagatagtgtgataccctaccttgttttaaccggattgactctcttttagctgagagagccagacagactccatttttgtttcttcacttgcagccccccttatccccctcccttaaggacataactagtgcaagctgactccaagcacgtccaggaatgcacttactgataagatatagaggcaagctgaaccagcagctcctggggatgc

SEQ ID NO: 114435 - DNA, 284 bp, Homo sapiens
atttaaggaacgctgagaaatctattctttttatattctacttatttctatttttgccatagtctgtgataccgatcagcccttcaaaagaccgagctgggtttgtccagtggttgaatgatcatcaaacagtgaatgatggcagagttcttatgggcactttggaccatgggctgcggcatggcctggtggataagcatttgggctccatgtggccttgggcaagaactttgacctcttcgagtctcagtttctccatctctagaatagggataataatatat

SEQ ID NO: 114436 - DNA, 371 bp, Homo sapiens
agaggtgtgcagggtggaagggtggcagaggccaagcagggccctggcagtgctggcctggggtatgtgagtccagtctagaacagtgggagacatgttgaagaggaactgtgacaagacctactaccaggaggaatgtattgtgaagaatcaaagctgactcaccaggtttctagcctttctttctttctttcttttttttttttgtcggagtttggaatgtattgtgaagaatcaaagctgactcaccaggtttctagcctttccttctttctttctttctttctttctttctttctttctttctttctttctttcctttcttccttttctttcttccttccttccttccttccttccttccttccttc

SEQ ID NO: 114437 - DNA, 366 bp, Homo sapiens
aactgtacccagatcaagaagccagacattacctgtaagcccttcttattctccagtgaccgctatcctaacagcataggttagttttgcctgttttatcctttacagaaacaaaatcatatagtgtctgtttttttgggcctgacttcttcactcaacattgtttcagaggttcatctatattaagcatagcagtggttcatgcagtctcattgctgtctgggattccgctttgtgactataccatcacaatgtctgcgatccattctgttggtgggcatctgggtcatttccaatctgggctattgcaaatatactgggtatgatattctagttcatatcctttggtaaacatacacactgatt

SEQ ID NO: 114438 - DNA, 237 bp, Homo sapiens
tgatgtagtaggatatgtaatgatttagaaattttcatgacacatttaagtgaaagaagtattttagagaacactgttgtaagccgttagaaaatagttcttaacctttgtttggttcaggattacccttaatttaacaaagaacctgtcaactctctgaggctgctcttgtttataaaaatgcctggagtcaatgtatcagaatattgagttgttgcccttggtactgactagatt

SEQ ID NO: 114439 - DNA, 212 bp, Homo sapiens
cctgggtgattctcccagagtcccgcggctcataggcggtgggatacccgggtatgggctccagcgaggacacgtacgtctttggctggctcttccctcttgggtgtgcatcctcaggtggggcctggggtcttactcccttgtcccagtgccttcctggcccagtgcctgtgtggagggggtggcaggggcagctggagtctctagagctt

SEQ ID NO: 114440 - DNA, 378 bp, Homo sapiens
gtgctgcgtcgacataacctctgtctgcattgtgcattttgatagccactagccacgtggtactgttgaacacttgaaatatagctaatgtgggctgggcgtggtggctcacgcctgtaatcccagcactttgggaggccgaggcgggcacatcacgaggtcaggagatcaagaccatcctggctaacacggtgaaaccctgtctctacttaaaaaatacaaaaaattagctgggcgtggtggcaggtgactgtagtcccagctactggggaggctgaggcaggagaatggcgtgaacccaggagacggagcttgtagtgagcggagatgcaccgctgcacgccagcctgggcgacagagcgagactccatctcaaaa

SEQ ID NO: 114441 - DNA, 719 bp, Homo sapiens
gcagtcaatgtagactatttaagggttgatgatcaaggcaatagattattcagcccttattttctactttctttgacttgttaattttagagtgattttgctgcttattagtaccttttaccagagataggatagggataatggaagaacaaagacttccccacattattacctcttagtcaatgaggggtagggctcttccataagggaagagtagaaattgtattgaataaaggaggcttgtggattttctctaaaataggtttcctcacagaagattgagaattgctcacacctgggaactctgtacctctagcatcctatcatgagtaggtgagtactgagtaaatcaaatgtgtatggtagaccaacttccaagatggtggccaatgactcccgcctcctggtatttatgttctgtgtaatcctttccccctgagtgatttgattttaaccagtggatgttactttcatgattaagttgtaaaatggtgacttccacacaggcagaatctctttcttgtcttcatcttgcatgatttaatgaagcaagctgccttgttggagaggaaatgaatgtgtctctggccaacagccagagaggaactgacactgtcagcccaataacctggagaaactgaatccagccaacaactacgtgagcttggaagtggatccttccctaattgagccttgagaaacctgtatcttagccaaga

SEQ ID NO: 114442 - DNA, 1052 bp, Homo sapiens
ttagcttttcttcatgtactaaaaagacccttctctctgtcgtaggctgaaccaagtaaagctagacctgaatataaaatcctgggctgtggtataacagttcacattcacgtaggcagtacacatggtatccatgggtaaagtttccaccaagccagtattttactatccaagtgatggaagagacattgatctagcattcaggagccccacttccagttcttgtttaactgttcacgtttagctgggtgattttatgcaagtcaacctctctgagccttaggtttttaatcttacatcttcatcattttttaaattaaaaaaaatttaaaaatatttgttgtggcagagactgctactcaccaaaatccattctttccttcataagacaagactataattcgaaacttcccttgaagcaggtgggattcaggtcttgccaacagaatgtaaacacaagtgatgtctgtaacctgtgtttacttgttgaaggccctttagtcaggctggaacggcaaggactggagcaatctcaaaaatggcacattagagatggtagagctgctgtcagactggagtcctaaatgtggaacagagtcacccactgacctgcagcctttgattaggactgttaaatgagaaagaactaagccattaactttttggaatatatttgttacagcagctagtgtttgtttaacaaatatatatgccctatttatattataaattgtgagagatagatctaatgtatgggaatgaacagtgttgggaggtgacaagtgctgcatgcatttgtcatcatattattaatacagagaaaacaaatgtctagtagaatgtctgacataggatgtctaatatctgttgaatgaatgcatggatatcttgctgaaaaaagtcctgagatttaaaaaaatctacaccgaacgtggtggctgattcctgtaatcccagcactttgggaggccgagttgggtggattgcttgaggccaggagtttgaaatgagcctgggcaacatagcaaaactacatctctactaaaaaaaaa

SEQ ID NO: 114443 - DNA, 698 bp, Homo sapiens
gggtggccttccaggaggcgggaggcgcccgctgtcgaggcagctgagccccggcaaccgctgctctccgcctctcccctcgcggggccggctcatggagcgcagggaccgggctggctctcgccgagccccgggcctcttttagcctcgtccccagagagggaggagccggtgcccggcacagccccgccggccctagaagctccccacgcgccaccatgcctctgctggacgttttctggtcttgcttcaggaaggtgaagtgaaaagaccaaaacatctacatggagtcaagcccttcacctatctgagccacaacttgctagctgtgttgaccatgagaaagttacttcgcctttctcaaaagaagacatttatgcagccaaaagacacatgaaaaaatgctcatcatcactggccatcagagaaatgcaaatcaaaaccacaatgagataccatctcacaccagttagaatggcgatcattaaaaagtcaggaaacaagaggtgctggagaggatgtggagaaataggaacacttttacactgctggtgggactgtaaactagttcaaccattgtggaagtcagtgtggtgattcatcaaggatctagaactagaaataccatttgacccagccatcccattactgggtatatacccaaaggattataaatcatgctgctataaagacacatg

SEQ ID NO: 114444 - DNA, 479 bp, Homo sapiens
cacagtggctcatgcctgtaatcctggcgctttgggaggcagaggcaggaggattgcttgagcccaggagtttgagacccacctgggcaacatggtgagaccctgtctctaaaaaaacaaataaaacaaaagggatctttctttggaagcatcactgatcaatcatcttgtagttaggttttaattatctttaggtgccaggatggacctgtcctgggttgttggtatggtcccatgttggagggagtgcttgtcaaactaggagtcagtgtcaggaccctttcagtcacatttgagcacacaagggaagtttggagggagtgattctcaggctaagtctgccgggaatccattattaagatcagtttttgtctgttccttaaatgtaggctatcatctcagggtttagggccagcccagtataattctgttgggtcagtataattctgtactactacagaaatgtaacaaataacatg

SEQ ID NO: 114445 - DNA, 301 bp, Homo sapiens
gctctatttgcaataaccaaaacctggaaataatccaagtgcccttcctgggtgaacggttgaacacaccttggttcatccagatgacggaacaccactaagtaattaaaaagaaacacctatggacatgcttgccaacccggatgggtctcaagggaattgcgtttagcggaaaaagccagtctcgaaaggttgcatagtgtatgattccatttatagagcattcttaaagcgacaaaattatagaaaataggaaccatactgtggttgccagcctcagggagggggaaggaggaagtca

SEQ ID NO: 114446 - DNA, 185 bp, Homo sapiens
cactgcactccagcctgggcaacacgggcaaaactccatctcaaaaaaaaaaaagaaagaagaaaagaaaacaaggccatcctgctccctttggcaccaggaacagatatcagaaatgcatgtcgttgttttcaaagctggacagggaggtggcaccagggtaagtttaaatgatagaaagcgct

SEQ ID NO: 114447 - DNA, 423 bp, Homo sapiens
ttcaactctagagagaattgtttctgggtgtttttcactatgtgactcaccactgtgaaggtatgaagatgagtttatgccgctaatggggtagctttgttgtgatgtaatttcagtagctgcccatggcagctgttagtcgaaggtaaattcaaagccagatggtttagatatcacagtggtgaagatcaacagagtaccgtgaaaccaggactcggtcatggcaacctgagactgttctagctaactctttctaatgtgtttcatctggcactttgccagttcagtcccttgcttacctttccccatttgaaaaactctgcttttggagggagaatggattacaggtcttgacagaggcttggactcttgacttcttggtttgtttttttaaatttaaaaaagaatttcagttcttttgtg

SEQ ID NO: 114448 - DNA, 390 bp, Homo sapiens
gagcaaggccccaactctttaaaaaaagtaaaagaaaaaaaaaagagagaggcatcagagttttcctggaccaaaaataattccttaaggatttaacagacacaagagaagagtaggcctcctccatcccccacagccagtggggttcaccttagaagcaaatttataaatacaaaaatcatgtagaatctcattgtaacaaacaaactaaagccctggagaggatgtagggggaagggaaggacatcaagaagcaaaaacatatccagatcacaaaactgaaaccagtcctagcccatctatcaaactctaagtgcattctttcattcatacttggtccaaccacaaatagttggtaatagaccagagagatcatggaaaacacattgt

SEQ ID NO: 114449 - DNA, 1182 bp, Homo sapiens
gctgagtttaaataaagccaccttggaattctgaacaaccaaatggactacttggatctcaagggataattgcattactagtgttctcatgatcctcttatttaaatactgcccatcctttggtgtccagctctcaagtcacctgttcatgaagctgcctcagttactccagccccatgcctcctttgcctgaggtcttttgaacctcgactgactaccatattgttcagtgtttcattatttcatacttggtgttttttccctccaaagcttgcatataaactctgaggaaatgtgagctgattctatgctttataaattttaaaatatctggtacagagtggataaattgatgctccacaaatacttggccataggttgatcaaaattgaaggcgtgattttttttctcccctcttcaaaattatggcggaccttaaagttttcatacattaaatagctatggctattttaattaaatactgttatatttttgttattataatacctattcaagaggcaagttctaattccagtaaaggaacactacaagtcaataatctcattttctaaaaggggaaacttgcgtatcactcagcttgctaagtaatctttggtttctctaacctgtaatttcctcatctctgaaaatgagaagttatgtctttagccacttgcctctttcattttgttgggagagtgcacatggctgaagatagtgatgtttctcagtcttggagagaggtgctatcagtacttacttcatcattcactgtgtgcaagaaggaacttgtgaagacctgatcaatgtattatttagcaattttcatttttgatttaccaggatgttgtgaacacatttcttttctaaaacagctttctagtgtgaatcccaagagaatgtataattttgcctcttactattggtttatttccagagtagatgattcagggaaactttttttttttttttttttttttggtgaagtttgtcctgaactagatgctagcaatttagttttgtggtaaaactttaaaatggaaatgtgatgacaaattaaagggtaagatggttctctgctggtgggaaggcgtgggatttccattctaatggcaggaaatcaacatatgttagcacattttttgcagatctgcagtaaataatggtagtgcttagattcgg

SEQ ID NO: 114450 - DNA, 455 bp, Homo sapiens
atgacttgctcctttaacccatacttttttaagaatttaatttgtcctacatttatctttctaaatcacttcctgtaatactgtcactatcctcctctaaaattttcagtgtcttcctaccgactataaaaaataagccccatcttctctgtctggcaaccaataaaacccactaattggtctcaacctatgtctccagtaaattgctgttattactccctgacatgtagcctctacacccaaacaaattaatctcttcattgcatttgaatataccatgtgtatctgtgtcccttttcagaaattacgtgcaaggtttggcttcattgaaatacattccttattcctatccacttattaaagtctaaagtatccgtacttttatctttcaaactagcactctttttgctggggagaaagaagaggggaaggatgattactcagagactgctcaa

SEQ ID NO: 114451 - DNA, 721 bp, Homo sapiens
gagatttcagcatgtgcagaggaatagggaatgaatgcatttcacatgtagtacatcagtagatctagtctacttgaataaagcaaggaaccggcatcttattgccctacctgtgaaccaaaatggataaaaaaatatttgatcaactatctagggttatggttagaaattagcaaattgtcatatccaggttgtatgtaaaaaacaaaacaaaacaaacccaaaaaaactaaaaaaaaggggggaaaaattagcaaattgtcgttaatggaagaaacagagacaactgtgtaactaaaaacttggaggacaaccttcttgatttagggaacagaagtgaaatatctctatgagacaagaaccttaggtgtccagcaaaatatctacttctgaaatggactccaagagccagactgagggaacttccaaaacatctgatgaggagtacatctgtggatggaaaagaaactaaaacaaaacacctcccatcaaaatgagtttcctcagtaaaaaaattataaagctggagagcgaatctttatcaagaaagatagtcaaaatgtaaacaaacaaaaagcaaaatataatacactcaaggaaattgaaataaactttaatcttgagaattatgaacatgtttattttaaactatgaccagtagccataaaacaatgtgagataataaagcaaaagctgataattacgtattaagaacaggtgg

SEQ ID NO: 114452 - DNA, 489 bp, Homo sapiens
aaatccagtgaatcacataaatctatatgggctaataaaaactttcagaaaggaaacaagattaacatataaaaatctacagcttttctaaaatcagaaaaaatctatttaaatatgtaatagaaaagaaagctatatgcaatttcaatagaccttgggttacctaggaaaaaaaacttacaaatatgaaagctgttgccaggcatggtagctcatgcctgtaaccctagcactttgggaggctgacatgggcggatcacctgagtccaggagttcaagaacagcctgggcaatgtagcgaaacccagtctcctactaaaaatacaaaaaatagctgggcgtggtggccggtgcctgtaatcccagctactcagggacaagagaatcgcttgaacaaaggaaaggaggcagaagttgcagtgagccaagatggcgccactgcactccagcctgggcaacagagtaagactccatatcaaaaaaaaaaaa

SEQ ID NO: 114453 - DNA, 289 bp, Homo sapiens
gtatttttagtagagacggggtttcaccatcttggccaggctggcctcaaactcctgacctcaggtgatctgcccatcttggcctcccaaagtgctgggattacaagcatgagccaccacacgcggcccaaagggcattttttattattactgtaactatcaggattatttgtagtcatacaagttagtagcagatgtggaattaaagcccagactcagggacatgaatcccagtgcccttttttgctgtatcataataagtggaacattagcatctgccagctctcta

SEQ ID NO: 114454 - DNA, 663 bp, Homo sapiens
actgtctgtgtggagtttgcacattgttctgtccaggatgggtttctgcttggctacctgagctgtcaggaaggactttggccacctgtgaccatgaactgaaataatagggtaaataattatcttacttgtttgtattaatctttcttaaatggatgtatagcttacatttatctcaaggtttaagattagaagggttttgttttttagttagaagtttggtgacatttttgtgagcagaaatacactctaagaatttatctcttttttatattagttagcctatggtaaaattgacttcaatagtcatcatttcacttaaagttgcagttttcaagaacctaccaataatgttatgtgagaccttattgtacatcataaagtttttcaaactggagaagaaaagaccatgaaagagaacagagacttagtactatggtgacacagaagaggcaaagaaaaaagtagaatgattcacccattaaacctgcctttatggaaatttatataaggcactgttgggtcctgtagctaaggaattatggaattattaagtagcttacacagtctgttagggaacagagacaattctacaaagaatactataatggagtaaggacaatttaaaaggaaagtcatagagtggtatggccactaggagtg

SEQ ID NO: 114455 - DNA, 314 bp, Homo sapiens
aaggctaacagtacccagtgttggtgagaaggtggcagatttagaactatcaaacattagggccgggcgctgtggcttacgcctgtaatcccagcactttgggaggtcgaggcgggtggatcacgaggtcaggagttcgagaccagcctggccaacatagtgaaaccccatctctactaaaaatacaaaaaattagccaggcgtggtggcgggcgcctgtaatcccagctactcgggagactgaggcaggagaatcacttgaaccccagaggcggaggttgcagtgagccaagatcgcgccattgcactccagc

SEQ ID NO: 114456 - DNA, 817 bp, Homo sapiens
tatggcctgcagaacccaggaatgaatcggtttctgggactctacggcgaggatgatgattcctggtgttcttcctcctcctcctcttccgactcggaagaagaaggatattttcttggacaaccaatccctcaaccccggccacagagatttgcctactatacagatgacctttctagtccaccatctgcacttcccacccctcagtttggtcagaggacaacaaaatccaagaagaaaaagggacacaagggcaaaaattgtattatttcttaaccaagtagtgatgcagagcatttgtttaaaacttagccattaaccgtctgaatcgtttccttttcttccgtaggaaagttgtgaaaatagtttaaagtgctttctttgcccatgtaaatgagaactcaactgctgtttacagtgtcagattaacatttgaaaggtgtgatttctccaatttaccctctttggatggtgccaggtggacgtgacatctcgtgcctgtccggtgcgggtgcgttacagatggacgtagctgccttggttttccagtcctcaagggaatactgaagatgctgactgaaggggattggatgttgattttagaagatggagaactccagccacctttgtaaagcactagtgtttgtcatttatgtaagtcaggtcggctcaggtcttgatagtccgtcttggtgtgaggcatgcctgtcacgatgacctagctaacactgtgcatcttattgtgaggccagcttgtcccctcgaaccctctttggccaggtaaacattgtattgtatcagcgccagctacagattg

SEQ ID NO: 114457 - DNA, 219 bp, Homo sapiens
tgtttcgttcaacctctatcaaatttacactcctcattttccaattatcctaggtaggtatgactaagggggaaaccgtggagtcagtgtccgaggaaggctaacctagtcttaaaaactacctgggaattagcttcaggtgagaagcagcaatgccagtaggcagatggggtggtgccaatgccaggcgggctctgcaatcagcatctcccagcctcc

SEQ ID NO: 114458 - DNA, 288 bp, Homo sapiens
tttgaagaggccagggctacacagccaggcagatgaaggatgcagatgttcccaccctttaccagctgtggagccttcagcaaatagcatgacgtcttcaggcctcaacttcccttatttgtaaaagggggagacatcaattcatggaaaggagcaccgacgacgtggagtttaagtctggagcaggcactgagctgtctgtgcgcggtgagtacagcgtgggcctcctttgcctctggtttgtgacagtaactcaataataacaccctccattctttgagcaatgat

SEQ ID NO: 114459 - DNA, 326 bp, Homo sapiens
gatctgcctgcctcggcctcccaaagtgctgggattacaggtgtgagccaccaaatactatatattttaaacaaacaaatacttttaagtgttatgcttactaccgactgctgcttaccagtgtggtgcatgttagctactctgaatgttggttttttatctgtaaaatgatagtaaaggcgtgagccaactgtgcccgactgcatcttgtattcttaagcctgtagagcatctcagtcttcaggcagccaaggacatttattagaattggagcctctggctgccttggaagaggatgttttcaacacttttagcctgtcgtaata

SEQ ID NO: 114460 - DNA, 313 bp, Homo sapiens
tgggaagagctttcacatcgctgtgaaatcctctaagaactctggctggcagtcacagcccagcttcagagttgatgattcagttttaacttgtgatcaaatcaaggtttacatcatgcatggaaatcaaggtttacagcacgcagaactgaaaactgggtcctcattagatctgccaaactcctagagcttgcaaagggacaagggacaatagtctctgctgccaggtcccaggggacaagcagagggacccaactggggagcacttgcagccagggatgtgcagagggagagggagtcatggcaggcagcc

SEQ ID NO: 114461 - DNA, 387 bp, Homo sapiens
  misc_feature (387)..(387): n is a, c, g, or t
attatgaagaatgcatatcccacatcagtagtgagcaatgcacgaaataatggaacactagagctgaacttcccaaaaagacctctaaaggaaaggaaccctggccgggcgtggtggctcacgcccataatcccaacactttgagaggccaaggcaagtggatcaccagaggtcaggaattcgagaccagcctggctaacatggtgaaaccccgtttctactaaaaatacaaaaaattatccaggcatggtggcacgcacctgtaatcccagctactcgggaggctgaggcaggagaattgcttgaacctgggaggtagaggttgcagtagccgagattgcgccattgcactctagcttgggaaacaagagtgacactccatctcan

SEQ ID NO: 114462 - DNA, 192 bp, Homo sapiens
gggtccatgtgggttacggccgccacgcgctggctgatttttgtatttttagtagagatcggatttcagcatcttggtcaggctggccttcaactccggatctcatcacacacccgcctcagcctccccacatgcggttattatagttgatatgtctgaaccaaaatgatatgggaagcttgagaataaaag

SEQ ID NO: 114463 - DNA, 249 bp, Homo sapiens
ccttgatggtgtggggaaagatgtctgaatgggcagaggcctcctgagtccacctttgtggcaacccagttctaagaacccgggatgggaaaggggtcagtgtgaatggggaacctgccaggccccctgggcaccagcctctagctacctgtgggccctgagcaactcccacccgctggagggtagggagccacaccccaccctgcctgctgccccagggtgccagcacagcatctcccatcccctggc

SEQ ID NO: 114464 - DNA, 436 bp, Homo sapiens
atttccttaggctgcttaaattgtagccaaagcttttgtatgtatgtttgacagtcatttggctaaggagtacttcacttgctcttgaaaatagttactgtaaactcatctttgacatagttggaaatcctggcgcttaaagtttggtcacatgacatagcttttgccagtgttgtagtatgtactggggtttctagtatcttcaatttcattctggaaagagcctgagatatctgagctgtctgttcaggaacatgtcaggactgttaaatgtggcatatagaaattgccaagtagattatattttttaaagctgttggagcatctttcagcctcaagtattgctatttcatatttaatattcttcctcgtctgtttcagtatgacttttctaccaagtggaaaagataaggtaggcttgctgagttagaagccc

SEQ ID NO: 114465 - DNA, 395 bp, Homo sapiens
gtggcagaggcagtatttgaatccaattatttcatctccaaagtcctgctgcttctgactttgggtgtgggggcaagagaaagccagaataaatagactctccacagtctcataaaattcagcattggggatcatgggaataactaaagtgaagacaggaacagcaaagaattctagtcttggctagcttcacagattcagccttgagagcatcctttccaatgaaacctttttccccccctttctagtgaattaaccactaacgactttctgttacgctaggcactatgtgactttatttcaagtatttgtttcacctctactactcctaagttcagataacttatttaagtcagctacttccccccagcatctagcatataattggcatataa

SEQ ID NO: 114466 - DNA, 515 bp, Homo sapiens
ctacatgcttacaactggctcgattcaaacattaaatgaagtagagaaatcatcagataaattgctggccctgtgtactggagagtgaaggctctttctccagctgacgacagcgctaggcttttgtctgacctaatttatttctctttcaggttagaataaagcactctttcctgtcgcagggtaacctcttctgctcatatattgaactctagcataagactcagggtgcagtctgcagatttcttcaacttgggaaagaagacattataaatctagaaatcctatgatcaaaagcacatatattccccatcactagattacatgtttaggggagaaatcctctcattaaaagccatccataaaggacaactgtttggggtgaaagatgtgatcaagactggctctagcaatcacatactctttccaaacaaagttttacatgttatttgagtcggcattttaaatctttggggaacggtgctatttcccttagttcagtgggaacattacct

SEQ ID NO: 114467 - DNA, 214 bp, Homo sapiens
attttgcctgtctgaaaatgcctgtattctacccttacacttgactggtaattattggatataaaattctaggtttaggtcatttccctcagaattttaaaaatttacttttcaaatcaaagctgtatatgcatatagtttaaaaatccaatacagtcatgcactgcataacaacatcaatgatggacagcatatacaatggtggtcccataag

SEQ ID NO: 114468 - DNA, 246 bp, Homo sapiens
actccagggcttgttcttgtgggtttcttctgggctccatgttagaatcacctgggaagctttaaaaatgacggacacctgggccccactcccagcaattctgattcaagtgatctaggcattgctattcaaaatgtggtccatgggccagcagcattggcatcacctaggagcttgttagaattccagcatcttagaccccactccagacccactgagtcagaaccggccatttaacaggatccc

SEQ ID NO: 114469 - DNA, 303 bp, Homo sapiens
caaaaatttctgtcagattacatgtcagtgagataactacagaagatgagagaaggttgtaaaaataagagttttgttagattattttagaaatatctttaaattctcccactacttaaagtaaatggaactggaaatcttttatgatgcattatagatacgcattatataagaaagatgctgtggagctccaattattaacagacattattaaatttaaatttttgcctctgcataaaaagattggccaaagaatgtacatacacatgctcaaagttaaaatgtttaaggtgcatatgtctc

SEQ ID NO: 114470 - DNA, 628 bp, Homo sapiens
ttcacagatctcagattgggaaagacttgtctacagcacacatgcatggttaggaaattatttttcaataaaagcaattacattgttattaaggacaatgacactgaccacactgagctaagtcaaagtttaagtaaatcaaacttgtcattagaaaagcagcttagaggtttattgcaaaagccttctccagaaactttcccggcccggggaatctgcctgtgatgggaatgtgctgatactctccagacccctgttttagggctgggaagattgaggcctagaaaaggaagtgcccgtggcagagttactgctagaacccttccctaaacatggggtcctaccccttcccaggtcagggcgccctcacctccttccctttcactggcccctgacgaggcactaagtcaaccaacaacctaaagagccacttagtgaagaggtagagagtgaatatacctagcgttttattccacaaagttccagaaacccagtgactgggcatttcctttttttttttctttttttttttgagacagagtctcgctctgtcacccaggatggggtgcaatgacacaaccttggctcactgcaacatctgcctcctgggttcaagtgattctcctgc

SEQ ID NO: 114471 - DNA, 776 bp, Homo sapiens
  misc_feature (696)..(696): n is a, c, g, or t
gtggcagggacagagacgggtccatggcagtgtctcctcttctctgtgaaggcaaagggcctctgagggagtattacagccgcctcatccaccagtagcatttccagcacatccaggtctgcaccccctggctggagggccgaggactacccccgcttctagagccaagagctgggtagagctgcaaggacaccgcctgcacaggatgcccggggctgggcattacctgctgcaatgacaacatctggctggacggcagagagctgacagaccgtcgcgacgtcccagtccagctgggccactgtcaccctggggccgtctaagttggcagtgatgtctgcctctaatgagaggccattgagaaggacattccctcggagctgctcgaggacccggctgtgacagtcgctgaagatgtacgcccgggggcggcacatcttgcagatggccaggcctgtgaggccggcgccactgccaagctttaggacagtcctggtgggaggaaaggggaccgtgtctgtgactgcaccaggtaagcctgctcggtgccctgccctgcgccccgaggtcacctgtgagtgaaggctgctgggttctcggcccattctgcaaggtagagggcagcgtccccatgtgaccaggcctgtggtgccgtggagatgatggctgtgctcttggagagtgtgacgagcctcncgagggctgcaccaaagagagggcgagagagtcagtccagcaatcagacgacagtggcattgaagacagtagcattcaca

SEQ ID NO: 114472 - DNA, 402 bp, Homo sapiens
cagtctggagtgcagtggcgcgatcttggctcactgtaacctccgcctcccgggttcaagcaattctcctgcctcagcctcctgagtagctgggattacaggcacgtgccaccacgcccagctaatttttgtatttttagtagacacagggtttcaccatgttggtcaggatggtctccaactcctcaccttgtgatccgcccaccttggcatcccaaagtgctgggattacagggatgagccattgcacccggcctgtattggcttttaatttttaggaagtaacacatggctgtgacctgacaacttcatagtggccgtagggtagggcactgttgtcattattcctgtcactgacaatgtcagccccacctgcagatgtgggagagtagatggggaaag

SEQ ID NO: 114473 - DNA, 344 bp, Homo sapiens
tccttgtgcccctcgaggaaggctccctggaatgagttagttgattaaaaatgtggcttaagggaattcgaagttgtttaggcaaaaggaaacctgactgaatttctccccacctgccccccttgtagctcccccaatcccaggatcatatccaccccaacccccttcagactggttcctgagttgccatttcgggggctgggcgccaggccagtcaggaacaatggccaatggaacttgagctgccaactgcaacaccagcaccgactgcccccccaagacccccaagtttccctgccccctcctgcctgggaaccaccctcccaccaccaccctcaccaccc

SEQ ID NO: 114474 - DNA, 633 bp, Homo sapiens
gctcggtaccgactgaagttggagtcatgaatgttgatcttaccaccgagggataggatctgagcattgcacctcaaaactacccgggatgagatacccagccaaagccaagggcacattctagtcggagacagccatcagaatttcgcctgtggtcttccagctggtagatgtgaacacaggtgctgagctcactcctcatgaagaacctgaagttttcactccgtggcataagcaagaagcgctaactctactgaaaggacatttgaacaaagacctagaaacaataagggagcaaaccatgtaggtacctgggagaagacccttctgagcagatgaaatagcaaatacaaagaccctgaggctgaagcattttttgtgtgtacatggaacagcaaagaggcacatgtagctgtgatcaaatataaacaggaagaatagtagcttataggatcagagagttgataggggccatatcttgtagctgtttaagctacaagatatctgagctacagattcagtttttcatactttgttttgagtgagtgtcgctctgttgcccgtgctagagtgcagtgagccgagattgtgccactgcactccaccccgggcaacagaatgggactccatctc

SEQ ID NO: 114475 - DNA, 5941 bp, Homo sapiens
accaggactaggaggcagcggggagcgtgcctgcgtcgctcggagcggtgacagcaaggagcgcagcgcggaggccgggcggcaaggggagtttccagtcctcgataagtggagtccctgctctgcgctgcgccagcgccttccgcctgggcccgcggtgctagacacctgccgagtccgaagcgggagtcaggctgagccttcggcccccaagatctccaacctgagcatatgccagttgacatgggaacactgaggccagcaatttaaggatttcacatttgcttgcagtgaatgcgtaatcctggatctcttgttcgcaaatcgacagcctgaagccctctggaagcccaagactgctggaggtttttgaccagacaagccaacctttttcaaggtagctcagtggcatttctgagcaggggccaccctgacttcaccttggcccaccatgagggtcttcctgctttgtgcctacatactgctgctgatggtttcccagttgagggcagtcagctttcctgaagatgatgaaccccttaatactgtcgactatcactattcaaggcaatatccggtttttagaggacgcccttcaggcaatgaatcgcagcacaggctggactttcagctgatgttgaaaattcgagacacactttatattgctggcagggatcaagtttatacagtaaacttaaatgaaatgcccaaaacagaagtaatacccaacaagaaactgacatggcgatcaagacaacaggatcgagaaaactgtgctatgaaaggcaagcataaagatgaatgccacaactttatcaaagtatttgttccaagaaacgatgagatggtttttgtttgtggtaccaatgcattcaatcccatgtgtagatactacaggttgagtaccttagaatatgatggggaagaaattagtggcctggcaagatgcccatttgatgccagacaaaccaatgttgccctctttgctgatgggaagctgtattctgccacagtggctgacttcttggccagcgatgccgttatttatcgaagcatgggtgatggatctgcccttcgcacaataaaatatgattccaaatggataaaagagccacactttcttcatgccatagaatatggaaactatgtctatttcttctttcgagaaatcgctgtcgaacataataatttaggcaaggctgtgtattcccgcgtggcccgcatatgtaaaaacgacatgggtggttcccagcgggtcctggagaaacactggacttcatttctaaaggctcggctgaactgttctgtccctggagattcgtttttctactttgatgttctgcagtctattacagacataatacaaatcaatggcatccccactgtggtcggggtgtttaccacgcagctcaatagcatccctggttctgctgtctgtgcatttagcatggatgacattgaaaaagtattcaaaggacggtttaaggaacagaaaactccagattctgtttggacagcagttcccgaagacaaagtgccaaagccaaggcctggctgttgtgcaaaacacggccttgccgaagcttataaaacctccatcgatttcccggatgaaactctgtcattcatcaaatctcatcccctgatggactctgccgttccacccattgccgatgagccctggttcacaaagactcgggtcaggtacagactgacggccatctcagtggaccattcagccggaccctaccagaactacacagtcatctttgttggctctgaagctggcatggtacttaaagttctggcaaagaccagtcctttctctttgaacgacagcgtattactggaagagattgaagcctacaaccatgcaaagtgcagtgctgagaatgaggaagacaaaaaggtcatctcattacagttggataaagatcaccacgctttatatgtggcgttctctagctgcattatccgcatccccctcagtcgctgtgagcgttatggatcatgtaaaaagtcttgtattgcatctcgtgacccgtattgtggctggttaagccagggatcctgtggtagagtgaccccagggatgctgctgttaaccgaagacttctttgctttccataaccacagtgctgaaggatatgaacaagacacagaattcggcaacacagctcatctaggggactgccatggtgtacgatgggaagtccagtctggagagtccaaccagatggtccacatgaatgtcctcatcacctgtgtctttgctgcttttgttttgggggcattcattgcaggtgtggcagtatactgctatcgagacatgtttgttcggaaaaacagaaagatccataaagatgcagagtccgcccagtcatgcacagactccagtggaagttttgccaaactgaatggtctctttgacagccctgtcaaggaataccaacagaatattgattctcctaaactgtatagtaacctgctaaccagtcggaaagagctaccacccaatggagatactaaatccatggtaatggaccatcgagggcaacctccagagttggctgctcttcctactcctgagtctacacccgtgcttcaccagaagaccctgcaggccatgaagagccactcagaaaaggcccatggccatggagcttcaaggaaagaaacccctcagttttttccgtctagtccgccacctcattccccattaagtcatgggcatatccccagtgccattgttcttccaaatgctacccatgactacaacacgtctttctcaaactccaatgctcacaaagctgaaaagaagcttcaaaacattgatcaccctctcacaaagtcatccagtaagagagatcaccggcgttctgttgattccagaaataccctcaatgatctcctgaagcatctgaatgacccaaatagtaaccccaaagccatcatgggagacatccagatggcacaccagaacttaatgctggatcccatgggatcgatgtctgaggtcccacctaaagtccctaaccgggaggcatcgctatactcccctccttcaactctccccagaaatagcccaaccaagcgagtggatgtccccaccactcctggagtcccaatgacttctctggaaagacaaagaggttatcacaaaaattcctcccagaggcactctatatctgctatgcctaaaaacttaaactcaccaaatggtgttttgttatccagacagcctagtatgaaccgtggaggatatatgcccacccccactggggcgaaggtggactatattcagggaacaccagtgagtgttcatctgcagccttccctctccagacagagcagctacaccagtaatggcactcttcctaggacgggactaaagaggacgccgtccttaaaacctgacgtgccaccaaagccttcctttgttcctcaaaccccatctgtcagaccactgaacaaatacacatactaggcctcaagtgtgctattcccatgtggctttatcctgtccgtgttgttgagaggatgatgttgtaagggtaccttaaaacaagagactcgcttgtattttaagagaaccaagtggccaaagaaactctttctaactttggcaacatcagaacttgccacatgtagctactgcagcaaggcttctgtgtacttgcctgaaaacaaaggaaggtgctggtcattccatttcttttgtttgaagctaaagagatgtgtagctcacaggggctaccttaccagtataaagagctgataacagtactcagaagaatctgtgaacaaatacttgaaaatgggttcaatgtagactgccattatgtgtggtcttcccattaaatgtgaacattttaatatgtatgcattcaccttgcctcttgcacaaatgtcaaaaaaaagatggtaatatctcaaagaaatgaacttgtagattaccaagcagtttgctaaaaattcaatctttgacccaagctgtagcatttttttttcatgtgtggcatctttttcatgccaccaacaaacttgttgtgtgtgtgcgtgtgtgtgtgtgtgtgtgtgtgtgtgtgtgtgtgttctgtacccactaggatttgtttaggtgcccattgcatctttttgtgctatggagttgtttacattaagcatgaccgaacgagagacaatactatttcccacaggagtccattgggttcagctttgaaagaggaatagaatcgaggctcctttgaccatcaaaatgatgaactttacttatgtggtacccaatgccagaatgtaagagttgcaagtgattttgtgctgctattcattaaaacttgtattccagtcttgccagcttaaggagatcaagatattaagaggtatccttgatttattttccagtattcagtagtaaaattttcctgtccactgtgaatcaaagcctgagtcactctatttaaccttggacacactaataaggttttattttgattgtgttcctttccccccccccaatagtaaaatttctcctcctttaactcctcctaccccccaaggtaagaaacaaaaaacaaacaaacaaacaaaaataggaagacaaaaggaaagacatatgaaaggaattgtaattggcttaacagaaacagtctgtaaaaacctaacagtggtgcaatcatgttgtctgtgttgtgttatgtgagaattttctcctaagtcatgcaggtaatgacaatatactgtaaataccacatgtgagtttacctgaatctgtgcattttgtgccttattcatgagaatgatagaagtactaaaatctgtcaagtgttttcagtatagcacattatttactgagtgccagttgtaaatgtttttcaaccagcacctaaaaagactcttttcaaaaaatcacagaaacaacctaggacaattatttgttacataatccgacctcatagcagcattacattctttgccgtgataaacattccactcctgctttcctaaggatgaaacagtgataatgtgaactcaaatgaggtttcctgggtaatgtgacacctgcagaaactatagagcgtcatttatacgtagtttggcagaaaccacttacggctgatgatgcgcaaccctgctgactgtttcagttaatatgctgcacaccacacacttgtttagtgaaccaaatctagaaagtaccaaggcagaggtatgctcctgctgtaatcaggcaaatgagttcaactggatttcttttgacaatactgttggtacctattacttgggggaggacatgttgcggaagaccagatcatttttatacagaatgtgaaatactgatacagttattcttttttttaaagaacattgttttataaagaacgtgatttccagtgatctctggaagcgctaaagctaaaatttctgttcttgaaacacttcagctttgcaactaaaatattacagattaataataaattaaaccaaccaatgataaacactactcagtccaccaacaacaaacgtgtttgaattcaccttaccaatattaatcccagcgtgtgtaaaacagaacagtaactctatgtgaccccagataacattttgtaacattgtgcttccttgtagtttgtaatgtgagttcaatcagtatttatgttgaaatttctaacattaaatctagtctctatcctgttaatttaatttttaaatgctttatccatttgtgcaaaggtaaacgcagattgtatcttttttaatggtacggcataaaaagtaaccctcaagtgaagtgtctctatactgttttatagagtactttaacatgaatagataccttgtaaacttgtattgtggatgtgtaaataatatgtactttgggtttttaacaccgcatgtaaagtcaaaataaaatatacaaatcattatatcctgcctcttg

SEQ ID NO: 114476 - DNA, 839 bp, Homo sapiens
gcggccgcttcccaccgtccctctccccttactggcagagcgcgctgcgggcggactcccgggcccggagcagcccaccggccaccccaccgcccacccggctcccggtgtctcctcccggccgctctacccagcaactttccgtgctttgttccccgactggaaatgctttacggaagcgtcttggacagggtctccgccaggcgacaagagctcggtgctgagatgtgttacgttctcatctccccatcaattatggatggaaacaaataaggaagagtcaattttgctgagccccttctccggcaacgagaggcgttctgcagccgggagggagccgccgctcgcgccggcagccgctggcaggggcatggtgaggaggaaggtagggaaacttttatttcccgtcttgacagcggcggtgtttgtccctggtctgcagaaactgatacagtagcctccttccttgggtaatttaggagggcttgaagcttcttctgtcatgtgtaattcttggattgaaatgaaaggtcataaaggacttggaagtgtgcacgagaattgggtttgaaaaatttgtgctccatccactcttgggaccattgctgtcaggtgattgtttaaatcctgaacttgttaaaaggcgaaatgtcagggagctggcgggggtgggggtgtggagggggattgaagtcccggtatgaatcgcagcgtttgaggaacttagggcagtactccctgttctggggtgaccattcggtaactgatgttccagcatcccgagccctcagcgccgtcagctggatgatctcacagggaaggcgcagcacatcgttact

SEQ ID NO: 114477 - DNA, 640 bp, Homo sapiens
  misc_feature (8)..(8): n is a, c, g, or t
gcaacgangggagaaatctggcaatcatcaaatctcatcccctgatggactctgcgccaacccattgttaataaaccctggcccaaaaactggggggaaagggaaaaatttggcggccttttagggcccattcagccggaccctaccagaactacacagtcatctttgttggctctgaagctggcatggtacttaaagttctggcaaagaccagtcctttctctttgaacgacagcgtattactggaagagattgaagcctacaaccatgcaaagtaggtatatgttacgagaacgcccttcagcactgctcaaaaattttcggcatgtatttcatctagtcattctcattgaaataaatcttgggtttgtttttttcccgagcctgctagggcgaggggggtgaatggttgatgagtttaaaaataatgcagcccttgtttttcacctgtagaatatgagaacattttaacagcacctctcttatcttgcagatatattccaagatgctacatgcagcagacagctgtgagcttgcatacacacacacacaaatatacatgcacatacatacacagaatgcagtactagttaagtatttccttcctatctttaataagtaagagaatatttagaccatt

SEQ ID NO: 114478 - DNA, 438 bp, Homo sapiens
gaaggcggcacacccagagagagcatggtagctccatgctgcttcccccatacctcaccctacacatctcttcatctgtatcctttataataatccactaaatgatctccaacctgagcatatgccagttgacatgggaacactgaggccagcaatttaaggatttcacatttgcttgcagtgaatgcgtaatcctggatctcttgttcgcaaatcgacagcctgaagccctctggaagcccaagactgctggaggggattctccagtcccgatggagccaaccaagtgcttttctcctatagcacctgacaaagaaaacagatagcgagaaagcctgcagtcaactctgggaatggggatggaggccccgaccccagccttccctgcttagaggaaacaggaaactctgtaccagctgggtgcatgaagggaagctt

SEQ ID NO: 114479 - DNA, 4808 bp, Homo sapiens
tcaatcaactatgtagaagtgcagtcccgggttgttatttcagtacggggactagagtttagtgtctaggctgtgtattcccgcgtggcccgcatatgtaaaaacgacatgggtggttcccagcgggtcctggagaaacactggacttcatttctaaaggctcggctgaactgttctgtccctggagattcgtttttctactttgatgttctgcagtctattacagacataatacaaatcaatggcatccccactgtggtcggggtgtttaccacgcagctcaatagcatccctggttctgctgtctgtgcatttagcatggatgacattgaaaaagtattcaaaggacggtttaaggaacagaaaactccagattctgtttggacagcagttcccgaagacaaagtgccaaagccaaggcctggctgttgtgcaaaacacggccttgccgaagcttataaaacctccatcgatttcccggatgaaactctgtcattcatcaaatctcatcccctgatggactctgccgttccacccattgccgatgagccctggttcacaaagactcgggtcaggtacagactgacggccatctcagtggaccattcagccggaccctaccagaactacacagtcatctttgttggctctgaagctggcatggtacttaaagttctggcaaagaccagtcctttctctttgaacgacagcgtattactggaagagattgaagcctacaaccatgcaaagtgcagtgctgagaatgaggaagacaaaaaggtcatctcattacagttggataaagatcaccacgctttatatgtggcgttctctagctgcattatccgcatccccctcagtcgctgtgagcgttatggatcatgtaaaaagtcttgtattgcatctcgtgacccgtattgtggctggttaagccagggatcctgtggtagagtgaccccagggatgcttgctgaaggatatgaacaagacacagaattcggcaacacagctcatctaggggactgccatgacatggaggtatcttcatcttctgttaccacaatggtgtacgatgggaagtccagtctggagagtccaaccagatggtccacatgaatgtcctcatcacctgtgtctttgctgcttttgttttgggggcattcattgcaggtgtggcagtatactgctatcgagacatgtttgttcggaaaaacagaaagatccataaagatgcagagtccgcccagtcatgcacagactccagtggaagttttgccaaactgaatggtctctttgacagccctgtcaaggaataccaacagaatattgattctcctaaactgtatagtaacctgctaaccagtcggaaagagctaccacccaatggagatactaaatccatggtaatggaccatcgagggcaacctccagagttggctgctcttcctactcctgagtctacacccgtgcttcaccagaagaccctgcaggccatgaagagccactcagaaaaggcccatggccatggagcttcaaggaaagaaacccctcagttttttccgtctagtccgccacctcattccccattaagtcatgggcatatccccagtgccattgttcttccaaatgctacccatgactacaacacgtctttctcaaactccaatgctcacaaagctgaaaagaagcttcaaaacattgatcaccctctcacaaagtcatccagtaagagagatcaccggcgttctgttgattccagaaataccctcaatgatctcctgaagcatctgaatgacccaaatagtaaccccaaagccatcatgggagacatccagatggcacaccagaacttaatgctggatcccatgggatcgatgtctgaggtcccacctaaagtccctaaccgggaggcatcgctatactcccctccttcaactctccccagaaatagcccaaccaagcgagtggatgtccccaccactcctggagtcccaatgacttctctggaaagacaaagaggttatcacaaaaattcctcccagaggcactctatatctgctatgcctaaaaacttaaactcaccaaatggtgttttgttatccagacagcctagtatgaaccgtggaggatatatgcccacccccactggggcgaaggtggactatattcagggaacaccagtgagtgttcatctgcagccttccctctccagacagagcagctacaccagtaatggcactcttcctaggacgggactaaagaggacgccgtccttaaaacctgacgtgccaccaaagccttcctttgttcctcaaaccccatctgtcagaccactgaacaaatacacatactaggcctcaagtgtgctattcccatgtggctttatcctgtccgtgttgttgagaggatgatgttgtaagggtaccttaaaacaagagactcgcttgtattttaagagaaccaagtggccaaagaaactctttctaactttggcaacatcagaacttgccacatgtagctactgcagcaaggcttctgtgtacttgcctgaaaacaaaggaaggtgctggtcattccatttcttttgtttgaagctaaagagatgtgtagctcacaggggctaccttaccagtataaagagctgataacagtactcagaagaatctgtgaacaaatacttgaaaatgggttcaatgtagactgccattatgtgtggtcttcccattaaatgtgaacattttaatatgtatgcattcaccttgcctcttgcacaaatgtcaaaaaaaagatggtaatatctcaaagaaatgaacttgtagattaccaagcagtttgctaaaaattcaatctttgacccaagctgtagcatttttttttcatgtgtggcatctttttcatgccaccaacaaacttgttgtgtgtgtgcgtgtgtgtgtgtgtgtgtgtgtgtgtgtgtgtgtgttctgtacccactaggatttgtttaggtgcccattgcatctttttgtgctatggagttgtttacattaagcatgaccgaacgagagacaatactatttcccacaggagtccattgggttcagctttgaaagaggaatagaatcgaggctcctttgaccatcaaaatgatgaactttacttatgtggtacccaatgccagaatgtaagagttgcaagtgattttgtgctgctattcattaaaacttgtattccagtcttgccagcttaaggagatcaagatattaagaggtatccttgatttattttccagtattcagtagtaaaattttcctgtccactgtgaatcaaagcctgagtcactctatttaaccttggacacactaataaggttttattttgattgtgttcctttccccccccccaatagtaaaatttctcctcctttaactcctcctaccccccaaggtaagaaacaaaaaacaaacaaacaaacaaaaataggaagacaaaaggaaagacatatgaaaggaattgtaattggcttaacagaaacagtctgtaaaaacctaacagtggtgcaatcatgttgtctgtgttgtgttatgtgagaattttctcctaagtcatgcaggtaatgacaatatactgtaaataccacatgtgagtttacctgaatctgtgcattttgtgccttattcatgagaatgatagaagtactaaaatctgtcaagtgttttcagtatagcacattatttactgagtgccagttgtaaatgtttttcaaccagcacctaaaaagactcttttcaaaaaatcacagaaacaacctaggacaattatttgttacataatccgacctcatagcagcattacattctttgccgtgataaacattccactcctgctttcctaaggatgaaacagtgataatgtgaactcaaatgaggtttcctgggtaatgtgacacctgcagaaactatagagcgtcatttatacgtagtttggcagaaaccacttacggctgatgatgcgcaaccctgctgactgtttcagttaatatgctgcacaccacacacttgtttagtgaaccaaatctagaaagtaccaaggcagaggtatgctcctgctgtaatcaggcaaatgagttcaactggatttcttttgacaatactgttggtacctattacttgggggaggacatgttgcggaagaccagatcatttttatacagaatgtgaaatactgatacagttattcttttttttaaagaacattgttttataaagaacgtgatttccagtgatctctggaagcgctaaagctaaaatttctgttcttgaaacacttcagctttgcaactaaaatattacagattaataataaattaaaccaaccaatgataaacactactcagtccaccaacaacaaacgtgtttgaattcaccttaccaatattaatcccagcgtgtgtaaaacagaacagtaactctatgtgaccccagataacattttgtaacattgtgcttccttgtagtttgtaatgtgagttcaatcagtatttatgttgaaatttctaacattaaatctagtctctatcctgttaatttaatttttaaatgctttatccatttgtgcaaaggtaaacgcagattgtatcttttttaatggtacggcataaaaagtaaccctcaagtgaagtgtctctatactgttttatagagtactttaacatgaatagataccttgtaaacttgtattgtggatgtgtaaataatatgtactttgggtttttaacaccgcatgtaaagtcaaaataaaatatacaaatcattatatcctgcctcttg

SEQ ID NO: 114480 - DNA, 2290 bp, Homo sapiens
gcggccgcttcccaccgtccctctccccttactggcagagcgcgctgcgggcggactcccgggcccggagcagcccaccggccaccccaccgcccacccggctcccggtgtctcctcccggccgctctacccagcaactttccgtgctttgttccccgactggaaatgctttacggaagcgtcttggacagggtctccgccaggcgacaagagctcggtgctgagatgtgttacgttctcatctccccatcaattatggatggaaacaaataaggaagagtcaattttgctgagccccttctccggcaacgagaggcgttctgcagccgggagggagccgccgctcgcgccggcagccgctggcaggggcatggtgaggaggaaggtagctcagtggcatttctgagcaggggccaccctgacttcaccttggcccaccatgagggtcttcctgctttgtgcctacatactgctgctgatggtttcccagttgagggcagtcagctttcctgaagatgatgaaccccttaatactgtcgactatcactattcaaggcaatatccggtttttagaggacgcccttcaggcaatgaatcgcagcacaggctggactttcagctgatgttgaaaattcgagacacactttatattgctggcagggatcaagtttatacagtaaacttaaatgaaatgcccaaaacagaagtaatacccaacaagaaactgacatggcgatcaagacaacaggatcgagaaaactgtgctatgaaaggcaagcataaagatgaatgccacaactttatcaaagtatttgttccaagaaacgatgagatggtttttgtttgtggtaccaatgcattcaatcccatgtgtagatactacaggttgagtaccttagaatatgatggggaagaaattagtggcctggcaagatgcccatttgatgccagacaaaccaatgttgccctctttgctgatgggaagctgtattctgccacagtggctgacttcttggccagcgatgccgttatttatcgaagcatgggtgatggatctgcccttcgcacaataaaatatgattccaaatggataaaagagccacactttcttcatgccatagaatatggaaactatgtctatttcttctttcgagaaatcgctgtcgaacataataatttaggcaaggctgtgtattcccgcgtggcccgcatatgtaaaaacgacatgggtggttcccagcgggtcctggagaaacactggacttcatttctaaaggctcggctgaactgttctgtccctggagattcgtttttctactttgatgttctgcagtctattacagacataatacaaatcaatggcatccccactgtggtcggggtgtttaccacgcagctcaatagcatccctggttctgctgtctgtgcatttagcatggatgacattgaaaaagtattcaaaggacggtttaaggaacagaaaactccagattctgtttggacagcagttcccgaagacaaagtgccaaagccaaggcctggctgttgtgcaaaacacggccttgccgaagcttataaaacctccatcgatttcccggatgaaactctgtcattcatcaaatctcatcccctgatggactctgccgttccacccattgccgatgagccctggttcacaaagactcgggtcaggtacagactgacggccatctcagtggaccattcagccggaccctaccagaactacacagtcatctttgttggctctgaagctggcatggtacttaaagttctggcaaagaccagtcctttctctttgaacgacagcgtattactggaagagattgaagcctacaaccatgcaaagtaggtatatgttacgagaacgcccttcagcactgctcaaaaattttcggcatgtatttcatctagtcatgtccttttggtcctctaaattagcagtggtttggcataatagtgttttgtgttttttttctcattgaaataaatcttgggtttgtttttttcccgagcctgctagggcgaggggggtgaatggttgatgagtttaaaaataatgcagcccttgtttttcacctgtagaatatgagaacattttaacagcacctctcttatcttgcagatatattccaagatgctacatgcagcagacagctgtgagcttgcatacacacacacacaaatatacatgcacatacatacacagaatgcagtactagttaagtatttccttcctatctttaataagtaagagaatatttagaccatt

SEQ ID NO: 114481 - DNA, 5925 bp, Homo sapiens
gcggccgcttcccaccgtccctctccccttactggcagagcgcgctgcgggcggactcccgggcccggagcagcccaccggccaccccaccgcccacccggctcccggtgtctcctcccggccgctctacccagcaactttccgtgctttgttccccgactggaaatgctttacggaagcgtcttggacagggtctccgccaggcgacaagagctcggtgctgagatgtgttacgttctcatctccccatcaattatggatggaaacaaataaggaagagtcaattttgctgagccccttctccggcaacgagaggcgttctgcagccgggagggagccgccgctcgcgccggcagccgctggcaggggcatggtgaggaggaaggtagctcagtggcatttctgagcaggggccaccctgacttcaccttggcccaccatgagggtcttcctgctttgtgcctacatactgctgctgatggtttcccagttgagggcagtcagctttcctgaagatgatgaaccccttaatactgtcgactatcactattcaaggcaatatccggtttttagaggacgcccttcaggcaatgaatcgcagcacaggctggactttcagctgatgttgaaaattcgagacacactttatattgctggcagggatcaagtttatacagtaaacttaaatgaaatgcccaaaacagaagtaatacccaacaagaaactgacatggcgatcaagacaacaggatcgagaaaactgtgctatgaaaggcaagcataaagatgaatgccacaactttatcaaagtatttgttccaagaaacgatgagatggtttttgtttgtggtaccaatgcattcaatcccatgtgtagatactacaggttgagtaccttagaatatgatggggaagaaattagtggcctggcaagatgcccatttgatgccagacaaaccaatgttgccctctttgctgatgggaagctgtattctgccacagtggctgacttcttggccagcgatgccgttatttatcgaagcatgggtgatggatctgcccttcgcacaataaaatatgattccaaatggataaaagagccacactttcttcatgccatagaatatggaaactatgtctatttcttctttcgagaaatcgctgtcgaacataataatttaggcaaggctgtgtattcccgcgtggcccgcatatgtaaaaacgacatgggtggttcccagcgggtcctggagaaacactggacttcatttctaaaggctcggctgaactgttctgtccctggagattcgtttttctactttgatgttctgcagtctattacagacataatacaaatcaatggcatccccactgtggtcggggtgtttaccacgcagctcaatagcatccctggttctgctgtctgtgcatttagcatggatgacattgaaaaagtattcaaaggacggtttaaggaacagaaaactccagattctgtttggacagcagttcccgaagacaaagtgccaaagccaaggcctggctgttgtgcaaaacacggccttgccgaagcttataaaacctccatcgatttcccggatgaaactctgtcattcatcaaatctcatcccctgatggactctgccgttccacccattgccgatgagccctggttcacaaagactcgggtcaggtacagactgacggccatctcagtggaccattcagccggaccctaccagaactacacagtcatctttgttggctctgaagctggcatggtacttaaagttctggcaaagaccagtcctttctctttgaacgacagcgtattactggaagagattgaagcctacaaccatgcaaagtgcagtgctgagaatgaggaagacaaaaaggtcatctcattacagttggataaagatcaccacgctttatatgtggcgttctctagctgcattatccgcatccccctcagtcgctgtgagcgttatggatcatgtaaaaagtcttgtattgcatctcgtgacccgtattgtggctggttaagccagggatcctgtggtagagtgaccccagggatgcttgctgaaggatatgaacaagacacagaattcggcaacacagctcatctaggggactgccatgacatggaggtatcttcatcttctgttaccacaatggtgtacgatgggaagtccagtctggagagtccaaccagatggtccacatgaatgtcctcatcacctgtgtctttgctgcttttgttttgggggcattcattgcaggtgtggcagtatactgctatcgagacatgtttgttcggaaaaacagaaagatccataaagatgcagagtccgcccagtcatgcacagactccagtggaagttttgccaaactgaatggtctctttgacagccctgtcaaggaataccaacagaatattgattctcctaaactgtatagtaacctgctaaccagtcggaaagagctaccacccaatggagatactaaatccatggtaatggaccatcgagggcaacctccagagttggctgctcttcctactcctgagtctacacccgtgcttcaccagaagaccctgcaggccatgaagagccactcagaaaaggcccatggccatggagcttcaaggaaagaaacccctcagttttttccgtctagtccgccacctcattccccattaagtcatgggcatatccccagtgccattgttcttccaaatgctacccatgactacaacacgtctttctcaaactccaatgctcacaaagctgaaaagaagcttcaaaacattgatcaccctctcacaaagtcatccagtaagagagatcaccggcgttctgttgattccagaaataccctcaatgatctcctgaagcatctgaatgacccaaatagtaaccccaaagccatcatgggagacatccagatggcacaccagaacttaatgctggatcccatgggatcgatgtctgaggtcccacctaaagtccctaaccgggaggcatcgctatactcccctccttcaactctccccagaaatagcccaaccaagcgagtggatgtccccaccactcctggagtcccaatgacttctctggaaagacaaagaggttatcacaaaaattcctcccagaggcactctatatctgctatgcctaaaaacttaaactcaccaaatggtgttttgttatccagacagcctagtatgaaccgtggaggatatatgcccacccccactggggcgaaggtggactatattcagggaacaccagtgagtgttcatctgcagccttccctctccagacagagcagctacaccagtaatggcactcttcctaggacgggactaaagaggacgccgtccttaaaacctgacgtgccaccaaagccttcctttgttcctcaaaccccatctgtcagaccactgaacaaatacacatactaggcctcaagtgtgctattcccatgtggctttatcctgtccgtgttgttgagaggatgatgttgtaagggtaccttaaaacaagagactcgcttgtattttaagagaaccaagtggccaaagaaactctttctaactttggcaacatcagaacttgccacatgtagctactgcagcaaggcttctgtgtacttgcctgaaaacaaaggaaggtgctggtcattccatttcttttgtttgaagctaaagagatgtgtagctcacaggggctaccttaccagtataaagagctgataacagtactcagaagaatctgtgaacaaatacttgaaaatgggttcaatgtagactgccattatgtgtggtcttcccattaaatgtgaacattttaatatgtatgcattcaccttgcctcttgcacaaatgtcaaaaaaaagatggtaatatctcaaagaaatgaacttgtagattaccaagcagtttgctaaaaattcaatctttgacccaagctgtagcatttttttttcatgtgtggcatctttttcatgccaccaacaaacttgttgtgtgtgtgcgtgtgtgtgtgtgtgtgtgtgtgtgtgtgtgtgtgttctgtacccactaggatttgtttaggtgcccattgcatctttttgtgctatggagttgtttacattaagcatgaccgaacgagagacaatactatttcccacaggagtccattgggttcagctttgaaagaggaatagaatcgaggctcctttgaccatcaaaatgatgaactttacttatgtggtacccaatgccagaatgtaagagttgcaagtgattttgtgctgctattcattaaaacttgtattccagtcttgccagcttaaggagatcaagatattaagaggtatccttgatttattttccagtattcagtagtaaaattttcctgtccactgtgaatcaaagcctgagtcactctatttaaccttggacacactaataaggttttattttgattgtgttcctttccccccccccaatagtaaaatttctcctcctttaactcctcctaccccccaaggtaagaaacaaaaaacaaacaaacaaacaaaaataggaagacaaaaggaaagacatatgaaaggaattgtaattggcttaacagaaacagtctgtaaaaacctaacagtggtgcaatcatgttgtctgtgttgtgttatgtgagaattttctcctaagtcatgcaggtaatgacaatatactgtaaataccacatgtgagtttacctgaatctgtgcattttgtgccttattcatgagaatgatagaagtactaaaatctgtcaagtgttttcagtatagcacattatttactgagtgccagttgtaaatgtttttcaaccagcacctaaaaagactcttttcaaaaaatcacagaaacaacctaggacaattatttgttacataatccgacctcatagcagcattacattctttgccgtgataaacattccactcctgctttcctaaggatgaaacagtgataatgtgaactcaaatgaggtttcctgggtaatgtgacacctgcagaaactatagagcgtcatttatacgtagtttggcagaaaccacttacggctgatgatgcgcaaccctgctgactgtttcagttaatatgctgcacaccacacacttgtttagtgaaccaaatctagaaagtaccaaggcagaggtatgctcctgctgtaatcaggcaaatgagttcaactggatttcttttgacaatactgttggtacctattacttgggggaggacatgttgcggaagaccagatcatttttatacagaatgtgaaatactgatacagttattcttttttttaaagaacattgttttataaagaacgtgatttccagtgatctctggaagcgctaaagctaaaatttctgttcttgaaacacttcagctttgcaactaaaatattacagattaataataaattaaaccaaccaatgataaacactactcagtccaccaacaacaaacgtgtttgaattcaccttaccaatattaatcccagcgtgtgtaaaacagaacagtaactctatgtgaccccagataacattttgtaacattgtgcttccttgtagtttgtaatgtgagttcaatcagtatttatgttgaaatttctaacattaaatctagtctctatcctgttaatttaatttttaaatgctttatccatttgtgcaaaggtaaacgcagattgtatcttttttaatggtacggcataaaaagtaaccctcaagtgaagtgtctctatactgttttatagagtactttaacatgaatagataccttgtaaacttgtattgtggatgtgtaaataatatgtactttgggtttttaacaccgcatgtaaagtcaaaataaaatatacaaatcattatatcctgcctcttg

SEQ ID NO: 114482 - DNA, 5890 bp, Homo sapiens
gcggccgcttcccaccgtccctctccccttactggcagagcgcgctgcgggcggactcccgggcccggagcagcccaccggccaccccaccgcccacccggctcccggtgtctcctcccggccgctctacccagcaactttccgtgctttgttccccgactggaaatgctttacggaagcgtcttggacagggtctccgccaggcgacaagagctcggtgctgagatgtgttacgttctcatctccccatcaattatggatggaaacaaataaggaagagtcaattttgctgagccccttctccggcaacgagaggcgttctgcagccgggagggagccgccgctcgcgccggcagccgctggcaggggcatggtgaggaggaaggtagctcagtggcatttctgagcaggggccaccctgacttcaccttggcccaccatgagggtcttcctgctttgtgcctacatactgctgctgatggtttcccagttgagggcagtcagctttcctgaagatgatgaaccccttaatactgtcgactatcactattcaaggcaatatccggtttttagaggacgcccttcaggcaatgaatcgcagcacaggctggactttcagctgatgttgaaaattcgagacacactttatattgctggcagggatcaagtttatacagtaaacttaaatgaaatgcccaaaacagaagtaatacccaacaagaaactgacatggcgatcaagacaacaggatcgagaaaactgtgctatgaaaggcaagcataaagatgaatgccacaactttatcaaagtatttgttccaagaaacgatgagatggtttttgtttgtggtaccaatgcattcaatcccatgtgtagatactacaggttgagtaccttagaatatgatggggaagaaattagtggcctggcaagatgcccatttgatgccagacaaaccaatgttgccctctttgctgatgggaagctgtattctgccacagtggctgacttcttggccagcgatgccgttatttatcgaagcatgggtgatggatctgcccttcgcacaataaaatatgattccaaatggataaaagagccacactttcttcatgccatagaatatggaaactatgtctatttcttctttcgagaaatcgctgtcgaacataataatttaggcaaggctgtgtattcccgcgtggcccgcatatgtaaaaacgacatgggtggttcccagcgggtcctggagaaacactggacttcatttctaaaggctcggctgaactgttctgtccctggagattcgtttttctactttgatgttctgcagtctattacagacataatacaaatcaatggcatccccactgtggtcggggtgtttaccacgcagctcaatagcatccctggttctgctgtctgtgcatttagcatggatgacattgaaaaagtattcaaaggacggtttaaggaacagaaaactccagattctgtttggacagcagttcccgaagacaaagtgccaaagccaaggcctggctgttgtgcaaaacacggccttgccgaagcttataaaacctccatcgatttcccggatgaaactctgtcattcatcaaatctcatcccctgatggactctgccgttccacccattgccgatgagccctggttcacaaagactcgggtcaggtacagactgacggccatctcagtggaccattcagccggaccctaccagaactacacagtcatctttgttggctctgaagctggcatggtacttaaagttctggcaaagaccagtcctttctctttgaacgacagcgtattactggaagagattgaagcctacaaccatgcaaagtgcagtgctgagaatgaggaagacaaaaaggtcatctcattacagttggataaagatcaccacgctttatatgtggcgttctctagctgcattatccgcatccccctcagtcgctgtgagcgttatggatcatgtaaaaagtcttgtattgcatctcgtgacccgtattgtggctggttaagccagggatcctgtggtagagtgaccccagggatgcttgctgaaggatatgaacaagacacagaattcggcaacacagctcatctaggggactgccatggtgtacgatgggaagtccagtctggagagtccaaccagatggtccacatgaatgtcctcatcacctgtgtctttgctgcttttgttttgggggcattcattgcaggtgtggcagtatactgctatcgagacatgtttgttcggaaaaacagaaagatccataaagatgcagagtccgcccagtcatgcacagactccagtggaagttttgccaaactgaatggtctctttgacagccctgtcaaggaataccaacagaatattgattctcctaaactgtatagtaacctgctaaccagtcggaaagagctaccacccaatggagatactaaatccatggtaatggaccatcgagggcaacctccagagttggctgctcttcctactcctgagtctacacccgtgcttcaccagaagaccctgcaggccatgaagagccactcagaaaaggcccatggccatggagcttcaaggaaagaaacccctcagttttttccgtctagtccgccacctcattccccattaagtcatgggcatatccccagtgccattgttcttccaaatgctacccatgactacaacacgtctttctcaaactccaatgctcacaaagctgaaaagaagcttcaaaacattgatcaccctctcacaaagtcatccagtaagagagatcaccggcgttctgttgattccagaaataccctcaatgatctcctgaagcatctgaatgacccaaatagtaaccccaaagccatcatgggagacatccagatggcacaccagaacttaatgctggatcccatgggatcgatgtctgaggtcccacctaaagtccctaaccgggaggcatcgctatactcccctccttcaactctccccagaaatagcccaaccaagcgagtggatgtccccaccactcctggagtcccaatgacttctctggaaagacaaagaggttatcacaaaaattcctcccagaggcactctatatctgctatgcctaaaaacttaaactcaccaaatggtgttttgttatccagacagcctagtatgaaccgtggaggatatatgcccacccccactggggcgaaggtggactatattcagggaacaccagtgagtgttcatctgcagccttccctctccagacagagcagctacaccagtaatggcactcttcctaggacgggactaaagaggacgccgtccttaaaacctgacgtgccaccaaagccttcctttgttcctcaaaccccatctgtcagaccactgaacaaatacacatactaggcctcaagtgtgctattcccatgtggctttatcctgtccgtgttgttgagaggatgatgttgtaagggtaccttaaaacaagagactcgcttgtattttaagagaaccaagtggccaaagaaactctttctaactttggcaacatcagaacttgccacatgtagctactgcagcaaggcttctgtgtacttgcctgaaaacaaaggaaggtgctggtcattccatttcttttgtttgaagctaaagagatgtgtagctcacaggggctaccttaccagtataaagagctgataacagtactcagaagaatctgtgaacaaatacttgaaaatgggttcaatgtagactgccattatgtgtggtcttcccattaaatgtgaacattttaatatgtatgcattcaccttgcctcttgcacaaatgtcaaaaaaaagatggtaatatctcaaagaaatgaacttgtagattaccaagcagtttgctaaaaattcaatctttgacccaagctgtagcatttttttttcatgtgtggcatctttttcatgccaccaacaaacttgttgtgtgtgtgcgtgtgtgtgtgtgtgtgtgtgtgtgtgtgtgtgtgttctgtacccactaggatttgtttaggtgcccattgcatctttttgtgctatggagttgtttacattaagcatgaccgaacgagagacaatactatttcccacaggagtccattgggttcagctttgaaagaggaatagaatcgaggctcctttgaccatcaaaatgatgaactttacttatgtggtacccaatgccagaatgtaagagttgcaagtgattttgtgctgctattcattaaaacttgtattccagtcttgccagcttaaggagatcaagatattaagaggtatccttgatttattttccagtattcagtagtaaaattttcctgtccactgtgaatcaaagcctgagtcactctatttaaccttggacacactaataaggttttattttgattgtgttcctttccccccccccaatagtaaaatttctcctcctttaactcctcctaccccccaaggtaagaaacaaaaaacaaacaaacaaacaaaaataggaagacaaaaggaaagacatatgaaaggaattgtaattggcttaacagaaacagtctgtaaaaacctaacagtggtgcaatcatgttgtctgtgttgtgttatgtgagaattttctcctaagtcatgcaggtaatgacaatatactgtaaataccacatgtgagtttacctgaatctgtgcattttgtgccttattcatgagaatgatagaagtactaaaatctgtcaagtgttttcagtatagcacattatttactgagtgccagttgtaaatgtttttcaaccagcacctaaaaagactcttttcaaaaaatcacagaaacaacctaggacaattatttgttacataatccgacctcatagcagcattacattctttgccgtgataaacattccactcctgctttcctaaggatgaaacagtgataatgtgaactcaaatgaggtttcctgggtaatgtgacacctgcagaaactatagagcgtcatttatacgtagtttggcagaaaccacttacggctgatgatgcgcaaccctgctgactgtttcagttaatatgctgcacaccacacacttgtttagtgaaccaaatctagaaagtaccaaggcagaggtatgctcctgctgtaatcaggcaaatgagttcaactggatttcttttgacaatactgttggtacctattacttgggggaggacatgttgcggaagaccagatcatttttatacagaatgtgaaatactgatacagttattcttttttttaaagaacattgttttataaagaacgtgatttccagtgatctctggaagcgctaaagctaaaatttctgttcttgaaacacttcagctttgcaactaaaatattacagattaataataaattaaaccaaccaatgataaacactactcagtccaccaacaacaaacgtgtttgaattcaccttaccaatattaatcccagcgtgtgtaaaacagaacagtaactctatgtgaccccagataacattttgtaacattgtgcttccttgtagtttgtaatgtgagttcaatcagtatttatgttgaaatttctaacattaaatctagtctctatcctgttaatttaatttttaaatgctttatccatttgtgcaaaggtaaacgcagattgtatcttttttaatggtacggcataaaaagtaaccctcaagtgaagtgtctctatactgttttatagagtactttaacatgaatagataccttgtaaacttgtattgtggatgtgtaaataatatgtactttgggtttttaacaccgcatgtaaagtcaaaataaaatatacaaatcattatatcctgcctcttg

SEQ ID NO: 114483 - DNA, 662 bp, Homo sapiens
gagagagataaaatgtcctctattaatataaataagactggtattaatagtgtcttagtccattttgtgctgctataacagaacacttcagactgggtaatttgtaatgaacagaaatttatcgggctcacaattctagaggctagtaaggccaagattggggggctgcatatggcaaggaccttcctgctgcatcatcccatgatagaagcataaaagggcaaaagagcatgtgtgcacaagagagcaaaagagtgaactcacagcctcaaacccttttataatggcattaatcattcatggggatggtgccctcatgacctaaatgcctcccattaggcctcatctcccaacactgttacactggggattttcaacacgtgctttctgggggacacatttaaaccacagcattccaccctggctccccaaattcatgttcttctcacataaaagacacattcatgtcatgcaatagccccaaaagtcataactttccagcatcagctcagaagttcaatgtacacagtctcatctgaatcagatatggatgagattcaaggcaggattcatcttgagggacacttccctctagctgtaagcctgtgaaatcaaacaagttacttacttccaaaatacaatggtggaataggcaaaggata

SEQ ID NO: 114484 - DNA, 229 bp, Homo sapiens
ccttaacttagcaatgtaaacctccatccatgaaaagcacctgctgacagctagtcattttaagaaatatagcatttcttaaaatggtacatgagaaagtttgcagaagcaattgtctagaacccttctggtcttgcttcacactgccagctgagttatcttcctaagtgaatcacagtagaatcctgctttgacgcatttctaaccagttggaccagctgcagctcac

SEQ ID NO: 114485 - DNA, 135 bp, Homo sapiens
ttggagaaaggaaaccacaagacaaccctggaatatttagtgtcagaaatcaagggagtgctcaaagattggaaaagacatgtctaggtaggatgcggtggctcacgcctgtaatcccagcattttgtgaggctt

SEQ ID NO: 114486 - DNA, 208 bp, Homo sapiens
ttctttctttttttttttttaaactgatttttgggggagagaagatctgcttttttttgcccccgctgctgtcttggaaacggagcgcttttatgctcagtgactcgggcgctttgcttcaggtcccgtagaccgaagatctgggaccagtagctcacgttgctggagacgttaagggatttttcgtcgggccttttttttttttttt

SEQ ID NO: 114487 - DNA, 141 bp, Homo sapiens
attcctgttgttccttgttccccacagcatggattctgatttcctgtactgattccctcatcttcagaactgactctctgtgactcagtagcactgatccccaccgaacaaatctaaaatagacaacaccttccaggtctg

SEQ ID NO: 114488 - DNA, 409 bp, Homo sapiens
ggaatttcacaagataatgtcatcagttaaggcaggaactgaccattttcacttcttttgtggtggaatgtcatcatttaaggcaggaaccagccatctggatgtgtacctgcaggtcacaggggatatgatggcttatagagttttccagtaagataaatttgccttatggctctattacttccttgctgtgtgaactttgataagttatgtaacccatgtgctttaatatctttaacagtaaattagaaaaatgtactattcaagcctgtgctttcattgctatgcactgtgtctcaaaataaagtgcaaaataaaataaaatataggccatatttatcatggagagagcaatttaatgggggaagacacatattaatttaataaaattaattttttacaaagaaca

SEQ ID NO: 114489 - DNA, 525 bp, Homo sapiens
cagtaagtcttttcagaaaaaagcaacgaagaaagctctagaccaatgagattttagtcatcattaatcaatgccaagcgaaaaaatcttaagatgtatttaaatttgtgatgccagtgtgattcagaaatttgaaaaatggatttcaaagtaatgctgtgagcagataggtcattgtataaacataactaatggttcattcattcattcctacaataatgattcagtgtcagatttgggtgttgaaaatacagcagagaacaaacacaacagaaggtccatatttgcggagcctacattttgtgggggaagagagatgataaacaaaatgaatgagttaagtagatagcacgttagatcatccaaaatgctatgggggggaaaaaccctgggaatagggagatggcatgtgaagtggaagaaggttatgattttcaatagagtgatcagagaaagcctcattgagaagacacgctaaggaggccatgtggctggaggggactgagttagggggtgaatagtagg

SEQ ID NO: 114490 - DNA, 459 bp, Homo sapiens
ggccctacgcctgcatccgcgtatctatgtaccgtcgtctacgccacgctagtatgtagaaaatgactaaagtcaaaagtaaagattcctaagagtcattctgaccggcatgtggggccagggacagtgctggaagatagaggacaggcggttccagatgacctgcgagatacactgaagccctgcattcctgcccccacctctccagaccaacgccagcctcacagtagtagagtagttgatgtgtttcaataaataaatatttctctaggcatttagtaaagccagggcatgtgatccatttatttggaaacagaattttatgtagtgttttattatttttcccttgtaagacttttttttcccaaagaagagtactcattaatttcaaccatggcccttaggtatgttgaaatcttctacttatattggctaccagagaacctaagttcaaatacc

SEQ ID NO: 114491 - DNA, 303 bp, Homo sapiens
ttgatatttctgcaagttaaatgaaattgcacatctgcttttaataaagcacagcacacttgacttaataccagtgtctttgcagcaaaattcaaattctagattcttatgacccaattaggtctctaagtgaaaatgttctttatttactcttttccacttaaatctggctttgccgggagcaccaggtttagtaatctgattaacaagtaggcagatgaaagcaaagaggcagccttcatattcatgttgtaaagacctccagggattactgagaacaaagataagcagtccccatcaatg

SEQ ID NO: 114492 - DNA, 375 bp, Homo sapiens
tcagtggctcacacctataatcccagcagtttaggaggctaaggtgggaggattgcttgaggacaggagttcaagatcagcctgggcaacatagcaagatcccatttctacaaaaagttaaaaaatgtatccaggtgtggtggtgtgtgtctgtagacccagatactcaggaggctgaggtgggaagatcacttgagctcaggagttcaaggctacagtgagctgtgattacaccattgcactacagtctgggagacagagcaagaacctgtctgaaaaataaaaataagtattatttttaaaaaggattaactgaagtgaaggttaaagagtgaaatattttttaaaatcttgacaaaactaacaagaattgta

SEQ ID NO: 114493 - DNA, 286 bp, Homo sapiens
gaaattttagagtttaaaaggatctagtagggtttgtttggaagcctttttcataaattcagtcttaacatgaaagcagagtggtgatcctacagctgactgatctcacccaacaccctcgtttttcagataaactgaggtccagtgaggttttgtgacttaatccaggatcgtcaatcaagatagtaaaaccagatttagaccaggtcttctgattcccaactgaatactctttctgtctcacaatagataaaaaataagttgctttgaaatactttaatcctga

SEQ ID NO: 114494 - DNA, 460 bp, Homo sapiens
ttgtgtctcccttactacactgcaaactcctggcagaaggaatggcatctgtcttcattgattcctagcacatgctgcagtttctcacacacagcaggaacttactaagtttttacttaatgaacaagtgtcatcgttatttatttgttttagctttcttgtcattatttaaagacagatttgaaacaagaattatgaatcatctttgtactttctacaatgcctagcatgacatctaacacaaaggacagacctgaaaaaatcatttagtgaggaaataaatttctccatcttatgctgcttcatcggcaggtgaggaatccctccccactctcctgtggacattgcacctggagggaatgatgttagaaccaaatagaactttgcctctggctttttcaattatttctctacctttctgtagtcacttttaatctggactccccactttctcattctg

SEQ ID NO: 114495 - DNA, 659 bp, Homo sapiens
gctgatgcaaattttaaacagtccattgcaattttgctcaatggctttaggtaaaaatgctgatgctagtgtcccagagttccacttactttcctggcttctctacaaaatgactatggatgtataaagaagcttattgggtcttaatagtgtggggttcaaggggaggaagccccacctctgtatgggatgtccctgtaatgtcttcttaccctggggcttctctgtcctggccatctgtttgccagtctgatgccagagtctgtatattatgatttgtttgctgtttattgacttgttcatagtgaggtagagtcaaggactagctatagctcacttaggctcccattgaccctccctgtgtgtctttgccataccctccacctggactcctggcctgcttctagcttctgctggtagccactttgccaggccacagctgatctgatggcaaaatctctgtctcccaactcagcacccatgctacatgggaaccaagggaggctcatttttgggaggctagcccaaaagatgacaccctcaaggctactagtgtaaaagcctagactcatgggggactatcccggaatgacccaaaagggagtagggatacaggaacataatttttcttttttttttttttttgagatggagttttg

SEQ ID NO: 114496 - DNA, 458 bp, Homo sapiens
agtgggcctgaaatgtaccatatgcaaacaccacaaaataaggatgtggagcctatggtgtgtcatgtgtagtcatttagctgcttttgtcaccagagttcatgaggaggtttccagaatttagtccaggtgaagtgagagggcagaagaattatgtaatatgatagaaatgtttatttgagtcagatttcggagagaacccctcctcaccctttgggacactattgccctcaggttctctctcaggcactcccgaggccgctgagcctcagcctccaggactttcctcttgcacgtactgtatgtggaaaactatctagagtagcagttgaatcttcagaaattttagaaagaaaaatgacagcatttattaaagttgatgtgattttttccccttattgggatgagtttggacgatgtgtgtcagcattgaatgagccttttatcaagtccagaac

SEQ ID NO: 114497 - DNA, 367 bp, Homo sapiens
aaaaagtagtgggggctggaaaagttctcgaagaaataatggctaaacgctctccaaatttggcaagagatataaacctacagattcaccaagtttactttcaagttttctaaattacatttgatggttgaagcaaaaattacaacactgtctgatgtggttctaaatgaatgtatgtttaatatgtatgtatattacaaatataaatgggagagaataatgggatataaaggaaggtaaggtttctgtacctcacgctggtaaagtgacaacacccataaaattgattgtgagaagttacatgtgcataatgtaataccaagggtagccactaaaaaagctatacaagaagacatactcaaaaaca

SEQ ID NO: 114498 - DNA, 425 bp, Homo sapiens
aactgcatatgtgaaggtgtggcctcatgaaaccacagcacactgttaggagctaccagcctgtcacaagtgggtgtgaaggttgcctagaggagactaccaggagataacactgaaggggtggattaggaaagcccttgtgcaccatcttgaactttaccttgaatgcaatggagagctgtgaaagggctttaagcaaggcccaggcctcactgaatctgtggtttagaaagaactctctggttacaagatgcagcatggatgcaagcgaggttagaaaaaagtgaacatctggacaaaatgaggactcttgactgtaaggaggaaggaaagaagtggccactgggtggagaaccaagtgtaacttcatccaagtgaagtgtgaaaacttctctgaaaaaagatcatataaaatctggattctc

SEQ ID NO: 114499 - DNA, 921 bp, Homo sapiens
actgaaactttcaatgtttagagaccagtgagagaaagaaccagcaacagagactcagaactatatcatattctgctgataagccaataagatgataatgataactaagaattgacattggctttagtgatgtagacataattggggaccttgacaagagcagtttactgggggtggttgagttgaaactttgattgtttcaagagagaatggaatgagtggaaagatagtttgtgagtgctagcaattattcagagaatttctgctataaatgggagcaggaggatgtatcaggagctaatgggagaaatgaggtcaacattatttcctgtgtagctttctcttatgcccaaattccactggatatcatccacttctggttacttctggtttgggatgtataggtgaaggaatagttttggatcctcctttattacctgttttatttgcataattggacaataactaaacttgctttaaatatctcttaaagcattttaaattcaaatttggagagaggaatatgagagtggtttttggtcattgtttagccatatacaatattgtcttaccttctgcatttgaagtttttgatacctgataaatgtttgtattgtgtagttgaacaagaatttgccacatgaaggtttacagttgtagttttatgttaagttctttacagtagtcccctctcatctttatcccccacttggaactatctacagtagttccaggacccccccctcccagtggatgattgaaaccatggatagtaccaaaccctatatacatattatgtttttcctatacatacatacctatgatgtttaatttctaaattaggcggagtaagagatgaacaacaactaataatgtaatagaacagttgtaacaatatactataataagagctacatgaat

SEQ ID NO: 114500 - DNA, 372 bp, Homo sapiens
gctgaggtgggaggatggcaggagttcaaggttacagtgagctacgattgcaccactgcactacagactgggtgacatagtaagaccctgtctcttttttttaagtctcattttagctaaaaattggggcaaagagcagcaacagggacaaagaggagcatcagagccaggaatgactggcaaaaaaataaggaaaaatgcaagaaatctagtgcccagccctgagaccacagatcctcaggatggggcgctggtggaccagaaaccccaccacgtgagaaggctgcactttaaattagaccgtcctggtgtctgccttggtcacaaaattagagtggagataagcaacacagacaccagccctggcctcag

SEQ ID NO: 114501 - DNA, 375 bp, Homo sapiens
atcactgcactgccattgccacaagggggcagccacgcacagggccaggctcgggatggaagtgtatctgccactaccagggagaactgaggagcctgcgtctcctcactggctagacaggaacaatagatatggacacctcatagagttgccttgagagcacaagtgagctgatgttctctcaggagtgagagttcccttctgcttgtctgaactaaactgacaacagctaacatgtattgagcagctgcgatgcattgggcatctcctctgagcactgtttgcatgaacattttggggctcagaacacaattccaaagcatggcgccggggccagcagagagctttgaactaacggaaattggaaggcctcag

SEQ ID NO: 114502 - DNA, 488 bp, Homo sapiens
tctagacgatccctactgatctgtgctcagaattggtagaaatgaatggctcttaagaccaccaggctcttccttgtcagaacctgtcccctaggtcctgccagtgctacgaggcaaggcgagttttccagcgatgcctgctctttggaaggaatattgagaacgggttaaacgggcctcaaccgagaggaaaagggaagccacgctagctttttcctatcagaacaaatgaagaatccctgaactggggaaggaaggaaaagctttgaaaactgtaactactcaggttatttggtgcagagaaattctaaatgcaaggtatgcatgcatttaatctgtaatgatctacagccatacatagcattttaagatgacaccaaattttagttgctgaataattccattgtttagaaatcgactgaacatttaaactcatggcatcatggaacactatgtagagcatgattggagactagcattgataaagt

SEQ ID NO: 114503 - DNA, 451 bp, Homo sapiens
gtttctgttaatttctttttttttttttcctatgactgggccatattttcttgtttctttgcatgcttagttttttgttattgtcattaaatactgtacattttgaatattatgatgggcaaaaaggaaaaaaataagaaaaaaagatatcttctccaggtctgtgcattttggttctgtatggggacactacttcagtgcttagccaggtctttcacaaccctgccttagtcctgtccttagcctagagattagccagaggttgaagttatgctcccctcagatctcttctaagcatgcattctgccctgagcattcaagtggctttctagttccctggtatacttgagcactttttccaagactttattccccaaagattctcattccctaccttttctttccttggctttcagcatatctgttgtttgtctcaactgtgcttttgccc

SEQ ID NO: 114504 - DNA, 323 bp, Homo sapiens
gcaaatggaatattttcttaactcaagaaggaaaagaccttgccaaaccattttttaatggtttctgccatttcttgactccctggctcaaacaagaatttttaaatttttgttttgttgtgttttattttgtgttcctttactgattattggatatttaggctcttgctactgaatagcaggttcactgtgcagtggttaccaacttcagagtccagtggacagaatactcatgcatgtaacatttgcatgaagaggctgagcacagtcactcacacgtgtaatctcagctgtgagaggaaggctttgggaggctgagaaga

SEQ ID NO: 114505 - DNA, 702 bp, Homo sapiens
gggtttgaacacgttggccaggctggtctcaaatacctgacctcaggtgatccgcccgcctctgcctcccaaagtgctgggattacaggcatgaaccaccacgcccggccagaagaaatctttattttggtgtgcgggctcggatgagggccaaatgtcatctatcttggatctgaatctggaaggatcaaggcactgaagggatttttttgtttcagagagtctccctctgttgccaggctggagtgcagtggcatgatctcggctcctgcaacttctgcctcccaggctcaagcgattctcctgcctcaacctcccgagtagctgggactacagccacgcgtcaccacgcccagctaatttttgtattttttagtagagacagggtttcaccatgttggccaggagtgtctcaatctcttgacctcatgatccatctgccttggcctcccaaagggctgggattacaggcgtgagccaccatgcccggcctcactgaagggattttttttaatgtcacgtggctctcacaggtgcagtgtgttcaggtgcaagtgaagattaggactgatgcttaaaaccaaacgtaaaattccaggtggtgttactatggggaagagcattaggacaatctgaatggtttcagttgcaagagtgtgcgtatacgtgcaagaactacagtcaagattcaacttctggctt

SEQ ID NO: 114506 - DNA, 466 bp, Homo sapiens
tctgtggcatgctgccagccccacccccccaggcttttggtctctgctggtcctttcatctccacaaagggccagagtctgttttcctaatttctgggtgagtgtttcatatgcatctttagagttcattcaacagatatttatcaagcacttactattaccaccactttaagcagattacgattactctaacacatactttccagtgcctctggaaagctccacaataaactgctatatggcagttcctaatgaagaagatctgctgtaaaacaaaggtttagaagcagcagataagttaggatggagaggaactggatttttgaaagataagagccttatcaggtaaaaacaggttggactgcgccttgtaagcaaaaaggaattctatgaaggcacagagacagaaaaaggctggtgtgtttagagaggtataaggagtctggtattggtaacgctgaaaatg

SEQ ID NO: 114507 - DNA, 472 bp, Homo sapiens
ctacaggtgctgctgtccaggcatgaggcctggacatagagctgggccctgctctatgtgacctgaggacagaagcccttgtgagtggcagagttgtggtggtgaccacgcagactgctgtgtttcccgtgcacttgcttttttccctcacttccaacctcccatccaccttgtctgccctctggagcctgtcgcctttcttccttgtccacacctcttctacccagcagcccagccttcctgcagagcagctgggcagtgcccacccccaccccacgcccatttccactcctggcactatttttcctggaactgtctgttccacactgtcctatgcctgggcctccccgagcgtcctgtgagatgccagttggcgagagtctttgctcggggtcctgaagcccccccctcgccccccttcttgatgttctccaccaggattctcctgtgccagatcccatctgcagggcac

SEQ ID NO: 114508 - DNA, 438 bp, Homo sapiens
gtgtgtgtgtctgtgtgtgggtgtgtatctgtgtgtgtgtgggcacgtgtatgtttgggtgtgtgggtgtgtgtgtgggtgtgtgtatctgtgtctgtgggcacgtgtgtgtgcacacatgtgcactcaggtttaggagagcgacagggggcacagaggaagaaaataacaggaaaaagtcaagaagaaagagccaccttaaagcatctcaggaattcatctctcgagtcaaatcatcaagaagtgcccagtccctcaaggctcatcttgatgtggaagaggagttgacctctggggagaggctctgcccacgcggcgcagtgggaatccagaggccagcgcgccagtccagcagctgtgaccttggaccttgggcaagtccctgacttctctgagcctctgtgtccagccctataaaatgaggggtgggattcctta

SEQ ID NO: 114509 - DNA, 283 bp, Homo sapiens
acgaggtttcaccatgttggccaggctggtctcaaactcctgacctcaagtgatcagcctgccttggcctcccaaagagctgggattacaggcatgagccaccgtacctggcctaatttctgtcttctgttagcttccgggttatgtattcattatcctttaatggctaccttagagatggttatatttatttatttatttttttgagatggggtctcactctgttatccaagctggagtgcagtggcataatcatggctcactgcagacttgacctcccagg

SEQ ID NO: 114510 - DNA, 204 bp, Homo sapiens
tacagggggttgatagtggtggtagggggataggaaatatgggtttaagaaaagctagtttctttctaaaggtactgtaagactgactcactaaataaataatgactcactaaataggcaaatgacacttagattcagctaataacagataagttagaatctctttagaaaatgcttcctcaccctaggcattgaatctgttta

SEQ ID NO: 114511 - DNA, 682 bp, Homo sapiens
tgacaccatttccattattgtgataaagtaagaaaaattgaaaatgctgtttttccaaattctttccttctttctttctttctttctttctttctttctttctttctttctttctttctttctttctttctttctctttctttctttctctctctttcttctttctctctctctttctttcttttctttctctctttcttttgctaagaaaggtgatttggaagttctcgtgcaccaaatgtagtctttgttaggattagccaaacatggctaaatgttttccatgatcaagcactcacataggaggtcactggttatattagcaaggtgtataagttatctctggcagggaagttttgttttttaaaactgctacaatcatgtttgctagcaaaatgaccaaattcaccctcaaaagtgggtgagaaacatactcaacatattgagagagaatatacacaacttaaggagagctaggggtctgaattagcggtgagtacatacaatactaagcaaatgaattaaataagacaattattaattccaggaatgcaagttatccagtggaggaaatgtaactagagaatactacatgtcacagttctgaatagagcttacataatcatagcaataaaaacggtaatcattgagaaataaaaatatatattcaccagtacataca

SEQ ID NO: 114512 - DNA, 495 bp, Homo sapiens
ccccattcccacccagagggcagtgccccattcccatgccagagggcagtgccccattcccacccagagccgcggggggtccagagccagggagagggttctcaagttgagtcaagatgcccaagcgcaaaccaggcctggccattgcaaaccagcacctgtctcgtttccttccagctgtcaactgctcccttgcctgggcctccatgccctgcctgctcctctctgccaggacttggccagggtacagtgcgtgtgggggtatacctgggcctgagtggcagttagggggccccgcagtgaggaacagcaagcatgggtttggtcccggtgtcccctcccccttgcccagcactctcttgaggctgatgatttggggagacgccagtctgaccacagcgactcaggtgcctgctccctgcctgctccctgtcctcctcaatgcgttgcttggaattcgactcaagaaaacccctggggttgagtattctgttc

SEQ ID NO: 114513 - DNA, 333 bp, Homo sapiens
ctttgtctctggcccttctccactctggaatgctgcattccagtgcaagagtcaagctcagagcttgaccagtctttccagtctgtcaaagtggtggatggcagatcaatacaacacaatgtctcctgggccatctcaagctcactggtaacccatttgcttggcactgtcttccccatccctccatcacctcctgcaaattttgtgctttcataatggctgctcctcagctacagcatccatatagtgctcctttgcctggcttacttctacttagcctacacaatgcagcttggatgtcatcgacttcaggaggacttctgtgacagtatg

SEQ ID NO: 114514 - DNA, 287 bp, Homo sapiens
tttatggccaaataatactatactgtatggacatacagcacattttgtttatccatttgtcaagtgatggacatttgagctgtttctgctttttggctattagaaataatgctgccataaacatttgtgtacaagtttttgtgtggacataaatatttccatttgtcttagagagtagaattgctggatcatacagtaacggtttcatcaaattattctaaagtggctgcaaaaatcttctgcctggggcgctaaataaagaatgttgaggtttcatcataatgttt

SEQ ID NO: 114515 - DNA, 690 bp, Homo sapiens
caggtcacaagggcaccggcctcggggtctctccaggcccagcagagctcttcaggggtcctgacactggaagaagagaccacttgagccatgtctttttcacggccaactcctgcctctaaggatgtctgagctcccctctggccagtactgcccacctctaccttgtccaggcccccttccccgccctgtcgacggaccgccaggcagggcactctgccttctacctcccggggtctcccatgcgctcctcaagccaggtgtgcacgtggccctggccctggcctgcaggacagctggggggcacccagcccccagaagacccctgtcctacatccctttctggaagtgagtgtccctacagtggattgcaacacatgtcgtccacttcgaccctagctggagtgcctcaccagggggccccactaggaacaaagccaggacaggccccgcgtcaggcacacactaacaaaaccagaagcatggggcagggcagggcggagtgagggcatcacaggggaccaagaagggctgtccttgggggaggcccaggaccacctgtcggggagggggaccgcagtcatttctcattcctcagtgtccaccttgcgacggggatagccacgagtcagcagcttcccggaaagagcaacgtattttaaaaaggaaagtaaagcccacagagggaaa

SEQ ID NO: 114516 - DNA, 148 bp, Homo sapiens
gctcaatcttcaaaggaatgactctcagagttgtgtcccctgccttttcttcaccatggaacttttcccagctccactctggtgggcttggggacaggacctgccctctgcaaagtgatgaccaaggataagtcggattttcaaggag

SEQ ID NO: 114517 - DNA, 457 bp, Homo sapiens
cacgagccactgtacctggcctcagcctgcttttcttgtatagactctaaatccttcctgctacaagttatacccaacaggcggggccaactggaatggggtgactaatacatccacacctggcttcaacaaaaatctcccatgtcacggtcttgagtttgctattgccagcctgctctggccagggaaatctatgatagttgtattcatcatcatcatcatcatcatcaacatgccttggctgttattgtataggcccttgccctgtggctctcaagagtcctggataatgtacaaaggacatagcttagtctggcttgcagaattgtagtattctattgactcctcagtacctccactgcatcatgggcacaaacaatgctctctaccagggcctggcaacagagtccgatctggcccacagcttgttattgtaaataaagttttattggaacac

SEQ ID NO: 114518 - DNA, 306 bp, Homo sapiens
cacgagccactgtacctggcctcagcctgcttttcttgtatagactctaaatccttcctgctacaagttatacccaacaggcggggccaactggaatggggtgactaatacatccacacctggcttcaacaaaaatctcccatgtcacggtcttgagtttgctattgccagcctgctctggccagggaaatctatgatagttgtattcatcatcatcatcatcatcatcaacatcatctccaaggttctttttctaccagcccagcaggtcctgcacatgccaagcccaacccacaggccatggat

SEQ ID NO: 114519 - DNA, 240 bp, Homo sapiens
cagtgagtgcccatcttctcagtacatcagctgcagggctctgatgggaggctagagtggcaaggcaaggacacaggcaccatccaaggcagctgctgagggcactggctcactcaccaagtcagccagttccggctctttcctttcctttttaaatttcttttcctttcttgcctatctataccatatatctcccaagagcagctagggctcaatcttttgataccactgactctgctt

SEQ ID NO: 114520 - DNA, 139 bp, Homo sapiens
gagctggggctaaatgcagtattggtttttgccttattgttttttaaataacattgttgcatgtgcccaattatagataaatagaatcagaatttttgcagatgaggtccctctcagtatttttaataagatgtttagg

SEQ ID NO: 114521 - DNA, 322 bp, Homo sapiens
gaaataaggaggttttaagaccagaactgtgatttggattctagctccagctcgccctcctactcattagctgtacgaccttggtcaagttacttaaactttctaaacctcaatttttttcactaaaaaagagattaccggctaggcatggtggctcacgcctgtaatcccaacattttgggaggctgaggtgggaggatcgcttaaacccagtagtttgagaccagcctgggcagcatagtgagacctcatctctacaaaaaataaaattagccagacaagtggcacatgcctgtagtcccagctactcgagaggctgtgc

SEQ ID NO: 114522 - DNA, 320 bp, Homo sapiens
ctgtggtcagtgaacagaaaaggcagcctctgatgaggcttgggggctggggagggaagattccaaacagcaaaggagtttgagcctctgtagggcctggcggtcctagtgggggaacggcctttcctggggccccccgcacagccaggagcagctgtcgtcaaggtggactgtgtcccagcccctccagctcagccttttcatctgttcaagctggtgctcgggagtgcacaggatgcctttcagaagaattctaaatcccgggggcctgtgatgccacagtcacatgtctgagcccaaaacaagagaaccacttgtgt

SEQ ID NO: 114523 - DNA, 344 bp, Homo sapiens
agagagagctggccaaacagtgggaagacattgtctttaagcgttaagagtactttcagggttagccctttcattatttccttgtgaggcaagtttgtagaagcagctgtctaaaggagggaaagtggcttggtgatgttaaagatgtttttggccgggcatggtggctcacgcctgtaatcccagtactttgggaggtcgaggagggtggattatgaggtcaggagatcgagaccatcctggctaacacggtgaaactctgtctctactaaaaatgcaaaaattagccgggcgtggtggtgggtacctctggtcccagctactcgggaggctgaggcaggagg

SEQ ID NO: 114524 - DNA, 195 bp, Homo sapiens
tgctctgcccctctctgctagaaccctaacttgccacgcactccacaggtgccatgcacttcctgcttggtgcctctgctagggtcctctctctgaaacaatctttccttcttctccaccagccaactcctcttgacccttctagacccctcttctaggccctgcttctctaccctcagtgcccccagagagggg

SEQ ID NO: 114525 - DNA, 401 bp, Homo sapiens
gctgcaggaacacagagagggcaggctgcaggaacacagagagggcaggctgcaggaacacagagagggcaggctgcaggaacacagagggggcaggctgcaggaacagagagggcaggctgcaggaatgcacagagggcaggctgcaggaacacagagagggcaggctgcaggaacgcacagagggcaggctgcaggaacgcacggagggtaggctgcaggaatgcacggagggcaggctgcagcacctacggaataggcatggggaagaaattcccaagagggaggctgacaaaccagtcatggcctccactggaggcttcgcttccctgagctggtggaggggactgccctttgctgggagagtagggggtgaggaggacccttcgacatgccttttc

SEQ ID NO: 114526 - DNA, 297 bp, Homo sapiens
aaggaaaatccacttatttgaatatccacacacaatccagatttggccccaccattgccaaccacttctaggttttaaaaatctcatgctctttccactaaagggctctgctctctctactcacaagactgttgggaatgattaaagtgactttgtagggagtgcctagcccatggtctgcataaccaatcttagctctgcttcccttgacttcagggaatgggacacatccttcatctatgcaagtttctctatcattttatttgcctacaaggtcctagtaaatgcaccagggta

SEQ ID NO: 114527 - DNA, 440 bp, Homo sapiens
gcaaaacataagaaataaggcaggggaggcaggtgcagccttgacaacataagaatatccaaacaatgttgtcaatatcaaaagaaaaaatcaaaacatcttttataatataaaataaatccatataattaagtactaattaggtgaaataacattatagggtatataacgtttattttctctatttaaatttgcatatcttaaatttatttgtttttattttattttttcctgagatggagtctcactctgtcacccaggctagagtgtagtggcacaatctcagctcactgcaacctctgcctcctgggttcaagaaattctcctgcctcagcctcctgaatagctgggattacaggcgtgcactaccatgcccagctaatttttacatttttagtagagatggggtttcatcatgttggccaggctggtctccaact

SEQ ID NO: 114528 - DNA, 190 bp, Homo sapiens
aaagtcctctcagcgtcattttttgtcctgtccagatggatattcttgatgagcattttttacatcattccctcaggcagtttgataaattgttgcttttatgcctgctatggccccgttctgaaaaatgaagttaaaatgatatttataattattcccataattggagcaaggccagagctctgtgtat

SEQ ID NO: 114529 - DNA, 768 bp, Homo sapiens
caaacccactccagcctgggcgacagagcgagactccgtctcaaaaaaaaagctgctaccctatatacagaagaagccctctggggaaaaaaataaaacactgcagggaaaacttataattgtgctttttaagttttacaatatgatttttaacagtatgattcttgttaggagtatcatcctgacagtttttaatacagatatttctgtagtttgttttaccaggacaaacctagtacttaatggaagaatgcatgtgagagtctatttaggtcactcttgaagacagaatttgtaccctttgtctacctccaggtaggaaagtccatttaaaactcaattttcttaatagtaatattctgatttacgtaagaaaagttataaagcttttagtgttaaagcattaaaaaaatcaagtcctgatacattccacaaaattgtaagtcagtggagtgtttacagatcatttcactctggtgactaactcttcacttcctatcagtaatgtaaaatatgaaaaagttcaactgatttggtttaatcatagtatatggttcctatacccaaaacaaacaaagaaacagactaaatactataagagtgtattatagctcagctaaatcatggtttgaactaaagtagatattatgctaagaatgacaaccagacaaggcataaaggttggtttatttttccaattctacttacaagaaaatagttatgcagttcacaattagaaaataaagctacaaatattttagaagagaa

SEQ ID NO: 114530 - DNA, 758 bp, Homo sapiens
acagactttacttcgtgtttcattcttcagcagtcagagttctttgccttccaaaactatcctcctctgaaaggttaaaattatattaaaattgtgctgggcattataacttgtattctagtgttaaatgcttactacttgagcatattcagagttagtaggaagagactgcctggtgatacacatcaagtttatgtttggggttgataactgtaccctatcttaatgaaaaagaggaaattaggagttaccattgtttggataacgtggtgcttcccagaatgcttatagtggttcattcttcccatgaatacacgcaatcctctgaaatcctgatgtgaccttggcatgatttaccaatagcctcttttacatttattttccaagatccagatgctgttctctagtgtgtttgctgagtgtgcaataatatggatcatttattttgaagcagtacttcattacaacactttcttcacagggctttccaaaggaagaaagggctaattatagaaaagaatcttgtctaccatttgtgagggaatatttttgtctgtagatggttggattattttcacattagggaggttcaaataagaagaaagtgctgacgttttctctcctctccaagtatgtggtggtggtcctgcactgtttttccaagcttagcttctacagaacataaatacatgtaccagtgtcaattcttgtagatatgcatatcagtgtaatatgcatttgtattctttagtagatga

SEQ ID NO: 114531 - DNA, 167 bp, Homo sapiens
tggctaccttcaggccatatcacaccagattctatttagatctgtctccctgccatgaacccctcaagggcacagactgtgtttccagcttcagatttcctattgcctattaaagtgtctgtcacttcatacatatctggtgaataaatgaatgaatgaatgagtga

SEQ ID NO: 114532 - DNA, 231 bp, Homo sapiens
ccacctgtctgcattctgatattttacctgataggacaaatttgccttaggtaaacctttataaacaggcatgatcttttagaaactactcaaacgttttaaaaggaagagcaagagcaagtgtcagttatgacacttgaagagtcataactggttacctttgttacagtttaaaaaaggtagcactttctgtgtttcacagggtgaatgccttcatccattggaacctga

SEQ ID NO: 114533 - DNA, 214 bp, Homo sapiens
ctggcaatccacgcatgggggtgcagaaacagcatgctagcgggcaacgcgcagaggggaggggaaatgacacggatgccaggtggtcagggcgcagggcctgaggcagggagacccgctgctgctgagacaggcaggctggggacagaacctacatgctgcccaatgctgctgactttatcctgtgccatgcgtggatacatggtccgactta

SEQ ID NO: 114534 - DNA, 365 bp, Homo sapiens
atccactctcactgtggctctatttccaccgtttccctggatttccattcacagagctccctgacataggacactagaagggcaaacgcagtgtcacctgccactattactcaattacttgatgaccacggtgataatctggcactaaactggctgtggccaaaggctagagagccagaacctacttccagcaagctcctccttgccctgtgtccccacttgaagagactgctagtgaccacaccttggacttcaatccacaagccaatccattctttccaggagacaaggacgcgactgacagtactctcaactggagagaagcgcggtcttccaccctccctggaggacacggtgctacccta

SEQ ID NO: 114535 - DNA, 437 bp, Homo sapiens
aagtcattctccatctggataatcagcttgttctgtcattaaatgtctaaaatccagctgcttctcaccactactactgcaactgttacactcctttaaaccaccatgatcactgcttagtgtaatagattgaaaaacatgactataataatttgcaccatctgggtgcagtggctcacgcctgtaatcccagcattttgggaggccgaggtgggcagatcacctgaggtcaggagttcgagaccagcttcatcaacgtggcaaaaccccatctctactaaaaatacaaaaattagcacacacctgtaatcccaggtactcaggaggctgaggcaggagaatcgcttgaaccctggaggcagaggttgcagtgagctgagatcatgtcactgctctccagcctgggccacagagtgagactctgtctccaaaaaaaa

SEQ ID NO: 114536 - DNA, 1775 bp, Homo sapiens
tgcttcctgaactagctcacagtagcccgggggcccagggcaatccgaccacatttcactctcaccgctgtaggaatccagatgcaggccaagtacagcagcacgagggacatgctggatgatgatggggacaccaccatgagcctgcattctcaagcctctgccacaactcggcatccagagccccggcgcacagagcacagggctccctcttcaacgtggcgaccagtggccctgaccctgctgactttgtgcttggtgctgctgatagggctggcagcctgggggcttttgttttttcagtactaccagctctccaatactggtcaagacaccatttctcaaatggaagaaagattaggaaatacgtcccaagagttgcaatctcttcaagtccagaatataaagcttgcaggaagtctgcagcatgtggctgaaaaactctgtcgtgagctgtataacaaagctggagcacacaggtgcagcccttgtacagaacaatggaaatggcatggagacaattgctaccagttctataaagacagcaaaagttgggaggactgtaaatatttctgccttagtgaaaactctaccatgctgaagataaacaaacaagaagacctggaatttgccgcgtctcagagctactctgagtttttctactcttattggacagggcttttgcgccctgacagtggcaaggcctggctgtggatggatggaacccctttcacttctgaactgttccatattataatagatgtcaccagcccaagaagcagagactgtgtggccatccttaatgggatgatcttctcaaaggactgcaaagaattgaagcgttgtgtctgtgagagaagggcaggaatggtgaagccagagagcctccatgtcccccctgaaacattaggcgaaggtgactgattcgccctctgcaactacaaatagcagagtgagccaggcggtgccaaagcaagggctagttgagacattgggaaatggaacataatcaggaaagactatctctctgactagtacaaaatgggttctcgtgtttcctgttcaggatcaccagcatttctgagcttgggtttatgcacgtatttaacagtcacaagaagtcttatttacatgccaccaaccaacctcagaaacccataatgtcatctgccttcttggcttagagataacttttagctctctttcttctcaatgtctaatatcacctccctgttttcatgtcttccttacacttggtggaataagaaactttttgaagtagaggaaatacattgaggtaacatccttttctctgacagtcaagtagtccatcagaaattggcagtcacttcccagattgtaccagcaaatacacaaggaattctttttgtttgtttcagttcatactagtcccttcccaatccatcagtaaagaccccatctgccttgtccatgccgtttcccaacagggatgtcacttgatatgagaatctcaaatctcaatgccttataagcattccttcctgtgtccattaagactctgataattgtctcccctccataggaatttctcccaggaaagaaatatatccccatctccgtttcatatcagaactaccgtccccgatattcccttcagagagattaaagaccagaaaaaagtgagcctcttcatctgcacctgtaatagtttcagttcctattttcttccattgacccatatttatacctttcaggtactgaagatttaataataataaatgtaaatactgtga

SEQ ID NO: 114537 - DNA, 1838 bp, Homo sapiens
tgcttcctgaactagctcacagtagcccgggggcccagggcaatccgaccacatttcactctcaccgctgtaggaatccagatgcaggccaagtacagcagcacgagggacatgctggatgatgatggggacaccaccatgagcctgcattctcaagcctctgccacaactcggcatccagagccccggcgcacagagcacagggctccctcttcaacgtggcgaccagtggccctgaccctgctgactttgtgcttggtgctgctgatagggctggcagcctgggggcttttgttttttcagtactaccagctctccaatactggtcaagacaccatttctcaaatggaagaaagattaggaaatacgtcccaagagttgcaatctcttcaagtccagaatataaagcttgcaggaagtctgcagcatgtggctgaaaaactctgtcgtgagctgtataacaaagctggagcacacaggtgcagcccttgtacagaacaatggaaatggcatggagacaattgctaccagttctataaagacagcaaaagttgggaggactgtaaatatttctgccttagtgaaaactctaccatgctgaagataaacaaacaagaagacctggaatttgccgcgtctcagagctactctgagtttttctactcttattggacagggcttttgcgccctgacagtggcaaggcctggctgtggatggatggaacccctttcacttctgaactgttccatattataatagatgtcaccagcccaagaagcagagactgtgtggccatccttaatgggatgatcttctcaaaggactgcaaagaattgaagcgttgtgtctgtgagagaagggcaggaatggtgaagccagagagcctccatgtcccccctgaaacattaggcgaaggtgactgattcgccctctgcaactacaaatagcagagtgagccaggcggtgccaaagcaagggctagttgagacattgggaaatggaacataatcaggaaagactatctctctgactagtacaaaatgggttctcgtgtttcctgttcaggatcaccagcatttctgagcttgggtttatgcacgtatttaacagtcacaagaagtcttatttacatgccaccaaccaacctcagaaacccataatgtcatctgccttcttggcttagagataacttttagctctctttcttctcaatgtctaatatcacctccctgttttcatgtcttccttacacttggtggaataagaaactttttgaagtagaggaaatacattgaggtaacatccttttctctgacagtcaagtagtccatcagaaattggcagtcacttcccagattgtaccagcaaatacacaaggaattctttttgtttgtttcagttcatactagtcccttcccaatccatcagtaaagaccccatctgccttgtccatgccgtttcccaacagggatgtcacttgatatgagaatctcaaatctcaatgccttataagcattccttcctgtgtccattaagactctgataattgtctcccctccataggaatttctcccaggaaagaaatatatccccatctccgtttcatatcagaactaccgtccccgatattcccttcagagagattaaagaccagaaaaaagtgagcctcttcatctgcacctgtaatagtttcagttcctattttcttccattgacccatatttatacctttcaggtactgaagatttaataataataaatgtaaatactgtgaagtgtgtgtgattttacaatggacttatggttggtgggaaaattcagcatggaaatgcttttc

SEQ ID NO: 114538 - DNA, 1609 bp, Homo sapiens
caaccatgtcaggcgtgcttccacctcaagagcacagggctccctcttcaacgtggcgaccagtggccctgaccctgctgactttgtgcttggtgctgctgatagggctggcagcctgggggcttttgttttttcagtactaccagctctccaatactggtcaagacaccatttctcaaatggaagaaagattaggaaatacgtcccaagagttgcaatctcttcaagtccagaatataaagcttgcaggaagtctgcagcatgtggctgaaaaactctgtcgtgagctgtataacaaagctggagcacacaggtgcagcccttgtacagaacaatggaaatggcatggagacaattgctaccagttctataaagacagcaaaagttgggaggactgtaaatatttctgccttagtgaaaactctaccatgctgaagataaacaaacaagaagacctggaatttgccgcgtctcagagctactctgagtttttctactcttattggacagggcttttgcgccctgacagtggcaaggcctggctgtggatggatggaacccctttcacttctgaactgttccatattataatagatgtcaccagcccaagaagcagagactgtgtggccatccttaatgggatgatcttctcaaaggactgcaaagaattgaagcgttgtgtctgtgagagaagggcaggaatggtgaagccagagagcctccatgtcccccctgaaacattaggcgaaggtgactgattcgccctctgcaactacaaatagcagagtgagccaggcggtgccaaagcaagggctagttgagacattgggaaatggaacataatcaggaaagactatctctctgactagtacaaaatgggttctcgtgtttcctgttcaggatcaccagcatttctgagcttgggtttatgcacgtatttaacagtcacaagaagtcttatttacatgccaccaaccaacctcagaaacccataatgtcatctgccttcttggcttagagataacttttagctctctttcttctcaatgtctaatatcacctccctgttttcatgtcttccttacacttggtggaataagaaactttttgaagtagaggaaatacattgaggtaacatccttttctctgacagtcaagtagtccatcagaaattggcagtcacttcccagattgtaccagcaaatacacaaggaattctttttgtttgtttcagttcatactagtcccttcccaatccatcagtaaagaccccatctgccttgtccatgccgtttcccaacagggatgtcacttgatatgagaatctcaaatctcaatgccttataagcattccttcctgtgtccattaagactctgataattgtctcccctccataggaatttctcccaggaaagaaatatatccccatctccgtttcatatcagaactaccgtccccgatattcccttcagagagattaaagaccagaaaaaagtgagcctcttcatctgcacctgtaatagtttcagttcctattttcttccattgacccatatttatacctttcaggtactgaagatttaataataataaatgtaaatactgtga

SEQ ID NO: 114539 - DNA, 709 bp, Homo sapiens
atcacacactggggccttttgcggggtggagggcaaggggagggagagcattaggacaaatacctaatgcatgcagggcttaaaactgagatgatgggacgaaaggtacagtagatcaccatggcacatgtatacctatgtaacctgcacgttctgcacgtgtatgctagaacttaaagtaaaatttaaaaaaacaataattctcattaaaaacacatcttatttttgggggtatactttgtgtacagaattatatatgttagaattgttaaggttacttttagtaacctcaatttctagtaaaaacctaggaagcaagaaattttgtcacatgtcagttttttatagatatgagcaattttgtaattttataaatatgtttataacctaacttttatgtgtagtgatagtcccaaatatagtcttttcttagactttaagaagccaagaacaaacttatgtttagtaatttatatttcagtattttttcttatttggaagtgattcagacatttaatgagtattatttaattcaactatttgtaaatgtttatgccacctacattcatctaatttatttatttttaacaagtataagtagatttcttacgaaaactgaggcattaggcaaggctagtcattagttcaagctatttccatgttaatcatttttatagcctatgaatatcaggtgttcacctaagtgaga

SEQ ID NO: 114540 - DNA, 356 bp, Homo sapiens
cttgcatcttcccttcagactctctgaatgtctcctccctgctccatggctttgcagcttcctgtctctaaggggtagaatgactcatcaaccctaaaggacagtcagtcttccaagagccatgaactgaatgctttatatcctaatttagatttagagtttccagaaggtgagcatgcagttttgttttgtttttttttctgtctcccaaatctgtgttttttccagatatggctggaagcagaagcttcatgtaacatccatgaatgtcctcctggtagtttgcataatggatgcacatgtgccgcatccataacattaaggggagaataatgcatggtttacagcctttgcca

SEQ ID NO: 114541 - DNA, 754 bp, Homo sapiens
tcagcatatttattcattaggaaaatgcaaatctagccttcaacacggtattatttaacactcacaattatggctataatttttttaaaacagaaaataaaatatgttggtaaggatgtggacatattagaactgtcatatattgctgatgggaatgtaaagtagtgcagcttctgtggacaacagttttgctgtccctcaaatagttccaaacatagtatttagtagtgttactatatgactcagaatgtccaatcctaagtattcacccaggataattggaagcatgttcccatgaaaacttggaccccaatactcatagcaccattgttaataatagccagaagatggaaacaacacaatgtccgtaaactgatgaataggtaaataatatatggtttatctatgcaatggaattttattcaaccataaaaagaaataaagtcccaatacatgctacataatggataaaccttgaaaatattatgctaagtgaaagaaaccagacacaaagggccacatactatgtgattctgtttatatgaaatgcccacaataggcaaatttagagacagaaagcagattagtggctgcaaagggttaggcatagaaaagaatgcagagtgactggtaatgggtaagtagtttctttcgggggttatgaatataactggacttagtggtgatgcttgcacatctctgtgaatatctgaaattctgctgaaatgtaccctttaaaatggtgaattctata

SEQ ID NO: 114542 - DNA, 509 bp, Homo sapiens
gaccagttaaaataaataggctgaggaaaatcttgatagtaggagagattttggagcattcattaaaagtaaaaatagggctgggcgtggtggctcactctcccctgtattcctagcactttgggaggccgaggcaggcagattgcttgaggccaggagtttgagaccagcctgggtcttaaaaggtagatattattctcattttacagatgacgaaactggagcttgtttgaaaagtttgcccaaaattgtagcagttagcgtgaggggcctgcctctagagaccatgcaaattcaacactaagctatactggactggtctcacatagtgagaccctgtctctacaaaaaatagaaaaagtagccgggcatagtggcccacacctgtagttccagctacttgggaagctgaggcatgaggattacttgagccaaggagatcaaggatgcagtaagccatgaccatgccactgcactcgtgcctggacaacagtgcaagaccctgtctc

SEQ ID NO: 114543 - DNA, 583 bp, Homo sapiens
aaatttacatgcattgaaatgcacagacattcagtgtactcctgttcccagaccccagttaagagagagaacgtttctatcaccaggtttcctcttgccccattcagtcattcgccaccctcactggcaaaaactttctgctttctatcattgcagtcttgttcttgagcttcctctaaatggaatcatgcagtatatactcttttgcgtctggtgcatctttcctaggaaagacgccccataccagtgtttctaagtaatgcttttagcttaatattctccacattgggaaagtcacaaacaagacaaggaggacttcttcctccacacctcctcgtcccacacccagctaaaaggctggtggactatccactcactacatgagtctccttggaggccttggccacagcatccccacgttctgagaagtacctgccagaagcaagggaataccacaggaatgagtgttcagggagatgtactccctcagaccctttccaaagtctcccatcatcctgatagggctgcccagctctgggggtcccaaagaaatgctcctactgcccccaatgctggtcctcca

SEQ ID NO: 114544 - DNA, 1051 bp, Homo sapiens
gacacttgtctctcagccttctgatgccatctgcaaacctcacaggtccccttctgcagcctttcctggaggtttgcttaagaaggtcgagagagggaattagccagagacaacacgtttctcttcgcagtggttggaagtcagtagaagctggatggggaagggctggaatgggaacccgacttcaggtacgtgcgttcctcattcatgctgagccctgggctctggacggcaccacacaggcctgcatgctggcgaggctggtgcagagaggtgagtcatccattcttcatggcacagctgtcgccttcctgaaactcacattagacacgcgctcatagaatcaaatgtaccacatgcagccattacagacgggcacaccaaccccagactgctgttgccaggtatgtgcgtggttcctctcactcgctggtcctgcagagcctggggatgtctgcaaggatgaaatgaggtacagataaggttcactgaggccacttttctctatttttgtgctgggattacaggcatgagccactgcacccggccaggttttgtttctttaaggattagcacaaatggcaccgttgggtttttcttcatacaatttccaaaataaattctgtactcaggttgttatatgattttctgagctgaataagttcaggagcagattattaagatctgccattctgaaacgctggtctttttctccttcctatagtgcaccataaaattctgtttgatcagattatattacatacattttgggggagtggagggacatgagttaagtagcccttcatgtatttataatctcttttctactgaatcaaatgacttagccatgaccctgaatggaccttgttttacttcaagttgagatgtctgccttttatgaatttgtatatgtgaatagagtttgggggttgccaaaaattgcatacattgtatgtaagtaaaattttttatgaagtagtctgtcaaattgtatcataaagtttatttttcttttatacgtaaatcattaaaaataatcacatattttttc

SEQ ID NO: 114545 - DNA, 932 bp, Homo sapiens
agcaatattttgttttaactagttttccttgtagagatctttcacctccttggttagatgtatttctaggtattttattacttttgtgactattataaatgcaattgcattctcgatttgactctcagcttgaatgttatggtgtatagaaatgtttagtcataaaaagaataaagtactgatatatgctgaaaaaaaagagtgatcactagttatggtgcttcaggaacattcgataaattaacttctcatgactacgttgcagtcaagaagcaaaatatttctattttgccttgaaattatagtgtgtgttatacttttcagcttactgcaataaatagcctccaagcaaatggcacttgggttcttttgatttcagtttttttgtagcaaaactaagttttcatttattttatctcctatgacctctttacccaaagtaggctgatcttggattctctggtctatttatgccgctgccgttccgtctttacatctcccgttggagcatggctgttgcattgacatgatgtttttggtgtgggtgttcagtagtgatgaagagtagccacatgccatgattggaatcaatagacattgcctgggatctttactgtacctcattgtcaattagacagtagcaggaaatctttgatatcaggggcagccccctcaatcatgtttcatggcattcaggcagcagtgccatgtgtcacatatatttgatgcttgtgtgattgggcagaactcattagtatgtggttgtgcacagactctgggccctccaccctctgaagaaagaaagtacagcactcaatggatgaattcttcagagaaaagctatcaaattggaatataaactaactcctttgaagcgccactggaggggaacttgatgtactgggaatatgaaggatgggcatggaaaatat

SEQ ID NO: 114546 - DNA, 363 bp, Homo sapiens
cagtttttactcatttcttaattatagaagtaatacctgtttgctatttttatttttatgttttctatgtgtttttgtttttgtttttaagactgagtctcattctgttgaccaggctggagtgcagtggcgcgatctcagctcactgcaacctccaccttccgggttcaagtgattctcatgcctcagcctccccgagtagctgggattacaggtgcccaccaccatggctggctaatttttgtatttttagtagaaaacatttcaccatattggccaggctggtcttgaactcctgacctcaagtgatctgccctcctctgcctcccaaggtgttgggattacaggtgtgagccactgcac

SEQ ID NO: 114547 - DNA, 307 bp, Homo sapiens
gccggaatacccggatacgagccagtgctggtgattatagacatgagccactgtgccctgtccaggggtggatttaccaggctttgtaggagcctagtaaatctttaactgaaaccactggtcctcagctcataggtttaagttcatttccccaagaatttagcctaactttccactcgctgatgctttaaagcaaaaacctgtggttctgtttactcttcagaagaaaaacctccactcatagctgctaataacagcaaatgctcctgaagcatgcatgctatgccagccacgtttctcagcactg

SEQ ID NO: 114548 - DNA, 549 bp, Homo sapiens
cacgccactgcactccagcttggtgacagagcaagactctgtctcaaaaaaataaaaaataaaaggaaaaaaaaaactattccagaccaactgaattaaaaactctaagagcacaaataaacacatgagaagatgcttggcatctctagtcatcagcaaatcaacaaatcaaaaccacattgagatactacttcataggcactaaggtagccagaatcaaaaagtcagatgataacaagtatcagcaaggatgtggagaaatcagaatcctcatgcactgctagtgggattgtaaaatggtatagctgctttggaaaacagtctggcagttcttcaaacagagtgaatatatgatccagcatttccattcctaggtagctacccaagagaaaggaaaacatgtgtccatacagaaactggaacacacatgttcatagcagcactattcataacagcccaaaggtagaaacaacccaaatgtccatcaactgataacagataaattatggcatatccataaaatgaaatactattcagccataaaaaaga

SEQ ID NO: 114549 - DNA, 745 bp, Homo sapiens
cagggaattattttgaagatccaatcaattcaatcatattcataaaaggcaaaaaaattttggagtatgaagtcctttattatatatttagtatcatcattacttgttcaaaattaaatctatacaacacatctgccagtgaaataattatgacactgactgctacagtacaggttctgttgagttcttcagagttgaaagaccatgtgctatttggtgacaatttcccccctactatgccttatgtaaatggctgtaaaagctttatttgtacagcttgccatgatgtaatttgtcctttacttggggccaatgcaaatgcaaactccaggacttcagtaaagcagtgggacatgggtataaattggtcatacaaacaatctttggtatgctcatatatatgggtgtaagattatcaaaataaatgtagaaaattcaaaattctcttaaaactaagaagtcaatctccagaaatcgtaagagtgataattctttcttttatatacactccttggcactttttcatgttctagttcaattaagagaaaaacaaaaaagttgtaaaatgctaagtcattcaggatttctccagattccaatattatttatggctcaaggtagatccaaataaaaatgagagtgttactgttttacacaggaaatatcaacttaggtcatttcccaacagttacacaatccaaagtaaattgaatggatcttaaatatttaaaaaatatattcattt

SEQ ID NO: 114550 - DNA, 557 bp, Homo sapiens
ctttcaacagttgtggttggtgcataaaaattcaccaagaaatacccacctctgctgtgctgttgacgaagatcttataaggaagtgctcatttgcccaggttttgcaagtccctcactattgctcctctgttcatcagggcttgtatcatacttttcaaagcagcagtagtctctggctgcggcatggctgtcaagattaaagccagcttatagccaggcattcccaagggcttggtgggcggctcagaactgggatggttcccgggaagcaaaggagcaggatggcagggacctggaagtggctgggctgaatggctgccggatggcaaaagctacaaaaaatttttaaaaattagccaggcatggtggtccctcctgtagtcccagctactcaggaagctgaagtgggagaatcactcactggagcccaaaaggtcaaggctgcagtaagccatgatctcacagttacactccagtctgggtgacagcaagacattgtctcaaaaaaaaaaaggaaaaagatcagtagttctgtgccccagcacaaccccacaa

SEQ ID NO: 114551 - DNA, 580 bp, Homo sapiens
cctttttttccccccaaagaagctatgtgctctacttaagctgagctgagagtccaaagagagtcctgctaatggtttgccaggtttctgcagaggtttccatttccatctgccaagtgtgcagcactgccttgcaaattcaggtgggagggtggggatgaggagcctttctcagacattagctccctaggtccaaaacatttctggcaggttaagatggaatagctgcctctctccctgaactccacaggccatcatattactgagttctatattttctgcacaacaatcaacaccacttgaacttacctggttgactaatttacttctgtgcatcttgtctcccctcaccctcatccccatgagagctccaagaggggagacaaggtagagccgagctcggctctaccttgtctctctcactggattggattgaatcacttgcaggccagagaatgtgatgctgtgattggccaagttgagtcatatgctctatgtctggagcttatgggggtggtggcagcttctggacagacagtggcggaggtgggagcatggactgtcttcctggcagtaaggt

SEQ ID NO: 114552 - DNA, 375 bp, Homo sapiens
ggtttccgcgatcggggagcgacctctgcctcccgtggcgcgcggggcccccggccgcccagctccctgctcccggggctgcctgctggaggagcctgcggtggcttcaggaagggcggcctcatatcttggggtcacacttggaacagggttggggaattccgatggaatcgttcaagaatgggggtaaacggaccgtggaaaggggcagaggtgggcggatgtggagcgagagacaagtgggaaggaaacggactcagtgatctaccttggggagcaacgcccagaagggatggcttgcggagttcagcctttaaggcaatcaaagccaccattcttttacacagtaggaaactctgtgttggctcttagtat

SEQ ID NO: 114553 - DNA, 352 bp, Homo sapiens
tagagatgagataaaagaaatagctacataattgtgaggagttgtgttgcccatctcaaatttacaaattttcagtctacttatgaatgaatgcacaatgaaaagatatttgtaagtcagatgatacaaatttaaaagttattgaatatttgtagtaagaaaatctatcaggctgggcgcagtggctcacgcctgtaatcccagcactttgggagactgaggcaggagaattgcttgacttcatcttagattataaggttcttgaagatctattgtctgtttttttctttttttttttttttaaatgtttactatggaacactgtttccaatagcctttcaggatttgaacc

SEQ ID NO: 114554 - DNA, 341 bp, Homo sapiens
ctgtctctatgcgttatgactattctgcgcatttcatataaatgcagtcatattacatttggcttttatgttcattttccatagtgtttctatatagcatgtatcggtgcttcattctttttaatgggtagataatattccattgtatgaatatatcacttttgtttcttccattcaactgatggatgtttgggttgcttccactttggggctattgtgaatgctgctataaatagtcatgaacaagtttttgtgtagacatgtattttcaattctcttgggtgtatacctagtagtaaaattgctgggtcacatgtaaactctatgtttaactttttggg

SEQ ID NO: 114555 - DNA, 286 bp, Homo sapiens
gtgagctgatctcaaaaaaaaaaagtattttagaatcttttggcaaaggaaattatttctgacaagttttgcacttaagacattcaggtgtgaggaaaacatgaaaaccactatgctagggaaagcaaatgctgttgagaatgtctcacaaacacaaactgcacgtcagcaggtaggtttgaccctcaggttgggcacattttactttaagtgtactgttggtggaacttaagatgaatctaggacattcacgatttatgtatgtgtgtgtgtgtgtgtgtgtatg

SEQ ID NO: 114556 - DNA, 352 bp, Homo sapiens
ttcaacacgagatttgggcagggacaaatatgaaaactatatcaaagacagaatagaggagaagaactggagacagtgaatttagacagtgctttctaggaatcttaatgtaaatgggaacaaataaatggggtagtaaggtggtagatggcagatgaagaaggtcaagagttgttatatggaaactactaagcttagtgttttccttttcataatatttattgtactcctactgtgtacgtaatactcccagctcctcaggaggctgaggcaggaggatcacttgagcccaggggtttgaggccagcctgatcaacgtagccagaacccatctcaaaattaaaaaaaaaaa

SEQ ID NO: 114557 - DNA, 447 bp, Homo sapiens
gtattttaaatgtttctatcaataattgcaattaattgaacaacttctagttctgattattatggaaaagcttttactgtaattacaacactgtggggaaagacaaggtttatctcaagagcttctgcttatgtaggcatgattttgaaagtggagcagattccaggggtggctcacgcctgtaatcccagcactttgggaggctgaggcaggtggatcatgaggtcagaagttcaagaccatcctggctaacacggtgaaaccctgtctctactaaaaatacaaaaaattagccgggcgtggtggccggcgcctgtagtcccagctacgtgggaggctgaggccggagaatgatgtgatcccaggaggcggagcttgcagtgagcctagatcatgccactgcactccagcctgggtgacagagcagtctccgtctcaaaaaaaaaa

SEQ ID NO: 114558 - DNA, 639 bp, Homo sapiens
ctatccattgtgtagatcatttagttttgttagccttgtttgcacttatttgaattcaggtagtagagaaataagaactgcataggcacagtgtgtgattatacactgtgcttctatacaaataaaatattttcagtttcaaatgtcttccacacaatgcaaaaatgactactagctatggaattgttagtttaattcagtacttagccactccttttagatcatgttaaagtctttcctggaagatacggaaagaagatacggccaattccgcccaaactctggagcatgcaactccaagtcatgacagcaaatgagatcttaccataggacaatgttgatttttttctaaaacatgtaattcccatatagtttttaaaaatctgcttccatctaatcgactattggagatctacaagaaaagtagtgagcaatcaatggattgttttctctgtaatggtgagaactgaaactaacacatacaccgtcccaagttgggttttccggaaagcggacctaaagacaaagatcagcgtgtaggaggcttatttgagtgctcttggaatcaatacctgtggtttcaagggaataaagtaacattggacagacagaaaagttgaaccctgataacagtcccaa

SEQ ID NO: 114559 - DNA, 403 bp, Homo sapiens
ggtcctgctctgctctccatttcaccttgtgtgcaatcagccttagggaagggtacaacgtgtcttttctgggtttgggtccaaggaagcccctaagtcctgtatctctaacaaggcctagcattgtgcacggagcacaagttaaattgtttctcagaaattataacagtccgtcaggcgcggtggctcatgcttagtaatcccagcacttttggaggctgaggcaggtggatcacctgagattaggagttcgagaccagcctggccaaaatggcaaaacctcgtctctactaaaaatacaaaaatgagcttggtatgatggcacatgcctgtaatctcagctactcaggaggctgaggcaggagaatcacttgaacccaggaggcggaggttgcagtgagcc

SEQ ID NO: 114560 - DNA, 1335 bp, Homo sapiens
gtttttttttttttttttttaccacaatagaaaagattctggccgggtgcgatggctcacgcctgtaatcccagcactttgggagactgaggcaggcagacgacgaggtcaggagttggaaaccagcctgaccaacatggtgaaactccatctctactaaaaatacaaacaacaacaaaaaaaatagccaggtatggtggcacgcgcctgtaattccagctacttgggaggctgaggcaggagaattgcttgaacccaggaggcggaggttgcagtgagccgagatcacgccattgcactccagactaggaaataagagcgaaactctgccccccaccaaaaaaattttatctttctgcccgtggataccaccaaagaagcatcatgaaagcctcttttctccctgccttcatgtctaagtcagagtctcctaaagagcctgaacagctgaggaagctcctctttggagggttgagctttgaaacaaccgatgagagcctgaggagccattctgagcaatgaggaacgctcctggactgtgaggtaatgagagatccaaacaccaagcacgccaggggctttgggtttgtcatctatgccactgtggaggaggtggacgcagccacgaatgcaaggccacacaaggtggatggaagagttgtggaaccaaagagagctgtctcaagagaagattctcaaagaccagagaacttctccacatctgcttctaccatgaattaaccaacacaaatcatatgttccattggtcgtaatggctggtcacaaaaatcataacagttttacatgaggtacacttgcagatgtgtttccatcaacctctgtattgaaggcccagttatctctacttaccttgttgctcgtgtaaacacctcttaagtaccactccaaatctttggacaccgttggacgcttactccaccctgctgccactgcagaaaccagctgtctgtggacactgccagctccatgtggcatcccaaatggcacccacctcacaggacccctggcccctatgcttgagaaacccacaataagtcagagaaaaaatgtgctgagatccaggcccctccagaaacagtcccagaagcccaaacaatcagttgtcagatgcccaatggtgaccagctcctcagcccaaaactctagcactccctggggagaaggtaaacagaaatggagaatgaggagtctcagctcctggcctccggcctgctcaagcgaaggggaaataccattgtatcataagcagtggtaattcccgtctgccaggtgtctaccgggtgaaggggtcttgctctgtgctgggtgctcaga

SEQ ID NO: 114561 - DNA, 720 bp, Homo sapiens
gtgtctcaccccgggccggaagggctcctgcgcaggcgtttgtagccacttttaagttttatcagctagttcatgcttgcgttgaaagagtggtcgtttgcgctgggtcatcactgtgtagtattggggatacttaggtgagaaaaaaacttaacgctagagacgttcacgcactagtggagaagccaggattgttgccctagagttacagtagataaaagtacctcagagaactgcgggggctcccaacctggacgcttgcaccggagtattaaatccagctagagaatggcatgtgcaaagatacagagcttttagaagttgcctgcattccttggccccttcctcacatcattccaaccaacttccatccttacaatcgattactttcctgtaatagctacagtcaaatgggcagctgaagatgatgatgatgatgatcttgacaccgagaagcagaagaccaatgaagatgaccagacagcaaaaaaggataagttaaaagaaggtaaaagaaggccactcgtacttgctgtctcagtatctaaaggtggtcaccttccagtagagaggcccacccactgcagactgtgccaccgaaggtgacatgcactttctgccacccatccaaaactgtaacgtgaatctgcaacaggagaggaaagaagaaccaaaacttccaaggccttgcattttttcttaaaagcatttttttttttt

SEQ ID NO: 114562 - DNA, 631 bp, Homo sapiens
gtgtctcaccccgggccggaagggctcctgcgcaggcgtttgtagccacttttaagttttatcagctagttcatgcttgcgttgaaagagtggtcgtttgcgctgggtcatcactgtgtagtattggggatacttaggtgagaaaaaaacttaacgctagagacgttcacgcactagtggagaagccaggattgttgccctagagttacagtagataaaagtacctcagagaactgcgggggctcccaacctggacgcttgcaccggagtattaaatccagctagagaatggcatgtgcaaagatacagagctacagtcaaatgggcagctgaagatgatgatgatgatgatcttgacaccgagaagcagaagaccaatgaagatgaccagacagcaaaaaaggataagttaaaagaaggtaaaagaaggccactcgtacttgctgtctcagtatctaaaggtggtcaccttccagtagagaggcccacccactgcagactgtgccaccgaaggtgacatgcactttctgccacccatccaaaactgtaacgtgaatctgcaacaggagaggaaagaagaaccaaaacttccaaggccttgcattttttcttaaaagcatttttttttttt

SEQ ID NO: 114563 - DNA, 586 bp, Homo sapiens
cagtggcgcgatctcggctcactgcaagctctgcctcctgggttcatgccattctccttcctcagcctccccagtagctgggagtacggtgcctgccaccacacctggctagatctttttgtattttcagtagagatggggtttatccatgttagctaggatggtctcaatctcctgaccttgtgatccacccgcctcggcctcccaaagtgctgggattacaggtgtgagccactgtgccctgcaaaataatatattttaaactggtaaaaacgagttgcatttgaaaaattcttcctcagccaggcgcggtgactcacgtgtgtaatcccagcaatttgggaggctgaggcaggcggattacgtaaagagatcgagaccatcctggtcaacatgttgaaaccccatcttcaccagaaatgcaaaaatttgctgggcgtggtggtgcgcctgtagtcccagctacttgggaggctgaggcaggagaattgcttgaacccaggaggggaggttgcagtgagccaagattgtgctgctgcactccagcctggcaacagagtgagactctgtctaaaaagaaaaaaaa

SEQ ID NO: 114564 - DNA, 343 bp, Homo sapiens
  misc_feature (284)..(284): n is a, c, g, or t
  misc_feature (289)..(289): n is a, c, g, or t
atttacatacatacatagctcctgtcccattaaagcatcagggatgcagaattctgtaggaacgtccataacgaactaaagtctttgatacaaggggcttgcagttacattgaggcagggctgggacgagtctgaggcaaaagaggtgcctgaggtgaaaaatgtaaggaggtgaccaagcgtcccgtagaacagccttaaaaaaagagtctccgtacacttctcgccctagacagctctcgccttgccctagtcccggccctgtgatccagcctgggtgacanaacgncattccatttcaaaaaaaagaaaggaaaaaaaccttaattagggaaccctgaaa

SEQ ID NO: 114565 - DNA, 240 bp, Homo sapiens
ttttaaagtgaattttttttttttttgagacggagtctcgctctgtcacccaggctggagtgcagtggcgcgatattcgctcactgcaagctccgcctcctgggttgacgccattctcctgcctcagcctcccgagtagctgggactgcaggcgcccgccaccataaagtgtatttttaatctgagcaggggaagctatacgttatagactgaagagacatcaacagatagcaatgggta

SEQ ID NO: 114566 - DNA, 345 bp, Homo sapiens
tggcaatccatatctttttaatatgtggtagctaccgtgtgctatggtctacagattcaaagacaaataagccagagttctcagtgagttgtactatcaggtgagaaagtgagacagcagccagcaatgaccatttatatccaagtctcctgggtacttgactatgtcttaaaaatgcattcctggccaggcacagtggcttactcctataatcccagcacctgggaggctgaggtgggtggaccacttgagcccaggagttcgaaaccagcttaggcaacataagaaaaccctgtctctacaacaaatacaaaaattagccaggcgtggcagtgtgcagctgta

SEQ ID NO: 114567 - DNA, 470 bp, Homo sapiens
aaatttagtgtatagtatgatctttctacgttctgcagtgttacataggaattcctgggaataagaaaaattttatccagttgctattttatagttatatccttgactgtattctcatcaatttaggagacaaataagttacttatttattccataaatagtgccaattattttataatctcaatttaagaagtcaatatttattatgttcaataatgtataatcaggccaggcacagtggctcatgcctataatcctagcactttgggaggctgaggcgggtggatcatttgaggtgaggagtttgagaccggcctgaccaacatggtgaaaccccgtctctactaaaaatacaaaaattagctggcatggtggcacttgcctgtagtcccagctactcaggaggctgagccgagatcgtgccactacactcaagtctgggcaacagagcaagattccatctcaaaaat

SEQ ID NO: 114568 - DNA, 606 bp, Homo sapiens
cacgcgtccgcggacgcgtggggaaaaaatgttactccttctctgacttataactctttgaagttcttgaagtcaccttcattctcttaattcttttatgtctttatcttctctttggttctgtagcaggttgtgacctagcacacaatacaaacataaagattacccttacggttatgggtgcctgttgcctagatgacaaaaaactttaatgtgataactgtttcttttcctcattctttctctttccttcttttggaactgttaacctagacatctgaagagaatgtagaaatagatgatggattaggaaaacttggtattgatactccagtaatattcattatctcttatggattatttgtatcatacccttttccatccagcttgaccttaggttatgtaacttaaacctgaaaatggtggatctcttggtgtgtttcccaatatttgaatatatgaatgtttctgaccttgcccaaatctagtgatttgaagttggtgtatctgacttgttgagtattaattaattttcttttttatatcacttttgaatttaattaaagtgttttgaaatggttctttagccctgtttcttaagcagta

SEQ ID NO: 114569 - DNA, 485 bp, Homo sapiens
tgatgtcagagaatatgggctcctcacactcagtgggatatgtgccactgtagttatagtgaaagcaaatacaagcctaagggtaggcttatgcaatcaagtggtttattatttttgtgggctaaagaaaataaggagctaaaacccacaggataaacaggcaaaagagaaagggaagcagcagatgaagagaatccaagactctaaatacaaagagaagcagcattatctccatgacccaaatatttctcgacatcttttcccagtccatctgatctctagccaccaccatcccacaacccaggcaaaattacatacagtaatattgctatcaacatctgctatagcacagtggtgtcttacagggaaagggacagcctttttgtgagcacagtattaccttgcccctgccccaaacaattaaccacgtaaaaaaaataaagatgtagttgaggaaaaatgttcaccctgtcttccaactcagg

SEQ ID NO: 114570 - DNA, 184 bp, Homo sapiens
tgcccatttaatatatgcaaaatgggtgatagtctctaaaacctgttaaatatcactgcttcctcccatggtgggaatacgagttccaatcttccaacattgacccagtagggtgactgtggcaagtcgcttaatgcctctaagcctgcttccacatccccaaagtaggaataacattattatc

SEQ ID NO: 114571 - DNA, 325 bp, Homo sapiens
gttggacacttgagcagcctgcggttatggcctgttataacacccactgccatgtccatgcttggagctcccttttgttggtaacactttcctagggaaaattctattgggtagtggatgtgaatgatattgtggctcttgatttcccctgtcctctagcccagttgttttaaaaaatagaagtgagtgcctccccaggaaggcaaaagatacccactgcagtacgagatgaaaacattagaagttctattcaaactgatttatggccgggcacagtggctcacccctgtaatcccaacactttggaaggctgaggccggttggt

SEQ ID NO: 114572 - DNA, 652 bp, Homo sapiens
cttgaattgaaattacagatttaaaatttttaaagcccataaactagttagtagtttgtatagctggacaaagtcataaaatgtaccatatgtaaagctacaattactcatagttttacaatttgaaaatatgcataaggatctgtgtgtgtatatgcatatttacatatatatatatttgaattgatggagtagctatataagatgtctttctgtagaaaaagacataggcagagaatctgaaatactttaattcaaatatctgcatggcattgttccaagcttgaatgactctgtgtctggactaacctctccaacctttatatatgcttatttgtaaaccaagtggtatagttgtgagaatcaaatgagataaattttgtgaattgtataatgcctggtacctaataaacgctcaataaaactttgagcatttatacattaattcaaggaatattgctgacattgaatttttaaatttttttgtcgtatatttaaaaaattaatttggtactggtttggaacaagagaaacagattatgataactttatctttccttggagtactatacctatggttaatatttttaaaaatttgagcacatgacattttgtcatccttgttttttagtgattttgaattgacattgca

SEQ ID NO: 114573 - DNA, 780 bp, Homo sapiens
gaactcacagaagtagagagtagaatggtggttactacggaatagaaattgggttggggatttattggccaaaggatacaagatttcagtcagatggaataaattcaaaagccgtattgtataacatggtaactgtaattaataacaatgtcttgtattcttgaaaattgctaaacgagtagattttagaattttgaccatgaaaatgataaatatctgagggtaatacatatgttaactagattgatatagccattctacaatgtgtatgtatttcaaagcatcatattttacatgataaatatgtataatttttccctgtcaattaaaatctatcaataaatatgaaaaaataaaccttgagaggaagtgctctgaaaaaaagaacaccttctataagagatgtcacaaaggatcttggccctggctgggactgttggccaaaatggtgacaaaggatgtacaggccagtggactgaaaaatatggggctccgggcatcttgttgacaagagttttcaactcttctcattgagcagctttcagtcactgttgattttatcaactaaccacagcattaggtcccatccacaccacacagcttatactgaacaagcttaaaatacatttgtgaaacgatcatactaattgtgcctttcatctcatatatactaactctttgtttaagcttaagtgtaagtaagctttttgctgagagagacaatattctctttgaattccccatagcacctaacaaggcattgtataaatacttaataat

SEQ ID NO: 114574 - DNA, 755 bp, Homo sapiens
gaaaaatgcattaggttgtcatggcctaaaaacaccagccatttacacattctgacgaattcccctgattctgaacccagactaacttggtaaccagttcattgattatgattctccttcccatatacctggatttatatctatatctatacctttagagaaaaatacagcaatcagtcagtatagttcattagcttgatggacatatttttattgtaaattagtatattggcatgctgctataaggaagcattttaattaatgtggttgttatcaatgaggtcattttaagatcatacagctctcagccacacatacagaggtagaagttccatttctggaacaagagatgagtcatttcttattcacatttgcttataaaaaatacagtcatccccatacatgccatcacgatgccttctctaccccacagaaaagagaactaatgtttgtaagaaattacagtcagtttaccactatcctcagagaaataaagtctcttctgcaggttcctgcaaccagtaagtaattagaggtgacattaaaactcagttctgacagacgtcctttcaactaaacttgtgtctctgtctagaatcaactgctagcaacatgccctgactaggagaaacagatgagatttctttggctgctagagaataaacactgatcatattggttacttcctctaaacaagtctaaactcaaatcccatgcccaagaaatgggtgttctgtactgaccccccaatctcg

SEQ ID NO: 114575 - DNA, 485 bp, Homo sapiens
cagcatgggcaaagctgtccaaccatggagacgtggtgttcagctacaggttgtggccagaatgggggtgggcaaagggtgtagggaaagtggaagagaaggctgggaggaaggtagtcagggacagagctgggaggaaggtagtcagggagagagctgggggaaaggtaattagggacagagctggggagcattgtaggccacactaaggcatattcagggaggactggaaagccgctaaagagttttaagcacattaatgagacttaggttttagagatgcgtggggggcagtttgggtgtttgaatctagggaggcaaagcctgaagccagggaaatcaagggagaagcacccacacttgtgcctgaagagcaatgagggcctaaaacctgcagtgggcattttcttttaaggatgtttgtgtttctctccttgtttgtcacatgcagatccttgcgctcctcactatttgttctcctgcag

SEQ ID NO: 114576 - DNA, 358 bp, Homo sapiens
gtcccaccttctataaatcaggatttagaacaggacttttaaagtgactcggaactacaaacattcctttaggaaacagcagtctgaactctgaccccacagaaccatgactctcaaaagctaaggaataacggataaacagaggttctccaatggcttgcggctggggcaggccttccaggatgccagcaaggactctagctagttccactaaatactctgggaaccagagctaacatggggtcccatcaatccaacagctacatattaacaactctttagaaaggaacttaaggtcttcaatgttttaaaatgctgcttctttgaaacagtctccatagtaatgaactcatggcat

SEQ ID NO: 114577 - DNA, 399 bp, Homo sapiens
gatatatcctgaaagctaagtgaaagaagccagtcacaaaaggccgctgattatatgatttcatttatataagatgtccagcatatatatagacagaacgtagatcagtgattccccaggggtgagggaggggaatggagattgactgttaatggttatgggatctattttggggatgatgaaaatgttctggaattgattatgatggttgtacaactctgcaaaatactaaaaaccaatgcattttttactttaaataggtaaattttctggtgtgtgagctatatagctatagctcaataaggctattatatacttattttattttattattattttttagagacagagtctcgctttgtcacccagcctggagtgcagttgtgcaatcttagctca

SEQ ID NO: 114578 - DNA, 398 bp, Homo sapiens
caagaagcaccaaacccactgaccccatttcagtcccgctggaggccctggccacctgactccccatccctgctctgtgcccagctctcaggagactccagagctgagtctgaccttggccccttcccagagcccatgaaaaggagttccctgggcaactccacccacctgaccacttcagctgccaccgatgccagtaagtccaaacctcgtctccagccagaccctctctgacccccacccatcagccttcagacatttctactcgatgtcccccaactccttagacaagtcccaaacagccttcccccatctccaccccgcactgttcctccctgtgttctccatccccacctatgccagaggctggtgcgcaggaagcactcaatgcacatctc

SEQ ID NO: 114579 - DNA, 391 bp, Homo sapiens
gattgccctcatcagtgtgagtgggcatcatcctacccattgagggcctgaatagaccaaaaatgcagaggaagggcaaatttgctctctctttctttgagctgggacatccatcttatcgagcccttggagattggtaatcatggttcttcagccttcagactcagacagactaggacttataccaactgcccccacccacaaccctacccccggattttcaggcctttgaactgggaccaggatttatacgattagctccctggttttgcagcttgtgaacagtacattgtagcacttcacagcttccataatcacagtgaggctaatgccgtaatatgtctacacacacacacacacacacacacacacacacacgcatgtacacaca

SEQ ID NO: 114580 - DNA, 877 bp, Homo sapiens
gtgagggggaagccctggttgggtatcaaaacctagcacctggttcggcaggagggagaccagcaccggctcccaggaccaggcccagctcaccacttcattgtaaagctccctctttgtttctggaacttgggtgtttccatttctttcttacaaaattatctatgcatttacagcaattgttgatatatctttaggcagcatctaggtacttgtagtgggttctcttttttcttttttcttttttttaatcaccctctcttttttttgagacagagtctcactctgtcgctcaggctggagtgcaatagcgcgatcttggctcactgcaacctctgcctcccaggttcaagtaattctcatgcctcagcctcccaagtagctgagattacaggcactggccaccagacccggctaatttttttttctttttcttttttttgagacggagtttcgctctttgttgcccaggctggagtacagtggtgtgatctcggctcactgcaacctccgcctcccgggttcaagtgattctcctgtctcagcctcccgagtagctgggattacaggcgcgcgccaccatgcctggctaattttgtatttttttttttttgagacagagtctcactctgtcacccagactggagtgcggtggcgcgatctcggctcactgcaagctctgcttcccgggttcatgccattctcctgcctcagcctccggagtagctgggactacaagcacccaccaccgtgcccggctaattttttgtatttttagtagagacggggtttcaccgtggtctcgacctccagacctcgtgatccactagcctcagcctcccaaagtgctgggattacaggcgtgagccacctcacc

SEQ ID NO: 114581 - DNA, 446 bp, Homo sapiens
agttcctcttttgtgacttggggtggggaaggaaaagaattattataattgaaatccatttaggtttgcataataaaaccttcagaaatagatcaggggaggcactaagcttgtgggatgggttggaaagaaatgatttgcccttgggtgcactagcatgattggctgcctccttggttttaaaagaatagcacagtatatattgtctccttggtattaactgcttcagaataggagggaagaagaaaagaggtgggatccagaaatggcatccgacctttacttcttgtctcttttaaaaattctcattaatataggtccagttttcctcgtattgcttcattaggtatgtgagttattgagtttgtagcagttctagttaattgcgctgttttaacacagttcccctggaggctgttaagagctttaagagggtgagccaccga

SEQ ID NO: 114582 - DNA, 563 bp, Homo sapiens
ggggatgtaagttagtacaaccattatgggaaactgtatggaggttcctgaaaaagttaaaaatagaaataccatatgatctggcaatcccgcttgtgagtatatatccagaggagttgaagtcagtatgttgaaaaggtacctgcactcccatgttcattgcagcattttcacagtagccaagttatggaatccacctaagtgtccatcaatcagtgtaaatgataaagaagatgttgtatatagaatacacaatgcagtaatagccttaagaaagaaggaaattctctcatttgcaacagcattgatgaagctggagaacattacactaaaccaaataagccagacacagacaaataactcatatgtggaatccaaaacaattgaactcatggaagcagaagaatggtggctgtcagaagggtgaggggatgttatacgcacacacacacaggtacacacatacacatatacatatatacatacatataaggaactcagctcaattgcaagaagacaaataacccaatttaaaaggggagatgggccggagaagttggtca

SEQ ID NO: 114583 - DNA, 791 bp, Homo sapiens
gctgagtctgctacaacaacattgttttcaacttttccttctgcttaatattactggcttcactccctcacacgtatcactcctgagcattctctaataaacgttctccaaaacaggggttgcaggcttagaatctaatcaccaaagcatttggtgtcaggagtggttggagaacgcagacaatgaatgtgattttggagctgcattacttgctggccagctggcaatatggaaactattgctggtgtcaggtgaaacatggaagatccctggcattctatagcactgaaactattattacttgatcagtggtgaacagggatgggatagcagtagaaggaatgcacttaaatatctcagggtttgttagattctgagaggactggtacttatgaggatgatggaattgaatggctgttgtggactgcaatctcatgccctggagaaagacagtgaatgactttgagtcagtaatcagtaatttgagagatactgtgaatgtcagaggagctctttaggaacatataaagagattcttatctctgtgatcaaggacagaaaaacctgagggtcagttctaggccataattttcaggatggcaaagctccatagaaggttgaagtctcagatgcagaaagtctatcatgtcaaggccatgccctggttgagagtcttagaaaggggatacctgggtgggtgcactaaaaaaaacccttaaaacccgttttgcctggaactctctgagctggtaaatgttcaaggctagcatgcccaccccctaaagccccca

SEQ ID NO: 114584 - DNA, 191 bp, Homo sapiens
acagattctgatttttacaataagtatcttatattcacgtggttcaaaattcaaggcaatgtaagatctgtaaacattattctctaccttttttcactttatgtgatcttgttatctcttggggactgtttggactctgggcactgtttggactctgggcactgtttggactctggcactgtttggactct

SEQ ID NO: 114585 - DNA, 348 bp, Homo sapiens
gaaggcatggagaagacgccctgggatctcccgatatcccttaaagagaaggacaaaagcagggagcaggaagccatctccagaattctggacactctgggtcttagatggtttgttaacaaagaaaaatgtttcctgaaattagctgactgcattttccatttgggctatgatgaccttgtttcctcaaggagaaaacgatgactctgtttctttcaggaaattcagggtaatctataaaaacatgggctgtgtaaaagcatcaatacttcttcagaatagcatgtctttgtggagcaaaactttcttaaattttgtcacatcattaaagtccagtaatacccttta

SEQ ID NO: 114586 - DNA, 326 bp, Homo sapiens
gatggagtcttgctctgtcacccaggctggagggcagaggcacgatctcagctcactgcaacctccgcctcctgggttcaagtgattctcctgcctcggcctcctgagtagctgggattacaggcgcatgttgccacacctggctaattttttgtatttaagtagagatggggtttcactgtgttgcccaggctggtctagaactcctgagctcaagcaatccacctgcctcggcctcccaaagtgcactagtagaatttttataaggcttttgcctgagggtacttatcagcccatgtggcaatggtcacttagactgaagcagg

SEQ ID NO: 114587 - DNA, 667 bp, Homo sapiens
catttgaccagtgtcttttcatttttagtaaaagtaaaattttttctagacataatcctgctattgatgttgaatactatttcatcttaccctgcataccacacaataccactgatacattgtatataccactgataacattcttggccactgggaaaattatttttttacattgttattggtctcctgtgttgtaggtaggactatgcaggaatggatcttttctttgagacagagtcttgctctgtcacccaggctggagtgcagtggcgcaatctcagctcactgcaggctctactctcgggttcaagcgattcttctgcctcagcctcctgagtagctggggctacaggcatacgccatcatgtccgggtaatttctatagttttagtagagactgggtttcgctgtgttggccagtctggtctcaaactcttgacttcaagtgatccatctgcctgggcctcccaaagtgctgggattataggcgtgagccaccgcgtctggccaggaatggttcttgaaccatttcttcccatcttagaaaatactgacttctcacttgccttattgaaatggtttggagaggtatagcatctaacaatactgcacttccatagagcggacttgggataacagttaactcctaagacatcagctgaagatg

SEQ ID NO: 114588 - DNA, 530 bp, Homo sapiens
aactcaacctgtacttcatatgtaccttaacattaattaggctgtcaaaaaaaaataattcactcttccatgtggttattgcaaaaataaatcatttatggcaagcttgtgaggcagtctaacttcatttgattaaaaacaaaagagctaaaaggggaatcatttatgtagattagataaatgaattctacctaatatttacatacgggctgaaattttctgttgagactgtaattgctagtcctacccatgtttacagtttcagtactattggttttggtatcagtagctcactagagaggaaataatactgagatgaaaaacattttatctctttctcaaaacttgatgaggaatgttaaaagaacaaaaaagaaaactttgcaaatatatatggcaccaaagaactggagccacatgtttgacaatgtatttgctttctacttctgatgctttgttatccttgtactttacttaagtgtatttgtttgatttttgatttgtttgatttttgagatgcagagtctttt

SEQ ID NO: 114589 - DNA, 1200 bp, Homo sapiens
aggcgtgagccactatgcccagcctaaattttcaattttgtataatagtttaagtgaaataatttaaatgaaaaataagagtcaaaacaaaatgggaacaagggatctttttggagtgatgaaaatgttctaaaattggattgtggtataaattcattaaaaataattgaattgtgcatttaaaataggtgaattttatagtatataaattataactgaataaagctaataacagctatataaaacataatttaaaagaaaaaaaaaaaaaaaaaaaaaaaaaaaaaaaaaaaaaaaaaaaaaaaaaaaaaaaagaaaacacaaagcgaacgagaaaaagaccagagcggacgaaaaagcaaagacgaagacagaaaagaaaacggggtgggcggggcgacaaaggggagaaagagaggacaagcagagacagaagagggggggggcgcggggcggaggcacggagcagggaggacggagagcggaggagcgagcaggcacggggacaaagacgaaccgcagtagaaaaacaaacgaccaaaggtggagcgaaggagaaaacgccgccaacacaaaaaaaacaaacagcgaggcagcgcggagaaacacaaagagcagaagatagaggaaaagcaaacaaaacggaaagcgcgagaagaacgctagaagagagccgaccagagagggaacgacagaacgagagaaggcgagagcggaggcagaaagagaaaccagcacccatcacaaagcagaacagacgcgcgacacggcggtgaaaaaaaaaaaaaaagcagaaccggagaaagaacacgaaaccaagaaaagaaagaaagaaaagagaggagaaggggaaaaaggacaaaaaaaagaacaagaaagaagacaagacagcaaagagaaaacgggaaaagacaaacagaaaaacagaaggagaggacgaagaggagacagggcagagacaagaagagggaagagaagaggggcgaaggcaaacacacagagagaacaaggccaaagcaaaagaagacaggagaacaaaggagaagcaggaagcaagagagaggaaggaaggaaagagagaaaagaaagcagacaagagagaagggacgaaagagagaggagcaaaacgacaaaagacaacagcagacgccagtacaaagagagcaagcagaggaagacgcagcgaacggcaaaagaacg

SEQ ID NO: 114590 - DNA, 615 bp, Homo sapiens
cctcccccatagttcgtttgggaccctatgattgtgctctcaccaatgggattgtgagtataagtgatagatagctcctggcttgaggccattaaaagcaggcatgcattcttccaggacttccctctctcctcctcacccatggaattggataatcctggaatggatgagttcattgagggaagcagctgagttccctgagtcaccactggaaaagacctaccaaggagagcttcttggctcacaccagactctgatgttagtgataagtactaggttgagcccctgagatttcaggatttattttttaaggcagcaaagtataacagtgcctaagtaaaagagaacccagagcccaaagatgagggaaaacttcatgagaagcgactttatactacatgaggcttggtaagaattccacatgaagaaatgaagtgatgaggaagaacagtttaggccttagtgcagagccaggcctggctctgaacttagggacaattttttctttttttttcttttttctttttctttttcttttttttttgggccctactagtttccttttctactataggttccagtatctttgtgtttgtgattacacactcactcact

SEQ ID NO: 114591 - DNA, 386 bp, Homo sapiens
tcactgcaacctccgcctcccaggttcaagtgattctcctgtcttggcctcccaaggaactgggattacaagcacacaccaccatacctggctaattttgtatttttagtagaggcagggttttgtcatgttggccaggctggtcttgaactcctggcctcaagtgatccacccgcctagacctcccaaagtgctgggattacaggcataagccacagcgcctggccctgatttttttttaaaaaaagcaacagttgtgtgattttgcttccagacttccagatatcaatttctagtcatctgattaattcccttctagttttcagatattgctatatctagttttcagatattgctacagacaaagattttggaattccctttcc

SEQ ID NO: 114592 - DNA, 241 bp, Homo sapiens
gagagagttgagcgtgtctggaaggctgatccactctctcctactcctgctcgcatctgctcatttctttttttcctgtctaaaggcaaaacaaggtaaaatacaatagccagttgcctcatataaaccacctgcttagtaggaaatgaagtaaaactctgcagtccctattgctacttgaagaatttgtggtttcctttcctgtcagtaaacaaaagccgtcagttaaaagagtggaaca

SEQ ID NO: 114593 - DNA, 1172 bp, Homo sapiens
atctgcttgcccaatcgacgcctccatgcccctcttgcttacaccaccaaaaaaaccaaacgctatttaaagaggagtggcccatgaggattgagcagcagacagcacgtacggaagtgctggtgggaggagttctctgaaggatggaaaggaaacatttctttatcttctctatttttaaccccaatcagtaggcattaggttaggctcagggtttatagttaggaaaaacctgctatctgctcctccttccagtagaggcaaacactttgataagaaaacagccaggctaagggtttatccaggataagcaaggctcctccagcttaaacacagtatggttggatctggttgttccataacctggtcaatatctgagtgttggctctttcatttgttttgaatatgggactccatttttcagaattttgtttaaagcaataagaaaaaaaaagtaataaaagtggtagtgagaaaatatatatacccacttccctcatgaaaaaataatgtgactcagcattcaggtcactgaattagaaagcccaatttttattccctgttaaactgctttctgttttaccctgtctagttatctggcatatatttccatttatgcttgggtttgaaatttgttctgatgtggacaccaagatgctgtcattactttaataaacaattttagacaatcaattttattcattaaaatcataaggccacaatataattttgaaaagaaatttgccaaatgcaggaaatatattccaggaagttgatgctcttcccagagtgcacatcttgtgacctttaaccccagtatcttggtaacctggtctacataagtttgtaggacatctattatttaaaaagtacaaggacgagcatattacacacagatcctcctcctcccaacacacacattcataacagtattttaatctgtctcgaatcgacttcaaacccattttgctcttaatgggagttattcattttcacttgaaaggtaatacatgacggctggatgtttaatgtgatggaatggctgccgattaactaggtgctgcaacattctagaccagttcccccatggcctacttcccatctcctggccccgctcagacctgatcctatggaacgtcgcgttgcaggtttgagaccttgcagtgtgatgg

SEQ ID NO: 114594 - DNA, 156 bp, Homo sapiens
tgcatctgctcagcccgcacctcctgagatcgacccatcaaaaagatcccctccttcccttttccctgccatcttttctccactgacgcctgctaacagctcccgtcgcaccaggtatctgtttagggaatctcattctgccaaaccaggtgcagg

SEQ ID NO: 114595 - DNA, 1017 bp, Homo sapiens
gtcactgtacacaccgccttggaggcaatcactccaggagagctgctttcatgcactatgcatctattttttttttttgtctttcctaatttcaagttcaagatggtgtccctagctttaattgtatacaaggaccaggcaaacaccatgctcttaacttcaactcaatctgttgagcaggagttccttaatacaagatgtgggaattatatgttaaagagaaaacattgtttgccactacccagtatggaaagaacgagttactaaaatttggccaaatataataagtaatatttagtataagtttaacataaggtccgtgtcttccatgtcaaaaacgggatctttgtactttctaagtaaaaagaaggtcctgtagtagaattccaaaactagaggacagatacctccagggaatccttaacaaaggggaggagaccaaagacttggtaatgatctaagaattcctacaggtttttatcagctttgtctaagtaatcagcataatcacttcggttctgtgcaagtgtacctcaactttggggtcttctatgaggggcctgagactgatcacaaacagaaggaaagaaaacaactgaatgatactctggatgcaattgaggacggcacacaaaaggtgcagaacaatatctttcacatgtggcgatactacaactttgcccggatgaggaaaatggctgactttttccttatccaatcaaactataactacgtgaactggtggtcgacagcccagagccttgttattattctttctgggatcctgcaactgtatttcttgaagcgtctcttcaatgttccaacaactacagatacaaagaagccaagatgctaagctaaggtgactatagcaccctggctgttttcttctggggcttagtcgaatcagctttgtaatgttatgggacaaaaatcaattatctcattaatgttttagtctgctgcacacatctaaaaaagcaaaatggcaataaaatcataacagtgaaaaagttc

SEQ ID NO: 114596 - DNA, 519 bp, Homo sapiens
atcaactccaaaccccagcagggggttgggcagtcccaccccagacagagaccgctgtgctgatgaccgtgggacgtcaatcttaccactcagctggcttcctcgtgatgtagcaggggttctgctacctatttaatgtgtcttggcaggttcagcggacagtggggatgtcacatgaccggcatgttgctgccacggcacataacccacagggatttctcatagacacctcccagggtgttcggggccagattaacttctctacccaagagacaggtctgttttcattaccatggctattataataatcatagggtcctatgaaattacagaaataatgaggaagtatacagagatgttttaacagtaggaaaaaaattcagcctttaacaccaaaaaccagtgttcctggaggctgctgacctccaaggatgccaagtggcagtctactgacgatttgggggcaacactccaggtgagcattctaagtctagggttcagccgctcaattttatctca

SEQ ID NO: 114597 - DNA, 945 bp, Homo sapiens
aacgacttgatttccctgggctgcgagcagttcacctgcagaggaggctccagaaagcggcatgtcccctttgctctttggggctgggctggtcgttctgaatctagtgacgtctgccaggagccagaagacagaacctctaagtggctctggggaccagccactcttccgtggagctgatcgatatgactttgccatcatgatacctccaggaggcacggaatgcttttggcaatttgcccaccagactggatacttctatttcagttacgaggttcagcggacagtggggatgtcacatgaccggcatgttgctgccacggcacataacccacagggatttctcatagacacctcccagggtgttcggggccagattaacttctctacccaagagacaggtttttatcagctttgtctaagtaatcagcataatcacttcggttctgtgcaagtgtacctcaactttggggtcttctatgaggggcctgagactgatcacaaacagaaggaaagaaaacaactgaatgatactctggatgcaattgaggacggcacacaaaaggtgcagaacaatatctttcacatgtggcgatactacaactttgcccggatgaggaaaatggctgactttttccttatccaatcaaactataactacgtgaactggtggtcgacagcccagagccttgttattattctttctgggatcctgcaactgtatttcttgaagcgtctcttcaatgttccaacaactacagatacaaagaagccaagatgctaagctaaggtgactatagcaccctggctgttttcttctggggcttagtcgaatcagctttgtaatgttatgggacaaaaatcaattatctcattaatgttttagtctgctgcacacatctaaaaaagcaaaatggcaataaaatcataacagtgaaaaagttc

SEQ ID NO: 114598 - DNA, 660 bp, Homo sapiens
agggcaagctctaactggctgcttccccatatttgtaatagttcaaagtcttgaaatatcagcgcttaagagtctttgggagcataaactgagcttcgtattaacagcttcttcatttgctttaaaatagcgagacctcttaccttttcaatcccaaaactaaccacttataattcagtgtggtcatttaaacgtgtgtgtgtgtgtgtgtgtgtgtgtgtgtgtgtgtgtgtgtgtgtgttttaaccataacatgagtgtcacatattctctaggagacattttggcccttttagttgtttaggttattatacttcaaggatttataaatgtgcaacaattcatggagtggcagaaaaggatatagagagaccaagttgttgaggacaatagctggagtttagtcttccagaagtatttttcttgccagaattgatcaaaggaagagccaacggcactggataggagattctagcatttggctgcttctccaagacaagcgaggttagaagggagttgagaagttatgtcatcttccactgcagcagataccccttttttagtacttggagatcccccgaatcacagcatttctaaatcagccctggattccacaagtgaagcagcggaggaaccaggaggtcagcggtgtcactcaaa

SEQ ID NO: 114599 - DNA, 256 bp, Homo sapiens
  misc_feature (202)..(202): n is a, c, g, or t
agcttcttaaaaaacagaacgtatgcctgtttcctcatcaagtaccccattcccagcaaggtagcccttggtaaatgtttgtttagtagactgacaaagcagccttagttattcaattcacttttaatccaactattaagagttagattctactcaggaggctgaggcaggagaatggcgtgaacctgggaggcggacttgncagtgagccgagatcacgccactgcactccggcctgggcaacagagcaagactc

SEQ ID NO: 114600 - DNA, 551 bp, Homo sapiens
gaaacataatggaagccacaatgtgagccacatgtgtgatttaacattttctagtagcccattaagaaaagtaaaaagaaataggcaaaattaattttagtgctatattttacttaactcatgtccaaaatatcatttcaacatgtaaaaaatgttcatgagtattttacattctgttttttgcactaagttttcgaagtccaatgtgtatttcacacgtacaggttgagcatctcttattcgaaatgcttgggaccacaagtatttcggatttcagattttggaatatctgcatatacataaatgagatatctcgggaataagacccaagtctaaattcaaaaatcatgtgtgtttcatatacatattatacacatggcctgaaggtaattttatataatactgttaataattttgtgcatgaaacaaagtttttatcaatcgaatgatcagaaaccaaaggtgtcactatctcaaccacccatgggacaatctgtgcttgtttggcaacatcattcctgacgctcatttatgtgctactgataagcaat

SEQ ID NO: 114601 - DNA, 209 bp, Homo sapiens
ctccaagtaatggcagcatgcctccagctagtaccagtggtgcaaggagataccagctagaaagatccagacatctggtcaccaacttagaccttctcccatcatgttattttatacccacctgcaaagcacagaatcctcacccctcttcccaccctccagccactccagcaagcatcatcccagactctgctggcaaaataaattgt

SEQ ID NO: 114602 - DNA, 424 bp, Homo sapiens
ccgtctttgtatctctgtctctcagtacaaatttaatgaaggaatgaatcaatgaatgaatgaagcaagcattcccccagagaattcttaaatcatcttagccggtcatggaatttcccagcaagtcagcttttagaatcctgaaaatattttcagtattcatctctttaaggaatatatcaaaagcagtcagcaccaaccacggtttttcagctgattcccaaatgtgtgataagaaacacctaattccttgggggagaaaacttgttcaggttaaattcttgcggtaatccttacggccctgtggtgttcgctaagatgtagcaagaatgtaaatagctaggtactttgatctacctcaaatacttactagtttaaacattctgccattctgccgtcataccaaaaaaaaaaaaaaagcacc

SEQ ID NO: 114603 - DNA, 169 bp, Homo sapiens
ctaggccacctgcctggctcagtccttgcctgtcccttctccctcctttcccttaggcctctctctgttgttaacactaattaatgataattaaggccagcctattacccacccccgcctgcaccctgcactgtagccacatctgggcagggctgggtaagcctggctt

SEQ ID NO: 114604 - DNA, 544 bp, Homo sapiens
gtttgctttattataggtttggcattttcctacttcaccagctacaactcttgtgatattcccctgtctctatgttttcagacatacacagaaccatttaggttttttggtttgccataatcttgtgcacatggagatttagctatccttctaaccatattactaatttatttcatgttttctcagttaattaacatcatatctcttttttatatcttacttcctcaagaaaaattcacatttcctctgactaggataaattttgtataaaatgttaccaatgcaagattcttgcactcctatttcttacagggttataattttacttttgtgggggcttccctttgggtatcctatctgtatatctgcattagtgttcaccacattttatgcatctttgtctttgtgatcttccattaaaccaaaaaccaagaatagggaggtaagaatattataagatttttgcttatttgttttgcttttgttcatcatcataaagctgactatcaatgtactattaaatacttactgaagagaagtccct

SEQ ID NO: 114605 - DNA, 270 bp, Homo sapiens
attttaagcaggcaaacctctgtagctttacagtttctgaaaattggatcccagttctaatgggcaggcagtgataatggtaatgtttcttttcctaaggttttctttaaagggaagggatcaaatagttcatttaagacaaagaggttattataaagtctaataaatactgtggtagctctgttaatgcttttcaagggcatttaagtgaaagaagccctttccaacaggcagttttggaaagctaaacactcttgttaattcatgaaa

SEQ ID NO: 114606 - DNA, 735 bp, Homo sapiens
caaaaaataagcttctagttagctttagcccttttagcttcagtctttttccttgagggatttaataattaaatgctgtatctgttcagtttgactatatgaaattgctgtttttgtaggtcagaagaagttgagtgtgagcaatgccaaatgggtctgcctaatactgtttacagttacattattacttcctggctgacttatgaatagtatttgttcaaatcagtatctacttactgcaccaagccctgtgagaagcagtagtgataaatagatgagaggtgagagtttgtgtcattaagaaacttggtctaatagtgaaacatatggaaagaaatgtattactattgttggctgggcacagtggctcacacctgtaatcccagcactttgggaggccaaggctggcagatcacttgaggtcaggagttagagaccaccctggccaacatggtgaaactcccatctctcctaaaacaatatacaaaaattagccaggcatggtggcgcgtgcctgtagtcccagctactcaggagactaaggcaggagaatcgcttgaacctgggaggtggaggttgcagtgagccaagattgtgccaagtgtaattggaacccctaagatgggggcaaggtgagggaagggcagtcaggattccgaaaagaagtgggcattagtctgtttattgtgcctggagagtaagattactttaggtggaggaaataatagtgtttga

SEQ ID NO: 114607 - DNA, 132 bp, Homo sapiens
ttagagccctgaacgagggagcgtagtcattgggtctgtggtcagttaagtggggacctgactgagactgcaatgaccgaagcatgttttaagaagcaacagtatgaaggggatgcagagcaaatcaggggt

SEQ ID NO: 114608 - DNA, 331 bp, Homo sapiens
tggaagattcaatactgtaaagaggtcaatattccataaagtgatctgtagattcaataaaatcaaatcagaatccccacagggtttttttattcagtgggaactgacaagttgattctgaaatttatatggaaaaacaacatcgcaagaataaccaaagcaatctttgaaagacttaacactactcgatatcaagactcctaacatcataataattaagacagtatggtaatggcacaaggacaaatgggcaaacagaacagagattacagagaaacagaccctcacatatacaacctcttgatttatgatgaaggtgattgtacactgg

SEQ ID NO: 114609 - DNA, 359 bp, Homo sapiens
gtttttaaagcaggactgtgaggagaattttaatagagtctagattggtgaataaaaaagaatagaatatcccaaaaagtatatattaatgctcaaaccagtaaagaaatatgagttaccattttgtggaaaaatgacatgggtagattcatatcccctactgcgtgtaagattattttcaaagagattaaagcattaaatgtagaaaataaaaccacaaaggctctaggagtaaacataggacatgacatttcctttataacctttaagtggttaaggtataagtaattataactaaaagtccagaagctaaaagattaaaaaatgggtgtatgtgaatacagtaacaataacttcat

SEQ ID NO: 114610 - DNA, 389 bp, Homo sapiens
catgcccgaagtgtaactccaacaagtgtgggcccgagtgccgctgcaaccgacggtgggtttacgatgccatcgtcactgagtcaggagaggtcatcagcacgctgccgtttaatgttcctgactaggtgctcttgtatatggactgatttgtttcttcttcttacacatttaagttgacctctttcttttgggtgaattttagggcttgggggaaatatcgaaaaaacatactgaagactcatgttctgtcaagccccagaacaatgtagaatgggcaataattctgtaaccttcttaactgtgtcaacaattttcaagtcccttaacttgcaaccaaagaatgtaacaatggagggatcagcatttctcatcagcaccctcatctc

SEQ ID NO: 114611 - DNA, 272 bp, Homo sapiens
ggtggcaggtgtctgtaatcctagctacttgggaagctgaggcaggagaattgcttgaacccaggaggcggaggttgcagtgagccgagatcgcgccattgcactccagcctaggcaacagagctagactcagtctcaaaaataaaaaagaaaaaaaaaggaaaaagaaacactaatctaaactgtgtgtcaagtgaactggattctgagctgtgactacttaggattcagtgtcctcatccatgtaaatagattcctgccattcttttggg

SEQ ID NO: 114612 - DNA, 345 bp, Homo sapiens
gacaacaccaggtatggaacaacaaaaagagatgcagctatagagaaaatcttccctgtcccgtagagccaccctttaacagcatcaccatttctcaaggtgtattaataggttccctttaaaaataaatgccacggggtgtccagagagatcaaacaagaaggcttagaaattcacaatgccatactagtgtattaaagactataacaggttctgaagtaaagagactacattcccctaaattgtttgaacatgaaatgcattttctgtggaatacctacgaacattttgtggaacaagtgtttactataacagtttgggaaataccactcttaggccctcaaa

SEQ ID NO: 114613 - DNA, 597 bp, Homo sapiens
gagggtgaggggtccttggcacaggagggcctcaagggcagtgtgaagggtggggtatagcagagtggctgagaggagactcccaggttaggggtcatcccagtgggaagcagcacgctccctatgatggttggtagtgagatgcagtgacccactggggatggagctgagagaggggggaaagagagaaagaaggaagaatgaggctgttcctgatattcccctagggggagcatcagcctggtttctccacaggctgtgaggttgagaataacttctgaagggatggtcttttttctaacagtgagatgtcactctatagcaaaaatagcagagtgtaccaccttctctcgagatttctcctgcaccttcgcacttctcacgggcctcatttccatgcaccaagagtggagggcagctcctaccccagggaaccagcctttcacacagaagaggaccttctgcaaggcactgaatgaacagcattctaccagcctttattttaatacccacaatggtaaaaaagtaaatatttcctgaggcctaactccacagttaggtggttccatttttacaacagaggtttgaaactccagt

SEQ ID NO: 114614 - DNA, 292 bp, Homo sapiens
gttatgaacaatgtctttataaaatgttttattgttgattatgataatctttaaacacaaatgttgtgaaaagttttatatatttatgaatactataaaacttccaatgcgaccttgatttcctccacggagactgaattgggataagaaaaacacttatttgctatgcaccatttattagtcaaccaacataccataactattggttaatttcttcaagcatcccattttattagtaaaataataatcagtatgccttttatttacttcatgtccctgaaaatatataatg

SEQ ID NO: 114615 - DNA, 325 bp, Homo sapiens
ctattagacatccaccaagagctgatttaggcaaaatctccagaaaaacataaagcttcaataatgaataaaagagaccagaggatgcaaaattccacaggaatgtcagattttatacaacctcatagagtaaatgggagcaaagttagcaagaggtagattgattaagagtaattatgaagagatgaaataccctctgactctgaagacactaatgtattaatctgtggaataagaaagaacataccagaggcctcatctgatgcaacacagtgcttaccctcctcggaatcgatctctacttctactttatataggtaaataa

SEQ ID NO: 114616 - DNA, 228 bp, Homo sapiens
tgttattgcatggatgctgcacacttacctcatggaaccagtcctcttctgaaggacatttagataatgtccaatctttctctcttgacagtagaaaaaggctgcacctgacacatacttcattacccacacatgcaaggggcatcgctcagatgaagtctctattttttttccccgagatgaggtctctctctatcacccaggctggagtgcagtggcacaatcaca

SEQ ID NO: 114617 - DNA, 286 bp, Homo sapiens
aagatatggttccagttttattcttttgcatgtggatattctaccatttgttgaaaagactgttctttccacatggtatcttcttggttgctttgtcaaaagtcagttgaatgtgtatgtctgggcttatttctggactttacactctgttccattgatacatgtctgtttttgtgcaaataccatatggttttgattactgtagttttgtaatataacttaaaatccaagaattgtgatgcccccaactgtgtttttctttctcaagatttccttggctatttgt

SEQ ID NO: 114618 - DNA, 503 bp, Homo sapiens
gccccacgggactgagggtaacatgagggtaacagacaggtgatgttaaattccatttgggctcatgttcacccccaggccccttattttctttcaaacacatggaatgggcatttagaactaggaagatcatgaatctggtggctgtgtagatgccataccaggtatggaccacaggcttggagcgcagcagcatacaggggtcagaggtcaaggccagtggtctatcagaacccagttcctgcaggagccagtgccggtactaggtagactcagatgactgaatggtcctcgggatctgaaggccagtgggggagatgaggcctggcctcccggaagtgctcagtaaacatttgttaatcatttcctgcctagggaagctctgtggtatgctcaggagaatcttgcttctcatgggggaatgggtggttgtcatttgggtgcctgagctccagcctgcttgctggctctctgggagttggggtggtggcatcaacctgcag

SEQ ID NO: 114619 - DNA, 492 bp, Homo sapiens
gccccacgggactgagggtaacatgagggtaacagacaggtgatgttaaattccatttgggctcatgttcacccccaggccccttattttctttcaaacacatggaatgggcatttagaactaggaagatcatgaatctggtggctgtgtagatgccataccaggtatggaccacaggcttggagcgcagcagcatacaggggtcagaggtcaaggccagtggtctatcagaacccagttcctgcaggagccagtgccggtactaggtagactcagatgactgaatggtcctcgggatctgaaggccagtgggggagatgaggcctggcctcccggaagtgctcagtaaacatttgttaatcatttcctgcctagggaagctctgtggtatgctcaggagaatcccttgaacctggtggaggtcggaggttgcagtgagccaagatcatgccactgcactccagcctgggcaacagagtgagactctgtctc

SEQ ID NO: 114620 - DNA, 418 bp, Homo sapiens
gactcatcagggaagtatagcactgggcttagcagagaatctgcctagagaaggcactggtatttttgcatgaatgattgaagtttgatctgtcaaggcagagctcgctggagaagagtgagaagacagtgtcagtaacgtaacaaggaatagaagtggtctatggagtgttaaggagggcctgggtgggaaagatatggaaccctaggtaaagattacttgtttgaagaatcattcagagagatgttgaagacgaggtcaacagagttggacaaaagtgtaaatgtgaatggtcctttctctaggaccctacaatcacaagtgtggctgggaccatccatgccagcatcacttgggaatttgttagcaatgcccactctcaggcccaccccagacccactacctgtcttttatccac

SEQ ID NO: 114621 - DNA, 413 bp, Homo sapiens
cttgataggaccaccccatccaggctgcagggctgacggggccacccaagggtcagacagtgaaggccccttctccacagtgtctaggctgtccctgggctccttggacctcgatggacatgtgaaccttgtgcctgcaggcacgcgagccccacgtctgccccctttccacagtcctggctttgacgtggggaaggggccccaggggcagggaccaagaggactttgcacagactgggtgtggcagctcacgcctgtcatcttagcacttggaaggctgagatgggagggtcacttgaggctaggagttcaagaccaggctggtcagcatagcaagatcccacttctgtttatttatttaaatttattttcaaatttaaaaaatgcaataaaaagaatgtgtatcgtctgga

SEQ ID NO: 114622 - DNA, 250 bp, Homo sapiens
ctgggctcaagcaatctgcctgcctcaacctcccaaaatgctgtgattacaggcatgagccaccgtgcctggcctatagtatatgctttactttataaaacactgccaaactgttttccatcatggatgtcccactttatagtcttactagctatatatgagagttcttattattctgtatgtgtgagggcattttgtattgtcaagttttttttaaattttcgtcattctaacagataagtagtggtaa

SEQ ID NO: 114623 - DNA, 512 bp, Homo sapiens
ttcttttgggaagtctttcttgacattggattccccatattaataataacagcagcagcagcagcagcaaaaacttacatagaatgtattaggcaccattataagtcccttgcttatgttaactcacaacaattcaatgaagtagactattattactcccattttactgatgaagaaatagtagcacagatatacttaagtaaatccaccatgaacatagagcaaggccagacatggtgggtcacgcctataatcccagcactttgggaggccaaagcaggtagatcacttgaggtcagcagttcgagactggcctgcacaaagtggtgaaaacctgtctctgctaaaaatacaaaaattagctgggcgggatggcgcacgtctgtagtcccagctactcgggaggctgaggcaggagaatggcttgaacctgggaggtggaggttgcaatgagccaagattgtgcctctgcactccagcctgggtgacagaatgagatgagactctgtctc

SEQ ID NO: 114624 - DNA, 651 bp, Homo sapiens
caagggcatccctgattcgggaggaagctggcgtgccgaaggtcaccagcaggcactgtggacccagcctttgagcttggaccccgcctggcccacaaagccccgtgctgcttcccagggcccacgcgcaggttcccggacctccagctgcaccctggagggggtgaggggggctcactgtgtggcgtgtgccaggtggaggggctggcgtgggacagagggatggagctcgggggaagaccagcagatccctggacacacggggtgaggctgggctgtctcagataggcaggactaaaagcaagacaagcaagacagaagggctcaagactggagcagccaggaaattctgtccaagccgagtccctgggtttgcgagacttcacgccacctcacaggggtcgtctggggttgtggtctctggccaggagggtgcgggagcctctttcttccagctcagctcgtgctacaccagaaagggaagggcaagagcaccccctcaacccagaggacccccagatcaagagaccacccaggctacaatcaactctgatggcgcttttaatcaccccagcaggagtggcgactgtaaacagacattcaacaattcccagtgacacacatacctcccgggaaaaaccgcgtttccat

SEQ ID NO: 114625 - DNA, 478 bp, Homo sapiens
tcaaattcctcctgctgtcacttgaactgctggtcattcaaggtcagtagatccacccgggtgacaaaagggaggtatatttgatctttttcatgtatttgtttcctaagacagagtttaattcttgtttcttaccattctcaaatttgctctttattctcttgtcccaatgctattgccctatgataagcatttttcagctcattccaaaagttgttctcactctgttccatgggaattttcagatacataaaccaaattgagcctaaatatgcctccttcctttctctgacttgtaattgatgcccaatatagcaatgtccttcccgaagaccttgccatcatcacaaaatcctttacatacccatactcgccctgcatgtgtgtccccaggctctccgattcctctttcatctctcagttggaaaaaaatagcgctatttcaagaaatgcaatccaccagtagggagtaggaaaa

SEQ ID NO: 114626 - DNA, 662 bp, Homo sapiens
gttttaaattgccatttggcagtgaaggtgctattgccggaagatggaaaagcagatattgtgagagccgctcaggacttttgccagtgagtagcccagaagcaaaggagacccacagatgtggatgtagatatgttagtttactcagttcaaatggttgtcctgatcctgatttagtactgaagttcggtcctgtggacagcacacgaggctttcttctctggcacatcagattgactgagattgtctctttgccttcccatgtaaacatcagttatggggactttttctctgcccttcgtcattatgcagcctgtgaacagcgtctgggaaagtggtggtcattggttgcataatttgatctgaggcttatggaggaaaggacccaagtgactctgatgtttagaaagcacctatgaaaccctgtacacacctagttcataatcctcataatttatcaacaaacacaaagaagtgtcttacttgagagtgagtgtgtgcgtgtgtgcgtgcacacatgtgcacgtttgtatgtgtggaaataaacataaatggggacgtgttggagaaggaaatacatagacctacaactttgagcatatagcagtgatgttttaggaactgaaatgtcacacttaataaagtcttcagcccagctactt

SEQ ID NO: 114627 - DNA, 472 bp, Homo sapiens
tcattgtgtcagtctagaggattatgcatttatataggactttgtatttgttaagaggtaggtgggttgtattcatagtagtagaaaagtttttctagctgggcatggtggctcatgcctgcaatcctagcactttgggatgcttaggagagaggattgcttgaccccaggagctcaataccaggctaggcagcatggtgagaccatctctacaaaaataaaaaatacaaaaattagctgagtgtggtagtgcatgcctgtggtcccagctactctggagactgaggtaggtggattgcctgagcctaagagttcaagaccagcctggacaacatggtgagaccctgtctctacaaaatttttttttaaattagccaagcttgatggtacgtgcctgtggtcccagctactgggcaggctgaggcggaaggatcacttgaatccaggaggtcaagagccaaggagatcaagg

SEQ ID NO: 114628 - DNA, 278 bp, Homo sapiens
tggtctggctgcaccttcctacgaatatcctttgtgtatacacatttgatacacgtgtccctttagtatgtttttctcttgagtgtacacacatacacctaacacatctggaagatacttgtctctatcccattgtttcaacttaatacatttgagcttttgttgtccacgtgtatacagcctcgtgtataatcctggacaatcctgaattcccccagggtctcagaaagtggggatgtaacccatttctggcatttagaggctcaggtttccagagt

SEQ ID NO: 114629 - DNA, 948 bp, Homo sapiens
atccacaagcatttttcccatttggatttctgaaaatatcagaaatagattttattttcattagttatgcaaacctaccatttaaaatatgatagttcctttttaaaatcttattatatttattgatttattatttattccaagacatcttgttatagcaaattcctttcccttggtgttgattatggaattagactgaaggtagagaacaaacattttagcttctttacctaggcatatagcaaaagcagaagcttttgtgtttgcctgggcaatttttgagcggtagaaataatgggctgggtgctgtggctcgtgctgtaatgccagccacttgggagactgaggcaggagaatcgcttggacctgggaggcagaggttccagtgagctgaggttgcgccactgcactccagcctgggcgacagagcgagactctgtatcatttacaaaaacaccagcacagcggactttaggccttttatcattcacatcaggcagtggtcacggggctcctcttgtttgtgacccttttgtgtccttaggcctcgagctactgtccttgttggttgggtggttacctttaagtccctttgcacacgatttcggaagccttcctctgggttagtgggtggcggaatgtcagtcctttcctttcacttgccgtcacctggaactttctacccaggttagctcttttccccaaatttgaccccattttggttggtcacagtttaggcaaacccactgtcccacggcaatgtgcacgaaatgggcgctcttcgagccaacacaagaagaattttctttggaaactctttcccaaagttacctgctgggcctccaattgggccccacaaaaggttcctagacacaagcaagtgtgttataccccttatttctcatatggacacatctggctcgggagcgcatttaacctatacgggag

SEQ ID NO: 114630 - DNA, 507 bp, Homo sapiens
agcagcaagaagtcagggtccactgaaaagtggttaagtgttactaatatggacaatgttgactgggcactttctaggtacccagcactgtgctagagttccacatagattgtctcactgactcctcactgatgcggtaagaaccctctgttcccattttacagagtaagaaactgaggctcacacaggttaagtcacttgcccaaggtcacatggctagcaagtggctgaaccaggatttgaacccaggaccatctgagctccagagtgtatctgaccccatagactactgtctcccacacctcagtttcccttctcaagaaggaggaatggggtggatgctctgcgatgtctcttctgctgtgactctggttctgtgatgctgagtgtctgcaaggtgcctggacccatgttcaccacccacttcctcctgcttcaggcttttccatgttgtgaccaagcctcagtggctctgacgcctctggatggcacctgtggtcagagctc

SEQ ID NO: 114631 - DNA, 421 bp, Homo sapiens
ctaagttaattattactagaggaacaggcctaagactcatgcatataggaatggaggtaaggtgctggtagcactagacagatgatgcataatacgtacaagtcattagatgaagaagaagtacctgtgccctagtaaatgaaaaacatgcaggtgaaactagcagcaaaaacttgtggaaatgtctgttccccaaagaaagaaagaatttggatagaacagaactaagagcaatgaaaagatttaagtaaactccagaattcacaaagaaaatgttctcaagatatgtatacgaactgagctttagcagaataagtgtcagactttattgaggcaatacaaagataaaggcattttggcaatacctaaatgtaaagagaaaccacatttgactgatgtaggtaacaggaacacggatatt

SEQ ID NO: 114632 - DNA, 643 bp, Homo sapiens
tgttacccaggtgggtcttgaactcctggctcaagcagtcctcccacttttgcctcctcaagtgctgagattacaggtggaagccaccgtgcctggcctacaagtcactttagccaggtgattgtttagttgaagtttcatattgccttgaaagttgaaaagaggggtgaaaaaattgagcttagaaagggtaaacttgttttcaatattttttgaaaagctgatggaaggagttctatgttcaactctgtaatttgtgggcccaaagttcctttatttcaaggctctagaccattaactaattttttgggagattgagaaagtatgttagagagagtgcaaattaaggaacctcattggggccaggtgtggtggctcacgcctgtaatcccaacactttgggaggctgaggcgagcggatcacttgaggtcagcggttctggaccagcctgaccaatatggggaaaccccatctctactaaaaatacaaaaagtagctgggcatgatggcgtgctcctgtaattacgcttcctcgggaggctaaggcaggaaagtcgcttgaacccaggaggcggaggttgcagtgagccgagattgcactgctgcactccagcctgggccacagagcaagactccgtctca

SEQ ID NO: 114633 - DNA, 190 bp, Homo sapiens
agggaatacagaatttcaatgttgctgaaaagtaagatgattggggaaacatttctgaactttgctgtaaaaagaaaaacaaacaatactagtggaaatttaaagggcagacaaagaaggggaaaatcatttaaagtgagataaccttgcaaagatctgtatttgttttctattgctgtgtaacaagtta

SEQ ID NO: 114634 - DNA, 269 bp, Homo sapiens
tatgccatctgtggccaaggaaacaagcaaagccaagccaattattcaaattggaatactcttccacagccacaggcaatggagttgatcctatcctggagaatcaagctcattattacatggctctggacctatcagagggcattcacatgacctggaatagacacaaggggagtcttaaaacatcacgacaaattagccggcgtggtggtgggcgcctgtaattccagttacttgggaggctgaaacaggagaattgcttgaacctg

SEQ ID NO: 114635 - DNA, 926 bp, Homo sapiens
ggtgtctactaaagcctgggggtggatgggatctcagaagggggactagagaaataggaaactggggacagaacccgggggtgagaaagaagacagcaggtgttgtgggaagtcagggaccccaaacggagggactggctgaagccatgacagaagaacgtggattgtgatgatttcatggacatttattagttcccccaaattaatacttttgtaatttcttatgcctgtctttactacagtctctaaacataagttgtgaatatttcatggacacttatcacttccccagtcaatacccttgtgatttcctatgcctgtctttactttaatctcttaatcctgtcagctgagggggatgtatgttgcctcaggaccctgtaataattgcattaactgcacaaattgtacagcatgtgtgtttgcgcaatatgaaatctgagcaccttgaaaaaagaacagggtaacagcaattgttcagggaataagagagataaccttaaactctgaccactggtgagtcgggcggaacagagccatatttctcttctttcaaaagcaaatgggagaaatatcgctgaattctttttctcagcatggaacatcccctgagaaagagaatgcacacctgggggtgggtctctgaactggcccccctcccccgggggcgtggtcgtctcttatggtcgaggctgcagagatgaaataaactccagtctcccatagcgctcccaggcttattaggaggaggaaattcccgcctaataaattttggtcagaccggttgctctcaaaccctgtctcctgataagatgttatcaatgacaatggtgcccaaaacttcattagcaattttaattttgccttggtcctgtggtcctgtgatctcgccctgcctccacttgccttgtgatattctattaccc

SEQ ID NO: 114636 - DNA, 642 bp, Homo sapiens
ctggagtgcagtgacgcgatattggctcgctgcaagctccaccttctgggttcacgccattctcctgcctcagtctcccgagtagctgggactacaggtgtccgccaccacgcccggctaactttttgtatttttagtagaggtggggtttcaccgtgttagccaggatggtctccatctcctgacctcatgatccgcccaccttggcctcccaaagtgctgggattacaagcatgagcctccttttgactttcatacttgtaaactgtcagatattatgttttgctactatcagtatgctttgtctatagcagcttctgctaatagttgcttttcatctcgtggatttggaaaaccaggtttgttataattatgtataagcaaataaataggcccagagtgaagacttgagagcaaaatgcctgaacacatgcaccttatttttgggggctgtttaaataactttgtgatgtactttcagggtttgggttgttttttgtttgttttaataaaaggtatgtaaaagagctgaactgtaaataggtattactgtatctcagggaggtgtctgcagtattattagtatttaaggaaatcatacttgctgttgacagtacctgtatcattaaaggctcacaaaga

SEQ ID NO: 114637 - DNA, 304 bp, Homo sapiens
cccctctcgctgttgggctgtgttatctacacagcttgtcgacagggctggaaagtccccaaggttggactctgccagctccccagctccgaacccatcacccaccctttcagcatggccacagggctctcatgtggctcttgtcttctgactaaaaaccatgataaggcgctggcctggggcagaggaggctggaggctgtgagttcacgatggagagtggggcagggacggactctgagtttggcatggctccaggagtcctctgacgtttcctgcccaggtggccatgcgtggattgccag

SEQ ID NO: 114638 - DNA, 438 bp, Homo sapiens
ataaacatatgtgtgcatgtgtctttatagcagcatgatttataatcctttgggtatatgcccagtaatgggatggctgggtcaaatggtatttctagttctacatccttgaggaatcaccacactgtcttacacagtggttgaactagtttatagtcccaccaacagtgtaaaagcaaatgaattcattatcaacaaaggtgccaagaacatatattggggaaagaatagtctcttcaataaatgggatgggaaaactggatgtccatatgcaaaagaatgaatctagacccctatctcttgccatatacaataataaaatcaaaatggatgaaagacttaaacctaagacctaaaactacgaaactactaaaagaaaacattggggaggccggcagccatgagtcagggttggcgtggtctgtgcagtagccggtc

SEQ ID NO: 114639 - DNA, 627 bp, Homo sapiens
gatttgggtggggacagaaagcctaatcacatgaaatagtatcaaactatatatgctttgacaagacagaagtaacaaaacaaaaaagaagggagagaggaagaggaaaatacaaagaactccttgttgcttaggcaatatgtagaagtcaaatagtattatttaaagttgacaaaccaagtatatgaagtgtaagtaaggaaaaagggagatttagagcattaaaggtgtactatactattaatagtatagaatacatagtataattactagaataaaaatgtaaatcatcaatgctcaaagaagcaataataaagattacagtgaaaaacatgcagtaaatgtaccatcatacagtaaatatattaagtccaagcatataagttaaatcagtacatgtgaaaggacttacctattaaaaggaatatcagattggcttacaaaccaatgtcttattgtctgttatttataagagacacatctaaagtaagtgattcaggagaggctaaaaaaaaagagatgggcaaaaatagaccagacaagtaggaccacaaaaggcaaagattacagtatccatatctgaaaaggtagaattcaggaaaaaatagacaagacaatgaaggatac

SEQ ID NO: 114640 - DNA, 275 bp, Homo sapiens
ccagattggagagatccaaacaacacagggagacttgcttactgtggagcgtttgtgttctttcgagtaaatccaatagcctgtttacctccttggaccattaagataatttttattatggacttagcaatgacactgaatccatttgtatttaaaactgtttaaaatgtagctgttatgacttggtcaactatggaagtgaagaaggttcagaattcttaagtcatagcttaaaaatatttactgtactttatctcactacaacagcaccacaa

SEQ ID NO: 114641 - DNA, 403 bp, Homo sapiens
agcattcacagactaagctaataaattgccccaaagtgtcctctagggaaccgaaatggacaaatggccaagaaccatggcgtgtttttggatgagtgagcagttttcagtacattgatcatggcggattcttttaagaatccttggccttttccttggccgttttcagaatcgacacagattctgaatcaaggagggcccagttgagggagatctgcggtattttctggctgtggtgagtacaagcctgaagtgcgggattgaaaagaggaacccggctgcagttatcatgattggacctccaggcacagctgagctttgtgaatgtgaggcttgatgcttcccaaggacagatcccagtagaaaaggaatctgctcgctctgccttggatcattagaacct

SEQ ID NO: 114642 - DNA, 931 bp, Homo sapiens
aaaccttgaggacattatcctaagtgaaacaaaccagtcaggaaaagacaaatgtcatatggttccacttatatgagatacttagaggagtcaaattcataggaacagaaagtagaatcgtgtttgccaggggtttgagggaggggttacggggaggagtatagagttccagatttgcaagatgaaaaatttctggagatacatggcacaacaatgagaagatacttaacactgctggattgtatgctcaaaaatggttaagacagtacattctgtgtgtgtgtgtgtgtgtgtttaaccacagttgggagaaaaaaagatactctttttaccttctctggccagcccagcaagcaaagagctctccctttccagagcctctgaagtgcttacactctttactgctgggcccctaaactaacccactacctcttcatgtattcacatgtggtcttcctttggggcaagttgtttgaaatcagcaataaaatttttgccttttattttccccatggcacctaacacggtgatttacataaattcagccaattcagtctatcagctcaattaatatttgctgattgactgaattcatacttcccttgataaactttggatggtgggctggagggtaatggatgatgaagcagcaaatacagagaaaggtaggaggtgtcagtccaaactgtaccattttgtaagctccctgctattttgcagaccttggtcaaagtgaaacatttcacaggggttcggaccgggagaaacatcctgcctgaccacttgaccacaaggcagacaaaggcccaactaaagaaacatccctatcatatctggctgggtaaaggtccaaggaacaccacgatgacatctccccagaacaagggctagaactgcctcatcatgggaacatcttaccaatatcctacag

SEQ ID NO: 114643 - DNA, 440 bp, Homo sapiens
gatggagggcatttctgcagggggggcagtgggatctcagacacagcagaggctgcaggggaggatggagggcatttctgcaggaggggcagtgggatctcagacacagcagaggctgcaggggaggatggagggcatttctgaccccttgcagcactcactggtaaacatggaataaggtgactctcatttaggattttttttaactttaaaaggctaacatataaatagtagtttgcaaatttagggattttgggagaggtggttaagactaaaagattataaaatgaggactaataacttaaaagccattatgtaatggtaatcaaacaagaaaaaaaatattttaccatcatgaaccagctataatttggggagtataacatggtctttgggttttatgctggatgtagacctaaattccacatttcttaaaatcc

SEQ ID NO: 114644 - DNA, 245 bp, Homo sapiens
agattttgcaatggtgactcgggcacagcgtgtctccaagaagtaactgactgaccacttgaccacttcacccttagggctagctcaaggacaaatttatgggacctattcccatcctctcccagtggacaaacaacattcaagatagtacacaagcagatagatagggcattaggccagcagatgttagttactagaaaacattttcaccaaagaacaatagaattctgatcaaaaaaccaaat

SEQ ID NO: 114645 - DNA, 304 bp, Homo sapiens
ggatagcacccattccttcatttaatcattcactcattcattcttctctacagtctgtctaggtgctgagtagtaaacacaacagtggaaaatatatgctccaggaatattacattccctagaggaagaggacaataaataagcaatatcagggataagtgctaaggagagaaggtaaaacagggaaggaagataagaatatgtatgtgggaatgggatgctgcgttcaattttaaataaggtggtcaagaagactgcactgcaaagatgagatttgaggaaagacctgtaggaggtgagggag

SEQ ID NO: 114646 - DNA, 173 bp, Homo sapiens
agcatgagttttcccttgatttgattcagttctgttgggtacttcaagctctttgggcttaaaaggtatgtggagaatttaaagagagtttggaggagaataatgaagatgaattaaggattggaaattgggacctattagaaaaggtcaaaggcacaaggattatttagttt

SEQ ID NO: 114647 - DNA, 484 bp, Homo sapiens
cctctgcctcagtctcctcttctggaaagtgggattggaaaccacatctgcttctctcccaggactgctaggaagacaagattagatggcaggaaggaaaatacatgtacagccaacttccttgaggattcgttcttttgcatcagggtgtctcaaactcctgcccttaaaacacctgcaagagaatcatccaggtggcttgctcactctgcatgcagaccctttagaatcagagtcagaatccctggggctggagccacaaaatgaaatgacatttcaacaagtttgtcatcacgtaagagagaatagcttgtcttcttctctcccagtagattcttcatgaagaggccatgtgctatattccatgagatatttcacactcaaagaagacttcttttatactcttttgataatttgtctgggaatcactgtcttgatttataagggagtttgtaataaatacagtaaaagagaaacacacaac

SEQ ID NO: 114648 - DNA, 444 bp, Homo sapiens
ctgtcagagagctactctactgtgaagcattctaagtgagaaacaagccgtgggcaggaacctctccatgttccgttgatagctgtcaggagggagagggtttacagcaaaatcacttccgctacttttacttggggtttgtgccaaagcgtgctgatccttcaggactctgctcagatccagacttcagaatagcgaggtgtggggagctgagggtggaagggcccctggaggaagtgctagctccatgagtctgcggtgccatgcaggtcaaggtagtgacctgtgtggccctacgtgccaggtgatggactaggggaattgcttgcacaagccctggaatagagtagatggtaaataagtgttaaattatgtgtaggaatgtgacagcagaaaagaggtgccagataatgtttccatattggttgcaattcaaattagctt

SEQ ID NO: 114649 - DNA, 364 bp, Homo sapiens
gatgaaggccttggatatttctccttgtagggggaatcagttgttctgaagaactttggtgtttgccttaagatgatgagtagaagcttctctgtgacaactgcatttcacactcatgaaaacattccagtaatattaaccacgtggctcttgtaatcttaaaaagtcccatattgcttcagcaattttgtcaagggggttgctaggaaaaaaagggaggggtggcagaatgtcaattttctttagggtggcaataagctcagctaagattgtacatttctcagattccttgtagtcaggggagacctttggcaattctggctaatgagaagtaagcagatgttacagggtggggcttccagga

SEQ ID NO: 114650 - DNA, 952 bp, Homo sapiens
ccacgaaggagttcccgtgccctgggagcgggttcaggaccgctgatcggaagtgagaatcccagctgtgtgtcagggctggaaagggctcgggagtgcgcggggcaagtgaccgtgtgtgtaaagagtgaggcgtatgaggctgtgtcggggcagaggcccaagctctcatacttacctggcaggggagataccatgatcacgaaggtggttttcccagggcgaggcttatccattgcactccggatgtgctgacccctgcgatttccccaaatgtgggaaactcgactgcataatttgtggtagtgggggactgcgttcgcgctttcccctgactttctggagtttcaaaaacagactgtacgccaagggtcatatcttttcttgtattggtttgtgtcttggttggcgtcttaggtgttaatcctacagtagacggttggggaataggaagtaacatgtggcctgcacgccataggagaaaaagcgagcatcagccgtatcggctttgtaacacaaattagctatcgtgaagtccgctcagctcttccctttctaccctggctgctttttgcagggattggtccgtggtctccagtctcttgggttctcaccctgtgtgaaaatcttcctgtttttccctaccccccaagtcacctcttacacagcctctgcttccaaacgcagcccccacaggagtttgtaggatttctgtgctagcggggaatgtgttctcacctcatagagccaggtagaaattatgcagatgggcgctgttctctgggaagaaagcagggcctttggggctctcagtgtccccgttgggttgtagacataacacgcttactttgcgtaggggaacggctctgccggcccccaggtgccctagcgcatatgcacggaggcccgcaggtcagaaccgcagtctcacctgtcttggcggaaatgccct

SEQ ID NO: 114651 - DNA, 324 bp, Homo sapiens
ggaatacctaagtagaatggcaatagtctataaatctatgccagttttccaaatggaaaattattaaattttttttaattttagaactcctcaacaatccattattgaaccgtattgaaaatctggccaaataataaaagcacaaagagtagaatttctagaatattcatatctacttcttactaccttctttttcatcaccaaagcaacttaaccatgtgtaagcaacaattttattccttaaagaaataatgaagccaacagccataattagggataatgtgtaattttttcctaaatcaatttaatttcagatagaattcc

SEQ ID NO: 114652 - DNA, 391 bp, Homo sapiens
ggggttgtcagtccaggtaaaaaatgagttcagtcctgaacatatttgctcagtttgagatcaaagcaagacagccaaggggaggcgtcgcgtggaaatgtgaagacgttgaactggagttcaagaaggagttctggagtccccttcagggagtaatggtgcatcatggagcagacccccagtggaagttagagagtgcaaagaacaaagagaaccacgcagagctgcccctgcagctcacccacactgaggggcatgggaagaggaagaagacagaagcagagacacggaaagagcgctaggagggacccatgtcccagagttaggaccaggagaacaatggagggaaacgaggctggaaccagctcactgtgtaccagactatcaaagt

SEQ ID NO: 114653 - DNA, 796 bp, Homo sapiens
ctctgttcctgtatactgcccatatctcttcaagaaatgatgactggtttcctgagctaccccgctttctatacacacacacacccctccacccgagaatgcagattacattttcccttctgtgcacacctctctcagtttacagcatccatacttagattcctcagaactttagtacgatgataaggcatgaagcagagacttctgttgatagatggaaactgaaatgtattctttagggtatgacatcaaaaatgcatttattttttcctcttactgtattaagagttggtaatctgaaaactctgatttccaaatttgtgaatggttgaactacagatactactgtatcagtgttcttaccaattgcaacagttaattcagtgcaggggttttgatgtatgtacagtcctattttaaacatgacacttccctcccttgccccaatcatttaaaatctacattgcttaccaatgttcatttctgatttttgttacagtctttcattggtttttaacttgacatgctagtttccaagatgtaatcttacacatttgactgttttgtcactggtccaacatacctggtgaaggaataaatccattaggtagaaatagttgggttttttgttttgtgtttttttttttaatagaaagctttggttaaaaaaaaaaaaaagaacagggtattttaaaattttgtgtttgaaattaaataacagttttccaggcatatgtttaaattactgagatgagtacttttgaggagactactatcttaactgaaaattttaatt

SEQ ID NO: 114654 - DNA, 938 bp, Homo sapiens
ctcccggagggggctgggaagtaagcgagtggaggcggagtcggctgtgcccctgacaggttagtttgtgtttgtaggcatgatcggagcctcccccatagtccagtttgtgtgtgtttaattaagggataagagtggtcgaggacacgatcttgagaggggattttacctgtgtgacaaggtctgtggtgtccctgccgcgttgaacggtatgtgggaacgacaggatgatctcagtgttgtaagtttaataaatgtcactggttagtttgtacatggaaagagatgtttttggtctagaagacagatggtctgttggtgtgtagcggctgtgttggtgtgtgtatgtgaggatggcaagtgtttccgtaagagtttgcctttatttgtgtaagtgtaatggagttccccttataagttagcttatttcttgaataaatgttgggaggttccttgcaggttgatatgtgtgtgtattttagggattgggagcccctagttacttgttgggaaagagcggcaatggtagtgttctgtacagcatgtgtctgtgaggtcagggaggggagaaacttggcatagccagttgtggtcttaagaatagtttgtgcctttggttagagtgagttgtgtaaatgtgaagggccaaaatatctttaacagaatcattgctacaaagctgtaaagaatgggtggccttatttgttgtcgcgggtttatagtaatagtttacaatacaataagaaagctctttcagtttctttgtgatactgaatctctgtgaaaatggtaggatgctttcttccattttacaaaataggaaatttaggcataaggagagaacttctccaaggccgcatgttaaattggtgacaaagttggaactgtaactcccatattttcactactactgcagcagtatattcagcataccatgg

SEQ ID NO: 114655 - DNA, 249 bp, Homo sapiens
gtagaactaagagaccaagagccatggattattattctcaggccttgcttcaagggctttcctctaaagctagagaccgagaactgaagcccaggtcgcctctgctctggatccccaaatccatgtgagggatctgtcttttcccaaccccaccctccccgtctggcatggcctcaagggcagaacctagcatcttagctcttccttctcctctccaaatctcccagcccagaaagaatgtgctgctgt

SEQ ID NO: 114656 - DNA, 299 bp, Homo sapiens
tctagaggatctccgtctagcctcgccagggtacacacaatgacaaaagctgctgcaagttcccctgcgggcacggttgtaggcacttcatattcctgtgttgatttgctcttcatttcaactctgtgtgtgtgtgtgttgggggggttatgatcaccacccccatttacactgaggaaacagaggcttgaggagtacatgacccatccaagaccacacagtgaggaactgtcaaggaagatctgaaccctcgtctgcgattctccagcttgcagccttaagcagccacctgccctgcc

SEQ ID NO: 114657 - DNA, 186 bp, Homo sapiens
tcttcttcctcagtgtgtatgtgtgtgcgtgtatagcatgactgtaaatacttataagttaatagttttctcctgtttatatacgcatgtacacgaggaaataacataggctggaaagggatatcgttcaggctggcagagtctgagcactaactatgtgccatgtactttatttacacacattat

SEQ ID NO: 114658 - DNA, 567 bp, Homo sapiens
  misc_feature (3)..(3): n is a, c, g, or t
  misc_feature (57)..(58): n is a, c, g, or t
  misc_feature (67)..(67): n is a, c, g, or t
  misc_feature (73)..(73): n is a, c, g, or t
  misc_feature (106)..(106): n is a, c, g, or t
  misc_feature (564)..(564): n is a, c, g, or t
ccnttaaaaaatatttattttccccctgaatgcttttccttaaaaggctcctgccanncaagcttcnaaggtnagaatgtttggtttccaacacaggacctccctntgagacctcacgggaaaagactatgcaagagtcttgctgtgtcacccaggctggaatgccgtggcacaatctcggctcaacctccacctcctgggttcaagtgattcttctgtctcagcctcctgagtagctgggactacaggaagagtgcacaggagcctggcactcctggacctgaggaaaccctgaaactgttggtatttgcagatcctctccaaaaagagttcaccgatctcctaagactgcaaacctgaccccagcatgctgggagccaagagggtctgcggatctccctgcttagcaaattgtgtgtatatatatacacacacacacaatgaaatactattcagcctgaaaagaagaaaatcctgccacttatggcaacagggatgaatttgaaggacattatgttaagtaaaataaacccatggcctcgtggcctcagcggggagctctcngcc

SEQ ID NO: 114659 - DNA, 326 bp, Homo sapiens
gttacatgcagctaagccaacaatagatcagtggttgcttatttaatatacataatactacctatacttttatctttacctaatacatatgccatacacaacgattttaaagttgtgattgagttgagtgaaaaatcttttagaatacccacgaacagacataaaattttcattgatttctgtgaatagtaacaacaatagcagtaaacaattgaatgaccctcttctcaactgggattctgagaatgggtttcaggaagttttcgtttttatgtgtgttctgaaactatgcaattcagaaaggaatgaagggccagacctgccat

SEQ ID NO: 114660 - DNA, 397 bp, Homo sapiens
ttgctgttgggccataggaaggagccactgaggataatccacagacagcattatagacattttagaaagagaaataaaatatttcccaagtcttcattcaatccagttgaaatacagtggctagtaaaatattcttaattcagacctaaagtaagactgtcattgttgattttgattagtatttccaagtggaggtattaatccatgttgcagaaatttgaagtgtttgctatgaagagtattttctttgtgggtttgtactagttatttctttaaagattttggaatgttagactaatacaagtagaagattgggaacactagtcacacgtgtaagaagtgaagaaaacttttccttatttctctgaaggtaaaaaactgttaggatggaggaaga

SEQ ID NO: 114661 - DNA, 677 bp, Homo sapiens
actcaccatcacgagaactgcatgagggaaatccacccccatgatccaatcacctcctaccagtccctgcctcaacagttgggattacaattcaaggtgagatttaggtggacacagccaaaccatgtaactgcatagcaaaatctctgtcgtttaaatataaatcttaatgactttgctgttttttaaaaaattaaagtatacaaagcaaatgtgtaacaaaaaagaaaaaaacaacaacaatgacctaaaaagacaggaagaaataatacatataaaaggaaaaataataagaaaagaaaccactcctaggagacttgtgccatggatactatggcccctcacccagtcccccttcaggttcaaggctgttgctgggagtaattattggctgttgatggctcacagctgaatccattttctggaattgaccttggttaaaggaagttgcctcaatacatttatgtctcttcttcaagggtagcccacaatccaatgactgaattcaatgcagcgattcaaagacccagccctggtgccttggattggtacatctctgaatgctctttcagcctcaatgctccccctggagccagctgaggctactgatgcagctgcatttcagtttggctttttcctctgctcagtactattttctccctggcttcctcaaagga

SEQ ID NO: 114662 - DNA, 666 bp, Homo sapiens
caaatgttatattgaattttacaagagaaccaaatttactttcaggtaaattttggtgaggaaaattgtctttagcattggattttctgtcatctatttgttcttcatactttgtcagtatttcattaatatgtaggccgggcacggtggctcacacctataatcccagcactttgggaggccaagtcaggtggatcacctgaggtgaggagtttgagaccagcctgaccaacatggtgagaccccgtctctactacaaaaaactagttgagcatggtggtgggtgcctgtagtctcagctacttgggaggctaaagcaggggactcacttgaacccaggaggcagaggttgcagtgaaccgagatagtgccactgcactccagcctggtgacagagcaagactccatctgaaaaaaataaataaaataaaaattagctgggaatggtggtgcacacctgtaacccagctacttgggaggccaaggcaggagaatcacttgaacccgggaggtggaggttgcagtgagccgagagcacaccattgcactccagcctagacaacaagagtgaaactccatctcaaataaataaaataaataaatacataatacatatttctctttatgttcaaaacaaaaaacacacccacacacacaaacaaacag

SEQ ID NO: 114663 - DNA, 138 bp, Homo sapiens
gttttactctatgttccttctgcatagcctggcaactctctctagacagtattgctgggacagtcataggactcagttttaaatattttaggcattgtagccctgtctgcctgttttcccatgcgtggatgccagtgt

SEQ ID NO: 114664 - DNA, 205 bp, Homo sapiens
tctaattcagttatgttctgacactatgtacctagagatagcatcagattccacaggttgagggcttagtccccaagactggcccccacctttagatgccaatggctagccccaggctgtgtcacctatgcttctgactgactagctataaatcagggatcccacggctccctctttgggcccaattaatttgctagagcgcctc

SEQ ID NO: 114665 - DNA, 805 bp, Homo sapiens
catgattccagtgccactgaggggaaaatatgtttggcaaccctagtagatcgtattcctttatttacataggcatccacttttatacatatatatgtactgagaacttgccaaattcagggcttggaactagggtgttagaaatgtaaaaataagctagtaatataaaaatataaaaataagtggagtagttaagctcaattgacaaaaacctgtagtttaggtagaaggtgattataagagtacaaataaagtattccaagggttcagaatagaaaatgatttcttccagcttggggacatttgggaaattgggatatcctttggggaaatgtagtaatcagtatattctgggaaaacatagtagagaatgaataaataaattccattgaatttggaatatgttgtccattctccctgtaactaatgctatcaagataaagtagaaataccacatttcagaaacagctggagtagacaggtcttcataggctagcttggaaacctaatagctattaataatgaaattttaattatactctggattctaaacaatgaacacacagtgatctttttgacttgctgcttgtttataagttggggatggtctgaattcattgttgattcaaaagaaaacgaatagtgttttaaaccttttatttacagagactataatttgtcaccttcctaccaacatatcttaaatacaccaagaccttttacagaagcttaaacaagggtgtacagctcttgttttactcctctcccaccaatctgctttagcttatctggactttggtatgta

SEQ ID NO: 114666 - DNA, 229 bp, Homo sapiens
tacctcaacctctggttgctccgtgattttgtttgtataatgaagtcacaacccatcagagtaataagggccttccgtaaaaatctccctggttttcaacaatgcccttagacagggagttccctgagctccaaagaagacttgtccccttaggcagagctttagatgtctttattcttatggtccacaatccccctgggcagaaatcttgtcccactgcacaggaact

SEQ ID NO: 114667 - DNA, 330 bp, Homo sapiens
gatagtgcatgcttactgaggaagttaacagtgttaggattcttcctaacctttactgaaaggtactgttataaaactggtagaggagtatgtgaaagctactggtgaagaaccaatgcagtgaagattattcaagcatggtggtgatggataaaagcatagaaaaaaaactcagaaaattattttgactgaagacttttcattacttttcttatgtgtccttgagtagcttataaggactaggctgaaggctactattaaaagatttaggtgtacctttcactcatgttctttcatgagacacacggttctctcattcaaagtacaagg

SEQ ID NO: 114668 - DNA, 245 bp, Homo sapiens
cacagcctacctgtgtctaggggtgacctggacaaagctgacccaaggatccatccaatacagtcagcctggattgaaggacattaaatcctcaatcacagagtatagctaacgaatgaaacaaaggcaaataacttggagtagataaatccagagagttatccagtaacacaattcaattttattctcaactacagcaaattccaataagcattttgctcttccctggctataactgcacacat

SEQ ID NO: 114669 - DNA, 594 bp, Homo sapiens
agagatcatggccaaaatgagctaaaatcttcagctagaaggggaaaagcttatgggccagtgccagtgcctaccctgtagttcctgagaaagctgagagcaggtgacccacttctggcctagcagaatgagctgctatgcacagcatgcagctgcaggggtcacttcctgagctggccaccagacctcggaaaagctaacctctcaggtggtcttgaagttaggttagggcatccctaaaactctgggtgcttgtggcttctgctgaatttagccatgccagggctgtggcagacactctgtaggccacactgccatgggacagggaataatttgggtgatacaccactgcaatttacacggggtctcttctcagcttggatgctccctgggaggcccagtgcttctgtcctgtgaattctgcatgtgattacccatgatttctgtcataggcatttcccactcttctgcttgcttgagaaggacttggactgatgggacactcagggtctagcccagggagcatatgcttggctaacctaatctccccttgatgtgtatacagaactgtggaaaagcagttggtggatccca

SEQ ID NO: 114670 - DNA, 370 bp, Homo sapiens
catagatacccaaagacagtccctaaattagaatctctttgctgactcttaattttcaaaatatgaaggcacctgattctgcttctccatctccccactgccatctgaaaagcttaatgtggaaataaatagttattctctaaacattaagcgatacaaaagaaacacacttgataattatattattcatcagacactcaaattgtgaggtgaattttctataagataatagaagcagggctgggaaggagagagacttagaaggcatgaagctactcttaattttgttagctttaatcccaattagccgcctgtaacattatcatgctgcttgtcccttggagaaaattcatggtacaaggtgaaataa

SEQ ID NO: 114671 - DNA, 425 bp, Homo sapiens
atcctagagcttggcatttctagtagctttttccagtgcaaacattctcaaatctgtactagtttccattgctgtactgaggtgtttggttgccacaattaagcaagacagctttttcccaatttgcttgaaaaaaatactgtaattagtctctccctttcataaaattttcttaagaaattgctacttctgataatactgacagaaggtaacataataaatactaaactaatactaatggaaaaacttagaactaaccatgtttaacttgagggctttaaaaatggttacttgtgcttaaactctgatttttatattgtacatttatatatgctatttgtgtatatttgaatatatgtatgtacacataggcatttttttggttagtaaaattattctggctgggcgcagttgctcatgactat

SEQ ID NO: 114672 - DNA, 602 bp, Homo sapiens
caggctgcaaggtcagcagtgacagcagctgctctttattggcccaactatgtggcagacggtttgcctgatttttttttttctagttatcctgacagcctagtggtaggagcagtatttttattcccgttttacagatgggaaaatgaaggcccagagaggttacctcaccagaatcccgtagcagaggcagaaagaggctggcaggtgcacagggtcgtctggctgtggggttcagaacctttctgcatcgcagggcccctccatgcatggctcttccaggacagaggagagcaaagaggtggtggcaggggggtggcagaaggctatgactgtggctgggttctgccgtcaccctcagtagctatgggactaggcagggtctgaggagctgagggccagacatggcccatctgccttggtgtgggggacagactctcaggtatccttggaagccccaccccccggtgctcatgccttcgtgcagtcctcacctttggtgtggatggcattcgtgaccagctcctagccagcagactgtgcaaaagcattgggccatcactcccaggattacactgtgctctgtaagattccatctgcta

SEQ ID NO: 114673 - DNA, 309 bp, Homo sapiens
gggaaagagagaggtggagggagctgccgggcctcagtggaggacggacttggggatgggtgtggggtgttcaggcaatggatgactggtcctgggctgaagccactgtaaaaatcccagtgaaccgtgccaagctctctctagtcaccctcaccgctgatgacagcaccagatcacgactccgtgactccgtctctagaggaaaggatagcccagccgaggcagtggctctgccacgtccacctggccagcactcagtagaggtggaagccaagcctatggtttcacccctgccagccactccctgcc

SEQ ID NO: 114674 - DNA, 277 bp, Homo sapiens
ctttaaagcaatcaaagtggtggaggagattgctggagatattgatggacagaggttagctgtgtgttggtaattttgaagttaggtgatgtgggtacatggaggtttgcaaaaccattttatatggttttgaatttttccaaaattaaaagaaagagagaaacacataggagtagtaaaaatgaaaaccccaaagctggtggcagcactttggagggacttaaggacacgtcccgtgcacccatgcctctggctttacctcatgggggcaccgatt

SEQ ID NO: 114675 - DNA, 357 bp, Homo sapiens
cagcctaactggccctgggagtctgcagtgtgaatccaccaggcctgagcaggagcagctgggtcagcctcttctctgttgcaggttgtggggtactgcttattattcacagagcatagcagctttgtgtggcttttatctggctccgtacaaccttcttaaggcttaagcgctgggatttttttaacaaggctcgagcagaagggccctggcttcatctctctcccgtgagcagggcacacccggaactgctctttggagtaagtgtttctaaatctgttatatttgttcattgattgattgattgattgattgagaccgagttttgctcttgttgcccaggctggagtgcagtgg

SEQ ID NO: 114676 - DNA, 485 bp, Homo sapiens
gtatttccccttccctgaagacgttcaacccaaggaaagcagccttttggggattttgtcacccactctacctttccagcctcatttctcactactcaaatcatcccaactctctatcccatcagagttccaagaggggaacgtacaaaactcaaggctttgcacaccctatttctaatacccggaaaatcccttaactctctggttaaaaaacaaatcctgttcacctgcaaagcagagccgcaacaaacatccattgaatgcctactacttaaggcctactggattcgtgatcagagcacagagtctggagccagactacttgaattcaagtcccagttttgctactttctagccacatgatctccagaaggtaaattacctgtatgataaatcatgtctcaggttcctcaactataaaacagagataacagattttctgcaaagggttgttgtgaggattagatgagttagtttctggggca

SEQ ID NO: 114677 - DNA, 808 bp, Homo sapiens
atcaacagctcttttgaggtataacttacataccataatgtatactcattaaaactgtacagtttaatgacttttagtaaattgaccaattgtgcaagcatcaccaaaatccatttctagaacattcccaccatccctccccacccccacaggacaaccactaatttgctttatgtcactatacgtttgccttttcaggacatttgatataaatggaacttatatgttctcttgtgatcagcttttttcacttagcataatatttttgaggttcattcatgttgtagcatgtattagcatatcatttttattgttaaataatattctgtttatgatatatcacattttattcattcactgatagatccttgggttgtttctgattttgattattatcaataatgctgctaggaacattaatatacaaatcaagtctttctgtggatatggattttcatttcttttgggtaggtacctaggagtagaattatcgggttgtgtggtaattttgcatttaacattttaagaaactgccaactttttccaaagtggttgtaccattttatgttctcaccagtgatgaatgagggttctagtttctctatatccttgccaacatatagtattgttagtttttttcttataaccattgtagtgagttagtagtgctatctcaatttcttcatgagtaatgatattgggcatattttcatatgcatattagccattgtatatcttctttggctaaatgtgttttcatattttttgcctgtttcttagttgtgtcattttggttttattgaattat

SEQ ID NO: 114678 - DNA, 369 bp, Homo sapiens
cctggctcgacttagggagggggaaaatgtgcgagggcctttacggtgtggcagtgccagctatggccccccagcagacaacaaggcacagtggggcttggggactgggggaggccagccctgtccgcctgtccttgacatcaggaggcttgtgagtggagtcctgcaacccccacccaacccctgtacaacgggggttccatttctgagacccccaaagtatggggcatcttagaggcccgccccacagctgagcatcatctcaaggaccttcccccatgacgggatcctaagttcagagccatggctctccaactgaggctattttctttgtgctccacttgtgcccacctccacccttattgcaga

SEQ ID NO: 114679 - DNA, 607 bp, Homo sapiens
tcttcagacaggcttattacaaggatgatgacgaagatcaacatgatgctaatcatgcccttattatttataatcatggtactgactatgggccaggtattatagtcacagttttcataaatcatctcatttaattatcataataatgaaattaagtgggtgccttttcttattcccactaaatagaagaggaggccgaagctcagaaaggttaaggaacatgctccagatcccccaggaggaaacagtaaagccagattcaaacacaggactggtttctaagtatacactcttaactactgcagctgtcagtcaaccaaaacttccatgcagctgttgagctaagctttctgtatcctatacctgctcagttggttttatttaaagtaactaaaaggtttgccttccccttagattcactcatctttccctcctacccgtcaataaggcctttggcacctgtaacctaacagctagtctcccctttcaggtgaaccgcgttatccatgggtctgatcagtatactttgcactgattcctattactgataaaactgtggaactggacaagacccggagaaaagccaccagctacctccaccctggag

SEQ ID NO: 114680 - DNA, 198 bp, Homo sapiens
cctctttgactttctcgtccaatttccttcacttcactgagcttatttccatgttaggtgacatcctcagggtctgacaaggactgaataaacccctaactgatactgaatgattgaggggccaggtgacctttatacagatcgtgaggagattgggttgggtttggattgggtttttgagtttctgagctgagttgg

SEQ ID NO: 114681 - DNA, 752 bp, Homo sapiens
tacctgggggaaaaaatctcaagactcttttgggaaaaaggacttaatgttgcagaggagctctgatcacccaggtttggtgcagaagtttgcgtgacctttttctaggaagctgctgctcaccattattgcagcataccttttgcattgttttgctagtcttgcaaataggtttcaccaagccacccacacttcccagccatctttcctgaaactactgaatgcacctctgagatggattggggtgtagtctccaaggcacaaagctgagttaattggacgcggagactgaacctgtagcagtggcctcgttagcaccactgaactacccggacacagcctcaatgatgcaaggcacttttggtaagatgcttcctgcaggtgtccttctgtgcacatatgctcccttcttccagggctacttggacttgatgactaagaatgttgaaagaatgagaccctacagtggccaagtcatcctgaagggactggccatgactgaagcccaagttcttagcatgttcatgcttgagaagcaacacagcacagggcagagaaagagtacaaggtttggagtgagattggtctgtgtttaagtccatccctgctacttactagacaagagacatcagacgttacttaacctttgtgtaccttatttccttcccaggattgtgacgacaacacctgctgtacctggtggttgggtttgtgttaacctagccaaacccccagcacaggtgtggcacatg

SEQ ID NO: 114682 - DNA, 452 bp, Homo sapiens
cagaagcataaagtggccattattgtgaagtccactgagtgaccatttaagcttggtgttatgccacacactgtatagtgaatttcataatcctggtgccagatttctaaattattacagacaatagatgatggactgggcacagtggctcacacctgtaatcccaacatttggggaggccgaggcaggcagattgcttgagaccaggagtttgagaccagcctggccaacatggtgaaaccctgtctctaaaaatacaaaaattagctgggtgtggtggcgcgttcctgtaatcccagctactctggaggctgggatgggagaatcactggaacctgggaggctgaggctccagtgagccgagattgcatcactgcactgcactccagcctgggtgacagagggagaccctgtctccaaaaaaaaaaaaaaaaaaaaaaaaaaaaaaaaag

SEQ ID NO: 114683 - DNA, 142 bp, Homo sapiens
cccacctggcaggtagagcagtgacatatgttgagactttcacattttgtgccaagtgtcacgtcccagtgaacaatgatgtagcttcaccaaaggcaaaagtggcagattcttccctactctgtcattcataatgtgactc

SEQ ID NO: 114684 - DNA, 226 bp, Homo sapiens
gttccagaggatcccgccctgattagacatctatacacatatttaaggacctattatttaccctctatagtttatataagtatatattttatattgtattatatatttatacttttcatatttaatattgtttatgtaatatgtgaaaccatatgtaatatatacctttatattttatcttttattttaattttttttttgagaaggagatgtctatagttgccca

SEQ ID NO: 114685 - DNA, 215 bp, Homo sapiens
gtaacaaatataccactctggtatgggatgttgataatggggaaggttgtgggtctgtggggacaggggtatatgggaactttctactgttttactgtgaatcaattttactgtaaagtttattaatgttaaaaaatttaatgcacatgtaccctaaaacttaaagtataataataataaaataaatttaggcaatctgaaaaaatgttaataaa

SEQ ID NO: 114686 - DNA, 749 bp, Homo sapiens
cacgatttccctgataaagccataatttaaaacactgactcaaagccctaataaaggaggttaacttgctttctaaatctgctgcacagactgctcatctctccttccatcagcctcccttctcctaagccaattgtagaatttggaacaaagagaaaaagtgcaaggtttttttattgattcccttgttaaccagattctgctgttcagcaacatggtgagcatttgagttctggttctcagcatgcatgtgaaaaatcctcaagtcattttctaccttcagagatttgggggccaaacagggaataaattaccaaacaatgcttatcatgctcccaaacatttgctgaaatcatttagtttcaattattttaattactgaagattttataagcagagttcatggcaaaaacatctgccttcatgaattggcacgaaggaggatgagtatatatgtagaaataaaggaagatgagtatatatgtagagatgaaggaggatgagtatatatgtagggatgaaggaggatgagtatatatgtaaggatgaaagttaattagtatatatgtagaaatatatatatatatatgtatgtgtgtgtgtatatatatataaaataccagatgggtatgtatgtatgtagagatgaaggagtatgagtatatatgtagaatgaaggaggatgagtatatatgtagggataaaggaggatcggtatatataggagtgaagggtgatcagtatatatg

SEQ ID NO: 114687 - DNA, 856 bp, Homo sapiens
atcacagaacaggcagaggccgttcagggggtattctggttgccttacccagctctgaagtctgtcagcctcttcagatgtcacttgccctgtggtaaggaagtgtagttggcagctggtgcagtggcaagaagagaaaggaagttccccaagacagaaacatctcggcaggtaaagagaaattccctagagccccaatcatgggatcagctagttggaagcaggtggcattcctgggtagtttctttcccttccagtgagcagagcggttaagccttggtgtgcttgtgtgtctgattgccccattcatcggaaaccagaccgatggtttcaggaactctgagtgtgttgttcccctctatgtgtccatgtgttctcatcatttagctcccacttataagagaacatggagcatttggttttctattcctgtgttagcttgcgaagaaaaatggactgcagctccattcatgtccctgcaaagacatcacctggttcttctttacagctgtgttgtattccatggtgtatatgtgccacattttctttatacagtctatcgttgatggacaatttagattgattccatgtttttgctattgtgaatagtgctgcagtgaatatatgtgttcatgtgtctttataacagaatgacttatattcctttggatgtatacttagaaatgggattgttgggtcaaatggaagttctgtctttaggtcttttaggaatcaccacactgtcttccacaatggttaacctaatttacactgccaccaacagtgtatgtgttcctttttctccacaatcttgctagcctctgttgtttgtttgattatttgttatttgttattt

SEQ ID NO: 114688 - DNA, 345 bp, Homo sapiens
gcccgctcaccgacggggtgacagggctgtgccccattttcaggaagatgggaccccggaggaggcggcagcttgtggaggggcttactgaggctcaggtggctgcactgcatgtgtcaagccagggtagggcttcagggagcagcagagcagggaggagctcacacctcacacagcaggcagaggtgcccactgtacagcaggcagcctgggaggagagacctccgtgtgcagcctcctgaatgtccctggctattcagtgggctgtcttatctttttaaacctttctgagctcttaggccagtgccacaggcagaataaagctgcccaccccgtcgggtggag

SEQ ID NO: 114689 - DNA, 188 bp, Homo sapiens
tgatgtgacgtgtgcatgtgtggggtgtgtgtgtgtgcctgtgtacgtggtgtgagtggggtgtgtgattgatgctgatgtgacgtgtgcatgtgtggggtgtgtgtgtgtgtctgactgtgtacgtggtgtgtgtgagtggggtgtgtgatcgacgctgatgtgacgtgtgcatgtgtgtggggtgt

SEQ ID NO: 114690 - DNA, 758 bp, Homo sapiens
tccatgatatttatgtataatgttggttttgatatttttgtatatgtgaaaagtcgatacgactttagagcagctctaagaaatatgcaaagatacttccaccagccttattgatgagctcttgggtttatgatttgaagaatactattgtgtttcctaaacccttatggactttttgataaaataggaatggtgaagcctcaacctcctgccctctcacggtattttttctttctttctttctttttcttgatatgaggatttacttttaaggcggtgacatttacagaagataatttcttaaaaaaggtttttgtttagagactgggtctctctctgttacctagactggagtgcagtggtgcgattgtagctcactgtaaccttgaactcctggactcaagtgatcctcccatctcagcctcctgagtagctgggaccactggtgtgttccaccacacccagttaataattttaaactttttatagagatgagatcttgctttgctgcctaagctggtctggaattacaggcatgagtcaatgtgcccagctaagaacataatgtggttattagcagaaaaaagtattttgccaatgtagaacctaggttttatttttttgactacaaattagaattgttgattaagtataaaaatctgataacagaatattctcttcaaatatgcttcactaggaacaaccctccaatagtaaatgctatgttttcttattttcagtgtcttagaattatataa

SEQ ID NO: 114691 - DNA, 493 bp, Homo sapiens
attgttgtttttctgtgttcaaagaaataaaggacatttcactagaggcctatctgtactcgattgtgctacaaaataataatcttagatacctgaggaaaccattgctgtttagactgagactcttcatcattagcccaggcatctgcctgccttcctctcttcatgttattccagtgtctgaaacatattacagtaagtaatcaggggcttgtgctagcctactcaactggggacttcttgaggtcagggactcaagaatctatcttgtctttgtaaacctttgaagtgcctagaattgcattttgtacatggtagagaaaaagaaaagaattccaaggctgtacttgctaacttgctgcattttatgtagtcacataagcccctttaagtccatgctggaaccagtgtaggtagcatgttctcactttaaagctcttccagccaagaactttcctacgtttacttaattattagctatttagtaagccta

SEQ ID NO: 114692 - DNA, 247 bp, Homo sapiens
tggggagtagagaccagaaattctgctcaagaaggaggcgagggagacaacaaagatggtaggaaattttctgggaagaacaaaaggcagcaagaggcgtttcttcccttcagttcgggcctttcagacagctgctcctatgattgatggagatatttatttgctgcagttttcttggaatcaccaatctcttgtcagtgctcagcacccctcaggagaacactgctggcattataaggtgtgcatt

SEQ ID NO: 114693 - DNA, 381 bp, Homo sapiens
gccagcatggtgaaaccccgtctctactaaaaatacaaaaaaaattaaccaggcatggtggcatgtgcctgtaatcccagctactcaggaggctgaggcaggggaattgcttgaaccagggaggtggaggttgcagtgagctgagatcacgccactgtactccagcctgggtgacagagtgagactctgtctcaaaaaaagaaaaaagaaaagaaaaaagaaatacaaactctattctcaggaggtcaaaagccccttctgtgctccatgattatcttcaagcccacctttctgtcacttcttcccactttctcagcagggtgacttttcctcttcacaggcttgaggatatcaagttgaaatgtcctctgattataacct

SEQ ID NO: 114694 - DNA, 302 bp, Homo sapiens
ccctgagacccacccacacacaaaaacacgggctcccacagagagaaatacatacacagacacacacactgacatccaacaggtaatgcttaaaactaaggttttcatggagcgtgaatagtgttctccacagttattttgaggagaaggagcaagtgttctctcaaaggtacttttaactgagccagaaaatgaagcaaaaacagacgggctgccattgggtctgcagaacagtgaatgctacaaagccagtttgatttggattcctgtttctggaactgcttgttcctgggcattgtttt

SEQ ID NO: 114695 - DNA, 387 bp, Homo sapiens
tttaatccttaaatctaatacatttggagtttatcctggggagtgttatccaacttgattttttgttggttttttttgagacagagtctcactctgtcacccatgctgtagtcccagctactcggagaggctgaggcaggagaatggcgtgaacccgggaggcggagcttgcagtgagccgagactgcgccactgtactccagcctgggtgacagagcgagactccgtctcaaaaaaaaaaaaaaaaaaaaaaaaaaagaatgcctttcacatctcattaataaactcattccctgtaggcccgtgtctcacagatgtcagtggttagtatcccaactctagctgtgatcgtctccaaaattatgcagtctgcttttgtactggtct

SEQ ID NO: 114696 - DNA, 935 bp, Homo sapiens
ctgtggcaaaccatgaaagcaggcaagacagagcagctccattatttgctgaatccagtgattaattttcaaggcacactcaaggttttataaggattattcataaatttatacagctttattcctttaagatgtttatctctgtttctatatagaaatctggccttattttttcaaattcacctttggaaaaatcgaagaaactaagaaaatatcttcaaaattgcagaagcctcccaaacttaacaccaacaccctgtagtatctggagctgaattcagtggaggcataatttgtcccagccaattactaaaaaaagaaattgtttttagtgatctgtaacctcttaataggtttaatgactcaaatcctattttaattgcttaatcatgagcaggaaatacaaaacaatttatgcagacttgatgttttctgtctagtaattttctttaactctgcccccttctccaatccctgagctgtaataatagccaacatttgacagtgagtgggtgccaggcactgtgctaggaagaaagtgttttgctgcagcaatgtctcttttaatcttcacaacaaccatgtaagatagatatcatgagcctcatcctactaatgaggaaactgagacttagaaaggacaaagtaacagctagaaagtcaaggagatggaactcaaactcaggtgtgtctgcagctaaagtcaatatgcatccatctgttcatccatctatctgtccattcattagcagatatttattgccatctatcatatggctggcactgtgttaggcattaaaagtacagtagtaagaaaataaagatctcgttatggtatagatggtctagtgagaagagaacagcattaatgaatacaatagataaatataaattttaatttggaaagtactgcaaagatgacattttagtgctct

SEQ ID NO: 114697 - DNA, 393 bp, Homo sapiens
tgaaaatgatactgacaaggaatacatctagatcagaaatactgatatcctaagtgagatcttgttttttaaaacaaaaaaaagtttaagaaattgtcatataggctgggcgtggtggctcacacacataatcttagcactttgggaagttgaggcaggagggccacttgaggccaggagtttgaaaccagactgggcaacacagtgagaccccacctctacaaaatattttaaaattagccaggcgtggtggtgcatgcttgtagtcccagctactcaggaggctgaggtgggaggataggaggctgaggtgggaggatcacttgagcccaggaggttgaggctgcagtgagctgtgattgcaccagcctgggtgacaaagtgagaccttgt

SEQ ID NO: 114698 - DNA, 211 bp, Homo sapiens
ggatgggcctttgttgtgaggttgttccagacagtggggaggtctgatcaggctggataaataatacttgtgtcaaatacacttggtgaaaatacctacctgggaggtttacacacacatttaaacagcagatgaaaaaaagtcaaatgagtcattctatccacctagctccatgcctagaacatttatttatctcactttttctagtctg

SEQ ID NO: 114699 - DNA, 3017 bp, Homo sapiens
atgtcttggctgcgtattactgccatggcccctccttacgtggcaactattgtctttactagtcaaggagctcagcctctggtgtgggtcaaggacccgctccagctgacctctaaccccctggggccacctgagccctggtcttcccgctcctcccatctcccatgggaatctccccatgcacctgctcccccagcagccccgggggactttgattacctggggccctctgcttcttcgcagatgtcagccctgcctcaggaaccaactgaaaatttggctccattcctgaaggaattggattcagctggagagctgcccctggggccagagccgttcttggctgcacatcaggacttaaatgacaagcggactccagaagaaaggctcccagaggtggttccgcttctcaaccgggatcagaaccaggccctagttcagcttcctcgcctcaagtgggttcaaactacagatctagatcgggctgcaggtcatcaggcagatgaaatacttgttccactagacagtaaggtttcaagaccaaccaaatttgttgtttcgcccaagaacctgaagaaagatctagctgaacgttggagccttcctgagattgttgggattccacaccaattatccaaacctcagcgtcagaaacagactttgccagatgattatttgagtatggacacactgtatcccggcagcctacctccagaactccgggtgaacgcagatgagcctccagggcctcctgagcaagttggactttctcaattccatctagagcccaaaagtcaaaatccagagacccttgaagacatccagtcctcttcactccaggaagaagccccagcgcagcttctacagctccctcaggaggtagaaccttcaacccagcaggaggccccagctctgcctccagagtcctctatggagagtctagctcaaactccactgaatcatgaagtgacagttcaacctccaggtgaggatcaagctcattataatttgcccaagtttacagtcaaacctgcagatgtggaggttaccatgacttcagagcctaaaaatgagacagaatctacccaagcccagcaggaggccccaattcagcctcccgaggaggcggaaccttcttctacagccctgaggactacagatcctcctccagaacaccctgaggtgacacttccaccttcagacaagggtcaggctcagcattcacacctgactgaagccacagttcaacctctggacctggagcttagcataactacagagcctactacagaggttaaaccgtctccaaccacggaggaaacctcagctcagcctccagacccggggcttgccataactccagaacccactacagagattggacattccacagccctggagaagactagagctcctcatccagaccaggttcagactctgcatcgaagcctgactgaagtcacaggtccacctacaaagttagaatcttcgcaggattcattggtgcagtctgaaactgcaccagaggaacagaaggcctccacaagcaccaacatatgtgagctctgcacctgcggagatgagactctgtcatgtgttggtctcagcccaaagcagaggctccgccaagtgcctgtgccagagcccgacacctacaatggcatcttcaccaccttaaatttccaaggaaactatatttcataccttgatggaaatgtatggaaagcatacagttggaccgagaaactaattctcagtgaaaattatttgactgaattacctaaggattcatttgaaggcctgctatccctccagtatttagatttatcctgcaataaaatacgatatattgaaagacatacatttgaatcactaccatttttgcagtatataaatctgggctgcaatttaattacagaactgagccttggaacatttcaggcctggcacggaatgcagtttttacacaacttaattctcaatcgcaatcctctgactactgtcgaagatccatatctctttgaactgccggcattaaaatatctagacatgggaacaacacacatcacacttacaacacttaagaacattctcacgatgactgttgaactggaaaaactgatcttacctagccatatggcctgctgcctctgccaatttaaaaatagcattgaggctgtctgcaagacagtcaagctgcattgcaacactgcatgtctgactaacagcatacattgtcctgaagaagcatctgtagggaatccagaaggagcgttcatgaagatgttacaagcccggaagcagcacatgagcactcagctgactattgagtcggaggcgccctcagacagcagtggcatcaacttgtcaggctttgggggtgatcagcttgaaattcagctaaccgagcagctacggtccctcatccccaacgaggatgtgagaaagttcatgtctcatgttatccggaccttgaaaatggaatgttcagaaacacatgtgcaagggagctgtgccaagctcatgttgcgaacaggcctcctgatgaagcttctcagcgagcagcaggaagcaaaggcattgaatgtagaatgggatacggaccaacaaaaaacaaattatattaatgagaacatggaacagaatgaacagaaagagcagaagtcaagtgagctcatgaaagaagttccaggagatgactataagaacaaactcatcttcgcaatatctgtgactgtaatactaataattttgattataattttttgtcttatagaggtgaattcacataaaagggcatcagaaaaatacaaagacaacccatcaatatcaggagcctgagcatgagttaaagcatgtggatggcctggagctatgtttttaaaattgttattaaatattggttttttacttaaatcaatgaaaactttctttactttgtggttgtgttcctcaaaatgagaatttttaacaataataaaaataaagcttgttagatcatttttaatggtaaaaaa

SEQ ID NO: 114700 - DNA, 274 bp, Homo sapiens
tgctcggaagcagaggagtgtgtgggacctctgctctaggaagggcagctaaagttactgctgaatgctgacttaagtataaaattgccagacagggatctgtgagtgagaggaaggagaaatataggaagaacctcctattcaagatgaacattttaaatgcattaactgaaatttcaaaacaaactgaagattaactcattatgggcaaatgaagacagctgaactttaaaaagacatttaaaaaaggtagttaggatgcacaattagataa

SEQ ID NO: 114701 - DNA, 152 bp, Homo sapiens
aagtgatctccagccacaggatcccgtgattctactcctgatgaggactggggctgtttttctttcctgtagcacctggaatgcagttctataccaattagacctccggtgaatgtgcttcacagagtttaatgaggctgttagcctttggc

SEQ ID NO: 114702 - DNA, 833 bp, Homo sapiens
gaaatataaatttcactttggaaactaatgagttaaaaccatttacagtttctgttaacgagttaaataatgtatagaatcatagttcgtaatggtagcaagttcatgctctgctgaacttactgtttgattatggtcaaattttctatgttattattatagtagaattaagagtgtgtcctggtaaattacattaccttcacagtttgagcattctgattttaacattttgtagtttcaaaacaaactgtactcatataatcagagcattaacagcagcatcatgtcagtggtaccaataattgtgaatcttctgcaacaaaatttctttaatgatgagtttaatgggctatattcaaacctaatttttattcaattcataagtgcccactaaatatgtattttatttctgctgttctgttcctttgattatctgcttttcagtgagcatctgcatagctaaaatagatatagcatgtgttgtaaatgctgttgaatttttttaaggctcaaaggtgctagtatataaataacagcacattgccaaataagcattttttctttcattttctgaagtactttcatatttactcatgtaattatcagcatttatggtgagttggaataatttttcctctttattttcttaaatgaccctagaaaacaatgtaaagtagctctgaagaaggctttgttgttgaatctgtctcataattacttgtggatcctttgacacagaattatttatagtttataattcaccctcatctagagaatgatgatttctattacataagtaatgtaaatagagctgagaccatagtgaagcagaa

SEQ ID NO: 114703 - DNA, 808 bp, Homo sapiens
ctcttgtgctttcctagaagtcagtgtcttgtcctgggctgttgcttttctgcttgactccctctgtggggccgtggactctgcggcagagtcctatctgcagggcttctgcatggttatccattgtcttctgaagaaatgatgatgttagtgatggagccactttggttagcgttttgttaagtatgaacttgtgaatccttcccacagctgtgcaatattattacctccagggcacagcatctggactttaattgatgatgagtgtatgtggccccaagggacatggggcctcgaaattaaggaaggagctggaagtagtggacaagcagcagcaccaccacgtggaaaggtgaaaagttggataaggactggctgagaaaatgccatcagaatagcaagagggggtcattgttgaagagcacagcttcaggcaagtctttgaaatcaaagccagatttcaaggaagtcggaaggagcagatggagaggaagtggagagatttccatatggtgcgtgtatttttttttttaattaaggattttggtgttaaatggaagtggtacttgatggcctagcaggatgaaacaaagtttgtttctaaagatagagggacatgggctcacttttaaagagaaagaaagtaggtggccattgagttatgagaggttgagaagccggagatggtgggcccagagacccacagagcaggctctttgagagcagcaggtcttcctgctcagggccttgctggtgctgtcacgagccatatcccctggcctcctgctttgcttctgggctgtcatca

SEQ ID NO: 114704 - DNA, 526 bp, Homo sapiens
cggctctgatctggagacaaatgaccgtgtgcatggcctgctgactttcccacctgtgctctctcgggcactgcttacgcagtcctcaggtatgaagtgatgggactctctcatgatgaccaggagggctctggccatgcaaggcccctggctggggagattgagcacagggaagggatgccagggccgtgcagacagagggacctcgggggcatgccagggctgtactcagctctggccccagggcgtgtccccaccacacagagagagctgtgacccctgggtaacctggccgcccactgcacagagggagccgtgacccctgggtgacctgccccacacagctgtgacccctgggtgacctgcccccaccgcacagccatgacccctgggtgacctgcccctgccacacagccgtgacccctggacgacctgccccgcacacctgtgacccctgggtgacctgcgcccaccacacagccatgacccttgggtgacctgcccccgcacacctgtgacccctgga

SEQ ID NO: 114705 - DNA, 840 bp, Homo sapiens
aagatatttaaatatacaacaataattgatgtcacagacccactacagtatactatatactttgaggtgttttatttcctcctcgtaatggtgaagattttgaactaacttacttataattcccttttattgtatgattgctgccatgtatttgccttgcatggctagaattatagtcctaagccttggaatgaagtaaataatagtaactatacaggatttcctagatcagtggtccccagcctttttggcatcagggactggtttcttgcaagacagtttttccatggatggggtaggagggaggtttcaggatgaagctgttccacctcagatcatcaggcattagattctcctaagggtcacgcacatgcagttcacaatagggctcgccctcctgtgagaatctaatgccgcagctgatctgacaggaggtggagctcaggcggtaatgctcactcacccaccactcacttcctgctgcatggccgggttcctaacagaccatggactggtaccagtccgtagcctggggcttgggacccctgccctagatctaatagacaaatcaaaatagaatagcactaactattctatttggtaaaacagttaactgaatatgaaacatggtcactgtgccagaggataagtagattgccagactagaaattacctggcaagctcctggaaattttattttattaagcttattcttgtggtagaaagggaggagggattttgcagagggaaattatttgtgattaacagatttctttgaacagactaattcatatgataaacattaagactttttttaggcttaaaaaattttttttccaa

SEQ ID NO: 114706 - DNA, 406 bp, Homo sapiens
gaaaaatagacacttattctttagcatcagagtatacagtataccatgtaatttatgtgttttttttttcagaaagtattggaaggtgcagatagactggtgttcatgagcttattttattttaaatttaatttatttgtataaatttaatgagtacaagtaccgttttgttacatggatatattatgtagtggtgaagtccaggcttctggtgtattcatcaccaaataatatacattgtacccattaaataatttctcattccccatccccctctgactctctcacccttccgagtcttcagtgtctattactccacactgtatgtccatgtgtacccattttttagctctcactgataaatgagaacatgcagtatttgactttctgtttctgtgttgtttca

SEQ ID NO: 114707 - DNA, 409 bp, Homo sapiens
tgcttgcctaagaggtttgcagggttcgagcttttgggagtcagaacttctcagactagattgtttcccctttggacagaacaacccaattctcagtgggcatttgatcaggactaacccaggccttcatgaactctttcccattgagcacttagccacctggctggcatttctcttctcccaggagcttccatgaggttcctacttatgtattatgtcgacttgaatgaatattttatgtctagagtgcagccaagcctcagactttgtggcccattatcgacaaatggggtagggggtgggcgccacctttggccccgtgatagcttctctgctaaatggactccccccagcagcactttgaagcccattaatggattggaatgaagtaacctcagcagatggaaag

SEQ ID NO: 114708 - DNA, 381 bp, Homo sapiens
cttaaagggtgaatgggaattccgtgggcaaaaaatagaccccagagagtatgtggttccaacccattcatttcagccatggaaaaacaagcccagagtggctttcacaccttccttaataacaaggtggttcttgtttctgggtgctgtggaaatgtcatgggtgctttttggaagatgtcttctttggagagctgggaatctgtggtcacatagactttgtgacctgctgttctcccacttgttgactctgccccaactgaatggccttcttttggttttcagtgtaccacctttatttccacattggagcctttgtgctggctgtttctcctgccttgaatatgtttccctaggtggtccttcttcatccttcacatc

SEQ ID NO: 114709 - DNA, 376 bp, Homo sapiens
agacaaacaaacaaacaaaaaacagaaaacaaaagagtagaaagactcccttcaacaacagcaggcaaataattaaacctcttcagtgtctttaagggctaaagccaaactggaaaagacacagtctggccactaaggctggcctgggaaggccacgctgcgggttcagtcctaacccagcaaacagctggcagcccgccccccacccagcgtgctgtctgggctagtctggggctgtcgggctagtcggggacttgtcgggctagtcgggggctgtcgggctagtcgggtgctgtcgggctagtcgggtgctgtcgggctagtcgggggctgtcgggctagtcgggggctgtcgcgctagtcgtgggggtaccga

SEQ ID NO: 114710 - DNA, 466 bp, Homo sapiens
ctgtcttaaccgacttcccctgctagctatcaccccatttctttgtttcctttggtaacaaaatttcctgaaagagctgtcttatatttgctgtctctaattcctctttccccattctttaatttttttatttacataaactctttattttaggacagttttgtatttatatttacaaaaaagttgcagagttcccatatactcctcacccagcttcccttattgttaacatcttacattactatggtacatttgccacaactatggaaccaacataaacgcattactactaattgaacgccatactttattcagatgtcactagtttttccttaacgttctttatctatttctggattccatctaagataccacattacatttagttgtcacgtcttcttagtctctgaaagtgaatgtctccttggaaattacataaattcaaaggagacaaggtagagccgag

SEQ ID NO: 114711 - DNA, 227 bp, Homo sapiens
ggcagaaattatcgctgggattgagagacagggattcaagcaccctgtaccaggagagaatgtggccaagggacattaccccagaaagcaatgtgggcctgacacaggtcggatgggaacccagatgaaagtccagaacgaggatgaccacatctgagggacagacaggtcttgtttcagctgatgccaacttgctcagatccctcagtagatcagactctcttcac

SEQ ID NO: 114712 - DNA, 1226 bp, Homo sapiens
tatgcaggtgtaatacaacaacttttcaacagctttctatttggaactaaaagcaaaggcaatagattagtcactagatcatggagtgattaatttggtttcccactctacctggcagagaaataaaaggtgaaatgacctcacacttacataccattgaaaaccttcaagtcagttactgtttttctttctcaaccctaacatcgtcactgatcattcaaaatataagtacctctagtcaaatctcttcttttaatacttgtcatagtcaacaccattatcagcaacaacagttgacacagcatttagctgtatattccaggcctgttctaagcaatttacataattagtccctttaagtactttttacccccatcattgaaaataaatattattcctattttacataagagaaaacagagtcctggggaagtgaagaatcatgctcaagaccacattgctaagtgtgagagcagatttgagcccaggctacctggtcccaagacccaaactctcactttacatagctctgctgcactgctcagggcctcctttcccaactcttgatggcaagttacacaaggccccctgaaaaacccagtcctacttacataaaatctcatcactaaccattctggtcatagaaagccattctctaaatcccaaatatcaatactcagagccttaattggaaaacttcccgaagaacattgagtttagaatatacctttgcaaaaagagaaaataaacactcgatatgtttaggtttttaattattgaattttttttttacttgcagatatagtcataaacgttttaagatccataagcaaactaaagcaattatgccaataatgactaaggccactgcttcctcaattgagtctttgatataaaagccttcacttttggttaattaccaaaaaaaaaaaaaaaaaaaaaaaaaaaaccgtgggagatatgtgacagtgagagtaggcctgctactgatgagaaggaccagcaacttagcaacaccataaaatgtctgctgcaattcaggtgtctaggtgtctccctgagaatcaacatttcatatacagctgttcccagaaaacaatcttgcacaatctgtacagtcaagttatgatctaaaaggagttaattgcaacattcatccaaagaatatgacagtatttttcatcaaggtctttttctataagtttttctataacttttcctataag

SEQ ID NO: 114713 - DNA, 182 bp, Homo sapiens
ccaaaaggtggaaacaactcatatgcctgtcaacagatgaatggataaacaatgtggtgtatacacataatggaatatcattcagctttaaaggaatgaaattaagaaatgaaattctgcccaggcatgggggctcatacctgtaatcccatctctttggtaggctgaggcaggcggattat

SEQ ID NO: 114714 - DNA, 423 bp, Homo sapiens
cttccttgctgacaaagtagatgcaataggtgggcccaagtagctaaggaagccgtgtgcagagcctgaaggggtgccagtgtgtgggccagccaatcagcatggagcccacgggaactgaaagatgtttaattctggggcttcatactagaaacttaatatttagaaagacaggttaaaacaagggaagagagaaaagcataagttaggtaattttggggataagttgagtgttgcctgcaaactatggtatagacagaaccaaagaaacagagacttaattaactctgtcaatcaacatttattgagcatttgttgagtcaggcactgggaacatgaagatgaataagacacagctcttgctttcctaggaactcacagtctggtggggaagacataaatggatacagctgattgtaaaat

SEQ ID NO: 114715 - DNA, 820 bp, Homo sapiens
tgccagagattaaccaaaagaatcatgtctgtttaaatggaagaaggaacatgcttaaggcaggctgacagttctttttgtgcacggtttgggaaggaagctaaacaatggtgtgtctgaaatgaatgaaggccttgataacattaaacctcttgcttttgtgacatgacttaaccatgtagtttttatctttccagtagtactcttttttcctctgcttctatatgttgtggctggtgaactcctcttgttcaaatcccttgttctgatctcttgcccttgaggaggaggggcatcatggccactgaccaaggaattgtggacattattccctctcaaacccacctgagtcacactaattgatgaaggaggttattcttgagcagtctcaaggtattacttcttgaaaagcaggctgtcgctacagatcttacagcttcttctgcttggtttggtagtaaaaataattgagcattagtttcttgtgggattattttcattgggccaggattattttcagtgggccaggaggttaatagctataattttgaaataaagtgattttgttgctgtagggcatatagatattccacttatattaaactaatattatgttgttgcataggctttttaagatgaacattcccagttgaactaaaatatgtgattctgttgaagataattgaaataatcataaagaccttaatccatatttatacatgaacaatttgagtacttaaaatgtctgatttttaaaagccttttgttatggatcagatgcactctaaaaaaggattattatgtttctccaactaattga

SEQ ID NO: 114716 - DNA, 639 bp, Homo sapiens
tggtaattaatttgctatgcagcaataataaaatataagcctagaacatcttgctgtgtcagaaagtaagaagggactcaaataactgtaagctatgacaaaaggaccctgaagtaaatttgaaggtgctctcactagccatatctgggacaatatgagattcaaaataaataatagtattaatataactcattgaataaaatgggaaataattagttcacatttatataaataaataaccaatcaatcaatggaaagaagagagagctcttccttgctactataaggacaactaattagtatagaagaaataatataattagaaaatatttattttgcaaccatcatagtaatagttaattcaggcagaaacatcaataattgctaaaactaggggtgaaagtgggatgataaatgaatatttacatagcttcaaagtatctttccacaaactaattaattacaaaggtaaaagaataaatttacaggggaaaatctggaaggtatcaccaagaaatcaaacttaacgttagcagcaattggacatattgacatttgtacttctgatatgatgtactgtgaagggtacaacatcactttcatagtattcctgccaaacatgcttaacctgcatctaat

SEQ ID NO: 114717 - DNA, 375 bp, Homo sapiens
gtttctagggtatcctacaaagaagaacgctgcttctaagtttttgggtttcttgaaccagagcttagaaagaacaaaaatatggcatggtattttcatggtttagtaaggctacttttagttaattattgtgatgtaggccattaagtagacttttctaaaacgaaaccccagaggagaggggttttgaagatacatatatactggtttctaagaactaatctttttggatcattggtattggtagaagggattcgctatgttttctgccaccattggatctctgtataaagtttggctccactatcaaaatgcttagatagatgcctttgcaatagttgccaccctaggatacagtagggagagggtaccgag

SEQ ID NO: 114718 - DNA, 260 bp, Homo sapiens
cacacctgtaatcctagctacgtgggaggctgaggcaggagaatcgctcgaacccaggaggtggaggttgcagtgagacgagatcatgccactgcactccagcttgggtgacaaagtgagactccatctcaaaaaataaagtcaaataaaataaaataaaaaagaaatccagggaggaaagcagggcctgcatgaggccatgccttggggaataaagtgagagtgacccatgcacgcaggcagacagaaggtctgggatc

SEQ ID NO: 114719 - DNA, 341 bp, Homo sapiens
agagctagcagcatgagcttcaacctgggaggcggaggttggggtgagttgagatggcaccactgtactccagcctgggccacagaggaagactccatctcaaaacaaaacaaaacaaaacaatggacctccaaaatatcagggagccatcagagatatctgatgttgccacatgtggaacagatcttagcatcctgtttagggatgttttctagctcacaggtggggcatttaccataattaaacataaagtggggttcctgcatgtttttttttttttttttttgtgaacacagctagtccctgtcctgagaacgggggtatactagaaatggagaatt

SEQ ID NO: 114720 - DNA, 617 bp, Homo sapiens
tattattttatgtatttatttttttgaaacagggtctcactcttgctctggctggagtgcagtggcatgatcacggctcaatgtagccttgacctcctgggctcaagtgatcctcctgccttagcctcctgagtagctgggactatagggatacacatgcctataatggtgcaatttaaaaaattttttgtagaagtgaggtcttgctatgctgcccaggttggtcttgaactcccggactcaagcagttacctctcctcagcctcccaaaagaggcatatcccaccatgcatgcctatagtggtataattttttaaattttttgtataaatggggtcttgctataattgtctaggctggtcttgaattcctgggctcaagcagtcatctctcctcagtgtcccaaagtcttagcactacaggcgtgagccactgcacccagccaagaacatttataattcatgggaggaggtcaaaataccaacattaaaaagagtttggaagaagtgagttttaaccctcttagatcactttcagagattaagacttcaagacttttgacacttctgaaactactaatagcctgttgttgaatggaggccatacggataacataa

SEQ ID NO: 114721 - DNA, 384 bp, Homo sapiens
atggctccctgatgggggaagaggatttaaggactgacagggagattgtaaaacctgagggaaagaggcaagagtgggagaggatcctggaatttatcaactaggcttgctgggaactcaccagaggaaattacagaggactacagcatgaaagactgaagtcagactggaaacagacttccaggcaatcaggcaacaacaggcctagtccttcctgatatctttggctgtacctgagtaaaaccccaggaagggacgcacagcctgactgtgctggaaggaaggcagaaggatggacagggagaccctgaagatgcttccgcaggaccagagaaggaggcagcggaggcacagcagtccctccccgaggctttctttgagatt

SEQ ID NO: 114722 - DNA, 439 bp, Homo sapiens
ctgagatgacagtcggctgttgatgagatatttggaggtggggatcaatagagggggaaatagaatgatcagaagggcgcctgggtgcatttgacagcatggaagccgtgaccatcccttagtatgatttccatctctctagggaaggtcacggcttccatgctgtcaaatgcactgacactttgctattctcatctttcttgacctgtcagcattagttgagacaatagtcccctcctttctggaaacggtcacctctcttggctttgtgagaccacctctctcctcatttttctcctaacactctgacatcctcttagtcttcctttgcaactcctcctccttcccaatttgacctttcaatagtcaaatggaactaaatatttaataggaccctccctctgccctctcagcctctcagttggtctctcatacatgc

SEQ ID NO: 114723 - DNA, 425 bp, Homo sapiens
tagagcagggttcccattaacccagttggtcagcatgggcagaggaaggagtccctggagaaagaggaaaaacaggagacatggtaccaaggaagcccaggaaacaaggggccttgagaaggaggccaaggccagcagagccaggagctggtggtcagagcccaaggaaggggaacccagagcagcctctgttaaaccacacaaaggtcatgggggaactcagccagagctgatcgcgcagcctggttggagtggaaatcaggtgaacggtgcctgctgtcggcagcccttctcactctccaacactggagtctttcctcagccagggaaatgttattctatctttctttgattatttcccctcttcctcccattcttggttcttttttttgagacggtgtctggttctgtcacccaggctgggg

SEQ ID NO: 114724 - DNA, 832 bp, Homo sapiens
cagaaaggagaaaaaaaaaatagaagagaggatatattcattgaaataattctggaaatgttaagaagtgaaggacatgagtttccacattaaaggtgtctacaatggataaaaccagacacaccgtctgaggcacattatagcgaaatttcaaaacaatggagacaaagagaaaatcgaatgagaaaaacatggtcatacacagaggattaggaatctgaatgccttttgagttctcaattactgcaaggaaagctgaaagacagcaggtccaacctcaaagggggaatagtttccagccaagaattctatatccaaatcaaatgcgtagggagaatgaaaacacgtttggacattaaaggtctcaaaaagttgtactttttacatgccagtttcttaggaatctcctagaagttgtgtttcctgtgaatgaaggagtaactttaggaaacacaggatcccagagacatttcactcaagacagagctggtgatcccaggataacagctgtgaactaggtggtagagagtgaactgtccaaggtaggtgggtaagtaagtgtcctgcagagacttcttcaaaaagatgaacctgatagcaaatccaatgcatctgaaagtctgcgaggcaatatatttgagatggcagagagtttgagagttgttagcgaaataacacagaaatctagatgaagaaaataataaaaattaaccaaaggtggcactggaaacaaatagcaattgcaggagatggcatggcttggccatgaacagtgttcacgtggttataataatgcaaaaaaaaatcatctaaataaaaatctggtatgtgt

SEQ ID NO: 114725 - DNA, 280 bp, Homo sapiens
agggagtgaaagaaggaagaggaggagggaatgaatgagtttgttgcttcttttgctttcgttcatcaccttactttcatctctcctgccaaatttataatccttccaagaacctcaaggattctttccacatcttctgtataccacagtggactttgccaggcagccttttgtgggcatgtgttttaggaactatttgacgtttgtaggagtgtggaagagagtttcttcttcttcttcttctttcttctttcttctttcttcttctttcttctttctt

SEQ ID NO: 114726 - DNA, 435 bp, Homo sapiens
cacctcagcctcccaaagtgctgggattacaggcgtgagccgctgtgcccggcccagccttatttttgactgcagattttaagagggagagtaatttataccaattatcctaccccaagaggttgtggaaactgcaccgccaaagagtcacaagactcttctggttttaacaccactgatcaggattctttaaactctatgtaagctctttttctgtagttttttaaagctatagtcagttctatttaaaataatttggaaaatggaaaatatgagaagggaattcattctctaagaaagtagtaattagcccgagcagaaggagaggaaatagcaagggagtggaggacagagtagttttttagattccattgagttggcagttaacagacaggtatttgccagagaaaaaccatttacagtatttgccagaga

SEQ ID NO: 114727 - DNA, 206 bp, Homo sapiens
tttgtaggtgtattcgtcagctagggctgctggaacaaaataacacaaagttagtggcttaaacaacagaagcctattctttcatagttctggaggttagaagtcaaggcgtaggctgggcgcggtggctcacgcctgtaatcccagcacatgatctggccgaggtgggagatcgagaccatcctggccaacatggtgaaaccccg

SEQ ID NO: 114728 - DNA, 849 bp, Homo sapiens
gaatctatttttacctacaaagaggtaagggcggaggtgcagcttgtggcaggatggagtgatctaggaaaaatctgtagaacagctggcattacaactgatctttcaaagacgggtgggaattgggcaggcacaaatggtattgggggaggttaagggcaggataggatgatgggaaggtgtcaggggcagatgtaaggatgtgaatttaaaccgtaattaaagttttgatacttaaccttcaggtgtttggagacttcaagtgtacagcaattcattttttcatgggctttggaaaggatcacattttatggaagtctgaaatggtccatgctcgtatttcaggaagtctcttattccttcctcttagccattgtgtatcctctgccacctgctgagaaaaacctgtattctttatatttgttcgtttctttgttttaaatagagatgaggtcttgctgtgttgcccacaatggtcttgaactcctgggctcaagcagtcctctcacctcagccttacaaagtgcccggattacaggcgtgagccactgtgcccagccaaaacctgtactcattagaaatgatcctctttcattgtggaaacatatgacagtagaataatccttaaaaaaaataataaaacccatccagtcacatgagtcagaaataaaaataaaagaaaacaataaaagggctccttgtccaacacacacctcacacaggcaggtgcccctctggggcgaagcttccagaggaaggatcaggcagcaatttttgctgttctgcagtctccactggtgatacccaggcaaacagggtctggaatggacctccagcaaacccccacag

SEQ ID NO: 114729 - DNA, 472 bp, Homo sapiens
cccaagctggggagggaggcccagggcactggggcctggcggggtctgggtgacaggttgaggatcctggcatgtggcagttcacaggctctgtagtcccccgtcctgcttgtctagcctaccctgttcccttagcagtgtcccctcccagctgacagggcaggcgggggctcctggcatttgtcccctggtggagaccttggggagcacttgctgtctgtaaatctctggggaagccccccatagctccatcatgtctatggcaacggggaaaaacctccagtccattcccaagaagacccagcactacttcctgctctgcttcctgctcaagttcagcctcaccatcagctcctgcctcatctgcagtttgaaactaagctgggcatgaactctcccttctgagccactggctgtgctgactgtagttgcccccgtcccgtgtcgggctagtcgggggggcaccgagctc

SEQ ID NO: 114730 - DNA, 304 bp, Homo sapiens
cacaggaaactggcctactgtgtctgcctcttggtgaagcatacaaccagccacatggaaaaacccagcctgcaataaaagacttgctttggtcaccacctgacattagctgtggtttaatctgtgtaatgtttttcttcccccccatctaagcctcaatttcctatccataaaatatgttggttttggccaggcgtggtggctcacgcctgtaatcccaacactttgggaggccaagatggcctgatcgcctgaggtcagaagttcaagaccagcctgggcaacatggcaagaccccccccct

SEQ ID NO: 114731 - DNA, 293 bp, Homo sapiens
gtggtagagggaaggtctgagcaaagataacagagtggctacaaacttaattattaatctgactcttctctcctgcttctctttagaagtgacattctctgtggagaggccaggagggggaagttgtagcattcaggttttatcagtttgagggcccactttcttcagtgggtctctgtgatggctgaaacgggttgcaaataaataaatgccatgtgggctcaggaagctaaagtgaaagagtgaggtgcagagccacagcgaggggctggactgtggagaactggacgcga

SEQ ID NO: 114732 - DNA, 1957 bp, Homo sapiens
tggtaggggagggcatagagcagggcggggggatgggactgttaggttgaattaacattacaaaatgatacagtgccagatctcagtttcgcatattgtttttcagggcaggtctgtactgtgtgtagtgctgtttacatagatgaatttaggttgtaataattatttttaaagatttacacagatttgaatagcagtgttaactgttaaccacattgcattaattcccaggcgatttagagctcttggagagccaaggccagccaagagcatttgtagtctggtgacaacccccttttaagctaatttatccagaaccctgatttccctcacttcttgctcattccttctttgacctattgcatttcatgttgagtttttccatcaacatgctgcacctgtcagtcaagtgagcattttttaagaacacattgtactgagaaccacttaagcattgaatgcggagaaagcagtgctacctcagttttgctggaagtagacttctttgatagttttctttctttgatgaagtttctgtattttcatgttgtaagtggaaatacttttttttgtttgtttgtttcatttgccttggagccaaagtttctgttcctggtggtcgggaaactgcctgccggccaactgacttgaaggaaaactgtggtatggagctctgcttgaatttttttttttttaatatttttatttttttctttgaatatcatcagcttacttgtctggcaagggcagaagcctggggttggcctgaactctgccaaacaaatatcaaagtgtatttaatagttaaatttgtgccctttcccttcttgctgcacccatgttgtcacttaacccccaggagttatttattatctttttgttaaagtcaggctcatttggggtaatgtgatgactgtttaggtttacatgaccctcctctcctttccctacccccaaatatgtatatatacatatataaaatatgtatatattttacctatataaaatatatatatatacacatatatgtatctatattcctttgtttctttgcctgcttatactggccataaaagagggagctgccttcaatgtataaagtataagaagagtgccagggaatgccataatggaggcttttggatctgaatttggaccatttcactaaagagaacatgagtttgctcagccctttcctcacaagagggagggccccggttccccagacttctccacgcgctggctccataaaggccagctttggccaggctgccacaggggcctgaggagctcactctgggcctacctggtttcagttagagggtcctcctgttatttttccatttaaaaagtatgtcctcagaaaactgtactggaaggatgggtggcaggaacttgtatagttcagcttccaacactttggaacagattaaaaagggaatcttttaaataaaaacgtataaaaaatcaccaacaaacagaaccccaacaaaaaaaacaaaaaaagggggggggggccaaaaaatcccccggggggggccccaattatgggcgtaccccccgtttttgtgttacaagagggggcccccaaaataaggagaggcgattttaataacgggcaaggaccagcaggcccggcctgttatacaaacagccgtgcggcaggggggcaacaacccggcgacaccgcgggggaacccttgggggaaagagaagcccgttacacatctcggggggcggggcagcaaacactggggccgcaaacagtcccctcccgcaagaagattttacagccgccgaaggggggcaacacttaacacaacatctgcaacgcgcacaaaaggcggtccacaccacacacgcgcgaattagaggctgccggggcaagaaagactgactcggccacaccgggaacattaccttccggaagacactttcacccgagaaggagagagac

SEQ ID NO: 114733 - DNA, 191 bp, Homo sapiens
tatttatactcttgaggtaatgagactttgtctgttaaacatttggaggtttctcccttaacctaataccccgctgcgtcccaggtatgtttctcagcctgggcaggaattgcatgttttgagttccattgtgagcagccttacagctctgggctcccatcttaaggattattaaagagttttggcagttg

SEQ ID NO: 114734 - DNA, 478 bp, Homo sapiens
tgggccgtacctggcgcactctggatgtggtcaatgactgactcgtccctttggaccatagacgcagctctgatttctggtgttcctgggctctgcacacagcaggagccactctgggctctgagaggtgcatcttctggctcactttcttcttgttggctcttctccctgcgtcttctgccactgccctgttctgggtgggaggctgtcacactgtggtggagggtcccctctcctgcctcccctctttgatccttttctgtgagggtctgctggggtcctgtgtgtcgtgcattgttgatagattcctgtcgtgcttgctgtcctccccattctaagggacctctgattgcctgtgagcagtttacagggtcctctcctggccccttcacccgaggaattcccgcaacgcatgagtttgtgaggggcggatcctgggaggatgtgacgtcaggtgagaagggagggcccgtcctag

SEQ ID NO: 114735 - DNA, 319 bp, Homo sapiens
agtggggtcaagcttttatgacatttttaactcagtccaggtgatgccactgcagccggtctgccaggctggtggtgctaaccatcaggagggtaaagcgttttcccattgcgcatgcctgagctacatgactttcaattttggctctgcaccatagcggcagcttaagcagtggttaattggtttgagctggtcctgtggttacagctgtagacattcagaaggcacttgggacacggagacactaggcagaccacaaacgttagggcaggaaatgattttgcacatcactagagctggggttttgtgttactaagta

SEQ ID NO: 114736 - DNA, 330 bp, Homo sapiens
ctcgtgccccaaagtgcagcgtgagccaccacacctggcagaatgctagttgttttttaatgttctttggaaacctgaaaagttggcagcctctctctacttgcctccctcaaatttcttaaatatttttaaattgtaaaaataatttttaggccaggcatggtggctcatgccggtaatcccatctccattaaaaatgcaaaaaaattaggcgtggtggtgcacatctgtaatcccagctacttgggaggctgaggcaggagaattgcttgaacccagaaggtcacgccactgcactccagcctgagcgacagaacgagactccgtctc

SEQ ID NO: 114737 - DNA, 567 bp, Homo sapiens
aaaatgctcctgtcaccttagatctcagtgatgaacgacaggaggaggagtagacactaacgttgcaacagtagatgccttttcttctgcctctgtgacaggttttcagaagtggaaaggaccgcatttagacactagccaaaccatgaggtttgtcacctgtatttgccagtgattcccagagctcttacagttgtcccaggacgctttagcacatggccacacgactcccaaggttgacctgggagttattagaagatcagagggctctaatgtcttcccccaacctcgtttttgttttgttttgttttgttcgagacaaggtctcactctgtcacccaggctggagtgcagtggcacagtcacagctcgctggagccttgaactcctggcgtcaagcgatcttccccctcagtctcccaaaatgctgggattacaggcgtgagccaccgtgccaggtctaaggtcttcagaagtgtggttgcctctgcagaggaacagggtccttttttcaactgattctacatctttttatgtctgaaaatgaaacctcactgtcctagtttt

SEQ ID NO: 114738 - DNA, 326 bp, Homo sapiens
tttctgctgacagtgactgtcagcacctttcctgctatcaacagccatatgtgtgagcacttcagacacttcctgtcctttcatcctcctgacagcctgggaaggaatcgggtgcaccgtcctacagtccaggccttggccagagaggaaagggcttgtcctggcagctccgaggtggcattgctgggtttgcgctgtgtccagccaagctcagttcctgtctccagcctgtgctgcgcaggctgagctgagccttaaccaccctcagcagcagcagggcctggggaagcacctggaaaacgctctttgcgttcatgcatcaagag

SEQ ID NO: 114739 - DNA, 288 bp, Homo sapiens
ctgcctcttggacgtgccaggtctatgcctggttgggcctttgcactcgctgtcctctttgcctggaatctgctttcctcagggatccagaggggaaatctggttcctccttgtccctcagatgccaggttcactgtcattgccctagagaagctgtccctgactgccagcctctgtcttcccataacctatctcaatctctgtacagtacttatcttcctgttgggttgatgtgttgtttagagtttgtctccctctcttagaaggtaaactctgtccgggcgcgat

SEQ ID NO: 114740 - DNA, 332 bp, Homo sapiens
gaagctgcaagagaaagaggacaaaaacaggttgttcaaggcaccaaccactctgtcacctgacagcagactgccacgttgacaggctaggaaagtgagaatgtagactccccacagctagggccaacgtctgaattcatcttggtaagattagactcccgggcatggggcttaatggccattcaacattcaatgaaatggaataacactaaatagctatcctggaagaggaaagtctacctgctcagcacgtaatcattctaggccatttgtacaaggcagcttcatgacactcattccattggcagtacaatcacctcgactgcttggag

SEQ ID NO: 114741 - DNA, 277 bp, Homo sapiens
taccaaggaaattttttaaaaaccctttaacgaaagagagccaacattgcatgaaggctgagattttttttaaaaggcaaggattcagaaaagggctgatcagtattttctgatcctagttcagtgctagtcagggagactgtcagtaaagacctttttggtctgttgatttgtagaattaagcaaaagatgaccatgcccctgtggaagctgggttggtaccagctggtagctgatttcccaggagaaccctgaacgctttacagatgatctactg

SEQ ID NO: 114742 - DNA, 453 bp, Homo sapiens
tctgtcgtcagggaagagaacgaggaaggagacagccaacatttattaagcatttgctgtatgccagaccctgtgctaggtacacatgtctcatccctgtttggtagttgaagcaatgcaacagagtgggtgagatggctcattcttaagctacagccctaggttttgaatccagcttttccactttatgtctgggccaccctgggcaatgtacttaacttcctgcacctcagtttctttatataaagaatgagggtgataatactacctaccccatacagctgttcagagggttaaggtagttaataaagagagtgtaaagggcttagaataatgcctggcatgtagaaagcctcagtgcatgtttagctattcttatcacttatcgccatcatacagatgaaggaagaggggttcagagatcacacaactggagacaaggccaagtacaaa

SEQ ID NO: 114743 - DNA, 132 bp, Homo sapiens
accaggtcagaaaatgtcaggggagctttggattgccttcataattgtgtaaagaaaattattgtcctcaaaatccagagactatgacaggcgttcttaatagagtgatatgtttagagacacaaacagcat

SEQ ID NO: 114744 - DNA, 275 bp, Homo sapiens
ggtctaattataatctggcatacatgttgtaccagcaatatctatagttcactttatttatatttttgagtcctagaactcaggataaatgaaaactagtgaccctacacctcaaaaatcaaagaattgttgccaaaactcaatctccaactcgtaatcttcacctgtttggttctgaaagtatctcctcagtatgatgctggactagtccaaccctgtgtagtccctgctgtgattccaaactaaactcaatgttattctgcagaaacattacc

SEQ ID NO: 114745 - DNA, 164 bp, Homo sapiens
aaaaaaaacagagactcaagtttatactagtgagaaaggcaaagaatggataagtggttttccaatattgtccatcatttgttattgatgaagaaacaattaatgaaacaaatatcaatggaggtaatttgacatttgtgggatggaaaaatgtatatgtgaaa

SEQ ID NO: 114746 - DNA, 739 bp, Homo sapiens
ctcctacagagggtgttactgtatttctggttctatgaccatcactagctttagattgtaagctctgtaaggaaaaagattatctagttcatgccaaagccccagtaactagcatggggtccagcatatagtagtcagtgaccccccaaatatctgttggatgaataaaggaataaataaatttagaggagaaagacataggtgagaggaacaaaaggatctcaaggagggagaagaagtacttcttgctgatgctgatggtgtaactactaagaactgggagaaataaataaaaaaggcctcttgcctggcccatgatcctcactttagcttccaaggaggtggaactactaaatagagtccttccaggtcttctatggaaaagaagaagtatagactaacactaggacagacacttggcaattcagggagggcactggaggagagcagtccccaggcccagaagtagatctgaccccaactctgtgtacattccaacaaataccaggggctttaaaaaaaaaaaagagacagggtctcactatgttgctcaggctggtcttgaattcctgggcttaagtggtcttcctgctttgccctccccaaagcactgggattacaggcatgagccactgtgcctggttgaccagtggctttttcattgtgaattttgggaagctggattttctctttgttatctttatattccatatcttttccccactgataacaaaagtat

SEQ ID NO: 114747 - DNA, 324 bp, Homo sapiens
tattctccacttacatcaccacaggaaggagagaatttgcacttttctcctcagaagggcaaagcctaaaagcaatattttctattaccctctgcacccacatttccaccttctcatctgactggttggtttgcaaacaggaaactggcatgctctctgcaggcctgttgctgaagctcttttgaatattctggtatgttctctgacatgtggtgctaaaggggtaggttccacccctacaacagacccatagggtaggtctgtcaatatgtgaactacttggaagcttttcagaacacacatgtaggctacatcctttcctcc

SEQ ID NO: 114748 - DNA, 435 bp, Homo sapiens
aggaatatgcagtaggtgagccggggctgggccagtgctgtccacagtccgcagagtgacctgcaggccgccttcgtggcctgagtgggccccggcacagttcccagagggatgccagtgtggcttccgcatgactttggaggaccgcattagtcgagtctgttaaccacagctttaaggaggactccacggccacacgggctcgtcagcataggggccctggggaggcgaggctagtatccagcagcctcagggctgtgccttttcctggagcctggggcgggtgatgtacaggaggccaggcagcagaagggaggccgggacttcgccgggacttagcagggactgaagtcctctcagagcctgtcgctgggccagagcattgcccccgaccgctggtggcagtggcagaggtcatagcctggggcttctaaa

SEQ ID NO: 114749 - DNA, 903 bp, Homo sapiens
ccctcaggagggagaacatccgccgaacgaaatggagagcaaaagaccgcgactgctcgaggaagcagacaagcagaaaaagacagtcagagtgggactcaatgcaccttccatgctacgaaagaaccagctaggtttcctcagattcgccaactattgccgtatagctcgcgagctgcgtgtaagctgcatgcagaggaaaaaggtccagattcatagctgggatccctcctctttggcaagcgaccgatttaaccgcatactggcgaataccaacactgaccagctcttcacagtgaaccaagtcgaagctggaggctccaagtacggcatcatcaccatgcgaggcctgacgacccctgagctccgggtatacccgcacaaaaccctctacgtccctaatcggaaggtgaattctatgtgctgggcctcactgaatcacttggattcccaccttctgctgtgcttcgtgggacttgcagatactccaagctgtgccgtgctgctcccagcgtcgctgttcataggtagcttcccaggaatgcgtcggcctggcatgctttgcagtttccagatccctgatgcctggtcctgtgcctggtccctgagcatccacgcgtatcactctttcagtacaggcttgtctcagcaggtcctgttgaccaacgtggtgacgggacaccagcagtcatttgggactagcagtgatgtcttggcccagcagtttgcaatcatgactcctttgctgtttaatggctgtcgctctggggagatctttggcattgatctgcgctgtggaaatcaaggcagcgggtggaaggccatttgcctgtcccatgattcagcagtgacttctctgcaaatcctccaagatggccaattcctggtgtcatcagacatgac

SEQ ID NO: 114750 - DNA, 790 bp, Homo sapiens
aggatataagattacagctagataggaggaatgagttctctagtgttctctagttctataggatgactatagttaacaataatgtattatacatttcaaatagctagaagaaggatattgaatgttccaacacaaaaatgtttgagatgatggatgtgttaattacccagatctgatcattattcatgattgtattgaatcatcactgtaactcataagtataattattatgtcaatttacaaaaacattttatcattgcatttgcttcattgctcaatacccttcctctccctacagacacacacacatgcatgcatgcacacacacgcacgcacacacatgatcattcatgtttttttgaatctttgcaaagcaagctttacaaacaatgtcccattaccactaaacactccagtctatattttcaaacaacaaagatattctcctaaaaattggcatacagccctccaaatcaggaagccaatatcaatataacattgctacccaatccacaaaccccattcagtgtcaccagctgtcccagtggtacctcttctttctttctggcccagtgtcctatccacgaacatgtgatgcgtttagtagttatgtttcttcagactcattcaatctgaagcagtcctttagtctttctcttgacagtgttaaagagtacagaccttgattatacaggatttccctcagccttgatgtgcctgatgtttacttgtgaccagacttatgtcacacattcttggcaacatcaccacctcccatcactggtgatgt

SEQ ID NO: 114751 - DNA, 427 bp, Homo sapiens
taattgatgaaggacttgtatccagattatacagagaaaagtaaaaaacttatcaataagaaaacaaacaacctagtaaaagtcagaaaatatttgaaacaagaaaaatacataaatggcaaacaagcacctaaaaaggtattcaacatcattaggcatagtgaaaatacaaattcaactgcaatgacaacactgcaaacttactagaatagctaacattgaaaaagactgaccataccaagtattgttaaagatgtgtgcagaaactggaactctaaaatactgctagtcagaatgtaaaatgggacaacctttttggaaaatagttttgttaccagaaacaggtcctgatcctgatccaaaagaagcctcttggaccttgctcaagaaagaatttggggtgagtctatagagtaaataaaaaaaa

SEQ ID NO: 114752 - DNA, 344 bp, Homo sapiens
cacagcaagaaaatgaaagactgttgatctcataaattctgtgctccagtgagtggattataagtcactttttaggttctgaatattttgcctgagaaggatcatctctaaaatcaaaaactataggccgggcgcagtggctcacgcctgtaatcccagcattttgggtggccgaggcgggcggatcacgaggtcaggagatagagaccatcctggctaacacggtgaaaccccatctctactaaaaatataaaaagttagccaggcgtggtggtgggcgcctgtagtcccagctactcgggaggctgaggcaggagaatggtgtgaacctgggaggtggaggt

SEQ ID NO: 114753 - DNA, 279 bp, Homo sapiens
atgttctgtaatgacaggaaggaatgcatatacacattgcagcagtcaaaactctggaaattaggactgtgactcattggttgtttttgtttttgttttgagaaggagtcttgctctgttgcccaggctggagtgcagtggcgcagtctcggctcactgcagcctctgcctcctggattcaagtgagtctcctgcctcagcctcctaagtagctgggattacaggcatgtaccaccacacccagctaatttttgtatttttagtagagataggtttcac

SEQ ID NO: 114754 - DNA, 508 bp, Homo sapiens
gatatgcccctttataatttcaatagtttaaataatgattgtcaggcacagcaaaatactcaggcatcagatactcagttaactctgttatgtttgctattcttagaagattattaccacactttagaacagttttcaatatccaaggctgtttgcttatttcactggaattaactaaaagtaattagggaattcattcctcagaataatttatatcctaagctttatgatgaagaaggcttttatttctaattgtatattccagccttggaccaaaaatgtacatgctaaaatatcaagacaaggcaaagatatatttttgcttttctgtcacttaatactatttcaaaatagtttcagatttatcaattggcccagaaaaagagtatttaattcctttgatttggaacatctgattcaaattaatgatttgagaagtttttaatatactttgggaacttcaacttggaattctgaggtaaattgttttaaagggaagattcttttg

SEQ ID NO: 114755 - DNA, 185 bp, Homo sapiens
cccccttctcctgaactctagagccctggctgggcagatctcctgctgaaacctggcgcagctgtcatggggaccgcccacgtttcctttgtccatgtctatctatactgatgtctttcctctctttgagagctgtgcctaacttacccatatctccgccatcctccacctagccacacatccat

SEQ ID NO: 114756 - DNA, 766 bp, Homo sapiens
aagctcagtagtagaattggcagaagaaatagtaaatgaacttgaagaaagattgatagagattagaggaaaaagaattttttaaaagtgaacatggcctcagagaaatatgtgtgacctttaaggacaccaacatacacatcataggagtttcagtagaagaggagagagaagggagctgaaaatacattcaaagaaatgacagctaaaaattttcccaaattttttgtaaaacaataacttacatattcaggaacctatatgaattccaagtagcataaacacaaagagtttaaaaaacagacatgtcctaacaaaaacaaaaaagctaaaagacaggagaaaagcttgaaagtagcaagagaaaagcaacttgttactcgcaaggaaatatcaacagctgaccattttaggagaaacaacaaagccagaaagtagcagatcactttcaaaatgctcaaaataaaaaaaaaatgtcaaccaataattctatatccagcaaactactttcaaaactgaaggtgaaacacagactttctcagataaaaagagaatttgttgctgggagacttgccttgcaagaaatactaaaagaggactccaggttgaaagcaagggactccagatagtaatttgaatacataccagtaaaggtaattgtgtaattatataggacagtacaaatgaatatctcctcttgattttaagaagaaacaaattatataaacactatatataatagtggccctataaatatgaaaatgta

SEQ ID NO: 114757 - DNA, 363 bp, Homo sapiens
gccagtgtccatcatccaggtgctcagctcccagtgcactgaagctcagacccttcctggttccctggtctcttgcactgagctctgatggtgagacttgaggaagacttccactgggcctgcttttcctgagccagtgcccatcacccaggtgctcagtccctggtgcactgaagctccagcccttcctggcgccctggtctcctgaactgagctgtgtgagctcttctgccaagcggttcccctggcattgaccaacatagatggtgagcctggaggaagacttgcgttgggcccaaaggccctagaccagtgtctgtcagccaggttcccaacccccgatgcgctgaagctcaagccttt

SEQ ID NO: 114758 - DNA, 388 bp, Homo sapiens
cctggctctgacattaggatgcgttgttcatcttctcagtggggcactattcctccaagttcctaacaaaatgcactttaaactgtacttgagtcactacatacattccctccctgggtaatattacttttaacagcaaaaaccacaattacttttgcaccagtctaacagcatccacagggactccctcaattgcaatttctatgaagaggcctccctgacctccagaccaacatcgccacctatatgaagaatgtttccaatcataggtaggtctggcacttaaaactcatgtagccaaagtaacagtacttctgctccaaacctattattgacctcttcatttctttttctttttcttttttttttgcctgagttcagaatctcg

SEQ ID NO: 114759 - DNA, 297 bp, Homo sapiens
ctcattttcctagcagcctccaggatcttcaggggtgaatccctcctttcccacgttggtactctgtacacacaacatgcccattccctgcctggggagctgggcattgcttcatgaatcagaggtcaattttttctctattaaagtcacagatgctcattgcaccattgtgagaatgaatgaagatagtgcttataaatcagccagcaaggtacccagcctcactgtgtcagggtctccctgggcatgaggtggttagagtgtgtgacatgtctgtccccaagcctgtcagctccc

SEQ ID NO: 114760 - DNA, 631 bp, Homo sapiens
gaccagcattcaaattcaggaaatacagagagctccagtaagatacttcacaagatcatccccaagacacataattatcagattctccaaggtcataataaaagaaaaaatgttcaaggcagctagaaagaaaagccaagtcacccatcagactaacagcagacctctcagaaaccctacaagccagagagattgggggccaatattcaaaactttttttttgagacagtgtctcacttctgttgcccaggctgcagttcagtggcacaatctcaactcactgcagtctcaaactcctgggctcaggtgatcttcccacctcagcctcctgagtaggtgggactacaggtgtatgctaccatgcccagctaatttttgtatttttagtagagacgggtctcgccatgttgtccaggctggtctcgaactcctggacttcagtgatctgcctatctcggcctcccaaagtattgggatcacaggtgtgggcctggcctatattcaacattcttgaagaaaaatactaaccaagggctaggtatggctgctcatgcctgtaatcccagcattttgagaggccaaggcagatggatcacttgaggccaggagtttgagaccagcctgggcaaca

SEQ ID NO: 114761 - DNA, 347 bp, Homo sapiens
ttctcctgcctccgcctcctgaatagctgggattacagatgcatgccaccatgcctggctaattttttgtatttttagtagagatgggatttcaccatgttggccaagctggtcttgaactcctgaccttgtgatccaccctcttcggcctctcaaagtgctgcgattacaggcatgagccaccgcagccagcctctgggctggtgtttttaaacagtttttatttgcatggctctgggtcctcagcctgattttacccttggagttcaaagccatctaattggaaatgaaaggagcctgattgatttggcaactctgcggccagcccacgtggcggtgatgcgatg

SEQ ID NO: 114762 - DNA, 356 bp, Homo sapiens
tccatgaaagctttgatatggtggatctttggtgagcatcccattctttaaataaaagtaactcagaagctaatttaaagaagatatgctcttggaatttaacgcagctcttggaatttaacgcagcttaattacatttttagcataatggtcatatggaggacttaatgcaattgaagttaataaaagtattatcactgtgcgggaatgtcttgcgggtccttaaacttcagtgtgcactgatgcaattttggagcgcttcagagaaaggattcagaattatgaatacaaaatgtttgcaggtcctctgggcggaggctgtgcctgtgcctaggctagctctccatgtgctattt

SEQ ID NO: 114763 - DNA, 463 bp, Homo sapiens
tacacaggaagcagtggaaatgtcagagagggctggggaatcaaacactgtagaaagggagcaacaggactcaataggtctcttcacctttttctctttctctaccctccagatgaccaaagttagtccaggtgcctagaatgaaaattaaccagtcttgaatccttaacaggaaaagttgttcagctccttctaaagagcctttgattcttttattccagaccatcaggacactgctaacagcagagaacctgttcaccaaccaccatagcagctcccttcccagctaagagatcaactttcatcttcttcacctcccccctctattcaatcatttctcttgtcctcaccttcccatagagggttcatttcctcattatgtctattgtgatagccaacacataaatgaaaatattatagatcattgactttcccaatagcaccagccatgtctcagccactg

SEQ ID NO: 114764 - DNA, 159 bp, Homo sapiens
gatgccactgctccaatgaataaaagaggatacaaacaaatggaaaacattcattaagtcccaaaaaggtaaagaatgacaaattaagcatgtatcttattagtaagagtaatataaagatgctcactcctatttataaatatttgacaatcatgttaa

SEQ ID NO: 114765 - DNA, 772 bp, Homo sapiens
atagaaaacattataaatgggtgagatgcggctaaagaagtgcttacatggaaagttatagctttacatgcttatgtttaaaaagaagaaaggtttaccatcaatgacctacttctactttaaaaacctagactaaaaacttctctggtttccattgtaacatgtaaggagtttggaagtcattactgcatcctaacaacaaacaaaaagctgaaaagggcctggaaaataaaaacttgtctcagatctatcagagaagtgaggtcacagggcaaactactgtcctaaaaattagagagactgaatacagagaattacaacttaaaggagaagaaacccacaagcagaaacctccacaggaaccagtgctgggctatataaacctaaactctaattgacaaattcttagagccttagtgtagagaaatctaagagttaaaacaccatgggaacccagtcatatgggaacccacacaccttcatgagtttaccattcagagattgaccctattctcccagtagatattgaagaaaaatcctctcatgcttctgtcaggggaagggggaaagtaatcatttaaaagtataccagagcatgccattcttcttaacaaggcctgtcctcaggagaaactatttttaccagagcctaacctattggagtttttcagagcccaactgactgagggaaaggaaatattcaactctaccccactctagccatcctcttctacctaaaaggggagaaaagtgagaagcacatacaaacttc

SEQ ID NO: 114766 - DNA, 333 bp, Homo sapiens
gccagtggatactgcggtgagccgagatggtgccattgcactccagcctgggcaacagagcaatgactccgtctcgggggggtgtttaatataatcttagtatacattctaactgctgataattaatttataagaacagcatatccaactggaaatataaaacctatacgataagtaaaatgcagcatgtttaaagtgcatgtataaagtacacttccagggagcaaaggtaaatttaggaaaaccctggcaattagtctcacttccttcatttttatatttaaacacacacaggcctttttaagtttgacacaaaagtcattaaaaagttac

SEQ ID NO: 114767 - DNA, 757 bp, Homo sapiens
ttcacctccccctaggtaacgatgctattagctatgtgtgtccttccagagccagtttattcataaccaagcaattatgtatgtattcagcacccccttgttacacaaacaatagcattctgaaacgtccttctgtttcttgcttttattaactttagcgaattaatatatcctggaaattcttacagatattcacaaaatctgaaaatgggaaattttatttttaactaaatatttatttttgacgttttcacaaaagtttttatacctttctggcccctctccattgttctggaaactctagattcctgcttgccaattcacaaagtttgaatatccttgtagcaaacccaatatgaaccgtaaggcagaaaaatagggtctggagacagggaacctaaggccaattcacgctgacttcctagaactaaatcaaaaggaaaacccgaactttccatgcccaggtaacaaaaggaacagaagctagtccctttgcaacctgccccgcttttctgcctggcagatgaaaaattgaaggtacctctgattggtcccctcttgcaaccaatcaggctgatcacaggccactacttcttttacatagagtgtacaccaagtaaccaacgggaaccctctagagggtatttaaactccagaaaattctgtaaccgggctcttgagccacctgctaggcaggctcccaacctgtggagtgtgcttttgttttcaataaatctctgcttttgttgcatcattc

SEQ ID NO: 114768 - DNA, 358 bp, Homo sapiens
tgacgggcgctgggctgctcacccagttttacatgggaagtggtagggccctgtctcccctggcccctgcccatgccccgggagaaatgggtatgtttgggtggtaccttcctgcatgggcagaggcaggtgattgtatcgccagccctggagctcagcgtgcacagcttgggcttccatttggaggaacctgatccttggacttgaacactctgctctttgtgttttgcacaacaggagagtcctgctcctcgcttagctcagcacagcgagtcccctggcttcagcttccctcctgagcacctgacggttgtcggtttactgtgactcactgccattctatctgcctgggcttatg

SEQ ID NO: 114769 - DNA, 389 bp, Homo sapiens
ggtggctagctttagtcatgttcagatgcaaaaccgtaatgagtttgagtatgcaagtcccagggattctgttgaaggccatcttttctcggccatcaagggagacaattttctaggtttaagcctccctggcaagttagcaagcagggaactgcctgccctagcttgcacctgtcccctgaaggggattctggcctgacggtgaagacccaccatcccttccagacagcccattctgccgctggggcacctcccgacaaaagggggaagcccactaggaagtggtcacgaccaaccaagccacaaatcctcagggtgtgggatttccacctctataccacgtctgaaaaccgaaaataggcgcccgcttgccatactgcaatgggatt

SEQ ID NO: 114770 - DNA, 395 bp, Homo sapiens
gttattattttttattaaaagacatacaataacaagtgttgttggcaaggatacggagaaattcatatgctggtagttagaatgtaaaatgatgcagctgctgaggaaaacattctggcaagttgttcaaaatgttaaacatagagttgtcatatgacccagcaactctcttcctaggtactcaagataaatgaaaaccaatatccacataaaaacttgtatattaatgtttataatagcatgtttagtagctcaaaagtggaaacaactcaaatgtccatcaaataatgaatggattaaaaaatgtagtatgaaaaaaattagctgtgtgtggtggcacatgcctgtaatcccagctacttgggaggctgaggcaggagactctcttgaaccga

SEQ ID NO: 114771 - DNA, 258 bp, Homo sapiens
aagtttcagcagaatagcaccaaagactagttcccaacccagctcccagagccagagccagagccaggctggctgcatgagatcagctgggagcttttgaaaacctaggtcctagctgagcccctaaacatcagactgggagtcactgggagtgagctccaggaactggtttatttaataagcacccccacacacatgattctgatgttcctaagggttgtagaaacatggaactatagaaaacactaaaaaaaaagg

SEQ ID NO: 114772 - DNA, 492 bp, Homo sapiens
caaagacgatatcataattcagactgcagatctgccaacattcaaatggctctagtcctcgagtgttattttctaactccgcttttagatgcaccattgtatagcccttacaactgggcctgtcccttctgtagatgtgggagtagctgaactccacagaaccccaggttacacactaaggacacaggttgttagggctcctggatgagggtaagtgtgtttattttaaaccacgtgcttttggctattgagcttatgatttcaaaggtgaaagcttaagcacgttattagacttctcaaggagagttcccctagattgggagaaaagttgacattgggtaatattaaatctttcttttaaaaccagggctattttgttgttgtttacaattttaagagtctagactgaaagagtcatgaaatgcagccacctatctgacctcttcccccaacagttagggaattcgctctgcccccaggccacccaacctt

SEQ ID NO: 114773 - DNA, 684 bp, Homo sapiens
aaagtgctgggattataggcatgagccactgggcctgtcagtgggtggacttcttgagggtggggagctgtgtctgggtctccttgatgctccagaacttagttattttcctgacactgcacaggtatatcaggtgagtgattgaataaattctttcccatgcaaggccaaagagagacacaagctggtggttttgaggaggagaggttggttctttccaactggtggactggggcaagtatcacatatgtaacacccactgagctgtgcatgagtggtctgcagaaatgcagtagatgggaagaggaggggtgatgcatgaaaggcaagccccaaattggggcttagcctgagagggttcttggctttgcccaggaaagaattcaagggtgagatggtggtaaggtagaagaaaacagctttactgaagtgtcagtgttgcagttctgacagtgatgcagctctgtgactgctcctgcagagcagggctaccccataggcagtgtgctgagagctgcagctcagggcaggtgtgcagtcatagttatatctacttttaattgcatgcagattaagaggtgtttttttgcggacatttctaggaaaagggtagtaacttctgcaccatcaggtcatttctatggagaggagtgataactcctgggtgttgccacgcaaaggtaa

SEQ ID NO: 114774 - DNA, 842 bp, Homo sapiens
gtgcccggcgcagggcggaagcagaggcgttggcggcgtgaggctcaggactgtacatcagaggaagccaaaagccagctggaatacttcctgaatacagttttaatcttgtttgcaattatttcgaaggggagaaatcatctggatcagaattaagatgctctggtttcaaggaaatagcatgcaacttgccagatcctcctttggactcttcttgagaaattgctctgcctctaagacaactctgcctgtgttgaccttattcacaaaggagtttctcagcacaaggtctctctttgcctgctgccatccatgtaagatgtgacttgctcctccttgccttccgccatcattatgaggcctccccagccatgtggaactgacccatgccccctttgtgatgaagccaaggaagtactcaagccttatgaaaacaggcaaccctacaaggatcagaagctgccaggaacaaggagaagacgctccccttcctcaccttcccacccccacatggcttctcagtcggggaaaagatacaacttaactttaaaccaagtcttaagttttgattatgacatgggattagatgcaccaaaaacaatttcaagtgactgtggggcattctattgcctgagaatgttcaagagtcctgatatgacctgttgtttttatcctaaacagtgaaaaattcatccaccaaatatataggaatagagggagacagaaagatgctttctgaaggtatcccatatttagagtattggttacatatacctaatgttggttttaacctatagctcttcaataaacttactcatcaattcttatttcagagaggaata

SEQ ID NO: 114775 - DNA, 1088 bp, Homo sapiens
gtgcccggcgcagggcggaagcagaggcgttggcggcgtgaggctcaggactgtacatcagaggaagccaaaagccagctggaatacttcctgaatacagttttaatcttgtttgcaattatttcgaaggggagaaatcatctggatcagaattaagatgctctggtttcaaggaaatagcatgcaacttgccagatcctcctttggactcttcttgagaaattgctctgcctctaagacaactctgcctgtgttgaccttattcacaaaggagtttctcagcacaaggtctctctttgcctgctgccatccatgtaagatgtgacttgctcctccttgccttccgccatcattatgaggcctccccagccatgtggaactgacccatgccccctttgtgatgaagccaaggaagtactcaagccttatgaaaacaggttcattttacaggaggtgaacatcacacttccagaaaactctgtctggtatgaaaggtataaatttgatattcctgtctttcacttgaatggccagtttctgatgatgcatcgagtaaacacctcaaaacttgaaaaacagctcctgaaacttgagcagcaaagtactggaggctgactgatgccctcatgattttccaccctctcttcccataaagcatcttcctaaggaaatgaccatggcctgatactcattttgtcacttgtacagagccctaaggatgttctgaattcagtggtgccaaataaatgttgacattccccttttggttgatggaagtatcagtgtgggaactgtttgcttaatggcattttataaaataagaagagcatattagcagggagggagatgatggagggagggagaagtccatttgtcttatttatcctttttgtattaatagagaagcacttcacagtcactgggcaatgccatttataggaagaaggttctgcattcctgctgctgccccggagggcttaactttttaatgaaagaataaatgctcttccactcagtagataaagtgaaatgtgaattgttaataactgtgcacggtcaataaagcgatgttttaaggaataaaaaag

SEQ ID NO: 114776 - DNA, 1063 bp, Homo sapiens
gtgcccggcgcagggcggaagcagaggcgttggcggcgtgaggctcaggactgtacatcagaggaagccaaaagccagctggaatacttcctgaatacagttttaatcttgtttgcaattatttcgaaggggagaaatcatctggatcagaattaagatgctctggtttcaaggaaatagcatgcaacttgccagatcctcctttggactcttcttgagaaattgctctgcctctaagacaactctgcctgtgttgaccttattcacaaaggtacaaagtgaaaaagtaaaattgttgggtgaagaaagttgtacatttaagaaaaagggacaaagttgaaaggaaaggcaatggaataagctttcttcagacctgctcttcaatttttctatcagcacaacagcagcaactcagttttctacccagataccttattatctcccaattagcaaagagtaaattgatgtatttaatggtcatctggcccctacattgaaaaaaatgaagtataggttataatatggtgtttactataaagtcaccttgaacgctgaattaatgaatattgctcctaggggaaatacacagttaggttcctatgagtctctggtcataatattttcatcagcctaccaaatacagaaccttattttatgtgtgattctatttaaagatactttatttttacatttgcaccatggaatactatgcagccataaaatagatgaaataatgtctttgcagcaacatggatgcagttagaggccattatcctgagcaaattaacacaggaacagaaaatcaaatactgcatgttctcacttataagtgggagctaaacattgagtacacatgcacacaaagaggggaatgatagacaccagggcctaattgagggtggagggtgagaatcgaaaaactacctatcaggtgtatgcttactacctgggtgatgaaatcatttgtacaccaaaccccagtggcatgcaatttacccatgtgacaaagctgcacatgtacccccgaacctaaaataaaagttgaaaaaaaatttttttaata

SEQ ID NO: 114777 - DNA, 882 bp, Homo sapiens
gtgcccggcgcagggcggaagcagaggcgttggcggcgtgaggctcaggactgtacatcagaggaagccaaaagccagctggaatacttcctgaatacagttttaatcttgtttgcaattatttcgaaggggagaaatcatctggatcagaattaagatgctctggtttcaaggaaatagcatgcaacttgccagatcctcctttggactcttcttgagaaattgctctgcctctaagacaactctgcctgtgttgaccttattcacaaaggacccatgccccctttgtgatgaagccaaggaagtactcaagccttatgaaaacaggtttctgatgatgcatcgagtaaacacctcaaaacttgaaaaacagctcctgaaacttgagcagcaaagtactggaggctgactgatgccctcatgattttccaccctctcttcccataaagcatcttcctaaggaaatgaccatggcctgatactcattttgtcacttgtacagagccctaaggatgttctgaattcagtggtgccaaataaatgttgacattccccttttggttgatggaagtatcagtgtgggaactgtttgcttaatggcattttataaaataagaagagcatattagcagggagggagatgatggagggagggagaagtccatttgtcttatttatcctttttgtattaatagagaagcacttcacagtcactgggcaatgccatttataggaagaaggttctgcattcctgctgctgccccggagggcttaactttttaatgaaagaataaatgctcttccactcagtagataaagtgaaatgtgaattgttaataactgtgcacggtcaataaagcgatgttttaaggaataaaaaag

SEQ ID NO: 114778 - DNA, 136 bp, Homo sapiens
aggggtaacagaaaagcagcaagatcaggaagtagagaatataatgaaaccagtcaagttttggaaatcagggacattagatcactgtggacctaaaacaaacaaacaactataaggaaaatggcattagaaatgg

SEQ ID NO: 114779 - DNA, 978 bp, Homo sapiens
gtgcccggcgcagggcggaagcagaggcgttggcggcgtgaggctcaggactgtacatcagaggaagccaaaagccagctggaatacttcctgaatacagttttaatcttgtttgcaattatttcgaaggggagaaatcatctggatcagaattaagatgctctggtttcaaggaaatagcatgcaacttgccagatcctcctttggactcttcttgagaaattgctctgcctctaagacaactctgcctgtgttgaccttattcacaaaggacccatgccccctttgtgatgaagccaaggaagtactcaagccttatgaaaacaggttcattttacaggaggtgaacatcacacttccagaaaactctgtctggtatgaaaggtataaatttgatattcctgtctttcacttgaatggccagtttctgatgatgcatcgagtaaacacctcaaaacttgaaaaacagctcctgaaacttgagcagcaaagtactggaggctgactgatgccctcatgattttccaccctctcttcccataaagcatcttcctaaggaaatgaccatggcctgatactcattttgtcacttgtacagagccctaaggatgttctgaattcagtggtgccaaataaatgttgacattccccttttggttgatggaagtatcagtgtgggaactgtttgcttaatggcattttataaaataagaagagcatattagcagggagggagatgatggagggagggagaagtccatttgtcttatttatcctttttgtattaatagagaagcacttcacagtcactgggcaatgccatttataggaagaaggttctgcattcctgctgctgccccggagggcttaactttttaatgaaagaataaatgctcttccactcagtagataaagtgaaatgtgaattgttaataactgtgcacggtcaataaagcgatgttttaaggaataaaaaag

SEQ ID NO: 114780 - DNA, 537 bp, Homo sapiens
acatgaggggcaccccttactttccatccatttgctgtccagttgaggagataaaataaccacaacagagaacagctatgaaaaatgcagtactttgggaaagtagttttcaaattatgttctgtggaatcctaaggagttctatagaggcaccccagaggccactgaggaggaagggttgggggccaagagctatgagtctccattctgtcccttcactacaataaggacagctttaattttatctttggagtttagcatcaagattttagaagcactgccataggacatcagagaaggaaagaagtttggtactttctgtgttttttgagacagacctcaaggaccaaataaaataggacaggtaggaggcagtctgagctgggcaacagcatgagttaagtttgagggctacttctaaggaacaagtgcctcctgagtcagctgattcctcctgtaagggaaggaagagtgtgtcccacggcacctcctctgcctttctatagaaaaagggatggagccaggggagacaaggaa

SEQ ID NO: 114781 - DNA, 328 bp, Homo sapiens
cttagtttcagagccgctttctacaaagaaacattaaatttaaaaaaaaattttactagacaaataataattgtagatattcatgggatgacattttgatacatatttgtaatgtgggatgattaaatcaggctaattaacaaatccatcaccttacatacttatcatgttttggcagtgaaaacatttaaaatcttctgtcttggcaattttgaaatatacaatccattattaaatgtaccctgggaagatggccatgagtagggaaggactggagaggagagtcactctccagctaactgagtcacttaggcacgtcacccttgca

SEQ ID NO: 114782 - DNA, 275 bp, Homo sapiens
ctggagcaaaattagtatttggctctgcctagtgcctaagtacatgcacttaacctctgcaaatacagtgttctagaaccctcatcattgaatccggaggtacttgtagtcatttgtgacactggagtcctagcctccaaaggactttcagaagagtcttagattagttcctaagaaagatttctacaatatgaacttagatgaatttgaagggtgcccggaaatacagatgttggagaatatgcaggaagagtttagaggatgagaatgctaaa

SEQ ID NO: 114783 - DNA, 676 bp, Homo sapiens
tagataatagcaaagtgaagcaaaaagccaactcaagagtagtgagctttgaatatgtactaccttgtttaaaatatgacatatttaattttaagtttatttacttgaatttttaataatggctgttttttaagtaagcgacttgtaaaattcctaaaactttgtcagctcttccaaaccagtgtcagccagttccagcacaccagtgagaaggtccctcagtagggggaagaaaactttctattatccaactactatgtaccagaaagggggctagcatgtcccatgtgttattctatccaaccactgtggtatcacttttagggtagatgttgtaactcccattgctatgaagaaactgaggcttagaggttaaaaaaccttgtccaagttcacatagtaagtggtagggtcaggattggaacccagactgtttgactcctaaacttgtgctttgaccatttactgtgctctaaagcccagagtccagagcgagggctaagctttggggaagaggcagggtgcttgtttgatttctatgtggagctggcctctccattgaactctcagcaggtacaaagattcttgtagtcatctcgggttccacaaatgagacacctcttgacttgcttcagtatggggtattggtgctaatacattgagctaggtgacatgc

SEQ ID NO: 114784 - DNA, 578 bp, Homo sapiens
acattcttgaggttgtaggtatttctttgacctacttctctttgagatttactctatattgctttatactagccacaaactccagttgacacgggtgtgtttgttgtcttgcctgataatgttgttgagtgttcagcactcctagatctggatggggtgaagaactcactggaaagagcatggagtcaggataaggacacttagtcttcaatcctgactttctgctttattatccccatgtttttaggcaagtacctgagggtctccattacctcccctacagaatgaggaatatcattcctgcctcactgaacacttatgaggattaataattcaataaatatttaaagtactcagcccggaacttggcatccgttgggtgcgcttcgcatcttccagttggagaaatcagttatcagtgtttgggaattgcattaagctcataaagtaatggctggaaattattaagattgatttttaaaaatacaatcatgcttttattctcttttggaaaacagaactttattgcttctcacaacaaaactttcagtgccctccgaggagaaaaataaacttac

SEQ ID NO: 114785 - DNA, 485 bp, Homo sapiens
ctactactactaaattcgcggccgcgtcgactttttttttgtatcctcaggtttattgatttcacattgtgaaataaacagcaaaggtcttagttttcaagtgaaaactttttggtaatcacaaaattacctgacacataccacgcttaaaccaacccccaaatttagcatattcattttgccatgagccagtcttgagattttcttaaaagatttcttattttgcctctgatgtagtgaaaaacggggtaagtatgctaactttcttgtatatgttggggggtacttattcaactccatttcttgtccttacaagatttataaatgtggtatgtttatagtgtggatatatatgttgccactgcaaaggtggtgcatatgtatatatgtgcaaaatgggtaaggcctgttctaactatgaaatttttctaaagacaaattcaataaaatttaatactgaatatttaaccaagtcaatcacaatt

SEQ ID NO: 114786 - DNA, 838 bp, Homo sapiens
agcgggtgacgtcacaaaaacctacgcgtcgcgcggtgggcgggagttggcggacggtccctggctgggttctggaggccctgggaccgcggaagaggcttcagacgctgcagcgatgcctcgcccacggcggatgcctttggtgcttcatgaagaatatttccagatatctcacagacattaagcctttgcctcccaacataaaagacagactgattaaaataatgagtatgcagggacagataacagattcaaatataagtgagattttacatcctgaagtccaaactctagatctacggagctgcgatatatcagatgctgctctcctgcacctgtctaactgtagaaaactgaagaaattaaatttaaatgcttcaaaagggaaccgagtttctgtaacttcagaaggaataaaagctgtggcttcatcttgttcatacctacacgaagcttctttgaaaagatgctgcaatctcactgacgaaggagtcgttgctcttgcactcaattgccagctgctaaagatcatcgatttaggtggctgcttaagtattactgatgtgtccttacatgcattaggaaaaaactgcccatttttgcagtgtgtcgacttttcagctactcaggtatctgacagtggtgtgattgcacttgttagtggaccttgtgcgaagaaattagaggagattcatatgggacattgtgtaaatctgactgatggggctgtcgaagctgtccttacttactgtcctcaaatacgtatattactcttccatggatgccccttgataacaggatcattcccgaagaagtgttggagcaattaagaagcgca

SEQ ID NO: 114787 - DNA, 1934 bp, Homo sapiens
agcgggtgacgtcacaaaaacctacgcgtcgcgcggtgggcgggagttggcggacggtccctggctgggttctggaggccctgggaccgcggaagaggcttcagacgctgcagcgatgcctcgcccacggcgggtcagtcagctcctggatctattttacatcctgaagtccaaactctagatctacggagctgcgatatatcagatgctgctctcctgcacctgtctaactgtagaaaactgaagaaattaaatttaaatgcttcaaaagggaaccgagtttctgtaacttcagaaggaataaaagctgtggcttcatcttgttcatacctacacgaagcttctttgaaaagatgctgcaatctcactgacgaaggagtcgttgctcttgcactcaattgccagctgctaaagatcatcgatttaggtggctgcttaagtattactgatgtgtccttacatgcattaggaaaaaactgcccatttttgcagtgtgtcgacttttcagctactcaggtatctgacagtggtgtgattgcacttgttagtggaccttgtgcgaagaaattagaggagattcatatgggacattgtgtaaatctgactgatggggctgtcgaagctgtccttacttactgtcctcaaatacgtatattactcttccatggatgccccttgataacagatcattcccgagaagtgttggagcaattagtaggcccaaacaaactaaagcaagtgacatggactgtttattgatgcttttttgaagatgatcaatgctaggaaagcttatcaaaactactttcccaggaaaccatctatagagatttgcattctacttaatgttaacactatttttaattattttattgtcttaagttataactctcagagaattagctaagtcttggtatatacatggtttgtgctttactcttaaacatctttaaagtgctattattctatatctgttggatgagtcattatttttgaaatgataatcctagcatgaactctgatctatggtgttggattctgtttcttaaataactttaaaattaactgttttcccttgagatttccttctcctatgtaggtatttgagctattgttctaagtttacctgtaagtataaaccttgggagaatctaagtaaacatatttctaaaagcatagttaccttcctattttctggctcttaccttcttggagtatttaaatgcccatttgccaaaagcagacctgaacatcaagcctgttaattcttcaaagaatttaggtatttgtttcaccgaaatgaagtgacttattagccattcagcgtattagtattacagaggctcttgcccagccacatccattcattgatttttatggctactcttcccagttacattttatgcatctgtaagctttccttccttagcaaaattgcattcaaaaatgtgtaaaaatgagtaaatacagaatatcactacagagacttgtatcctcaggtttattgatttcacattgtgaaataaacagcaaaggtcttagttttcaagtgaaaactttttggtaatcacaaaattacctgacacataccacgcttaaaccaacccccaaatttagcatattcattttgccatgagccagtcttgagattttcttaaaagatttcttattttgcctctgatgtagtgaaaaacggggtaagtatgctaactttcttgtatatgttggggggtacttattcaactccatttcttgtccttacaagatttataaatgtggtatgtttatagtgtggatatatatgttgccactgcaaaggtggtgcatatgtatatatgtgcaaaatgggtaaggcctgttctaactatgaaatttttctaaagacaaattcaataaaatttaatactgaatatttaaccaagtcaatcacaatt

SEQ ID NO: 114788 - DNA, 2047 bp, Homo sapiens
agcgggtgacgtcacaaaaacctacgcgtcgcgcggtgggcgggagttggcggacggtccctggctgggttctggaggccctgggaccgcggaagaggcttcagacgctgcagcgatgcctcgcccacggcggatgcctttggtgcttcatgaagaatatttccagatatctcacagacattaagcctttgcctcccaacataaaagacagactgattaaaataatgagtatgcagggacagataacagattcaaatataagtgagattttacatcctgaagtccaaactctagatctacggagctgcgatatatcagatgctgctctcctgcacctgtctaactgtagaaaactgaagaaattaaatttaaatgcttcaaaagggaaccgagtttctgtaacttcagaaggaataaaagctgtggcttcatcttgttcatacctacacgaagcttctttgaaaagatgctgcaatctcactgacgaaggagtcgttgctcttgcactcaattgccagctgctaaagatcatcgatttaggtggctgcttaagtattactgatgtgtccttacatgcattaggaaaaaactgcccatttttgcagtgtgtcgacttttcagctactcaggtatctgacagtggtgtgattgcacttgttagtggaccttgtgcgaagaaattagaggagattcatatgggacattgtgtaaatctgactgatggggctgtcgaagctgtccttacttactgtcctcaaatacgtatattactcttccatggatgccccttgataacagatcattcccgagaagtgttggagcaattagtaggcccaaacaaactaaagcaagtgacatggactgtttattgatgcttttttgaagatgatcaatgctaggaaagcttatcaaaactactttcccaggaaaccatctatagagatttgcattctacttaatgttaacactatttttaattattttattgtcttaagttataactctcagagaattagctaagtcttggtatatacatggtttgtgctttactcttaaacatctttaaagtgctattattctatatctgttggatgagtcattatttttgaaatgataatcctagcatgaactctgatctatggtgttggattctgtttcttaaataactttaaaattaactgttttcccttgagatttccttctcctatgtaggtatttgagctattgttctaagtttacctgtaagtataaaccttgggagaatctaagtaaacatatttctaaaagcatagttaccttcctattttctggctcttaccttcttggagtatttaaatgcccatttgccaaaagcagacctgaacatcaagcctgttaattcttcaaagaatttaggtatttgtttcaccgaaatgaagtgacttattagccattcagcgtattagtattacagaggctcttgcccagccacatccattcattgatttttatggctactcttcccagttacattttatgcatctgtaagctttccttccttagcaaaattgcattcaaaaatgtgtaaaaatgagtaaatacagaatatcactacagagacttgtatcctcaggtttattgatttcacattgtgaaataaacagcaaaggtcttagttttcaagtgaaaactttttggtaatcacaaaattacctgacacataccacgcttaaaccaacccccaaatttagcatattcattttgccatgagccagtcttgagattttcttaaaagatttcttattttgcctctgatgtagtgaaaaacggggtaagtatgctaactttcttgtatatgttggggggtacttattcaactccatttcttgtccttacaagatttataaatgtggtatgtttatagtgtggatatatatgttgccactgcaaaggtggtgcatatgtatatatgtgcaaaatgggtaaggcctgttctaactatgaaatttttctaaagacaaattcaataaaatttaatactgaatatttaaccaagtcaatcacaatt

SEQ ID NO: 114789 - DNA, 1415 bp, Homo sapiens
  misc_feature (45)..(45): n is a, c, g, or t
ataagcgctgcattaatgtttaattattttcttttgttccccctncccccacaggagattcatatgggacattgtgtaaatctgactgatggggctgtcgaagctgtccttacttactgtcctcaaatacgtatattactcttccatggatgccccttgataacagatcattcccgagaagtgttggagcaattagtaggcccaaacaaactaaagcaagtgacatggactgtttattgatgcttttttgaagatgatcaatgctaggaaagcttatcaaaactactttcccaggaaaccatctatagagatttgcattctacttaatgttaacactatttttaattattttattgtcttaagttataactctcagagaattagctaagtcttggtatatacatggtttgtgctttactcttaaacatctttaaagtgctattattctatatctgttggatgagtcattatttttgaaatgataatcctagcatgaactctgatctatggtgttggattctgtttcttaaataactttaaaattaactgttttcccttgagatttccttctcctatgtaggtatttgagctattgttctaagtttacctgtaagtataaaccttgggagaatctaagtaaacatatttctaaaagcatagttaccttcctattttctggctcttaccttcttggagtatttaaatgcccatttgccaaaagcagacctgaacatcaagcctgttaattcttcaaagaatttaggtatttgtttcaccgaaatgaagtgacttattagccattcagcgtattagtattacagaggctcttgcccagccacatccattcattgatttttatggctactcttcccagttacattttatgcatctgtaagctttccttccttagcaaaattgcattcaaaaatgtgtaaaaatgagtaaatacagaatatcactacagagacttgtatcctcaggtttattgatttcacattgtgaaataaacagcaaaggtcttagttttcaagtgaaaactttttggtaatcacaaaattacctgacacataccacgcttaaaccaacccccaaatttagcatattcattttgccatgagccagtcttgagattttcttaaaagatttcttattttgcctctgatgtagtgaaaaacggggtaagtatgctaactttcttgtatatgttggggggtacttattcaactccatttcttgtccttacaagatttataaatgtggtatgtttatagtgtggatatatatgttgccactgcaaaggtggtgcatatgtatatatgtgcaaaatgggtaaggcctgttctaactatgaaatttttctaaagacaaattcaataaaatttaatactgaatatttaaccaagtcaatcacaatt

SEQ ID NO: 114790 - DNA, 2177 bp, Homo sapiens
  misc_feature (6)..(6): n is a, c, g, or t
  misc_feature (10)..(10): n is a, c, g, or t
  misc_feature (24)..(24): n is a, c, g, or t
ctcgtncgcntcgtgccgctcgtnccgctcgtgccaatatttccagatatctcacagacattaagcctttgcctcccaacataaaagacagactgattaaaataatgagtatgcagggacagataacagattcaaatataagtgagggtcatgctccgttgcccaggctggagtacagtggtgcaatctcagctcactgcaacctccgctgcctggacttaggtgatccctcttcagcctcctgagtagttgggactataggtgtacaccaccatgcctggctaatttttgcattttttgtagagacagggtttcaccatgttgcccaggctggtctcgaactccggagctcaagtgatccatccgcctcagcctctcaaaatgctgggattacagattttacatcctgaagtccaaactctagatctacggagctgcgatatatcagatgctgctctcctgcacctgtctaactgtagaaaactgaagaaattaaatttaaatgcttcaaaagggaaccgagtttctgtaacttcagaaggaataaaagctgtggcttcatcttgttcatacctacacgaagcttctttgaaaagatgctgcaatctcactgacgaaggagtcgttgctcttgcactcaattgccagctgctaaagatcatcgatttaggtggctgcttaagtattactgatgtgtccttacatgcattaggaaaaaactgcccatttttgcagtgtgtcgacttttcagctactcaggtatctgacagtggtgtgattgcacttgttagtggaccttgtgcgaagaaattagaggagattcatatgggacattgtgtaaatctgactgatggggctgtcgaagctgtccttacttactgtcctcaaatacgtatattactcttccatggatgccccttgataacagatcattcccgagaagtgttggagcaattagtaggcccaaacaaactaaagcaagtgacatggactgtttattgatgcttttttgaagatgatcaatgctaggaaagcttatcaaaactactttcccaggaaaccatctatagagatttgcattctacttaatgttaacactatttttaattattttattgtcttaagttataactctcagagaattagctaagtcttggtatatacatggtttgtgctttactcttaaacatctttaaagtgctattattctatatctgttggatgagtcattatttttgaaatgataatcctagcatgaactctgatctatggtgttggattctgtttcttaaataactttaaaattaactgttttcccttgagatttccttctcctatgtaggtatttgagctattgttctaagtttacctgtaagtataaaccttgggagaatctaagtaaacatatttctaaaagcatagttaccttcctattttctggctcttaccttcttggagtatttaaatgcccatttgccaaaagcagacctgaacatcaagcctgttaattcttcaaagaatttaggtatttgtttcaccgaaatgaagtgacttattagccattcagcgtattagtattacagaggctcttgcccagccacatccattcattgatttttatggctactcttcccagttacattttatgcatctgtaagctttccttccttagcaaaattgcattcaaaaatgtgtaaaaatgagtaaatacagaatatcactacagagacttgtatcctcaggtttattgatttcacattgtgaaataaacagcaaaggtcttagttttcaagtgaaaactttttggtaatcacaaaattacctgacacataccacgcttaaaccaacccccaaatttagcatattcattttgccatgagccagtcttgagattttcttaaaagatttcttattttgcctctgatgtagtgaaaaacggggtaagtatgctaactttcttgtatatgttggggggtacttattcaactccatttcttgtccttacaagatttataaatgtggtatgtttatagtgtggatatatatgttgccactgcaaaggtggtgcatatgtatatatgtgcaaaatgggtaaggcctgttctaactatgaaatttttctaaagacaaattcaataaaatttaatactgaatatttaaccaagtcaatcacaatt

SEQ ID NO: 114791 - DNA, 1927 bp, Homo sapiens
  misc_feature (6)..(6): n is a, c, g, or t
  misc_feature (10)..(10): n is a, c, g, or t
  misc_feature (24)..(24): n is a, c, g, or t
ctcgtncgcntcgtgccgctcgtnccgctcgtgccaatatttccagatatctcacagacattaagcctttgcctcccaacataaaagacagactgattaaaataatgagtatgcagggacagataacagattcaaatataagtgagattttacatcctgaagtccaaactctagatctacggagctgcgatatatcagatgctgctctcctgcacctgtctaactgtagaaaactgaagaaattaaatttaaatgcttcaaaagggaaccgagtttctgtaacttcagaaggaataaaagctgtggcttcatcttgttcatacctacacgaagcttctttgaaaagatgctgcaatctcactgacgaaggagtcgttgctcttgcactcaattgccagctgctaaagatcatcgatttaggtggctgcttaagtattactgatgtgtccttacatgcattaggaaaaaactgcccatttttgcagtgtgtcgacttttcagctactcaggtatctgacagtggtgtgattgcacttgttagtggaccttgtgcgaagaaattagaggagattcatatgggacattgtgtaaatctgactgatggggctgtcgaagctgtccttacttactgtcctcaaatacgtatattactcttccatggatgccccttgataacagatcattcccgagaagtgttggagcaattagtaggcccaaacaaactaaagcaagtgacatggactgtttattgatgcttttttgaagatgatcaatgctaggaaagcttatcaaaactactttcccaggaaaccatctatagagatttgcattctacttaatgttaacactatttttaattattttattgtcttaagttataactctcagagaattagctaagtcttggtatatacatggtttgtgctttactcttaaacatctttaaagtgctattattctatatctgttggatgagtcattatttttgaaatgataatcctagcatgaactctgatctatggtgttggattctgtttcttaaataactttaaaattaactgttttcccttgagatttccttctcctatgtaggtatttgagctattgttctaagtttacctgtaagtataaaccttgggagaatctaagtaaacatatttctaaaagcatagttaccttcctattttctggctcttaccttcttggagtatttaaatgcccatttgccaaaagcagacctgaacatcaagcctgttaattcttcaaagaatttaggtatttgtttcaccgaaatgaagtgacttattagccattcagcgtattagtattacagaggctcttgcccagccacatccattcattgatttttatggctactcttcccagttacattttatgcatctgtaagctttccttccttagcaaaattgcattcaaaaatgtgtaaaaatgagtaaatacagaatatcactacagagacttgtatcctcaggtttattgatttcacattgtgaaataaacagcaaaggtcttagttttcaagtgaaaactttttggtaatcacaaaattacctgacacataccacgcttaaaccaacccccaaatttagcatattcattttgccatgagccagtcttgagattttcttaaaagatttcttattttgcctctgatgtagtgaaaaacggggtaagtatgctaactttcttgtatatgttggggggtacttattcaactccatttcttgtccttacaagatttataaatgtggtatgtttatagtgtggatatatatgttgccactgcaaaggtggtgcatatgtatatatgtgcaaaatgggtaaggcctgttctaactatgaaatttttctaaagacaaattcaataaaatttaatactgaatatttaaccaagtcaatcacaatt

SEQ ID NO: 114792 - DNA, 786 bp, Homo sapiens
agcgggtgacgtcacaaaaacctacgcgtcgcgcggtgggcgggagttggcggacggtccctggctgggttctggaggccctgggaccgcggaagaggcttcagacgctgcagcgatgcctcgcccacggcgggtcagtcagctcctggatctatgcctttggtgcttcatgaagaatatttccagatatctcacagacattaagcctttgcctcccaacataaaagacagactgattaaaataatgagtatgcagggacagataacagattcaaatataagtgagattttacatcctgaagtccaaactctagatctacggagctgcgatatatcagatgctgctctcctgcacctgtctaactgtagaaaactgaagaaattaaatttaaatgcttcaaaagggaaccgagtttctgtaacttcagaaggaataaaagctgtggcttcatcttgttcatacctacacgaagcttctttgaaaagatgctgcaatctcactgacgaaggagtcgttgctcttgcactcaattgccagctgctaaagatcatcgatttaggtggctgcttaagtattactgatgtgtccttacatgcattaggaaaaaactgcccatttttgcagtgtgtcgacttttcagctactcaggtatctgacagtggtgtgattgcacttgttagtggaccttgtgcgaagaaattagaggagattcatatgggacattgtgtaattgataaggtgtagtctgtcgggctagtcgggggtaccagctcgagtctatctga

SEQ ID NO: 114793 - DNA, 258 bp, Homo sapiens
cctgaattagccatctcaacagtgctttgtgtcccaagaaggactttgccagcactgaaagctgcacctcctgctggaagtagaagtggttttctcctgctttgtgtgtctgtctgcacatggatatgcttctgtattctttgctgtattttacatcagccacttgtctgttatgaccaccaaaacactgaatatggaataaatatttgtatttatagaaagaaataattttttcaaaatcacttatttgttatagat

SEQ ID NO: 114794 - DNA, 475 bp, Homo sapiens
actacacctaataatagtgagggctaccattaattaattattagtgagttagttgtatattgtgctttatagatcacctcctttaatcctttaaataactgtataataattaacatcacctccagttagacatgaggaaacattaaacattttttattgtcaattaatatattgtcattgttttcttttatagatcattcccgagaagtgttggagcaattagtaggcccaaacaaactaaagcaagtgacatggactgtttattgatgcttttttgaagatgatcaatgctaggaaagcttatcaaaactactttcccaggaaaccatctatagagatttgcattctacttaatgttaacactatttttaattattttattgtcttaagttataactctcagagaattagctaagtcttggtatatacatggtttgtgctttactcttaaacatctttaaagtgctattattct

SEQ ID NO: 114795 - DNA, 2067 bp, Homo sapiens
agcgggtgacgtcacaaaaacctacgcgtcgcgcggtgggcgggagttggcggacggtccctggctgggttctggaggccctgggaccgcggaagaggcttcagacgctgcagcgatgcctcgcccacggcgggtcagtcagctcctggatctatgcctttggtgcttcatgaagaatatttccagatatctcacagacattaagcctttgcctcccaacataaaagacagactgattaaaataatgagtatgcagggacagataacagattcaaatataagtgagattttacatcctgaagtccaaactctagatctacggagctgcgatatatcagatgctgctctcctgcacctgtctaactgtagaaaactgaagaaattaaatttaaatgcttcaaaagggaaccgagtttctgtaacttcagaaggaataaaagctgtggcttcatcttgttcatacctacacgaagcttctttgaaaagatgctgcaatctcactgacgaaggagtcgttgctcttgcactcaattgccagctgctaaagatcatcgatttaggtggctgcttaagtattactgatgtgtccttacatgcattaggaaaaaactgcccatttttgcagtgtgtcgacttttcagctactcaggtatctgacagtggtgtgattgcacttgttagtggaccttgtgcgaagaaattagaggagattcatatgggacattgtgtaaatctgactgatggggctgtcgaagctgtccttacttactgtcctcaaatacgtatattactcttccatggatgccccttgataacagatcattcccgagaagtgttggagcaattagtaggcccaaacaaactaaagcaagtgacatggactgtttattgatgcttttttgaagatgatcaatgctaggaaagcttatcaaaactactttcccaggaaaccatctatagagatttgcattctacttaatgttaacactatttttaattattttattgtcttaagttataactctcagagaattagctaagtcttggtatatacatggtttgtgctttactcttaaacatctttaaagtgctattattctatatctgttggatgagtcattatttttgaaatgataatcctagcatgaactctgatctatggtgttggattctgtttcttaaataactttaaaattaactgttttcccttgagatttccttctcctatgtaggtatttgagctattgttctaagtttacctgtaagtataaaccttgggagaatctaagtaaacatatttctaaaagcatagttaccttcctattttctggctcttaccttcttggagtatttaaatgcccatttgccaaaagcagacctgaacatcaagcctgttaattcttcaaagaatttaggtatttgtttcaccgaaatgaagtgacttattagccattcagcgtattagtattacagaggctcttgcccagccacatccattcattgatttttatggctactcttcccagttacattttatgcatctgtaagctttccttccttagcaaaattgcattcaaaaatgtgtaaaaatgagtaaatacagaatatcactacagagacttgtatcctcaggtttattgatttcacattgtgaaataaacagcaaaggtcttagttttcaagtgaaaactttttggtaatcacaaaattacctgacacataccacgcttaaaccaacccccaaatttagcatattcattttgccatgagccagtcttgagattttcttaaaagatttcttattttgcctctgatgtagtgaaaaacggggtaagtatgctaactttcttgtatatgttggggggtacttattcaactccatttcttgtccttacaagatttataaatgtggtatgtttatagtgtggatatatatgttgccactgcaaaggtggtgcatatgtatatatgtgcaaaatgggtaaggcctgttctaactatgaaatttttctaaagacaaattcaataaaatttaatactgaatatttaaccaagtcaatcacaatt

SEQ ID NO: 114796 - DNA, 2276 bp, Homo sapiens
agcgggtgacgtcacaaaaacctacgcgtcgcgcggtgggcgggagttggcggacggtccctggctgggttctggaggccctgggaccgcggaagaggcttcagacgctgcagcgatgcctcgcccacggcgggtcagtcagctcctggatcttgatgcttaggaaagattttatatcattaaaaagaaattgggaggtcacttccaagatggctaaatgggaacagctccagtctgcagctcccagcaagattgacgcagaagatgggcgatttctgcatttccaactgagatgctactggacttgaatggttaataaaattgcacaatgttgttggtggcagtgacttctttctgttcagatgcctttggtgcttcatgaagaatatttccagatatctcacagacattaagcctttgcctcccaacataaaagacagactgattaaaataatgagtatgcagggacagataacagattcaaatataagtgagattttacatcctgaagtccaaactctagatctacggagctgcgatatatcagatgctgctctcctgcacctgtctaactgtagaaaactgaagaaattaaatttaaatgcttcaaaagggaaccgagtttctgtaacttcagaaggaataaaagctgtggcttcatcttgttcatacctacacgaagcttctttgaaaagatgctgcaatctcactgacgaaggagtcgttgctcttgcactcaattgccagctgctaaagatcatcgatttaggtggctgcttaagtattactgatgtgtccttacatgcattaggaaaaaactgcccatttttgcagtgtgtcgacttttcagctactcaggtatctgacagtggtgtgattgcacttgttagtggaccttgtgcgaagaaattagaggagattcatatgggacattgtgtaaatctgactgatggggctgtcgaagctgtccttacttactgtcctcaaatacgtatattactcttccatggatgccccttgataacagatcattcccgagaagtgttggagcaattagtaggcccaaacaaactaaagcaagtgacatggactgtttattgatgcttttttgaagatgatcaatgctaggaaagcttatcaaaactactttcccaggaaaccatctatagagatttgcattctacttaatgttaacactatttttaattattttattgtcttaagttataactctcagagaattagctaagtcttggtatatacatggtttgtgctttactcttaaacatctttaaagtgctattattctatatctgttggatgagtcattatttttgaaatgataatcctagcatgaactctgatctatggtgttggattctgtttcttaaataactttaaaattaactgttttcccttgagatttccttctcctatgtaggtatttgagctattgttctaagtttacctgtaagtataaaccttgggagaatctaagtaaacatatttctaaaagcatagttaccttcctattttctggctcttaccttcttggagtatttaaatgcccatttgccaaaagcagacctgaacatcaagcctgttaattcttcaaagaatttaggtatttgtttcaccgaaatgaagtgacttattagccattcagcgtattagtattacagaggctcttgcccagccacatccattcattgatttttatggctactcttcccagttacattttatgcatctgtaagctttccttccttagcaaaattgcattcaaaaatgtgtaaaaatgagtaaatacagaatatcactacagagacttgtatcctcaggtttattgatttcacattgtgaaataaacagcaaaggtcttagttttcaagtgaaaactttttggtaatcacaaaattacctgacacataccacgcttaaaccaacccccaaatttagcatattcattttgccatgagccagtcttgagattttcttaaaagatttcttattttgcctctgatgtagtgaaaaacggggtaagtatgctaactttcttgtatatgttggggggtacttattcaactccatttcttgtccttacaagatttataaatgtggtatgtttatagtgtggatatatatgttgccactgcaaaggtggtgcatatgtatatatgtgcaaaatgggtaaggcctgttctaactatgaaatttttctaaagacaaattcaataaaatttaatactgaatatttaaccaagtcaatcacaatt

SEQ ID NO: 114797 - DNA, 2022 bp, Homo sapiens
agcgggtgacgtcacaaaaacctacgcgtcgcgcggtgggcgggagttggcggacggtccctggctgggttctggaggccctgggaccgcggaagaggcttcagacgctgcagcgatgcctcgcccacggcgggtcagtcagctcctggatctatgcctttggtgcttcatgaagaatatttccagatatctcacagacattaagcctttgcctcccaacataaaagacagactgattaaaataatgagtatgcagggacagataacagattcaaatataagtgagattttacatcctgaagtccaaactctagatctacggagctgcgatatatcagatgctgctctcctgcacctgtctaactgtagaaaactgaagaaattaaatttaaatgcttcaaaagggaaccgagtttctgtaacttcagaaggaataaaagctgtggcttcatcttgttcatacctacacgaagcttctttgaaaagatgctgcaatctcactgacgaaggagtcgttgctcttgcactcaattgccagctgctaaagatcatcgatttaggtggctgcttaagtattactgatgtgtccttacatgcattaggagtatctgacagtggtgtgattgcacttgttagtggaccttgtgcgaagaaattagaggagattcatatgggacattgtgtaaatctgactgatggggctgtcgaagctgtccttacttactgtcctcaaatacgtatattactcttccatggatgccccttgataacagatcattcccgagaagtgttggagcaattagtaggcccaaacaaactaaagcaagtgacatggactgtttattgatgcttttttgaagatgatcaatgctaggaaagcttatcaaaactactttcccaggaaaccatctatagagatttgcattctacttaatgttaacactatttttaattattttattgtcttaagttataactctcagagaattagctaagtcttggtatatacatggtttgtgctttactcttaaacatctttaaagtgctattattctatatctgttggatgagtcattatttttgaaatgataatcctagcatgaactctgatctatggtgttggattctgtttcttaaataactttaaaattaactgttttcccttgagatttccttctcctatgtaggtatttgagctattgttctaagtttacctgtaagtataaaccttgggagaatctaagtaaacatatttctaaaagcatagttaccttcctattttctggctcttaccttcttggagtatttaaatgcccatttgccaaaagcagacctgaacatcaagcctgttaattcttcaaagaatttaggtatttgtttcaccgaaatgaagtgacttattagccattcagcgtattagtattacagaggctcttgcccagccacatccattcattgatttttatggctactcttcccagttacattttatgcatctgtaagctttccttccttagcaaaattgcattcaaaaatgtgtaaaaatgagtaaatacagaatatcactacagagacttgtatcctcaggtttattgatttcacattgtgaaataaacagcaaaggtcttagttttcaagtgaaaactttttggtaatcacaaaattacctgacacataccacgcttaaaccaacccccaaatttagcatattcattttgccatgagccagtcttgagattttcttaaaagatttcttattttgcctctgatgtagtgaaaaacggggtaagtatgctaactttcttgtatatgttggggggtacttattcaactccatttcttgtccttacaagatttataaatgtggtatgtttatagtgtggatatatatgttgccactgcaaaggtggtgcatatgtatatatgtgcaaaatgggtaaggcctgttctaactatgaaatttttctaaagacaaattcaataaaatttaatactgaatatttaaccaagtcaatcacaatt

SEQ ID NO: 114798 - DNA, 2352 bp, Homo sapiens
agcgggtgacgtcacaaaaacctacgcgtcgcgcggtgggcgggagttggcggacggtccctggctgggttctggaggccctgggaccgcggaagaggcttcagacgctgcagcgatgcctcgcccacggcgggtcagtcagctcctggatcttgatgcttaggaaagattttatatcattaaaaagaaattgggaggtcacttccaagatggctaaatgggaacagctccagtctgcagctcccagcaagattgacgcagaagatgggcgatttctgcatttccaactgagatgctactggacttgaatggttaataaaattgcacaatgttgttggtggcagtgacttctttctgttcagatgcctttggtgcttcatgaagaatatttccagatatctcacagacattaagcctttgcctcccaacataaaagacagactgattaaaataatgagtatgcagggacagataacagattcaaatataagtgagggtcatgctccgttgcccaggctggagtacagtggtgcaatctcagctcactgcaacctccgctgcctggacttagattttacatcctgaagtccaaactctagatctacggagctgcgatatatcagatgctgctctcctgcacctgtctaactgtagaaaactgaagaaattaaatttaaatgcttcaaaagggaaccgagtttctgtaacttcagaaggaataaaagctgtggcttcatcttgttcatacctacacgaagcttctttgaaaagatgctgcaatctcactgacgaaggagtcgttgctcttgcactcaattgccagctgctaaagatcatcgatttaggtggctgcttaagtattactgatgtgtccttacatgcattaggaaaaaactgcccatttttgcagtgtgtcgacttttcagctactcaggtatctgacagtggtgtgattgcacttgttagtggaccttgtgcgaagaaattagaggagattcatatgggacattgtgtaaatctgactgatggggctgtcgaagctgtccttacttactgtcctcaaatacgtatattactcttccatggatgccccttgataacagatcattcccgagaagtgttggagcaattagtaggcccaaacaaactaaagcaagtgacatggactgtttattgatgcttttttgaagatgatcaatgctaggaaagcttatcaaaactactttcccaggaaaccatctatagagatttgcattctacttaatgttaacactatttttaattattttattgtcttaagttataactctcagagaattagctaagtcttggtatatacatggtttgtgctttactcttaaacatctttaaagtgctattattctatatctgttggatgagtcattatttttgaaatgataatcctagcatgaactctgatctatggtgttggattctgtttcttaaataactttaaaattaactgttttcccttgagatttccttctcctatgtaggtatttgagctattgttctaagtttacctgtaagtataaaccttgggagaatctaagtaaacatatttctaaaagcatagttaccttcctattttctggctcttaccttcttggagtatttaaatgcccatttgccaaaagcagacctgaacatcaagcctgttaattcttcaaagaatttaggtatttgtttcaccgaaatgaagtgacttattagccattcagcgtattagtattacagaggctcttgcccagccacatccattcattgatttttatggctactcttcccagttacattttatgcatctgtaagctttccttccttagcaaaattgcattcaaaaatgtgtaaaaatgagtaaatacagaatatcactacagagacttgtatcctcaggtttattgatttcacattgtgaaataaacagcaaaggtcttagttttcaagtgaaaactttttggtaatcacaaaattacctgacacataccacgcttaaaccaacccccaaatttagcatattcattttgccatgagccagtcttgagattttcttaaaagatttcttattttgcctctgatgtagtgaaaaacggggtaagtatgctaactttcttgtatatgttggggggtacttattcaactccatttcttgtccttacaagatttataaatgtggtatgtttatagtgtggatatatatgttgccactgcaaaggtggtgcatatgtatatatgtgcaaaatgggtaaggcctgttctaactatgaaatttttctaaagacaaattcaataaaatttaatactgaatatttaaccaagtcaatcacaatt

SEQ ID NO: 114799 - DNA, 1625 bp, Homo sapiens
ggttctggtacattctggccactgccactgatgcccaggattcttgccggccagggacaagaggaagctgggggcgtccgtggtaaaggtgaacaaagtgggccagctccgcgtgctcctcgccttcagacgataggcagaatgtttcgagcttccagagtctgaaggaattcatggacgcttgtgacattctggggctctccaaggccgccgtcatcctcccgaaagacgcgtcccgtacacacaccatcctgccatgagagccagcgtcctctgctcttccctttcgacgcgtggtcctcccagacccgaggagcgttgttccagatgtcaagtggagaccacggcttgttgagaggtgtttggtgactctaggtcattgacagtgtgaaaatcaagtggctcaagggatcctttatgatcacagaaagatgggggaaggaggatacaggctgaccgggtggcgagatgtcagccaggccccttccccactgtcttctggagcacactgcaggctgctgctattccctgtctgctgtgaaacagaccacaggccggcccaacgcagtcctcgccgtgtgccttgcctctgccctccacgccgccgccaccctccgcgttcctttacatcctgcactttctcaggaagccgttcgcatatccacccaacatggaggagcccccatgacgtgccaggcagcgtgctggcccctgcggctgcgttagggaacagaatcggcaaacgcagtcccagagttgatgcctgatcaggagaagccaacttcagcagtgtggtcacctggatactcgagtatagaccctagatcacctggatactcgagtatagaccctagaagtgtatctaggcgcggccagggccccacaacagcaggtctgactcattccatccagggcagcatcagggagagcttcctgggggaagtggcatttgggctgacctgggaagggtggtgggtgttaagtcagtttgggtggggctggaggagcaggggtgcatccccagaacaggatgtgacttctgaaaagacatcagagtagagaaaatggtttctcaaggagattggggacgccagtatcagaatggcggcggggagagccacagaggagcaggagggggcccaccagaccacggcacctcgaaggctgcggtgaaggcttaggtctcactcaaggggtgatgacgggaggttgtctgagatgaaccccccaactgaatgaatggaccttcttctggccaaggggatcccaaagaaaccctgaacccgagtcctcagccatgacggggtaaggggtcagcccctccttctggcccgagaagagatcagagattggttctgggcagtccatggagaatttgctcagctggaccagtacacgcttctcctttcatgaatattcatgactcctcctgaagcttattgaacatctctatttggccatctccttcagcgtaaattcctgtcccctctgtccctcccctccaagtgtctgttccaggcttctggcctgaggctacgcttcctagcctgtcagaagggctgccctgctggctgcaatctcttatgagaaataaagctctcctgtgtgcaaaaaagtaaaaaaga

SEQ ID NO: 114800 - DNA, 1593 bp, Homo sapiens
ggacatttcagcagctcctggggtagggatgggggtcagggtgcagaccctaaaatggccagagctggagtctctgatgtgatcctgatctcaacctcagataggcagaatgtttcgagcttccagagtctgaaggaattcatggacgcttgtgacattctggggctctccaaggccgccgtcatcctcccgaaagacgcgtcccgtacacacaccatcctgccatgagagccagcgtcctctgctcttccctttcgacgcgtggtcctcccagacccgaggagcgttgttccagatgtcaagtggagaccacggcttgttgagaggtgtttggtgactctaggtcattgacagtgtgaaaatcaagtggctcaagggatcctttatgatcacagaaagatgggggaaggaggatacaggctgaccgggtggcgagatgtcagccaggccccttccccactgtcttctggagcacactgcaggctgctgctattccctgtctgctgtgaaacagaccacaggccggcccaacgcagtcctcgccgtgtgccttgcctctgccctccacgccgccgccaccctccgcgttcctttacatcctgcactttctcaggaagccgttcgcatatccacccaacatggaggagcccccatgacgtgccaggcagcgtgctggcccctgcggctgcgttagggaacagaatcggcaaacgcagtcccagagttgatgcctgatcaggagaagccaacttcagcagtgtggtcacctggatactcgagtatagaccctagatcacctggatactcgagtatagaccctagaagtgtatctaggcgcggccagggccccacaacagcaggtctgactcattccatccagggcagcatcagggagagcttcctgggggaagtggcatttgggctgacctgggaagggtggtgggtgttaagtcagtttgggtggggctggaggagcaggggtgcatccccagaacaggatgtgacttctgaaaagacatcagagtagagaaaatggtttctcaaggagattggggacgccagtatcagaatggcggcggggagagccacagaggagcaggagggggcccaccagaccacggcacctcgaaggctgcggtgaaggcttaggtctcactcaaggggtgatgacgggaggttgtctgagatgaaccccccaactgaatgaatggaccttcttctggccaaggggatcccaaagaaaccctgaacccgagtcctcagccatgacggggtaaggggtcagcccctccttctggcccgagaagagatcagagattggttctgggcagtccatggagaatttgctcagctggaccagtacacgcttctcctttcatgaatattcatgactcctcctgaagcttattgaacatctctatttggccatctccttcagcgtaaattcctgtcccctctgtccctcccctccaagtgtctgttccaggcttctggcctgaggctacgcttcctagcctgtcagaagggctgccctgctggctgcaatctcttatgagaaataaagctctcctgtgtgcaaaaaagtaaaaaaga

SEQ ID NO: 114801 - DNA, 392 bp, Homo sapiens
cctggtctctgactaggatctgtgtatgttctaagtctttctctcctttaaaaaaaagagataatctgattctattttggatctgtgtacattctaagtctttctctcatttagagaaaaacattctcaagtctatagaagaggaaaaaaaattaagattaggaccaacatttcaagctgcctttaggaaagaaaattaaaaacagaggtagatggttaattattagtggccaagttactcaggtgactaattttttcttggtacacattcaccaaaattttatacttgaagccaaatagtaaataactttaggagcctggctctgaattagggttgacaattggattaaaaaaatgactttgtcctactaagttcattctgacatctttat

SEQ ID NO: 114802 - DNA, 371 bp, Homo sapiens
ggagaatttcttgaacccaggagacggaggttgcagtgagccgagatcacgccactgcactccagcctgggcaacagagtaagactctgtttcaaaaaaaaagcaaaaggatatgttattatttatataaacttagaacaaaagtatgtactaggtacatacaaataaagtaaaattataaaacagatgggacaaatacacaccaatttcaagattttggatccttttaggaagaaaaaagagaaatggaataaggtgcctgggttgggagaagagatagaccaaaaaaatttaagaaaaatgtgagagtatgtttatgtgagcaaagtataacgtgccattgggaggcaaaaaaataagattgattaaaa

SEQ ID NO: 114803 - DNA, 335 bp, Homo sapiens
caataaaaatacacctacaaggtttccagaaatataaaaatgaaagcaggatataaataaaggaataagttttagggaggcatcagacttctcaacaataacacagtatgaaaaagcagatgggccaatagctatacattactgtaggaaaccgatttagggcctagcatcttgatactcaccaatttaggatttaagttttttggattataaaaatttagtatccagagacatttcttgccagatttgctcaaagagtaaaaggcacaatctgctaagaagatgtaacattctgtaatatatgtgattatgtaagttggtatttttactgttct

SEQ ID NO: 114804 - DNA, 216 bp, Homo sapiens
cacagacagtgggtctccatgccaagcacaatgcctagaacagaggagtatgtttggagtatgtttgttgactgcatagcaaataggaaaataacccaggccaaccccacttctgagtgaggagagaaacacacacatgcacagacacacatatgcacacagaggcaatctggtagctgtgtgtagagtataaaagacaatatgtagcagaggcta

SEQ ID NO: 114805 - DNA, 344 bp, Homo sapiens
actgtattactgtttttaaattttttgcttattttgaaaatatgtataaaataattacctgaactattatatgaagtaacatttacccagatgtcagactcaaaagtagaacccaaaagttgacatttaagtagcttcagcaaaacttgcctcaaagaactagagttaatatctgataatttcattttgtaggaacactgatgctcctggctaatatatcaatcaattcctcatcatcttttttattttttagcctaaaaaaacttagactgtagattttttgtttgtttctttacctatattttctttgtatttgttttttgttttttgcttttaagacagag

SEQ ID NO: 114806 - DNA, 262 bp, Homo sapiens
gtgttaagcactgtgtattatttcatttattcttgaatatacaaacccctcaaagtcaaaatcgtcagataatcctttataatccaccatcaaaacatatccagaatctgattcacttctcacaacctctgctgctaccacccttgacgaaggcaaccagcagctcttgcctggacatccagaataacctcctcactagtgtcccagcctctacttttgttcgttgcatttcattctccacaaaccagaatgttctttttca

SEQ ID NO: 114807 - DNA, 693 bp, Homo sapiens
gaggaggaaggagagaaaatggcatccatggattacagtacctatagccaagctgcagcgcagcagggctacagtgcttacaacacccagcccactcaaggatatgcacagaccacccaggcatatgggcaacaaagctatggaacctatggacagcccattgatgtcagctatacccaggctcagaccactgcaatctatgggcagaccgcctatgcaacttcttatggacagcctcccactggttatactactccaactgccccccaggcatacagccagcctgtccaggggtatggcactggtgcttatgataccaccactgctacagtcaccaccacccaggcctcctatgcagctcaatctgcatatggcactcagcctgcttatccagcttatgggcagcagccagtagccactgcacctacaagaccgcagaatggaaacaagcccactgagactagtcaacctcaatctagcacagggggttacaaccagcccagcctaggatatggacagagtaactgcagttatccccaggtacctgggagctactccatgcagccagtcaccgcacctccatcctaccctcctaccagctattcctctacacagccaactagttatgatcagagcagttactctcagcagaacacctatgggaaaccgagcagctatggacagcagagtagc

SEQ ID NO: 114808 - DNA, 414 bp, Homo sapiens
cctctcttagccatatagtagaagcccgatcatagactctcacccttacaccatgacttgagttcctgctcatttttatccctgagctctgcagacttctaagcagtggaagttttcattctctttcccacattgcactcaagagagctaacatgagagattctaaatcctgggattcctctgcatctggctttaagtacaggagcagaacacagggaatttaaggaacaaaaatagccagagcttcaggcttcttccactgatggtaagtcattgacatgcacttggatgaaatcctgtatctgttctttggactagcactatcgcctgagattatcagtttcagagagttacagagaggcagtagatttcatctttcctatttcaggaggagttattttggttgtttaaaaa

SEQ ID NO: 114809 - DNA, 390 bp, Homo sapiens
cactgcagccccacagaagccccagacaagaagtgaacacaggggaggaactgtggctccaataaacctttattcacagtaggaggggggcttcatctggattgtgggccatagtttgcccacccctgcctgacctcatgacaacactgaccttcgtatttatgcctcttaaaaacatgtgtaagccgagtgcagtggctcatgcctgtaatcccaacactctgagaggccgaggctggaggattgcctgggggcaggaggtccagaccagcctggataacacggcgagatcctgtctctacaagaaaccatttcaaaagcagccaggcatgggggcccacacatgtagtcccagctgttcaggaggctgaggtggggaggattgcttga

SEQ ID NO: 114810 - DNA, 374 bp, Homo sapiens
ccagtttgtgaagacttattattttcttcaatgcagaaatatgatctcttggcaagaatagtgagtttatatagatttttatgtatcatctgcatatatcctatgatatttattgagtgctttctctgtaacaggcagaattttagatgtttactaatgaatgacaagcttgcgatatctcagtgctcatctcacccaatttctcagcaacttttgacacagttgatctctccctccttgaaaaacattcctcagttgttcctgggaaaccacacttgcagcctgtctccctgtctctctgactgtgctgtctcagtctcctttgcctcctcttcttcctgactgttacacattcctggagtggctgtggctca

SEQ ID NO: 114811 - DNA, 324 bp, Homo sapiens
gaagtgttcgctgatgatggtgaagaacgttatgtccatttatggtcactaacttagtgcttttcccttccaattgagcttgtacctgttgagcatctcctatgtacatggattttgatttacttggatgagaatcactgttgattaaagttgtaaaaataattttcatctcagatagaaacttcatcccagacttccgtggtatcttcagatagcacagaaggttttgtgaaggtcaggaaggttgttgctgaagtcttgacagatgatatctggatcccagtttagaaaaacttggactcttgttacaggtgagcagagcgg

SEQ ID NO: 114812 - DNA, 394 bp, Homo sapiens
catcatcatcatcatcatcatcatcatcactaatgttttgcaatggtagttttgagaagagaataggatctacccaaggaacagtactgaaaggggtagtgaagtcaaatgtatttcagagaattattggcttgggaaagatggagagtgtctccaaccagcaggtcaaccattacattagaaagttcccaggtgggaggtaaaattcctaatttagggtcagatattgatgtattaggtataacctttttaagagatgtgcaggctgggtgcggtggctcacacctgtaatcccagtactttgggaggccaagggcaggtggatcacctgaggtcaggagttcaaaaccagcctggccaacatggtgaaaccctgtctctattaaaaatacca

SEQ ID NO: 114813 - DNA, 567 bp, Homo sapiens
agccgaggaattattcccaatatctttctttttttttttgcattccacatccagttaatcagcaaatcctgtcagatttgtcctaagtatatatcaaatatagaggcttcacaccacctctacctcaccgtcctggtgtatgccacatacttccctttaagaatcctactgccttcttcctgttggccactcttactcattcttcctcctgccagacctcccccgacccccactgccattccattcttcacatagaagctagcatgaacttctaggatacaaagaagatcatgtaattctcccagtcagaacactgcactatgaattacattgtgtctggaatttgtgtcagaataacctgtggttctccccctccctcacccctccacagagtaagtccgcaagtccccttgatgctaaaccccaaatatctctcgagtcagtctcttttgctccttactcacagtctctgccttagtgggggaaagagagcctataaagcctcacaaaatgaggctcccacctacctctctccatccccatgcctcattgctcaccttagccata

SEQ ID NO: 114814 - DNA, 1062 bp, Homo sapiens
cactgatgaagaaccctcctttgagaagctgcctttgtgtcctacagacaggctggggccaaagccattcaaccaatccccagataatccagagctcttgggagcagaaccttaaagagagatcgtggagagagccagggcccagaagaactctctcaaagagaagagggcagccaagatgacccgatggtccagttacctgttgggatggacaaccttccttctctattcctatgagtcaagtggagggatgcatgaggaatgtgtctttcctttcacctacaagggatctgtttacttcacttgcacccatattcatagcttatccccttggtgtgccaccagagccgtgtacaacggccagtggaagtactgccagagtgaagattacccacgctgtatcttccctttcatctatcgaggaaaggcttataacagctgcatctcccagggcagcttcttaggcagtctgtggtgctcagtcacctctgtcttcgatgagaaacagcagtggaaattctgtgaaacgaatgagtatgggggaaattctctcaggaagccctgcatcttcccctccatctacagaaataatgtggtctctgattgcatggaggatgaaagcaacaagctctggtgcccaaccacagagaacatggataaggatggaaagtggagtttctgtgccgacaccagaatttccgcgttggtccctggctttccttgtcactttccgttcaactataaaaacaagaattattttaactgcactaacaaaggatcaaaggagaaccttgtgtggtgtgcaacttcttacaactacgaccaagaccacacctgggtgtattgctgatgctgaggaaaggagaaatatcttcagaggaagactgccgccatactgaggctgagcacagatttgtctttttcattgcatctgtcaagcttaaataaccacctttagaaataccctctgcaccacctgcttcaatcagctggtcctttgtgaagaacgtagagagaatgcggcataaccaccaataaaggagtcttgatttaaccctggga

SEQ ID NO: 114815 - DNA, 924 bp, Homo sapiens
cactgatgaagaaccctcctttgagaagctgcctttgtgtcctacagacaggctggggccaaagccattcaaccaatccccagataatccagagctcttgggagcagaaccttaaagagagatcgtggagagagccagggcccagaagaactctctcaaagagaagagggcagccaagatgacccgatggtccagttacctgttgggatggacaaccttccttctctattcctatgagtcaagtggagattacccacgctgtatcttccctttcatctatcgaggaaaggcttataacagctgcatctcccagggcagcttcttaggcagtctgtggtgctcagtcacctctgtcttcgatgagaaacagcagtggaaattctgtgaaacgaatgagtatgggggaaattctctcaggaagccctgcatcttcccctccatctacagaaataatgtggtctctgattgcatggaggatgaaagcaacaagctctggtgcccaaccacagagaacatggataaggatggaaagtggagtttctgtgccgacaccagaatttccgcgttggtccctggctttccttgtcactttccgttcaactataaaaacaagaattattttaactgcactaacaaaggatcaaaggagaaccttgtgtggtgtgcaacttcttacaactacgaccaagaccacacctgggtgtattgctgatgctgaggaaaggagaaatatcttcagaggaagactgccgccatactgaggctgagcacagatttgtctttttcattgcatctgtcaagcttaaataaccacctttagaaataccctctgcaccacctgcttcaatcagctggtcctttgtgaagaacgtagagagaatgcggcataaccaccaataaaggagtcttgatttaaccctggga

SEQ ID NO: 114816 - DNA, 618 bp, Homo sapiens
cactgatgaagaaccctcctttgagaagctgcctttgtgtcctacagacaggctggggccaaagccattcaaccaatccccagataatccagagctcttgggagcagaaccttaaagagagatcgtggagagagccagggcccagaagaactctctcaaagagaagagggcagccaagatgacccgatggtccagttacctgttgggatggacaaccttccttctctattcctatgagtcaagtggaggaatttccgcgttggtccctggctttccttgtcactttccgttcaactataaaaacaagaattattttaactgcactaacaaaggatcaaaggagaaccttgtgtggtgtgcaacttcttacaactacgaccaagaccacacctgggtgtattgctgatgctgaggaaaggagaaatatcttcagaggaagactgccgccatactgaggctgagcacagatttgtctttttcattgcatctgtcaagcttaaataaccacctttagaaataccctctgcaccacctgcttcaatcagctggtcctttgtgaagaacgtagagagaatgcggcataaccaccaataaaggagtcttgatttaaccctggga

SEQ ID NO: 114817 - DNA, 1104 bp, Homo sapiens
cactgatgaagaaccctcctttgagaagctgcctttgtgtcctacagacaggctggggccaaagccattcaaccaatccccagataatccagagctcttgggagcagaaccttaaagagagatcgtggagagagccagggcccagaagaactctctcaaagagaagagggcagccaagatgacccgatggtccagttacctgttgggatggacaaccttccttctctattcctatgagtcaagtggagggatgcatgaggaatgtgtctttcctttcacctacaagggatctgtttacttcacttgcacccatattcatagcttatccccttggtgtgccaccagagccgtgtacaacggccagtggaagtactgccagagtgaagattacccacgctgtatcttccctttcatctatcgaggaaaggcttataacagctgcatctcccagggcagcttcttaggcagtctgtggtgctcagtcacctctgtcttcgatgagaaacagcagtggaaattctgtgaaacgaatgagtatgggggaaattctctcaggaagccctgcatcttcccctccatctacagaaataatgtggtctctgattgcatggaggatgaaagcaacaagctctggtgcccaaccacagagaacatggataaggatggaaagtggagtttctgtgccgacaccagaatttccgcgttggtccctggctttccttgtcactttccgttcaactataaaaacaagaattattttaactgcactaacaaaggatcaaaggagaaccttgtgtggtgtgcaacttcttacaactacgaccaagaccacacctgggtgtattgctgatgctgaggtgagagcagggaccaacagtggtcatttcacggatgcagaggaaaggagaaatatcttcagaggaagactgccgccatactgaggctgagcacagatttgtctttttcattgcatctgtcaagcttaaataaccacctttagaaataccctctgcaccacctgcttcaatcagctggtcctttgtgaagaacgtagagagaatgcggcataaccaccaataaaggagtcttgatttaaccctggga

SEQ ID NO: 114818 - DNA, 403 bp, Homo sapiens
tcctcagcacaggatggaagagttcgcagctgccatggcctcggaagacatgggttcaagtcccagcgataccacttagctgtgtgaccttgggcatgttacttaacctctctgaacctcggtttcctcatttgcaaaaggggatattaatgttcactttcaggaccattatttgaaagtagtgagtagcaagcacccagcacagtactggctcataagagacacttaataagtagtagcgatagttcaactttatcaggcgctatctgcagtcctaaagcctttctctatttctctgaaactttgaaggcaccagatcacatttaaaaattacataaaaattacttgaaatgggcaaagagctataaatgccgacaaaccatcttgtttcacaaaaaaaaaa

SEQ ID NO: 114819 - DNA, 369 bp, Homo sapiens
cccggccagtattgggtagtattattaggcagaggttccaaggttctcaagtgtttggtaaggccaaagctggtgcccaagctattgtctttttaagtgttctccatgctagctggtatcccttccctgtaccagtgtttcatttagataattggaccaagcatcggcctttcttactgtaatgcaaccattacaaaagcttgttgataccaggctcttttcatttgttggcctagtgactttatcgtttgtccctttcctgatacattgctctcctgctaaggaaactttcatctaggccactgtagtcagatccaagctgtatctttccgttgactttcttccctgtctgtattgcccccaagatat

SEQ ID NO: 114820 - DNA, 723 bp, Homo sapiens
atgtatatgtgttatgggttagttttcatcagtataagttttaaattttacttaaaatttccttagaaataagaagctttttcacaagtgacaaaacacattaaaagcttatggtatgtgtggtctatatttatcttcatatttcatttaccaataaacgtatttatttaaaaatgttatttaccaatgaatttactaatatatttttgtaaataaattgtaatattatttatggttttgtttcacttagtgtgaattttcacacatttattcgcagaaatagtaagattaatgtgtttcattacatagtactgtcctgtacccatttggaatgttacaaaatgtatgcaatttatgtagtatattccaaaggattccaatttcatcctgaattccaaaaaattctcatttccaaaacacatttggtccccagagtttttaagagattatagacctgtgattcttttttgttgtgaatgatccagtgaaatgatcaatgtaaaatgtctcacacaaagtaaatgcccattaagtgtagttgctattattaatattgcgttactctactttaaaaatgtaagacaagctttttctgacattgaagttagcaatagcataggtaatgatatgcattcttcaagttttattactctaggagatgctttggcaatgtgctgctgataaagtgtattagagtatctcctaaatcttcatccaagaatg

SEQ ID NO: 114821 - DNA, 713 bp, Homo sapiens
gcttttcacccatgtagttactgcttatggacttttctccattaaaaaaaaatcaaaacactaaaagcctttatttacactgtttgctctttcttttacatctactctgtatcttcttcctaattaagaatagttgggaacctccagggtcaaatagaaatggtggcatcaacacggtcatagagaactctgatgttcaaaggacatggccatggaaaatcaaagggaagactaataaagttaaaggaaagtttcaggtttgttgggcccaaggactcctgaaaggataggattaatgtgttttttgagccaaagttctgcccttgaaagggaaatctcctctgagctttgagtagctggtgctgcatcctttaaaaatgtattggatggaattaatagtgagcgttgccacatcccttcttcccagcccaaacaagaaccagggaaccagtcattctgtcacaaaatgaataagaagttatatccaaatgccaataaaacccagttagaatttaatgtaggacataactagagtgtcaaatatgacaaactaactttgagataagtctgagagctcaagttccaacagaaacaaaaccttttatggacaaatagcttcgtatctcatatgctactcccaacagctcatttagatgaataatacagattctgcattggatctgtattggatggaggaaattgagacatagagc

SEQ ID NO: 114822 - DNA, 365 bp, Homo sapiens
cgactctagcaggatctcccgggtgatgcatgtggatgaaggaggaatcaggagtaatgccaagaatgagaaatctgtataagcagttcagaaaaggggcgtcatgagtcactctcctcagtgctgcccaagagttccacagtttgttccttacatcattcacttggataaaacctttcaatgtctctccatggccttcagagttaaatcaaaactattccttggaatgacttaaaacccatactacctctaaagcctcatctcttgactctctcgcaccaagctcactgagcttccagccctactgaatttcttcagtaacaaactctcacatctcagagcctttgcacatgcatgcacccagg

SEQ ID NO: 114823 - DNA, 304 bp, Homo sapiens
ctggagcagggcagggatgtcgccacccttagtgtcctctgtcccacagagcccaacagaaatttcatccttccttctcttgtatccctagaatccaggaatcgccttcaagtagcttatagactcaaaagggatcaggagagactgatttagagagggctttgtgccctgagagtgacaagagagcagagtctggttccagctgtgcatttggagctcccctcgggggaaggccagtcctcacgaggtctgccaggcccaagggctctgccgcagcacctgccctgccctgtctctgatgtca

SEQ ID NO: 114824 - DNA, 365 bp, Homo sapiens
tttcttggcacgtggcatgtcaatggatagctctactattccccagatatgatatttaacagattctggggtctatcctaatgaatcaggcccagtgtgatactggtccagcagcttgaatcgcttccaactcaaacttctgtggcctcggaatatgattaattgcttttcattgttactgttgttggtttaaacagaccatagaacctgacatctgatctcatacatcagatgcatataagctatgactgctgattggaaatgccctttcactgcacctcctttccctttgtagttgtagctaaagaacacgtgtttcttgaagttattgttaacttattgctgaatgtctcctaaagccaaag

SEQ ID NO: 114825 - DNA, 329 bp, Homo sapiens
ctgagatgacagtcggccgaggttgagaccctgattctggttctgtttcatgcaccactggtgtggcttccttttcgctgcgattgctgtcttgtctagtgaaaacgggttcctcctctttattacagctgttttcactttcttgtttttctaccatgggctctaaattaggttctctggggtcaattttctcctctaatttttccctttccttctccagctccattcttttggttgcttttcattctcttgacagtgtcttttgcagagcagacatttttgatgaagtctagcttactaattctttctttcatggatcttgcttttag

SEQ ID NO: 114826 - DNA, 412 bp, Homo sapiens
caggatgtactccaagctagtgatggtggttgcctctgtagagggaagtggtgggctgaggctggggagaaagtggagcgctcttttattcttccctgtaaattattctatatggcttgaattttttataatcagcacgaactacttgtaaaaacttttaaagcaactcaaaccttaaaacacaaaaaggaacacacacacacacagagattctccagccccactctaaatgtgctgaatcagaatttccaccaggaacccaagctctggtccaagccctggctccccaccattgcgctcttgcatacccccagtgatggggatcttactgcctccctgggcattggatgtctttctgcctgtgttgcctctggtcctctaccttgaattgggctccccctctgggtctttc

SEQ ID NO: 114827 - DNA, 352 bp, Homo sapiens
atttacacaaacctagatggtagagcctcctacacacctaggctatgtggtgtagcctcttgctcataggctacagacctgtacagcagcttactgtattgaatactgaaggcgaatcataacacagtggcaggtgtttgtgtatctaaacagaaaaaggtacagtgaaaatacagtattataatcttataggatcacatcacatgtgtggtctttgaccaaatcattatgtagcaggtgattatatatttcattctttagaatttcctaaaattatctttccggtagtgtcagcctgtaatttccttaagacacaagaggaacttctcatgcacttagttgacttctaatc

SEQ ID NO: 114828 - DNA, 519 bp, Homo sapiens
ggagattggttaagcaacatccatacagtgaacagtattcagccatttgaaatgatgtggaggaaattttattgacatgatacattgttaagagcaaaagaaaaagttttaaaatacaaatgtttaatttgtaagtctcacaaacatcatctaacgaaatatacacgaggtgttaagtcagccttgcaaacgtaactattttttcattatttttatatcagttactgttattggagcattttatattgactgaggatctttattaaaacttcttcagccttctgtgaaatcttgttatgatggctatagtgacactatataaaacacataaccagaatatgtttatgctcaaatatttcaagcaatatttgatgcttaaaataccaaagtgacaatgaaaatgaaagaaatttggatagttccttagagttatttgtttgtgtttcagatatgaacataaagtatgtttttaatattaccagttttgagaataatagaataaatgccttctcaccttaa

SEQ ID NO: 114829 - DNA, 540 bp, Homo sapiens
tagggaaaaaaatcttatcacatacttacacacaaaaatacatctctatgacattctttatttctacctcagagccaatgctattattatgcaatatttcaactagtgttttagtctgtgtgcaaaggctttgaggctgcagcattacagaacgcaacccaatcttaaatttacacatgagggcaggctcactgtcacttgcctgtgtaaagtatagattgagatagtcccataacttcagatttcactttataaaatcacctgttagtatcttgaatagatcttgcctacttcttccaactctagacataaatttttttgtcatcttagttttcttaagatttcattctgctttcccaatctactgctgctcctgggagtcatcagggcagctgcatcctaaagtccaaagatacatccattacccaggtcattagaattagaaaaaaaaaaatcattagcagagatcactggatatggtacagcatgaattaaataaaaatattaaatttacattactaattcaaacaagatttgcaa

SEQ ID NO: 114830 - DNA, 270 bp, Homo sapiens
ttttcttctatggctggtattgctcagaaggtaattctaaaaaagagttttaaaatgttctgttcatggccaggtgcagtggctcatgcctataatcccagcactttgggaggccgaggtggatggatcatttgagttcaggagttcaagatcagcctggccaacatagtgaaaccccgtctctactacaaacacaaaaattagctgggtgtggtggcatgtgcctgtagtcccagctacctgggaggctgtggcatgagaatcgcttgg

SEQ ID NO: 114831 - DNA, 413 bp, Homo sapiens
catagggaaaaataacaggaaagtgggaacaagcaggcagtgagttttgtgtaaaaagaattcagttaaatagttgagtgtctactctatatttggtacttttacaataagagatgcaaaggtgaattgtgctgtttaacagctgactgtcagggtttttccatctcatcaatgttgacagtttgggccagatattgttgggcaggtggacatgctgtgcgttgtagggtgtttagcaacatccttagcccacatgatatgccactaccataacccaggcttaccaatccagaatgtctcctggtggacagattcaccccttgttgagacccatgagtctagatagattagagctggtaagaacagttgagaacctggcttaagtggactttaggacctggtttaagttcgtc

SEQ ID NO: 114832 - DNA, 430 bp, Homo sapiens
gcgcacctgaagggtgtcaaatctttggcattttgagatggatctccaagatcagctggtttaatcactttattttccagatagggagactgagcctcacaaagggaatgggatccacatcactgggcatttgctgttaaatttccaatccaggcccatccaattctgaaacctagactcctgtttaccaaactctggcagcccataatataatatcatccttatacttagccccgcaagagctggatctgtgttacttttctaagctaggcaccatcctgtgacatcttcctgaaaacaaaggaaaccttatgtcccgttggtgggattgcaaggtgacaagcattctcgggggaagagcctaatattgcaggttaatcagtgatgaccaaagtcagctttttggagagatgtcaggtttggttagact

SEQ ID NO: 114833 - DNA, 289 bp, Homo sapiens
ggatcttattcgatagccgacactggcggggggtgcctgttgacttgggaagggccaggatcgcgatcaatggtgagttgggggttggaggaatgggaaggcctagttcagggagagtaattggaaaaccactcgctccggtttggacattctttaaaaagccgaggatgacttggggagggggggtggtcttttgtggaggggaggttacatcggttcgcatcgcaggcggatttcaggtccgaaagtcttggtcaaggagcccgatgctgcctctcggggctcgggg

SEQ ID NO: 114834 - DNA, 422 bp, Homo sapiens
ttggatgcctatttctgtcttccttatctactactgtcactgtcaaccccttgtggctgttccatccccatgtgtcagctctttgtgggctggtttgcccccggaactattgctctgagttctgtccattccctgctcggctcagtgggctcctgagttagcctttagcatgtcacctttctggcatctccatggtaccagaacctttacttttcacgtgggctccaaccagcagcagctcccaactaggagtgtcccagcctggtggaaaggactggacacacaagatgggtcggaattgaatattaaatgaatttcaatacttggtgtacctttgtgaagtagcacattgattttgagagagcattgactttaaatctgatagatttttttgcaagcttcttttcagcaaatggcttact

SEQ ID NO: 114835 - DNA, 220 bp, Homo sapiens
tgccacctcacacccctgaggatggctgctattaaaaaaaaaaaaaaacctccagagaatcacaagtgttggtgaggacgtggggctatcggcccctgtgcgctgttggtgggaatggaaaacagtgcagctgccgtggaaactctacggcagctcctcaaacacttaaatcagaatgacagtatcatccagcctgggtgacagagtgagactccgtctc

SEQ ID NO: 114836 - DNA, 692 bp, Homo sapiens
tttcttttcttttcttctcttcccatgcactattctggaggtttgccaggtttggggagacatggagtaaaagaaagataggcaactcatggatggtgggagagcaggtaagcaggtctgatctcaagggcccacatgaggcatcagtatatattaggcaggtagggatctctggctttggtaattctttatgagaggatcctagcctttgaagctgggagcaggagtcagtggctacagtgggaaggagtactgcaggttggggccaaagtgatacacagcttagaaggcagccttcctccacttactcaacaaatctttatttagtgactctccaagtcctagtgattattattattgttcactccacatttggcttaatgggtaatgctattacccattgcctaactaggtttgcagtagtggaatctccagagatagcaggcttagtaagctggaggtaggacatgaagtcccccaaaacttgatgtcctatttttatgtgagttggacagtggttatcttttgcctgttgatatcttaaagcagcagagtggtatagaaatttgcggttatgacagacccgggttaaaaatcacagctgtgccatttgctttgatattttgagcaaggtagctaaattttctgagcttctattttctcatctgtaaaatgaggatacgtacctgttc

SEQ ID NO: 114837 - DNA, 459 bp, Homo sapiens
tttcttttcttttcttctcttcccatgcactattctggaggtttgccaggtttggggagacatggagtaaaagaaagataggcaactcatggatggtgggagagcaggtaagcaggtctgatctcaagggcccacatgaggcatcagtatatattaggcaggtagggatctctggctttggtaattctttatgagaggatcctagcctttgaagctgggagcaggatcatcatctaaagaattccattgctcacctcctgcatagcagcacagccccatgaggccacacaccagatggaggggataaaagtacgaggtcatggcttcttgcaagaggctttttcttaaactaaccctgactcctggaaaagaggcagagcaggagagtgttgaatgagctgctgatgacagcagcttcataggtcttgtgtataaaggaaggaaaaagctaacttggct

SEQ ID NO: 114838 - DNA, 430 bp, Homo sapiens
tggaatatagagaaggaaacataaatctgcatattagacagttctgtaataaacagtacttacatagacataataatgtaaaaacacagaccaaggaagactaactatgaacagaacatgttatcaattatataaaaataaggatggccaggtgtggtggctcatgcctgtaatcccaacactttgggaggctgaggcaggcgacctgcttgagctcaggagctcgtgaccagcctgggcaacatagccacaccccatttctacaaaaaatacaaaaaccagctgggcatggtggtgcgctcctgtagttccagctacactggaggctggggcaggaggatcatttgagcctgggagatcgaggctgcagtgagctgagatcacaacaccgcacttcagcctgggtgacagagtaagacccactctcaaa

SEQ ID NO: 114839 - DNA, 627 bp, Homo sapiens
ctgaggaaaccaggcgacaaaggccaagctgggaggagagcctcgcttccaggtatcccctgggttccacagactcccgtgcacgtgtgtccaagtgaggggcagtggctgtcactatcatgtgcgctgccggcggctgccgggcagatttctcttctgggtttgaaataaccggaggcgatcttaagaacctactgacgacccgccgctctggaagaaatcattttccattctgcatctagcatcagcatttcacatccagatgcaggaagtcttcgtggaattttacatacattgcttggtttgcttccaagaactcatgattttgccttctggtttactctccttactgcttcaggcttgcagcgataggaacccatttctcccttgggttgctgtggcagcgtgacggtaatgcagattcaggagattgcagtatgaggttcaagtgtgggctgcgttcagatggggtcccttgacctgcctcatcctgtttccttaccatagtgcttcccatgtactgtagcatttttttctttttaaaatgatttatattatattattttattttttaaatgtttatttatttttgagacagagtttcactcttgttgcccaagctggagt

SEQ ID NO: 114840 - DNA, 549 bp, Homo sapiens
taagatctagaatattgcctatactttagaagtcccctaagaaccctctccctctcaagtaattatttggaaatttgtgtttgtcatttgctttgtacataggtatctctaaatgaaatgttaattttgtatgtttctcaattttgtataaatggcataatgtttgtttacttttgtgactttcatttttattgctgtattgtattatatgaatacttattcttctgttgatgtacatttgagttttatttagttttgtttttgctgctgaaactgctgctgtgaacattgtctgtctaggagttatagtgcttgatcatgtgctatgagtatcttcatttgtataaaataatgccaaattataaaaaatattagaattatagcctttaatattactattcagttatgttagctagtctttaggacacttgccccgttgtactttgtattaaacatgtggtcaaaaaataatgtctttatgcggatattcctgtttaatgaagtacgtgttgtagttaacttcttggtaaagcaaacaatgttaaatga

SEQ ID NO: 114841 - DNA, 757 bp, Homo sapiens
agcaaggaaagccagtccaagttccaaaactgaggaacttggatccgatgttcaagggcagggcgcatccagcatgggagaaagatgtaggttgggaggctaggccagcctgtctattcatattttttctgcctgcttatattccagctgcattggcagcttattagattgtgcccacccagattgagggtgggtctgcctttcccagcccactgactcaaatgtaaatctcctttggcagcacactcatagacacaccaaggagcaatactttgtgttcttcaacccaatcaagtggacacccagtattaaccatcacatctggtaacttcccaatatttcctttatatccatgtcttcactgcatcgtttccatacctgcaccccccaaccagcaaccagtgagtgcagggggccccgtgcctgagaaggctattttctccttatggtccatgtgctttctccccaccttttcttatttaatgtctgactgtcccccgcaactggattgtaaaccccgtgagggcagagaccttgtccattttattctctgaagaatccccagcatgtgctccatacatgttggatggccagatggacaaatgcataaataccgagcttagtgggtgagcaggtccgggcttacaggcttcaggaccttaggtaactcccttgacctgcctctgcctaaggtctactgtctggctgatggttactcttcctaggttgagatccaaagctgggaaaagcagagaga

SEQ ID NO: 114842 - DNA, 728 bp, Homo sapiens
ggccacgtcactgtccttaggccctggagagcgcggctccgcccctaccgcccccaccggagcgctgggcacttagctaagacgcaccggccccagcccagggccagcccagtcgccgccgcccgcccacaaagccacaggcaggtgcaggcgcagcgcgggagagcgtatggagccgagccgttagcgcgcgccgtcggtgagtcagtccgtccgtccgtccgtccgtcggggcgccgcagctcccgccaggcccatgcggccccggcccctcgtctccccgcacccggagccacccggtggagcgggccttgccgcggcagccatgtccatgggcctggagatcacgggcaccgcgctggccgtgctgggctggctgggcaccatcgtgtgcttgcgcgttgcccatgtggcgcgtgtcggccttcatcggcagcaacatcatcacgtcgcagaacatctgggagggcctgtggatgaactgcgtggtgcagagcaccggccagatgcagtgcaaggtgtacgactcgctgctggcactgccacaggaccttcaggcggccgcgccctcatcgtggtggcccatcctgcttggccgccttcggggctgctaggtggcgctggtgggcgcccgtgccaccaactgcgtgcaggacgacacgggccaaggccaagatcaccatcgtggcaggccgtgcttgttccctttctcgccgccttgttcacct

SEQ ID NO: 114843 - DNA, 351 bp, Homo sapiens
acactcccaagccaacagcacaccactaaaaagtcaacgaacaaatatcaagaaacaaagcttcccagttggttgggaatgagaagcagccaggtcttctctcttctgttgcaggtacacgtcacaccaccatggaatcttctcttttgatttagtgagggagactggcgtcttctagatgtgcagtgtatgacaagcttctctcatccttgcatgtctgcagaggtgtgacatggttttgtgacacagcttctagtcttggggggattcattgtgctcaccctttttttcctggccagttgctaactcaaacctgtccccttctgggatttggaaaggattgtttgcagc

SEQ ID NO: 114844 - DNA, 345 bp, Homo sapiens
gttttagtactctggaagtaggatttcaaagcaaaagcttaactttttaaatacctagctggcttacgcagtgcaatatttccaaatcattttgtttccatataaaaaaataataatcaaactaaggctgctggtagccagtattaacaaataagatctttcttcaattacccaatatgaacgaaccttcaatgattattttagtcacatgaagtctacatttcactttcaaacactctatggtaaactttacaactctagcttaaaattgtagcactgacataaggcaagatttcaaaaagctttcttcatttgggagcaactgaggagaaattttaggtaatt

SEQ ID NO: 114845 - DNA, 648 bp, Homo sapiens
caagatttcgccatgttagccaggctggtctcgaactcctgacctcaggtgatctgccagcctcagcctcccaacatgctaggattacaggtgtaagccaccgcgcccagccccagaatactttataaagaataaaagttttctttttggcttaataagtattttaatgaaaatggatattgtctttaatcacgtacttttgttgagatgatacatattcttttttacctgtaatacctcaatgtggtgattgcattaatgttagtcataatgtgttctatttttaatatttattcagcagatacctgtttggttattgcattgtgtcaggaactatgtcacacactggtgttagcactaagtctgaaaggttcatttttttttatggagaagaaataataagcaagtatccaagaacaagataatttcaggctgtggtagtattatggaggaaataaagaggatggtgtggtagaaagataaggagagaaactccgttgatagtatcatctgagtaagtaaaacataagctaagacctgaagaacgaaagggttgggaaaagcattccagacagctgagtgcgatggctcacgcctgtaatgccagcactttgggtggctgagggggcggaatggtagccaggcatg

SEQ ID NO: 114846 - DNA, 1041 bp, Homo sapiens
aatgtgattgtggttgaggcttaagggtactgctaagataaaattatttttaggtttcaagcacttgatgtttttaattttttgtgtcttatagatagtatctgacagatagccagtctttagggagcttattttagttatggagttatatattattgccatatggtgccatgacttaaaatgttctcatgctgacaatactataggaggaataaagtaaacaagcaaaatccagtaaaccaaataggaatgggtaagcaatatgtagggtgactcagaatgcatgagatgttggtagtgcttacactagaacacagcatgtctatctagtgttgtctttgtgcttgaccatctgtgacatctatattgctttctggcctattgccaggtcttgattgaccattaccagtcccttcttacaaaatactaaaaacacctgggtgtgtaaatagcggaggtaatggaaggactgaggcagcttcaaagaactacattgtggaaagttgccataatggtcagagccacccttgttcattcattcttaactttggttatacagtaactcaaggattgaaatatatttggtagcactgacagtttcattgcaaaatattatctaggccctttggggctacttatcaccatccatccctctgagcataggctggacatttaattgtgaaaaaacacaaccacgaaacacaggtaaagtaaaaaagataaaactaaaccatgggtgatcattagtagaccagaattcattaacataatcattatccagagggtgcagaatttcccccccaaatgatagcatttcataaatttataatattgtataaataactctcagatgttttcattatccatttattttgcatgggaaatataacttatttttatagtgtaatttcatttgggtttctaaaagtacatgatgttactgttattacatcaatatcatttataacaagttcttttccattcagatattcagaatccacatattaaatattagattggtacattatggctctagaactg

SEQ ID NO: 114847 - DNA, 747 bp, Homo sapiens
acagagagacagagtcttggtatgttgccctgtctccaactcctgggctcaagtgattctcctacttcagcccctggagtagctgggactacaggcacacaccaccttgcctggctatttaagctaatttcttttggcactctgtagcctcccacattcagttcctcacatttattttacctataatttcttctaccaattctcctgtattttctccttttcttttgctttcctgttctctgtggtgtcttcctttgtctctctttgcctcctcttgcctcccctatcttttttttcttttaggttgggtttcctttttttccctttaggttttcccttaggtcttcatgggcgttgctttgcctcactaacagttaacataaagacgtatttctgtttcttgtacccatgtgctaaaggtacaactgttaggataccacttcatttcagttagatctagtttaggcatacaattgtaatccaagaagactgatctcttctagtgattcagattggttttatctttgatttttagatttcatctgcatttcttgattaattactcattttggtttagttgacagttgagcaaaaaaaaaattactttctccggagtaaatcatctgttttatttatgctttctatgttgttctatgttgtagtgcagtagcacattaggaggtatctttgtggagtgaaaagatttttgtggctgggcgcggtggtggttcatgcctgtaatcccag

SEQ ID NO: 114848 - DNA, 280 bp, Homo sapiens
atccccagccactgtaagcaccatcctaccctctgcttctatgagagagatttcattgactcaggtcatgttatcaagaagacattcaagggccaggtgtggtggcacacacctgtaatcccagcactttgggaggccgaggtgggcggaccacttgagatcaggagttcgagaccagcctggccaacatggcaaaaccccatctctactaaaaatacaaaaaatttagctgggcatggtggtgtgtgcctgtaatcccagttactcgggaggctgaggc

SEQ ID NO: 114849 - DNA, 822 bp, Homo sapiens
ctagtctttttttatgctcgtaatcatatccatgttggtagaaatgcctctaatttttttttagctatagttcgtgttttgaaataatctcaaccttagagaaaaattgtaggaatagtacaaagaactcccataaaagcttcttgcaaattcctcaattattgacaatttacaaaatttcctttctcatctttcaaaatatagatgtatgtgtgtctgtatatgcatttttttttaaattttgtttcgaaccacttgaagttaagttgcagacatgattccctcattacccctgaattctctaatgcagtgattttccaagtatgatccccttgacaagtaacaccaacattgaaatcatctgggaactaacaagtacatttctaacaaaagtacaaattcttaggaccctccctggacctactgaatcaaaaactcttggtttaacaagccctccaggtgattctaatgaatgaatgaatgctgaaacttgggaaccactgcttagtgtatatttctgcaaacaagagctctcacttaaatatctatagtacaattatcaaaagcaaaaaattatcattaatacaatattaacatctgatgtaatacaatacctactctggtaaattataatttgttgccatcattattttaatgctcaaatcgtcctagatttgatcaatgagaaccctttgaagctggcttttatatcattttgatatattcccatcataatttgagggctttctagaacaaaaaggtatttcaggcagatcttttaccttccctacccctgccctgggatcagttgtttctcctagg

SEQ ID NO: 114850 - DNA, 735 bp, Homo sapiens
ccttggcctcccaaagagctgggattacaggcatgaaccacagcgcccagcccccagaagagtttttaaaaggtgttaaaggaggtttatgcacgtaacagacctttctcaggtggtcccctaaaaaaaatcctgccaactagggaggggaagtccaacctgctatttgaaagccttcacggtttgccaaatgtacatttcttgagaattatcttctttcccagggatattgtacctagaggacaggttggttagggaactatggacgaccagaagagatgttcttttgaagcattcttactggataaagtaaccccatggtatcattactttctacaagttttttacttacaaatttgccatttttttaactgatattttctaaatgctcattctgtctatgtagccggggggagattatatacaagttttaaaacttctttgtgatagtgtattgtgctctggggtctattcaaaatttggtgtttgaggttttgttaatttgattgcctggagatctgctaaaatcctagaatctcaaaaagccaagtttgaagccactgagagcaaacaatgaggtcattgttagcctggttccacactcctgaggacttggctgttctttttcaccttattatgttctaatggaagtaaaaaccctcatagtgaagaagagcagtatatacaccagactagtgtataggaacttcttcattaaatattgcagtccttatg

SEQ ID NO: 114851 - DNA, 375 bp, Homo sapiens
tttctgattggactactgcttggcagcatttgtggacatttgtccaacggcaagagggagggatgactgtctggtagctaaaaccctacaagagaatgagctggaggtggaagataacgcagtagaaaggcattgagctgtgactaaagaggccaggtttctagtttgagctctaaccctatttcattatgtaaccatagccatataacccataaaaagtctttttcctaaaagacggggttggtctagactatttccgggggctcctttacttttagtagcctatgacacccacgctgtgaattcacaaactacgtttttctgacacaactttgtactacaaatcacctatataactgaattttcctactccaa

SEQ ID NO: 114852 - DNA, 184 bp, Homo sapiens
acagtttaaatctgtgttgttccagggtcaactgtattattattatgattgttgcagtaattaaattaaaatattgtaacaaaattgggccaatgtttaaaccttattctcacattttttaactttatataggtagaaagacatactggctatgctcaaaagtctatgtaccaccatgatgcag

SEQ ID NO: 114853 - DNA, 323 bp, Homo sapiens
agcaagagaccgaaacttaagtgtgtgacaacctcagtactgtagttaagctacattccccaaattcgcttttgtgaactgactgggaccctaatctctttcgtaactgtttgagaaaaactctgaagcacctgatattcacacaaactcatggtacctacttaactcatttgtaaattggcgatgtagctggctgtagtattgctttgataatttttttcttttaatttacctaatatatataaggaaggggtttggatatattaaaataggtgttaattttatctatttaccaataaattcatctctttaattcagtggct

SEQ ID NO: 114854 - DNA, 657 bp, Homo sapiens
gttttacacaatgttctccctttgtctctagttcttgttttagtcctaaagggttttttcagctcttactgacacaggcaaatctatactgatgttgaacaggcgaagtgggaggagtctatcacacggtaatgtcactagtggattctgtgatgtccctgatggacagctggaactgtaggaagaaggaggactgttgtccacactgtagctgccttgtctgcagaaatccccgattcttgtaaatgcaaacatagttgatctgtggtgtaaagtttctcataagattattgtaaacagatcaatactactttcttaaaagtttttctgctgtttcttgttatttctgaagcagaccctgaggagaaatagcatggtatggtctaccagttcttaaagtcataaagcatttagccatgtgttaaaaggggcgtggcatggggctcagctcattaattctgaaaaccaatttccctaatgttgaaagatgaaacttcaaaattggtattatcctgaatattgctagccccttcctaccctctttataattgtataatctgagtttttgccagacagtaaaattatggtctccatttttccatttccataacagcatttgttaatagataattgcaaaactggtagcaatttaaccaa

SEQ ID NO: 114855 - DNA, 318 bp, Homo sapiens
ggcgttgtattggctcttacttctctgtggaccattattgtcccaggtatcatcatggctaactcatggcaacttctcaaagaggagaccatcctgtttaaaaccaaaaacccaaactagggccacctgtaatcccagctactcaggaggatgaggcaggataatcgcttgaacccgggaggcagaggttgcagtgagccgagatcacgccattgcactctggcctgggtgataaggcaagactccgtctcaaaaaaaagaaaaaagaggtgacatcacaaattcctgtctttcaataactcagaaggtctgggagtg

SEQ ID NO: 114856 - DNA, 419 bp, Homo sapiens
  misc_feature (418)..(418): n is a, c, g, or t
gcaaataataacccaggctgacatttgtcaaataagtgactatgcgatggatagtatgctaagcaatttacttgcatttatctcagttaatttccctagcaccccattagtttatttcagtcattatcattaccattttacaggtgtagaaagtggggcttagtgatgttttggttgctcaaggtgaaacacctgataagtgatgatgatgctgggcttcaataagggctgggattttagggcccatactttaaaccagtatccttcactgactcccattaagaatgaatagggggaggagctgttcctattctgccatcatgccagcaagtcccccatacctaatttttattcatagcattgtatgctttcttcttttaaaaaaaccttataaattatatgaggctttgggcccctng

SEQ ID NO: 114857 - DNA, 180 bp, Homo sapiens
gcctgtcctggggatgttctgggtctagggctctctttgaccatagcacacaccaagtctgtgtcttccagagcagcctctgtgcctgttcgctgcctctccttgaagtgctattgcattgagacagagaacacatagtttttcttcaagtgggtccttgctcaccctgaagtgcacctg

SEQ ID NO: 114858 - DNA, 400 bp, Homo sapiens
tcctcaattgatcctgctacctcagcctcccaaaatgctgaattacaggcatgagccactgtacctggtcttaaacaattttaaaataacatttttatccaggattttagttaattttcaacaggtggattagttcttgctgtattctcgtaaacagaagtcctggtttatttttatttgttttaaacattgaatcccatactcctccccaccttaccctacccagaatttagactgttaatgttttgaagccacagcctgcatcttaatcactattttatcttagtgcctggtcttagaaattatattgactctttgatagaccatatataaggcaggtggatgagaatgtgggtagctagttggaaaaggctgcttggtcatttgcttgattattttc

SEQ ID NO: 114859 - DNA, 326 bp, Homo sapiens
gcagtggcagaaccatccagagggcaccttacatgttgtctacagtgtgccaataaatagtcctggcagacgggccgtgttttagggaataagtcattttggataagcatgatctctgggtagtggagacctgcttcttttaggcatactatattcatgctattaagggtaatttgtgagatgcgagtaaatttccttttctctctctgttcatcacttgctctcttttctcctatactgtgccaaaccaggcactgctttcgatctccgtggttcatttaatctcttttctgatttctcatttccaaattctgctcacgacccct

SEQ ID NO: 114860 - DNA, 391 bp, Homo sapiens
tcaacgttggctgggcacctgacttccattatcatagctctgcgatcctctaatccatctcccccatgaccttgtgaagttgatcttaatccattttacacacaagaatactgaggctcagaaaggttaagccagttgcccaaagtcctcaagtcaagaataggagagttaagatttgaatccagttttgtctggttgcaaaattcactctcttaaccattgttccctgctggcacctggcacaggtaatacactttcattgtcataggattgcagggctttgtttctgatggagtcagggtgactttgagacagggtttcactaccattccctaggctggaatgcggtggcaccatctcagctcactgcaacctctgcctcccaggctca

SEQ ID NO: 114861 - DNA, 207 bp, Homo sapiens
atggagaggtgcaggcagggcccagagcatgtgtgcctggtctggcgggtacccctcaggacacacagtggcatatgcccattatattgctcctgtgcagcctccccaagggcaaatttagcagataaagatgtacacgcttcaagtcgggctccagagaaaccacagatacaattgtagtatcagtccaccccatgcgggttctcg

SEQ ID NO: 114862 - DNA, 369 bp, Homo sapiens
gggattacaggtgtgagccactgcacctggctaacttgatttcaaaaaaaaaagaatgaagtatgagaaaaagttaaaatgggctttttagatttagtgagatacaatgctatgttactctacaaagatatctagcaatacagagtataggaatttatttctcacacagtagtcaagagggctggtccaggtccaggtcagtggtgcaggtcttctctgcacagccgttcaggaaccctgggtcttcccatttgtttgctttttctgccattttctaaggcagtgggcctctgagacttcagtgtacatcatcatcccctgggaggcttgttgaagcccccatggctcaaccccacccaaagtttctcg

SEQ ID NO: 114863 - DNA, 431 bp, Homo sapiens
attttctgattccaaagatgcaatcaaattttgaagagccaagaggaaatctactacaacaacaaaagtaatagcttcactatgatcacagagatgatcaatgatctaaatgcctcacctattttcagcagagccatggatacaagtaatcacaaggcagaagatattttccctttgcttctgaactgcttttggtggcaatgatacaaatacaaattgtggttgatgtttgcataagggcacagacatgcttggtccaagctgaagtaaagattccaagttgtggaccgtcctgcccacattctgcatcatgatgtcaaaatagcatctgatgttctttgcattttcattgaagtaattatcacaaaattgttctcttacttcagcatttacactattagaattgagtgattaaaggattgtgtgatttt

SEQ ID NO: 114864 - DNA, 296 bp, Homo sapiens
ttcaactgtctgaggctggattgagctattcaaaagacggagctgctcatcctggcctccttgtcaggatgccaagccctctccaggggtctagaaacagcaaagatgttccctgttacccaaagcagttgctctgaggcccccatttaggaatccacccagtaaattaatgaccaactcaattgcttcctctgccaggcagcacactctctaggaatatctgccccaggtatacctgatcaacatcacactcatgtgacattaccaggacaggatgttagtttaaaaagcaaaaa

SEQ ID NO: 114865 - DNA, 621 bp, Homo sapiens
ccgtcacgaacgtacccctgctgggcccccgcaagtgcaccaaccgactcgaaagtcccagagagggctggcgggcaaggacctgagtctccagccacccctgcaggaggagcccagggaccctcgcatccctgataaggaagcaggtggcgtgccctgctgtgaccccgaaacagcctgtagtctcaccctccatttccacgagactctaagtctgccgcttttgcagcaaaagcccagtgctgggggtgagcgtgtggggagtgtgggagacgggctctgacccggccaccctgggcagctgtgctcacgcagcacccccgccgttcccagctggacttcacctggcaggacagccaacaggcctcaccgtggcctccgtcccgggggtcgtgcatgggggactgggccagcccgagcagtgggacatgctgccttcctaccctgctccacctgccacaaacacaaactggaatgttctcagccacctccagacttcacaccctttgggctttggggcacagaggtcgggctgccctggggaaaggagggagagaaggaggcttcgagagagcacggacatgagtcagacctgaaataaagcaaagccacaccgcctca

SEQ ID NO: 114866 - DNA, 542 bp, Homo sapiens
  misc_feature (528)..(528): n is a, c, g, or t
ttcagtcaccttaatgttattggaaagttaatgtccatagtataaaccttagagcactacctaacaggacaaaataagcaaaaacatatgactaataatctattagttgaaataaaataaaattcaaaattaaacacttaatccaaggtaaagcatcaaaagtggaaaatagtaataaagaacagattaaattttatggaaaataaattttatgatagtagatttaaggccaaaatatagataacaatattaaatataagtagtctaaaactactatttaaagtaagaattttaagactaaatttaaaaagtaatgttaaatcaatataaagacaaaggttggtcagaaaaaataggttgaagatagctgtacttcaccatgatacagtaagaggaactaaactaaattctttacaaaacaaacaaacaaaaaacaaaaaaacacacacacaaataaaaactaactgcagacaaaatataatcaacagtgattttttaaccattgacaagaagctgaggatgctgatncctgtggaaaagta

SEQ ID NO: 114867 - DNA, 198 bp, Homo sapiens
accccacagctgcagggcttcaggctcggtcagccacacttcctgtcctcaccaccggccctccttcctcggctccctcagacaagcacaaccttcctcctgaggaggaggccaggaaccctcatcttgcaaatccagtggttaatttccacctgcatctgacttgactttctgcccttggcttccagaacatgattc

SEQ ID NO: 114868 - DNA, 382 bp, Homo sapiens
acgaagaagcatgggttactgagcatctactgcgtgtcaggcactgttcagatatggagacataccaactcatacaatcctcaccccaacccatgaggtagatgctgttatcatccccactttacggaagaggaaactgaggcacggagaggttcattaatttagccagagagtcaataagtaacaaagcttgtatttaaactggggcagcctggctgtagagcccatctacctaaccactgctctgtcttattgtaccgtgattattgtttctatttcaatttcccctctcccatctttctttcattctgttccacttaccctcattactgatcttccttctctgccatcctgaccccttcctgtccttggatgcctttgg

SEQ ID NO: 114869 - DNA, 578 bp, Homo sapiens
tccccttgcacaacgggcaaagaccggccaaggagcatctgctaagttcttataggagcttctgggctcaatcacccactgatcgccaagctgggtgctggcgatgcaatgggggcaggatctagccacaggcttgggggagcatatgagtcacaaataaaggcctgtgtacccccaggcttccttcccacacccatggcaggcattaccaattggtccccatgctctcttacagagctccttgtagcctcagaattgctattctgtatagcactccaggctgtcactctcaggcagagcataagacaaaacctacagcacttgatgtccctgttagtggagcaactactacattctgctgggttcagccacatctgggagagctagggcctggtcttggtctctggcctaggagagagcagccagatggtgtcaagcttagaccctcagtttgggaacttcaatggagaggcacagagggcctgggggtggggggatttggttttgctacagaatcccagcttcttggccaagactctccacgagagtggtttccttggcccggatgccagaatggg

SEQ ID NO: 114870 - DNA, 442 bp, Homo sapiens
  misc_feature (66)..(66): n is a, c, g, or t
ggtattgcatttcttttacttgtgtgttattagtccatatggaaaatacaatgtttttatgtatgnaaatggccgatttgaaaagagtatataaacatagacatactgtgtttgcccttttttaaaaaaagggctgtttaaatgggtccctaagataactttttgataatgtaatattgacatgataaaattgtaaacttcataattctggcacaggaacaatttatgaaaacatactaaggtatttgtaaattgatgaaataatatatatcttaggaaagtcataattattacacttgtacatacccttaaaataaaagagcctgcttgaaatgttgcaaaaagaaacagaaatacctgctaatatgcccttctaattaaggatgatgccaattaatctctttatataaataataaactttgagttgttttaaaaaaaaaa

SEQ ID NO: 114871 - DNA, 440 bp, Homo sapiens
cttgtccccaaaaagcagaggacccgggaggtaggcattttacagccaggaagtatcgctggaccatggcccacagttaagacacagtatctgggaccagaagaaagcaataaaaggtcaggacacacgtgccttgtgggtgggagcagaagagatggcccaacatacacagtcatgttatggaatgtaacccttacatgttatggaatgtaacccttattcatgacggttacattccataaagtcaccacaaacatgaagtagtggacactgagacgttggtcctgaggaactacagagttgtttcctgtgagcctctgcccacattttgtcaaccaatcaatacataaccttgttttaagtgtgtttctatttaaagacaccttatttaatatatatgattgattcatgaacattaaactcctggccactagcaccgt

SEQ ID NO: 114872 - DNA, 487 bp, Homo sapiens
ccccagtatgggttctctgatgtaccataagactagaattataactgaagaccttcccacactcattacattcatagggtttctcaccatgcctgtaatcccagctactcgggaggctgaggtaggagaatcgcttgaacccgggaggcagatgcagacatcacaaaagaataccctcaggaagcgtagagtggtcatagttgacccagaaaccaataaagaaatgtctgttcaggaggcctacaagaagggcctaattgattatgaaaccttcaaagaactgtgtgagcaggaatgtgaatgggaagaaataaccatcacgggatcagatggctccaccagggtggtcctggtagatagaaagacaggcagtcagtatgatattcaagatgctattgacaagggccttgttgacaggaagttctttgatcagtaccgatccggcagcctcagcctcactcaatttgctgacatgatctccttgaaa

SEQ ID NO: 114873 - DNA, 429 bp, Homo sapiens
aacaaccttggttttctgggacttttcttttatgagtatttttttattaatgtaaagtttcaaagaaggctaatcaaacacaaaaatatctgcaaagagccacaataagccttgaacaacatacagtcagtaaaacatcaaggtttaaattgttgctttaacttccttttggctggaagctccatattctggtaattcaccaaaatggccaacacaaggaaaacaggagaggcacccagtgtatgttttctaggccttttagaaaacatggagttggccacatgcatgggagtctataaaaaaggtgatactgtagacatcaagggaatgggtatggttcaaaaaggaatgcctcacaagtgttaccatggcaaaaactggaagagtctataatgttactcagcatgctgttagcattgctgtagggaa

SEQ ID NO: 114874 - DNA, 272 bp, Homo sapiens
tgagccaccacgcccggccgtctgtgacctcattttttataactattccttttctgtcactcagctctggccacactgtcctcagtgttccttgaaattccagggcatgctaccttactgccctccagggccttgcatgtatccccatgcagtgggataaaagcctttggcttttccctcacttttttcagtaagacatcctctgactctcctatttaaaattgtacccaccaatactcccagtcctccttccatgttttatttttctctgt

SEQ ID NO: 114875 - DNA, 684 bp, Homo sapiens
ggggaagccagcctctgcttgaggaggggaggctccagggcagaaggaagaggctggaggtgaaccttcactttggtccctgaagggatgggcagtagcagcagagcccggaaggccagccttcccagagagtgaccttgtctttggcccttctgtccttggccagaatgcgtgtctttgcagggtaactggagggtagagtaggtctttggcggggctgatggaatgggtgtccaagcaggggaggaaggcggtgtggatgcagcctgcctgatctgggatgtcactttttgctggcgaccaggaggagaggccttcccccacagcccctcccccccatgcccgcatggggcacctctctcaggtccctgtgccacaatttccttgccacctggtaccatttaacaagagaagtggcatcgcattctccagccaagagtctgggaaccttccaagcactggggaacacagtgctgtcactgccgccagctcccagctgagcttggcaggggccctggaaccaggaggcctcccactctagagttgggggctggcctgcccctgcctcacagcagagctgagccacacttaaatggcaggcaggtgccctcagacctgctgtccctggaaggcgggggatgggtggccagagagtggggttgcttcacgccatctggagaccca

SEQ ID NO: 114876 - DNA, 2139 bp, Homo sapiens
agggacttttgctcccacaagtcctgcctcggaggcgggggagctggaccagcagccgcctggagcgtccgagtcaccgtcgccggggctcccgcgctccccagaacggtgggacgcggggctcggcagccgccagcggaacatggcgccctggacgctgtggcgctgctgccagcgcgtcgtgggctgggtgccggtgctcttcatcaccttcgtggtcgtctggtcctactacgcgtacgtggtggagctctgcgtgtaccacgttgatgagcgaacaatatgcaatggaattgccccagaaaaagatgtagatggatttcatattatcaatattggaagattgtgccttgatcagcattctctcatacctgccactgccagtgctgtttgggaaataataaaaagaacaggaattcaaacatttggaaaaaatgtggttgtggctggaagatccaagaacgtagggatgcctattgccatgcttttacacactgatggagagcatgaacggccaggaggtgatgcaactgtgacaatagctcacagatacacccccaaagagcaactgaagattcatacgcagctggcagatattatcatagttgctgcaggtattccaaagttgattacgtctgatatggttaaagaaggtgctgctgtaattgatgtgggtatcaactatgtccacgatccagtgacaggaaagacaaaattagttggagatgtggacttcgaagctgttaaaaagaaagctggctttatcactccagttccaggaggtgtgggacccatgacagtggcaatgcttctgaagaacacccttctggcagctaaaaaaatcatttactagatcacatgaaaggataaagcaaactgaagtcatgctatttgtttatttgacaaagggtaaaacctttatattttactacaaagctatttatttctacatggtatttattttttcatgggtgaaatcattgtgaatcaattgattcacatagttttatgcatttcctgctaatttattttgagttttaagaaaacaaccaaaacaattccaatgaaaattttagtaacaattgtttattttgagggtatttgttcataacattaaaacaataaagggctcataataaataaatatatttttgacacaattaaatattacatagagtatgtttacaacaaatatcctgtcagccaaatggttacccatataaaatgtaatttaggttttgctacttgcatgctaacatttttaatgtattttatgatctatgtcatatattaaaaaagagcttgcttactacaagaaaaatattgaaatattgaaaatattgaaaatattattattgaaaataaaatcttgatctcaactatcccccaaatgcatcctataagtccatcctaatgagaaatgatgttctatttaaggaaaggaaaatattccgggaaggcaaaaaatgcagtgctgtttggaagtgtaatgattttatcacatggtgaatgactactaagagtaatgattatatcacattgtgaatgactacttgccacagtaaaaatacatgaagaatgtgttaggtttaaacgtcgtttctttcttctaaaaaatatttggttagtaccttcactgagcaatagtggaaaaataaaaaaataagtaaacagaaaaaactaaagttgtattttcccacaaatatagtatgaatgaggtcatattaaagaacagcaactgttaatgtttgttcacaaattcagaaatctaataggaaaacatgatactttcaatgtgccaaaactaaaccttagtatacaactaaaaatctcctgccttcttgcctacctgtcttccctcttctgttacagaatttgttcctcaaagtagatgcaatgtttctaacacaatttaaattaggaaatatatatgaatgtcgttgaagtctattttgagactgctaaagctattaattgatactgtgtttttatgcccaaatcccagtatgtttatgtaccaataatgactcttacccagcgcatgtctttatcagtgtgtactcgtgacgatttgtgtgaaaatagacttgatgtttataattaataccattacaactgtataataaaagcaatttgaag

SEQ ID NO: 114877 - DNA, 1467 bp, Homo sapiens
tttcagtgtgaggagtctgatagcagcccatcccatttgggtgggaaggttatagaccttgcacattaatgccatgctcaaagcagatttgcaggtatcctgcaacacagggactttcacaaaacccgctttggcttattctacctgaactacttattttaattaactaaatggatatcccaagcattccatgtttatcctgttgctcagtgaatcctcaaatcgttaatttggtagattctcttttttgtcttcatactattatttcttttagcttttaaaaaaattgtgtactgcctacaggtctttatggaagtttcacctttctttgtgtcgcactggcatcggctgtataatttttgcagctagaccacattttaaaaaaatctacatttttggaactagtaaaagatacttatttgtgttatttaagtattcacgtcttttaccgtgggtagttaagtttaataatttaaaaagacacattttatcagtaacaatgttcattttatttttcagactcttccctctactacttactctgtatttctgtctcttctaatgactaggaaaggcagtttctcaaaatcatcttctatttagttggcaaatgtgataatgtgggtagtgttcctaccttcctgctgtatgtgttctactgaaatgagatataatagccatctggctacaattttgatttctaagaagttcttatgtcattttaaattcaaaaactaagtatttcaacatttggtctctcatatcttaagttttattttctttgttccagctgttcagagatagtgtgttctaatatctccacaatcaagatttttgactaaaatggatcagtacatgaaaaagagggactagtattaattttagatcttgttagttaatcatggtcttactaataatttggcaagttctttaatgagccaaatctttgtatttcaaatgccttgaagttgtattctttcctattagtaccctgatgggaggatgaaaacagcagaaaggagcagcaccagatgatcttttcatgggcacgtactctttcaaggaatcccatggagctcagtgaaattacactttggcttagagataattaagttgtggaaggaggtttaagagaggagcttaggtgaaatttgagctgtaaatgagtatgctaaattaaagaaatgattagtaataaatgagatttgctattaagaaattcactttggatctgagacaacattttacatacaatgtagaaaactttatggtcagaacagaacacagtctgaacctaaattaacagtagtgttaaagaattcagggcgggatattatccaagaaggcctagccagctgctccacttaatgttacatcacaagtggtttctgtgttgctattgtttttattagcatttcaatgactgtgtcatattacattaaatcaattggctctaacttacctaac

SEQ ID NO: 114878 - DNA, 1702 bp, Homo sapiens
gttagaggaggtcctgtgcagccttctgactcctttattactttcacagagtcagattgctttcttctaaaatagcccctctatgtgatgcaactgtgacaatagctcacagatacacccccaaagagcaactgaagattcatacgcagctggcagatattatcatagttgctgcaggtattccaaagttgattacgtctgatatggttaaagaaggtgctgctgtaattgatgtgggtatcaactatgtccacgatccagtgacaggaaagacaaaattagttggagatgtggacttcgaagctgttaaaaagaaagctggctttatcactccagttccaggaggtgtgggacccatgacagtggcaatgcttctgaagaacacccttctggcagctaaaaaaatcatttactagatcacatgaaaggataaagcaaactgaagtcatgctatttgtttatttgacaaagggtaaaacctttatattttactacaaagctatttatttctacatggtatttattttttcatgggtgaaatcattgtgaatcaattgattcacatagttttatgcatttcctgctaatttattttgagttttaagaaaacaaccaaaacaattccaatgaaaattttagtaacaattgtttattttgagggtatttgttcataacattaaaacaataaagggctcataataaataaatatatttttgacacaattaaatattacatagagtatgtttacaacaaatatcctgtcagccaaatggttacccatataaaatgtaatttaggttttgctacttgcatgctaacatttttaatgtattttatgatctatgtcatatattaaaaaagagcttgcttactacaagaaaaatattgaaatattgaaaatattgaaaatattattattgaaaataaaatcttgatctcaactatcccccaaatgcatcctataagtccatcctaatgagaaatgatgttctatttaaggaaaggaaaatattccgggaaggcaaaaaatgcagtgctgtttggaagtgtaatgattttatcacatggtgaatgactactaagagtaatgattatatcacattgtgaatgactacttgccacagtaaaaatacatgaagaatgtgttaggtttaaacgtcgtttctttcttctaaaaaatatttggttagtaccttcactgagcaatagtggaaaaataaaaaaataagtaaacagaaaaaactaaagttgtattttcccacaaatatagtatgaatgaggtcatattaaagaacagcaactgttaatgtttgttcacaaattcagaaatctaataggaaaacatgatactttcaatgtgccaaaactaaaccttagtatacaactaaaaatctcctgccttcttgcctacctgtcttccctcttctgttacagaatttgttcctcaaagtagatgcaatgtttctaacacaatttaaattaggaaatatatatgaatgtcgttgaagtctattttgagactgctaaagctattaattgatactgtgtttttatgcccaaatcccagtatgtttatgtaccaataatgactcttacccagcgcatgtctttatcagtgtgtactcgtgacgatttgtgtgaaaatagacttgatgtttataattaataccattacaactgtataataaaagcaatttgaag

SEQ ID NO: 114879 - DNA, 1284 bp, Homo sapiens
gatcataactcaggaaaagacagatattggtcaatatttccttccaaaagtggagatgataaagtagaagtatagaaatcctaaagtccagaccttccttgttcagccaggttttgctccttctccacacacctttgttcttttctccaacttccaaggaatctcacaaaggaagtgggaaacaatgaacctattacttctttcctgctttaaatccaattccacgtagtcacggagactgttgggcaggatctctggcttggtggaaagtggggcgtgctgcctaaagtgatagtttggaggccttctctgtgccgtcgctatgggaatgccagctatatgttggctgggtgcggggcccagtcgccaggccacactgcacgcctccacatcctcagagggcccgggacttgggtcctggccccgccccctgcggacccggcactctgtcagttccgtccccggtcctgggaaccgctctttatcccactctgcgtgtctgccggaacctggctgggaagcgctacttgctgccctgccagcccgggtgagggcggagccaggcctccagccgcgaggactggagtcgcgggaggtggagccccagtccggaagccggggatccgcggccatgacggtgccggtccgcggcttctcgctgctccgcggccgccttggccgagcgccggcgttgggcagaagcacagcaccctccgtaagggcaccgggagagcccgggagtgcgttccggggctttcggagcagcggtgtgaggaccagcagagagaagagattccatcttcctaccctgatgggaggatgaaaacagcagaaaggagcagcaccagatgatcttttcatgggcacgtactctttcaaggaatcccatggagctcagtgaaattacactttggcttagagataattaagttgtggaaggaggtttaagagaggagcttaggtgaaatttgagctgtaaatgagtatgctaaattaaagaaatgattagtaataaatgagatttgctattaagaaattcactttggatctgagacaacattttacatacaatgtagaaaactttatggtcagaacagaacacagtctgaacctaaattaacagtagtgttaaagaattcagggcgggatattatccaagaaggcctagccagctgctccacttaatgttacatcacaagtggtttctgtgttgctattgtttttattagcatttcaatgactgtgtcatattacattaaatcaattggctctaacttacctaac

SEQ ID NO: 114880 - DNA, 427 bp, Homo sapiens
tttcagtgtgaggagtctgatagcagcccatcccatttgggtgggaaggttatagaccttgcacattaatgccatgctcaaagcagatttgcaggtatcctgcaacacagggactttcacaaaacccgctttggcttattctacctgaactacttattttaattaactaaatggatatcccaagcattccatgtttatcctgttgctcagtgaatcctcaaatcgttaatttggtagattctcttttttgtcttcatactattatttcttttagcttttaaaaaaattgtgtactgcctacaggtctttatggaagtttcacctttctttgtgtcgcactggcatcggctgtataatttttgcagctagaccacattttaaaaaaatctacatttttggaactagtaaaagatacttatttgtgtta

SEQ ID NO: 114881 - DNA, 944 bp, Homo sapiens
gatcataactcaggaaaagacagatattggtcaatatttccttccaaaagtggagatgataaagtagaagtatagaaatcctaaagtccagaccttccttgttcagccaggttttgctccttctccacacacctttgttcttttctccaacttccaaggaatctcacaaaggaagtgggaaacaatgaacctattacttctttcctgctttaaatccaattccacgtagtcacggagactgttgggcaggatctctggcttggtggaaagtggggcgtgctgcctaaagtgatagtttggaggccttctctgtgccgtcgctatgggaatgccagctatatgttggctgggtgcggggcccagtcgccaggccacactgcacgcctccacatcctcagagggcccgggacttgggtcctggccccgccccctgcggacccggcactctgtcagttccgtccccggtcctgggaaccgctctttatcccactctgcgtgtctgccggaacctggctgggaagcgctacttgctgccctgccagcccgggtgagggcggagccaggcctccagccgcgaggactggagtcgcgggaggtggagccccagtccggaagccggggatccgcggccatgacggtgccggtccgcggcttctcgctgctccgcggccgccttggccgagcgccggcgttgggcagaagcacagcaccctccgtaagggcaccgggagagcccgggagtgcgttccggggctttcggagcagcggtgtgagaccacagagagagagagaaaaaaaagatacaaatggcttaatttgagaagtgagtgataaaagactaaggaaaccaagattcaaactcacatctctttgcctaaccacagtgctagagtaaacactccctaaaggcaggctctgaactgggtaccaaaggatccaaaaac

SEQ ID NO: 114882 - DNA, 2504 bp, Homo sapiens
aaactagaataataaaagggaaattataatattcacaaacttgaagcacactggaattctgctataaatgtttgttatagaatagaatttggtgcagggtgaatttgatttaagagggtttaaattatatgaactgtgtgaaaacatttagatctaaggctgaaaacaattatcaactcaatgaaattttaatatggtatttcacaactgtgacttcatgacagctgttacaagtgtcaggaatggtaaatatgtactatttactaatgccaacactgtacagaagtgctttatatacaataaatcatttattactcacagcaatccttaccagtagatgctatttctatctgaggtttgtggttaaggaaaaagagtgaactgagtaactggtgtgagttcactcagtgagtaagtaccagagcgttgtcaagagaaccaagtgtagcatccttcgtaccatagtcacagtcctacagcagaaatttaagagagcatcaagagagatgcttgcttacccgctttgtatttacttgctctctgagaagtctacttctcatttatttctggaacacaattaggtaaactctatctatttcaaatgttctcttcagttgtctagtttgaagcctttgaggattagcaccttccagtttattcaagggaattggacaaagaaatgagaatgaactataggattaaaggataaaactaaagaaggtgagttagaagagtttgagttcatggcgcagatttaacataaaataatcgaataattagtaggcataaaaaggtggatatcgacctaactagtaagcatggagatatgtgtatttgtctaaaactcatttcttcatttggggaaaaaaagtattgctataattacttttcatgagaaattatcaaatttatgtatccagaacactgattattattaaaatgtttgaccagagtgggaatttttttttatcattctgaactctttcctattttattctgtttaattcaagatggtttctaaattttaattttactttgttttagaatttatatttcctttctctatgggagaaaccccagttctgtgtttgagtgtatagaataattccacatagggagaattgcagtaaacattataaccctgtaatctgccttgtatctgttagacaattagtgaatgctgttgaagaaatgagtgaatcctgtagtttttcagcaccacttttttgtgtgttaagtctcatccttctgcatatgtttctacatgtaagagattagtgcataaacaatttaactgatcaagattggtgaagatcttgtgcccgcacccatgaaagttttctatagctatatagtatctattgtatacaggccacgttaggaatgcatattttataacttgaataatgtgttagcctcttacctcttcactatattggttacctttcaaacatacaagggctgagttctttctccctttagatcttagcgtaaatgtcactgctttggggaagcttttccagcccatgcccctaagttgttttcattctgttgttctctatttggaacctcctttttttctgtgacagagacaatttaagttctccaaatatccacatgtcctcttatattttggggcttctctttgcaattagattgagcccatgtgactactggacaatagattgtaaaaggaagagacatttttggaaccacttccagactgagatggttaaaagctgttgtgccctcctccttcacttctgtttctgttgcattgttcttggaaactaggtattacagatggttgtaaattacaaaaagtagggcagtagaattcttattggacttgacatgaataagaaataaatacccttttataaatgaaaaaaaaaaaaaaaaaaaaaaaaaaaaaaaaaaaaaaaaaaaaaaaaaaaaaaaaaaaaaaaaaaaaaaaaaaaaaaaaaaaaaaaaaaaaaaaaaaaaaactttggggggggccccggacccaaattggccttatagggagtcgttttacatttaatgggccgtcgtttaaaaacgtcggaattggaaaaaccttggggttaccaaattaaatcgctttgaagaaaatccccttttggcaagttggcgtaataccaaaaaggcccgaaccaatggcctttccaaaaatttgccaaccctgaatggcaaagggcaaattgaaagcgtaaatttttggtaaaaattcgcgtaaaattttggtaaaataagttaatttttaaaccaatgggccgaattgggaaaaatcctttttaaatcaaagaattgacccgaaatgggtttgatggttgttccatttgggaacaagagtccccttttaaggacactgacttcaaacgaaaaggccaaaaaaccgtttttaagggcaagggcccaatacgggaccctttaccctaataagattttttggggccaagtcgccaaaagcctaaattggacccctaagggaaccccctttt

SEQ ID NO: 114883 - DNA, 818 bp, Homo sapiens
atatattttgatagttttattttttaagaggcactagcaagttagataaggcgggggttttgacgcctctttgtactgaataccatctctgaaggtgaggttggccacaaggttgaaaacacctgtggactggtgggtctcgggtgggaggaattcggacagtgtgttgatgcttattgggtgtctcttttctcttctaggaccagcagagagaagagattccatcttccagaggttgccactgtctgcctccccacttgtccccatccacagtcatcttttttatatatataatgacacattagttgtctagttcttcatagttaatgtggtttaagtctgacatcttttcttttgccatgaaatttacaccttagtgttattctcactgaaaattgcctttgagtttgataaactcttatcccagtgatattgactgttttaaattaacagatttatcaccatttctgagctgtgtagggccttaattgaaaaagtatctttgattattttttcacattttggccacatgcctataataatggaatatttacagtactttttagtggagaacttttttaagtagaatttcaataattaatgtttgatggagtttggaagttaccgtattttgaagtatcgtttaacattcttctctcaatgagttttcctttaaaatttgcagtgaatttgttttcctgtttatgcatgagaatttaggtcttattaattgggggaaattaatgttaaagtaataaataagcccttgttgcagcttattgtttcttgaaatgaattaactatccaggcaaaaggtt

SEQ ID NO: 114884 - DNA, 912 bp, Homo sapiens
gcacaacaagtccccagggacagctaagcactccagtgtctagggactgtgggaaactggaaagaaacaatccagtgtaaatatgacttctaagctggctgtgctctactgctttcttggcagttgcatgctttctgtagcactgtgtgaagtgtgaagcttattcatgaagagacctctgcctgaacatacagcaaatttaagaaggttgtgcagatagtctgaaggaggctggtgcagcatggaaacacggatttgagctcattactccaattttcacgctgagtttggaagggtcctagagggaccagcagagagaagagattccatcttccagaggttgccactgtctgcctccccacttgtccccatccacagtcatcttttttatatatataatgacacattagttgtctagttcttcatagttaatgtggtttaagtctgacatcttttcttttgccatgaaatttacaccttagtgttattctcactgaaaattgcctttgagtttgataaactcttatcccagtgatattgactgttttaaattaacagatttatcaccatttctgagctgtgtagggccttaattgaaaaagtatctttgattattttttcacattttggccacatgcctataataatggaatatttacagtactttttagtggagaacttttttaagtagaatttcaataattaatgtttgatggagtttggaagttaccgtattttgaagtatcgtttaacattcttctctcaatgagttttcctttaaaatttgcagtgaatttgttttcctgtttatgcatgagaatttaggtcttattaattgggggaaattaatgttaaagtaataaataagcccttgttgcagcaaaaaaaaaatacatggccttgttggcctta

SEQ ID NO: 114885 - DNA, 2700 bp, Homo sapiens
gctgtacggccgggatattagggatctcgttcaccagagcacctactatgttccaggtggtatcataagaacttgggagacatcactaaacaaaatagaaaaatccctgcccttatggagctgacattctagtgggggcttggtttttttccttgggtactgggtttgtttttccatgatgagcatatcctatgatgcactatagcactcaagcaagatgcctgaagcaaaggaggccaaagtaatgattcatggattcagcacactttcctttgttgaaaagcactgcttgttccccctcaaagctatgtgagaggctgtgtaggagagagtggagagcaggtagcctaccggacctacagttcaccatttcagccctgtaattgaccagctgtgggacctcagtgtgaagcttattcatgaagagacctctgcctgaacatacagcaaatttaagaaggttgtgcagatagtctgaaggaggaccagcagagagaagagattccatcttccacatgaagccattattatatcaggaaccgaaatggccaagcatatccagaaagaaatacagcgaggtgtggaatcatgggtttcccttggaaacagaagacctcacctcagtataattttagtgggagataacccagcaagccatacatatgtcaggaataagataagagctgcctctgctgtaggtatttgtagtgagctcattctaaaacctaaggatgtttctcaggaagaacttttggacgtaactgatcaattgaatatggacccaagagtcagcggtatattagttcagttaccactaccagaccacgttgatgagcgaacaatatgcaatggaattgccccagaaaaagatgtagatggatttcatattatcaatattggaagattgtgccttgatcagcattctctcatacctgccactgccagtgctgtttgggaaataataaaaagaacaggaattcaaacatttggaaaaaatgtggttgtggctggaagatccaagaacgtagggatgcctattgccatgcttttacacactgatggagagcatgaacggccaggaggtgatgcaactgtgacaatagctcacagatacacccccaaagagcaactgaagattcatacgcagctggcagatattatcatagttgctgcaggtattccaaagttgattacgtctgatatggttaaagaaggtgctgctgtaattgatgtgggtatcaactatgtccacgatccagtgacaggaaagacaaaattagttggagatgtggacttcgaagctgttaaaaagaaagctggctttatcactccagttccaggaggtgtgggacccatgacagtggcaatgcttctgaagaacacccttctggcagctaaaaaaatcatttactagatcacatgaaaggataaagcaaactgaagtcatgctatttgtttatttgacaaagggtaaaacctttatattttactacaaagctatttatttctacatggtatttattttttcatgggtgaaatcattgtgaatcaattgattcacatagttttatgcatttcctgctaatttattttgagttttaagaaaacaaccaaaacaattccaatgaaaattttagtaacaattgtttattttgagggtatttgttcataacattaaaacaataaagggctcataataaataaatatatttttgacacaattaaatattacatagagtatgtttacaacaaatatcctgtcagccaaatggttacccatataaaatgtaatttaggttttgctacttgcatgctaacatttttaatgtattttatgatctatgtcatatattaaaaaagagcttgcttactacaagaaaaatattgaaatattgaaaatattgaaaatattattattgaaaataaaatcttgatctcaactatcccccaaatgcatcctataagtccatcctaatgagaaatgatgttctatttaaggaaaggaaaatattccgggaaggcaaaaaatgcagtgctgtttggaagtgtaatgattttatcacatggtgaatgactactaagagtaatgattatatcacattgtgaatgactacttgccacagtaaaaatacatgaagaatgtgttaggtttaaacgtcgtttctttcttctaaaaaatatttggttagtaccttcactgagcaatagtggaaaaataaaaaaataagtaaacagaaaaaactaaagttgtattttcccacaaatatagtatgaatgaggtcatattaaagaacagcaactgttaatgtttgttcacaaattcagaaatctaataggaaaacatgatactttcaatgtgccaaaactaaaccttagtatacaactaaaaatctcctgccttcttgcctacctgtcttccctcttctgttacagaatttgttcctcaaagtagatgcaatgtttctaacacaatttaaattaggaaatatatatgaatgtcgttgaagtctattttgagactgctaaagctattaattgatactgtgtttttatgcccaaatcccagtatgtttatgtaccaataatgactcttacccagcgcatgtctttatcagtgtgtactcgtgacgatttgtgtgaaaatagacttgatgtttataattaataccattacaactgtataataaaagcaatttgaag

SEQ ID NO: 114886 - DNA, 1165 bp, Homo sapiens
gctgtacggccgggatattagggatctcgttcaccagagcacctactatgttccaggtggtatcataagaacttgggagacatcactaaacaaaatagaaaaatccctgcccttatggagctgacattctagtgggggcttggtttttttccttgggtactgggtttgtttttccatgatgagcatatcctatgatgcactatagcactcaagcaagatgcctgaagcaaaggaggccaaagtaatgattcatggattcagcacactttcctttgttgaaaagcactgcttgttccccctcaaagctatgtgagaggctgtgtaggagagagtggagagcaggtagcctaccggacctacagttcaccatttcagccctgtaattgaccagctgtgggacctcagtgtgaagcttattcatgaagagacctctgcctgaacatacagcaaatttaagaaggttgtgcagatagtctgaaggaggctggtgcagcatggaaacacggatttgagctcattactccaattttcacgctgagtttggaagggtcctagagggaccagcagagagaagagattccatcttccagaggttgccactgtctgcctccccacttgtccccatccacagtcatcttttttatatatataatgacacattagttgtctagttcttcatagttaatgtggtttaagtctgacatcttttcttttgccatgaaatttacaccttagtgttattctcactgaaaattgcctttgagtttgataaactcttatcccagtgatattgactgttttaaattaacagatttatcaccatttctgagctgtgtagggccttaattgaaaaagtatctttgattattttttcacattttggccacatgcctataataatggaatatttacagtactttttagtggagaacttttttaagtagaatttcaataattaatgtttgatggagtttggaagttaccgtattttgaagtatcgtttaacattcttctctcaatgagttttcctttaaaatttgcagtgaatttgttttcctgtttatgcatgagaatttaggtcttattaattgggggaaattaatgttaaagtaataaataagcccttgttgcagcaaaaaaaaaatacatggccttgttggcctta

SEQ ID NO: 114887 - DNA, 848 bp, Homo sapiens
gcacaacaagtccccagggacagctaagcactccagtgtctagggactgtgggaaactggaaagaaacaatccagtgtaaatatgacttctaagctggctgtgctctactgctttcttggcagttgcatgctttctgtagcactgtgtgaagtgtgaagcttattcatgaagagacctctgcctgaacatacagcaaatttaagaaggttgtgcagatagtctgaaggaggaccagcagagagaagagattccatcttccagaggttgccactgtctgcctccccacttgtccccatccacagtcatcttttttatatatataatgacacattagttgtctagttcttcatagttaatgtggtttaagtctgacatcttttcttttgccatgaaatttacaccttagtgttattctcactgaaaattgcctttgagtttgataaactcttatcccagtgatattgactgttttaaattaacagatttatcaccatttctgagctgtgtagggccttaattgaaaaagtatctttgattattttttcacattttggccacatgcctataataatggaatatttacagtactttttagtggagaacttttttaagtagaatttcaataattaatgtttgatggagtttggaagttaccgtattttgaagtatcgtttaacattcttctctcaatgagttttcctttaaaatttgcagtgaatttgttttcctgtttatgcatgagaatttaggtcttattaattgggggaaattaatgttaaagtaataaataagcccttgttgcagcttattgtttcttgaaatgaattaactatccaggcaaaaggtt

SEQ ID NO: 114888 - DNA, 646 bp, Homo sapiens
  misc_feature (23)..(23): n is a, c, g, or t
actactccttccaatatgatgtntatgttatggccttcgagggccaccaggatagaatagaggttgccactgtctgcctccccacttgtccccatccacagtcatcttttttatatatataatgacacattagttgtctagttcttcatagttaatgtggtttaagtctgacatcttttcttttgccatgaaatttacaccttagtgttattctcactgaaaattgcctttgagtttgataaactcttatcccagtgatattgactgttttaaattaacagatttatcaccatttctgagctgtgtagggccttaattgaaaaagtatctttgattattttttcacattttggccacatgcctataataatggaatatttacagtactttttagtggagaacttttttaagtagaatttcaataattaatgtttgatggagtttggaagttaccgtattttgaagtatcgtttaacattcttctctcaatgagttttcctttaaaatttgcagtgaatttgttttcctgtttatgcatgagaatttaggtcttattaattgggggaaattaatgttaaagtaataaataagcccttgttgcagcttattgtttcttgaaatgaattaactatccaggcaaaaggtt

SEQ ID NO: 114889 - DNA, 3182 bp, Homo sapiens
gatcataactcaggaaaagacagatattggtcaatatttccttccaaaagtggagatgataaagtagaagtatagaaatcctaaagtccagaccttccttgttcagccaggttttgctccttctccacacacctttgttcttttctccaacttccaaggaatctcacaaaggaagtgggaaacaatgaacctattacttctttcctgctttaaatccaattccacgtagtcacggagactgttgggcaggatctctggcttggtggaaagtggggcgtgctgcctaaagtgatagtttggaggccttctctgtgccgtcgctatgggaatgccagctatatgttggctgggtgcggggcccagtcgccaggccacactgcacgcctccacatcctcagagggcccgggacttgggtcctggccccgccccctgcggacccggcactctgtcagttccgtccccggtcctgggaaccgctctttatcccactctgcgtgtctgccggaacctggctgggaagcgctacttgctgccctgccagcccgggtgagggcggagccaggcctccagccgcgaggactggagtcgcgggaggtggagccccagtccggaagccggggatccgcggccatgacggtgccggtccgcggcttctcgctgctccgcggccgccttggccgagcgccggcgttgggcagaagcacagcaccctccgtaagggcaccgggagagcccgggagtgcgttccggggctttcggagcagcggtgtgaggaccagcagagagaagagattccatcttccacatgaagccattattatatcaggaaccgaaatggccaagcatatccagaaagaaatacagcgaggtgtggaatcatgggtttcccttggaaacagaagacctcacctcagtataattttagtgggagataacccagcaagccatacatatgtcaggaataagataagagctgcctctgctgtaggtatttgtagtgagctcattctaaaacctaaggatgtttctcaggaagaacttttggacgtaactgatcaattgaatatggacccaagagtcagcggtatattagttcagttaccactaccagaagctgtgcaactttgttcaggatttgaaatgctcgggatataagagtacacaggcttgctgtttgtccagtagctgaccctaaagctaaggagaaataaaaatgaccgaatgcagatgctttcctactcctgtcctgaccgtgcagagattcttatcaataagtggtcactttgtcgagttgtctagtttgaagcctttgaggattagcaccttccagtttattcaagggaattggacaaagaaatgagaatgaactataggattaaaggataaaactaaagaaggtgagttagaagagtttgagttcatggcgcagatttaacataaaataatcgaataattagtaggcataaaaaggtggatatcgacctaactagtaagcatggagatatgtgtatttgtctaaaactcatttcttcatttggggaaaaaaagtattgctataattacttttcatgagaaattatcaaatttatgtatccagaacactgattattattaaaatgtttgaccagagtgggaatttttttttatcattctgaactctttcctattttattctgtttaattcaagatggtttctaaattttaattttactttgttttagaatttatatttcctttctctatgggagaaaccccagttctgtgtttgagtgtatagaataattccacatagggagaattgcagtaaacattataaccctgtaatctgccttgtatctgttagacaattagtgaatgctgttgaagaaatgagtgaatcctgtagtttttcagcaccacttttttgtgtgttaagtctcatccttctgcatatgtttctacatgtaagagattagtgcataaacaatttaactgatcaagattggtgaagatcttgtgcccgcacccatgaaagttttctatagctatatagtatctattgtatacaggccacgttaggaatgcatattttataacttgaataatgtgttagcctcttacctcttcactatattggttacctttcaaacatacaagggctgagttctttctccctttagatcttagcgtaaatgtcactgctttggggaagcttttccagcccatgcccctaagttgttttcattctgttgttctctatttggaacctcctttttttctgtgacagagacaatttaagttctccaaatatccacatgtcctcttatattttggggcttctctttgcaattagattgagcccatgtgactactggacaatagattgtaaaaggaagagacatttttggaaccacttccagactgagatggttaaaagctgttgtgccctcctccttcacttctgtttctgttgcattgttcttggaaactaggtattacagatggttgtaaattacaaaaagtagggcagtagaattcttattggacttgacatgaataagaaataaatacccttttataaatgaaaaaaaaaaaaaaaaaaaaaaaaaaaaaaaaaaaaaaaaaaaaaaaaaaaaaaaaaaaaaaaaaaaaaaaaaaaaaaaaaaaaaaaaaaaaaaaaaaaaaactttggggggggccccggacccaaattggccttatagggagtcgttttacatttaatgggccgtcgtttaaaaacgtcggaattggaaaaaccttggggttaccaaattaaatcgctttgaagaaaatccccttttggcaagttggcgtaataccaaaaaggcccgaaccaatggcctttccaaaaatttgccaaccctgaatggcaaagggcaaattgaaagcgtaaatttttggtaaaaattcgcgtaaaattttggtaaaataagttaatttttaaaccaatgggccgaattgggaaaaatcctttttaaatcaaagaattgacccgaaatgggtttgatggttgttccatttgggaacaagagtccccttttaaggacactgacttcaaacgaaaaggccaaaaaaccgtttttaagggcaagggcccaatacgggaccctttaccctaataagattttttggggccaagtcgccaaaagcctaaattggacccctaagggaaccccctttt

SEQ ID NO: 114890 - DNA, 1392 bp, Homo sapiens
gatcataactcaggaaaagacagatattggtcaatatttccttccaaaagtggagatgataaagtagaagtatagaaatcctaaagtccagaccttccttgttcagccaggttttgctccttctccacacacctttgttcttttctccaacttccaaggaatctcacaaaggaagtgggaaacaatgaacctattacttctttcctgctttaaatccaattccacgtagtcacggagactgttgggcaggatctctggcttggtggaaagtggggcgtgctgcctaaagtgatagtttggaggccttctctgtgccgtcgctatgggaatgccagctatatgttggctgggtgcggggcccagtcgccaggccacactgcacgcctccacatcctcagagggcccgggacttgggtcctggccccgccccctgcggacccggcactctgtcagttccgtccccggtcctgggaaccgctctttatcccactctgcgtgtctgccggaacctggctgggaagcgctacttgctgccctgccagcccgggtgagggcggagccaggcctccagccgcgaggactggagtcgcgggaggtggagccccagtccggaagccggggatccgcggccatgacggtgccggtccgcggcttctcgctgctccgcggccgccttggccgagcgccggcgttgggcagaagcacagcaccctccgtaagggcaccgggagagcccgggagtgcgttccggggctttcggagcagcggtgtgaggaccagcagagagaagagattccatcttccagaggttgccactgtctgcctccccacttgtccccatccacagtcatcttttttatatatataatgacacattagttgtctagttcttcatagttaatgtggtttaagtctgacatcttttcttttgccatgaaatttacaccttagtgttattctcactgaaaattgcctttgagtttgataaactcttatcccagtgatattgactgttttaaattaacagatttatcaccatttctgagctgtgtagggccttaattgaaaaagtatctttgattattttttcacattttggccacatgcctataataatggaatatttacagtactttttagtggagaacttttttaagtagaatttcaataattaatgtttgatggagtttggaagttaccgtattttgaagtatcgtttaacattcttctctcaatgagttttcctttaaaatttgcagtgaatttgttttcctgtttatgcatgagaatttaggtcttattaattgggggaaattaatgttaaagtaataaataagcccttgttgcagcttattgtttcttgaaatgaattaactatccaggcaaaaggtt

SEQ ID NO: 114891 - DNA, 869 bp, Homo sapiens
gatcataactcaggaaaagacagatattggtcaatatttccttccaaaagtggagatgataaagtagaagtatagaaatcctaaagtccagaccttccttgttcagccaggttttgctccttctccacacacctttgttcttttctccaacttccaaggaatctcacaaaggaagtgggaaacaatgaacctattacttctttcctgctttaaatccaattccacgtagtcacggagactgttgggcaggatctctggcttggtggaaagtggggcgtgctgcctaaagtgatagtttggaggccttctctgtgccgtcgctatgggaatgccagctatatgttggctgggtgcggggcccagtcgccaggccacactgcacgcctccacatcctcagagggcccgggacttgggtcctggccccgccccctgcggacccggcactctgtcagttccgtccccggtcctgggaaccgctctttatcccactctgcgtgtctgccggaacctggctgggaagcgctacttgctgccctgccagcccgggtgagggcggagccaggcctccagccgcgaggactggagtcgcgggaggtggagccccagtccggaagccggggatccgcggccatgacggtgccggtccgcggcttctcgctgctccgcggccgccttggccgagcgccggcgttgggcagaagcacagcaccctccgtaagggcaccgggagagcccgggagtgcgttccggggctttcggagcagcggtgtgaggtacgagggctgcgggcgccgggtgcggagccgctggcggtgggaggtcggcgggggcgcgggcggcgctcgcgcgcgtggggcccaaggctcgt

SEQ ID NO: 114892 - DNA, 2961 bp, Homo sapiens
gatcataactcaggaaaagacagatattggtcaatatttccttccaaaagtggagatgataaagtagaagtatagaaatcctaaagtccagaccttccttgttcagccaggttttgctccttctccacacacctttgttcttttctccaacttccaaggaatctcacaaaggaagtgggaaacaatgaacctattacttctttcctgctttaaatccaattccacgtagtcacggagactgttgggcaggatctctggcttggtggaaagtggggcgtgctgcctaaagtgatagtttggaggccttctctgtgccgtcgctatgggaatgccagctatatgttggctgggtgcggggcccagtcgccaggccacactgcacgcctccacatcctcagagggcccgggacttgggtcctggccccgccccctgcggacccggcactctgtcagttccgtccccggtcctgggaaccgctctttatcccactctgcgtgtctgccggaacctggctgggaagcgctacttgctgccctgccagcccgggtgagggcggagccaggcctccagccgcgaggactggagtcgcgggaggtggagccccagtccggaagccggggatccgcggccatgacggtgccggtccgcggcttctcgctgctccgcggccgccttggccgagcgccggcgttgggcagaagcacagcaccctccgtaagggcaccgggagagcccgggagtgcgttccggggctttcggagcagcggtgtgagacatgaagccattattatatcaggaaccgaaatggccaagcatatccagaaagaaatacagcgaggtgtggaatcatgggtttcccttggaaacagaagacctcacctcagtataattttagtgggagataacccagcaagccatacatatgtcaggaataagataagagctgcctctgctgtaggtatttgtagtgagctcattctaaaacctaaggatgtttctcaggaagaacttttggacgtaactgatcaattgaatatggacccaagagtcagcggtatattagttcagttaccactaccagaccacgttgatgagcgaacaatatgcaatggaattgccccagaaaaagatgtagatggatttcatattatcaatattggaagattgtgccttgatcagcattctctcatacctgccactgccagtgctgtttgggaaataataaaaagaacaggaattcaaacatttggaaaaaatgtggttgtggctggaagatccaagaacgtagggatgcctattgccatgcttttacacactgatggagagcatgaacggccaggaggtgatgcaactgtgacaatagctcacagatacacccccaaagagcaactgaagattcatacgcagctggcagatattatcatagttgctgcaggtattccaaagttgattacgtctgatatggttaaagaaggtgctgctgtaattgatgtgggtatcaactatgtccacgatccagtgacaggaaagacaaaattagttggagatgtggacttcgaagctgttaaaaagaaagctggctttatcactccagttccaggaggtgtgggacccatgacagtggcaatgcttctgaagaacacccttctggcagctaaaaaaatcatttactagatcacatgaaaggataaagcaaactgaagtcatgctatttgtttatttgacaaagggtaaaacctttatattttactacaaagctatttatttctacatggtatttattttttcatgggtgaaatcattgtgaatcaattgattcacatagttttatgcatttcctgctaatttattttgagttttaagaaaacaaccaaaacaattccaatgaaaattttagtaacaattgtttattttgagggtatttgttcataacattaaaacaataaagggctcataataaataaatatatttttgacacaattaaatattacatagagtatgtttacaacaaatatcctgtcagccaaatggttacccatataaaatgtaatttaggttttgctacttgcatgctaacatttttaatgtattttatgatctatgtcatatattaaaaaagagcttgcttactacaagaaaaatattgaaatattgaaaatattgaaaatattattattgaaaataaaatcttgatctcaactatcccccaaatgcatcctataagtccatcctaatgagaaatgatgttctatttaaggaaaggaaaatattccgggaaggcaaaaaatgcagtgctgtttggaagtgtaatgattttatcacatggtgaatgactactaagagtaatgattatatcacattgtgaatgactacttgccacagtaaaaatacatgaagaatgtgttaggtttaaacgtcgtttctttcttctaaaaaatatttggttagtaccttcactgagcaatagtggaaaaataaaaaaataagtaaacagaaaaaactaaagttgtattttcccacaaatatagtatgaatgaggtcatattaaagaacagcaactgttaatgtttgttcacaaattcagaaatctaataggaaaacatgatactttcaatgtgccaaaactaaaccttagtatacaactaaaaatctcctgccttcttgcctacctgtcttccctcttctgttacagaatttgttcctcaaagtagatgcaatgtttctaacacaatttaaattaggaaatatatatgaatgtcgttgaagtctattttgagactgctaaagctattaattgatactgtgtttttatgcccaaatcccagtatgtttatgtaccaataatgactcttacccagcgcatgtctttatcagtgtgtactcgtgacgatttgtgtgaaaatagacttgatgtttataattaataccattacaactgtataataaaagcaatttgaag

SEQ ID NO: 114893 - DNA, 2683 bp, Homo sapiens
gcacaacaagtccccagggacagctaagcactccagtgtctagggactgtgggaaactggaaagaaacaatccagtgtaaatatgacttctaagctggctgtgctctactgctttcttggcagttgcatgctttctgtagcactgtgtgaagtgtgaagcttattcatgaagagacctctgcctgaacatacagcaaatttaagaaggttgtgcagatagtctgaaggaggctggtgcagcatggaaacacggatttgagctcattactccaattttcacgctgagtttggaagggtcctagaggacatgaagccattattatatcaggaaccgaaatggccaagcatatccagaaagaaatacagcgaggtgtggaatcatgggtttcccttggaaacagaagacctcacctcagtataattttagtgggagataacccagcaagccatacatatgtcaggaataagataagagctgcctctgctgtaggtatttgtagtgagctcattctaaaacctaaggatgtttctcaggaagaacttttggacgtaactgatcaattgaatatggacccaagagtcagcggtatattagttcagttaccactaccagaagctgtgcaactttgttcaggatttgaaatgctcgggatataagagtacacaggcttgctgtttgtccagtagctgaccctaaagctaaggagaaataaaaatgaccgaatgcagatgctttcctactcctgtcctgaccgtgcagagattcttatcaataagtggtcactttgtcgagttgtctagtttgaagcctttgaggattagcaccttccagtttattcaagggaattggacaaagaaatgagaatgaactataggattaaaggataaaactaaagaaggtgagttagaagagtttgagttcatggcgcagatttaacataaaataatcgaataattagtaggcataaaaaggtggatatcgacctaactagtaagcatggagatatgtgtatttgtctaaaactcatttcttcatttggggaaaaaaagtattgctataattacttttcatgagaaattatcaaatttatgtatccagaacactgattattattaaaatgtttgaccagagtgggaatttttttttatcattctgaactctttcctattttattctgtttaattcaagatggtttctaaattttaattttactttgttttagaatttatatttcctttctctatgggagaaaccccagttctgtgtttgagtgtatagaataattccacatagggagaattgcagtaaacattataaccctgtaatctgccttgtatctgttagacaattagtgaatgctgttgaagaaatgagtgaatcctgtagtttttcagcaccacttttttgtgtgttaagtctcatccttctgcatatgtttctacatgtaagagattagtgcataaacaatttaactgatcaagattggtgaagatcttgtgcccgcacccatgaaagttttctatagctatatagtatctattgtatacaggccacgttaggaatgcatattttataacttgaataatgtgttagcctcttacctcttcactatattggttacctttcaaacatacaagggctgagttctttctccctttagatcttagcgtaaatgtcactgctttggggaagcttttccagcccatgcccctaagttgttttcattctgttgttctctatttggaacctcctttttttctgtgacagagacaatttaagttctccaaatatccacatgtcctcttatattttggggcttctctttgcaattagattgagcccatgtgactactggacaatagattgtaaaaggaagagacatttttggaaccacttccagactgagatggttaaaagctgttgtgccctcctccttcacttctgtttctgttgcattgttcttggaaactaggtattacagatggttgtaaattacaaaaagtagggcagtagaattcttattggacttgacatgaataagaaataaatacccttttataaatgaaaaaaaaaaaaaaaaaaaaaaaaaaaaaaaaaaaaaaaaaaaaaaaaaaaaaaaaaaaaaaaaaaaaaaaaaaaaaaaaaaaaaaaaaaaaaaaaaaaaaactttggggggggccccggacccaaattggccttatagggagtcgttttacatttaatgggccgtcgtttaaaaacgtcggaattggaaaaaccttggggttaccaaattaaatcgctttgaagaaaatccccttttggcaagttggcgtaataccaaaaaggcccgaaccaatggcctttccaaaaatttgccaaccctgaatggcaaagggcaaattgaaagcgtaaatttttggtaaaaattcgcgtaaaattttggtaaaataagttaatttttaaaccaatgggccgaattgggaaaaatcctttttaaatcaaagaattgacccgaaatgggtttgatggttgttccatttgggaacaagagtccccttttaaggacactgacttcaaacgaaaaggccaaaaaaccgtttttaagggcaagggcccaatacgggaccctttaccctaataagattttttggggccaagtcgccaaaagcctaaattggacccctaagggaaccccctttt

SEQ ID NO: 114894 - DNA, 335 bp, Homo sapiens
cagccatcacatctgcattccagccagaagccttgcttttcccatgtgtacaatggggattacatctaccttaggtcatcaaaaataggagatgggatagaagtgtctagtgtggagcctgctgtgattatggccagtaccccctagaggtgcttggtaagaccaaggttcccctttttttttttctgaggcggctgcaccctggggacctacccagagggctttggaggcacatgatggcctgcggacctcaagcgggctcctctttcctggggcgccatcccccatgctctgagctcccgctctccccagcctctcaggccccatgggcaggg

SEQ ID NO: 114895 - DNA, 4735 bp, Homo sapiens
  misc_feature (140)..(140): n is a, c, g, or t
gtgggatttggggggcgctggtgggcacccctggatctggcggctgcggcctcgcggggggaggctgatcggtgacaggggcagggggctattttgggggtagaaggcagtgagagcgtgagggggaggggggtccccancgcccaagccggagccagagacgcggagcccgcgcgagcgtcggagacagggctccagggctccgaagcgacagagccgggccccggccgctgccaggggccccgcccggcccccccactccaccccacgtccctcctgcagcccagctccgcccgcagccgccgcggaccaggcaggcccgcaccgccgccatgatgtgcgaggtgatgcccaccatcagcgaggatggccggcggggctcggcgctgggcccggacgaggcgggcggggagctggagcgcctcatggtcacgatgctcacggagcgcgagcgcctgctggagacgctgcgcgaggcacaggacgggttggctacagcgcagctgcggctgcgcgagctcggccacgagaaggactcgctgcagcgccagctcagcatcgcgctgccccaggagtttgcagctctgacgaaggagctgaacttatgtcgggagcagctgctggagagggaggaagagattgcagagctgaaggcggaacggaacaacacgcggctgctcctggaacacctggagtgcctggtgtccaggcacgagaggtcactgcgcatgaccgtggtgaagcgccaggcccagtccccgggtggggtctcctcggaggtagaagtgctcaaagctctaaagtctctcttcgagcaccacaaggccctggatgagaaggtccgggagcggctgcggatggcgctggagcgcgtggcagtgctcgaggaggagctggaactgagcaatcaggagactctgaaccttcgagaacagctgtctaggcggcggtcagggctggaagagccgggcaaggatggggatgggcagactcttgccaatggcctgggtcctggcggggattccaaccggcgcacagcagagctggaggaggccctggagcggcagcgcgccgaggtgtgccagctgcgggagcgcctggcggtgctgtgccgtcagatgagccagctggaggaggagttgggcaccgcgcaccgtgagctgggcaaggcagaggaagccaactccaagctgcagcgcgacctcaaggaggcgctggcgcagcgggaagatatggaggagcggattacaacactggagaagcgctacctgagcgcccagcgggaggccacgtctctgcacgacgccaacgacaaactggagaacgagttagctagcaaggagtcgttgtatcggcagagtgaagagaagagccgtcagctggccgagtggttggacgacgccaagcagaagctgcagcagacgctgcagaaagcggagaccttgcccgagatagaggcgcagctggcgcagcgcgtggcggcgctcaacaaggccgaggaacgtcatgggaattttgaggagcggcttcggcagctggaggcccagctggaagagaagaatcaagagctgcagcgggcccggcagcgggagaagatgaacgatgaccacaataagcggctgtccgagacggtggacaagctgctgagcgagtccaacgagcgcttacagcttcacctcaaggagcgcatgggggcgctggaggagaagaactccctgagcgaggagatagccaacatgaagaagcttcaggatgagttgctgctaaacaaggagcagctcttggccgaaatggagcggatgcagatggagatcgaccagctgcgggggaggccaccatcctcctactccaggtctctccctggcagtgccctggagctccgttactctcaggcacccactttaccttctggtgcccacctggatccctatgtggctggcagtggtcgggcaggcaagaggggccgctggtcaggggtcaaggaggagccctccaaggattgggagcggtctgcccctgcgggctccataccacccccattccctggggaactggacggctccgatgaggaggaggcagaggggatgtttggggccgagctgctgtcccccagtgggcaggctgacgtgcagacgctggccatcatgcttcaggagcagctggaggccatcaacaaggagatcaagctgatccaagaggagaaggagacaacagaacagagggcagaggagctggagagtcgggtgtccagctctggcttggactcgttgggccgctaccgcagcagctgctccctgcccccctccctcaccacctctacccttgccagcccctcccctcccagctctggccactcaacaccccgcctggcaccccctagccctgcccgtgagggcaccgacaaggctaatcatgtccctaaggaggaagctggagctccacgaggggaggggccggccatcccaggagacaccccaccacccactccccgctctgcccgtcttgagagaatgacccaggccttggcactgcaggcggggtccctggaagatgggggacccccacggggaagtgagggcaccccagattctctgcacaaagcccccaagaagaagagcatcaagtcatccataggccgtctctttggcaagaaagagaagggacgaatgggacccccaggccgggacagctcttctctggctggaacaccctcagatgagacactggccactgaccctctggggctagccaagctgacaggcccaggagacaaggaccgaaggaacaagaggaagcatgaactcctggaggaggcctgccgccagggcctaccttttgctgcctgggacgggcccaccgtggtgtcctggctggagctgtgggtgggcatgcctgcctggtatgtggccgcctgccgggccaatgtcaagagcggtgccatcatggccaacctgtcagacacggagatccagcgcgagatcggcatcagcaacccgctgcaccgactcaagctacgcctcgccatccaggagatggtctcgctcacctcgccctcagcccccgcctcctcccgcacttccacaggaaacgtgtggatgacacacgaggagatggagtcccttacggccacgaccaagcccgagaccaaggagatcagctgggagcagatcctggcatatggcgacatgaaccacgagtgggtggggaacgactggctgcccagcctggggctgccccaataccgcagctacttcatggagtcgctggtggacgctcgaatgttagatcaccttaacaagaaggagctccggggccaactcaagatggtggacagctttcacagggtgagtctacattatgggattatgtgcctgaaacggctcaactatgaccggaaggacctggagcggaggcgggaagaaagtcagacccagatccgagacgtgatggtgtggtccaatgagcgggtcatgggttgggtgtccgggctgggcctgaaggaatttgccacgaacctcacggagagcggggtacacggggcactgctcgccctggacgagaccttcgactactccgacctggccttgctcctgcagatccccacgcagaatgcacaggcccggcagcttctggagaaggaattcagcaaccttatctccttaggcacagacaggcggctggacgaggacagcgccaagtctttcagccgctccccatcctggcggaagatgttccgggagaaggacctccgaggcgtaactcccgactcagctgagatgttgccccccaactttcgttcggctgcagcgggagccctgggctctccggggctccctctccgcaagctgcagccagaaggccagacttctgggagttcccgggcagacggcgtttcggtccggacctattcctgctagtgcaggcctccaggtgacctcactcggacggaagaatcttcccgaggctgggctgttccctctcctgcccggactgtggcctcgccggggagagcgggcgggggagctcgcgccgaggactggaccatctgtacagaccagcgggagtgcgcgcgcccgcctcgcacagggccggggcctggaccaaaccacatgaactggactgagagggggaagaagcggggaggaagaaatcccgccccaaacgtccgctttccttttctctactttgtaatttattgatcagtttctgttgggagacgggtgtcctttacccgcgggaagggggcggggcttccctcccgggccgcatgcggggagaggctgctccctcccctttttcctgcccagtcgcggggcccaagtcttccttcttcgtccgaaaggaggggaggggggactcgctgctacaagcctcgccccctgtgccactcagctccgccccgccgcgtccggtcgccggtcccccgggtcatctgcgggcggggtcccctctccctcccccgtgtctcgtgtccccggggcctcaccgccccccgtgctgtggccgtgtccgtgccccgggggtagggggcgcagaatggcgcttccccttctcctctggctccggggtttgcatgggagaatcctctttccacgatgccgctgggcgacgtggcgtgggggcagggggacggtgggggagccctcgcccccgactctcggtcggcctccccgccccaggcgtcactcagtgatcacgggtaaagagaactgtttcaaaaagcttacttgttgac

SEQ ID NO: 114896 - DNA, 1011 bp, Homo sapiens
ggggaagggagggaaacccatgtggagcccggcgatcgttgtgacatcgggaagggaagtccaaagggaggaatcctggagaggaacagggaggagggtgctccaggctgaaccgctgctcgctctccctccaggccagacttctgggagttcccgggcagacggcgtttcggtccggacctattcctgctagtgcaggcctccaggtgacctcactcggacggaagaatcttcccgaggctgggctgttccctctcctgcccggactgtggcctcgccggggagagcgggcgggggagctcgcgccgaggactggaccatctgtacagaccagcgggagtgcgcgcgcccgcctcgcacagggccggggcctggaccaaaccacatgaactggactgagagggggaagaagcggggaggaagaaatcccgccccaaacgtccgctttccttttctctactttgtaatttattgatcagtttctgttgggagacgggtgtcctttacccgcgggaagggggcggggcttccctcccgggccgcatgcggggagaggctgctccctcccctttttcctgcccagtcgcggggcccaagtcttccttcttcgtccgaaaggaggggaggggggactcgctgctacaagcctcgccccctgtgccactcagctccgccccgccgcgtccggtcgccggtcccccgggtcatctgcgggcggggtcccctctccctcccccgtgtctcgtgtccccggggcctcaccgccccccgtgctgtggccgtgtccgtgccccgggggtagggggcgcagaatggcgcttccccttctcctctggctccggggtttgcatgggagaatcctctttccacgatgccgctgggcgacgtggcgtgggggcagggggacggtgggggagccctcgcccccgactctcggtcggcctccccgccccaggcgtcactcagtgatcacgggtaaagagaactgtttcaaaaagcttacttgttgac

SEQ ID NO: 114897 - DNA, 426 bp, Homo sapiens
taggggactggaaagctcatccgtgactccacttcccctgctgctcagggtgagtctacattatgggattatgtgccactcagctccgccccgccgcgtccggtcgccggtcccccgggtcatctgcgggcggggtcccctctccctcccccgtgtctcgtgtccccggggcctcaccgccccccgtgctgtggccgtgtccgtgccccgggggtagggggcgcagaatggcgcttccccttctcctctggctccggggtttgcatgggagaatcctctttccacgatgccgctgggcgacgtggcgtgggggcagggggacggtgggggagccctcgcccccgactctcggtcggcctccccgccccaggcgtcactcagtgatcacgggtaaagagaactgtttcaaaaagcttacttgttgac

SEQ ID NO: 114898 - DNA, 4364 bp, Homo sapiens
tgggggcggggcctcgtggtgttgaagtggggggcggggcctctcagtgttgcagcgtgacctatttttttcccccatctcgcctttctgtcttctcctcttccctgctcccacttcctggctggtctcccactctggtgccactccttcctccctgtctccataacttttctcttttctgtaccaccggttccttgaccccgacctcctctcttttcctgacctgtctcggtgctcctttatatggctccatcttttcctccatgtgtccgccctacctgtcaccctttttctcacatctgccccttttcccttgcctcttttcattgaccccatgccgtgtgcttgcagctgctcctggaacacctggagtgcctggtgtccaggcacgagaggtcactgcgcatgaccgtggtgaagcgccaggcccagtccccgggtggggtctcctcggaggtagaagtgctcaaagctctaaagtctctcttcgagcaccacaaggccctggatgagaaggtccgggagcggctgcggatggcgctggagcgcgtggcagtgctcgaggaggagctggaactgagcaatcaggagactctgaaccttcgagaacagctgtctaggcggcggtcagggctggaagagccgggcaaggatggggatgggcagactcttgccaatggcctgggtcctggcggggattccaaccggcgcacagcagagctggaggaggccctggagcggcagcgcgccgaggtgtgccagctgcgggagcgcctggcggtgctgtgccgtcagatgagccagctggaggaggagttgggcaccgcgcaccgtgagctgggcaaggcagaggaagccaactccaagctgcagcgcgacctcaaggaggcgctggcgcagcgggaagatatggaggagcggattacaacactggagaagcgctacctgagcgcccagcgggaggccacgtctctgcacgacgccaacgacaaactggagaacgagttagctagcaaggagtcgttgtatcggcagagtgaagagaagagccgtcagctggccgagtggttggacgacgccaagcagaagctgcagcagacgctgcagaaagcggagaccttgcccgagatagaggcgcagctggcgcagcgcgtggcggcgctcaacaaggccgaggaacgtcatgggaattttgaggagcggcttcggcagctggaggcccagctggaagagaagaatcaagagctgcagcgggcccggcagcgggagaagatgaacgatgaccacaataagcggctgtccgagacggtggacaagctgctgagcgagtccaacgagcgcttacagcttcacctcaaggagcgcatgggggcgctggaggagaagaactccctgagcgaggagatagccaacatgaagaagcttcaggatgagttgctgctaaacaaggagcagctcttggccgaaatggagcggatgcagatggagatcgaccagctgcgggggaggccaccatcctcctactccaggtctctccctggcagtgccctggagctccgttactctcaggcacccactttaccttctggtgcccacctggatccctatgtggctggcagtggtcgggcaggcaagaggggccgctggtcaggggtcaaggaggagccctccaaggattgggagcggtctgcccctgcgggctccataccacccccattccctggggaactggacggctccgatgaggaggaggcagaggggatgtttggggccgagctgctgtcccccagtgggcaggctgacgtgcagacgctggccatcatgcttcaggagcagctggaggccatcaacaaggagatcaagctgatccaagaggagaaggagacaacagaacagagggcagaggagctggagagtcgggtgtccagctctggcttggactcgttgggccgctaccgcagcagctgctccctgcccccctccctcaccacctctacccttgccagcccctcccctcccagctctggccactcaacaccccgcctggcaccccctagccctgcccgtgagggcaccgacaaggctaatcatgtccctaaggaggaagctggagctccacgaggggaggggccggccatcccaggagacaccccaccacccactccccgctctgcccgtcttgagagaatgacccaggccttggcactgcaggcggggtccctggaagatgggggacccccacggggaagtgagggcaccccagattctctgcacaaagcccccaagaagaagagcatcaagtcatccataggccgtctctttggcaagaaagagaagggacgaatgggacccccaggccgggacagctcttctctggctggaacaccctcagatgagacactggccactgaccctctggggctagccaagctgacaggcccaggagacaaggaccgaaggaacaagaggaagcatgaactcctggaggaggcctgccgccagggcctaccttttgctgcctgggacgggcccaccgtggtgtcctggctggagctgtgggtgggcatgcctgcctggtatgtggccgcctgccgggccaatgtcaagagcggtgccatcatggccaacctgtcagacacggagatccagcgcgagatcggcatcagcaacccgctgcaccgactcaagctacgcctcgccatccaggagatggtctcgctcacctcgccctcagcccccgcctcctcccgcacttccacaggaaacgtgtggatgacacacgaggagatggagtcccttacggccacgaccaagcccatcctggcatatggcgacatgaaccacgagtgggtggggaacgactggctgcccagcctggggctgccccaataccgcagctacttcatggagtcgctggtggacgctcgaatgttagatcaccttaacaagaaggagctccggggccaactcaagatggtggacagctttcacagggtgagtctacattatgggattatgtgcctgaaacggctcaactatgaccggaaggacctggagcggaggcgggaagaaagtcagacccagatccgagacgtgatggtgtggtccaatgagcgggtcatgggttgggtgtccgggctgggcctgaaggaatttgccacgaacctcacggagagcggggtacacggggcactgctcgccctggacgagaccttcgactactccgacctggccttgctcctgcagatccccacgcagaatgcacaggcccggcagcttctggagaaggaattcagcaaccttatctccttaggcacagacaggcggctggacgaggacagcgccaagtctttcagccgctccccatcctggcggaagatgttccgggagaaggacctccgaggcgtaactcccgactcagctgagatgttgccccccaactttcgttcggctgcagcgggagccctgggctctccggggctccctctccgcaagctgcagccagaaggccagacttctgggagttcccgggcagacggcgtttcggtccggacctattcctgctagtgcaggcctccagaatcttcccgaggctgggctgttccctctcctgcccggactgtggcctcgccggggagagcgggcgggggagctcgcgccgaggactggaccatctgtacagaccagcgggagtgcgcgcgcccgcctcgcacagggccggggcctggaccaaaccacatgaactggactgagagggggaagaagcggggaggaagaaatcccgccccaaacgtccgctttccttttctctactttgtaatttattgatcagtttctgttgggagacgggtgtcctttacccgcgggaagggggcggggcttccctcccgggccgcatgcggggagaggctgctccctcccctttttcctgcccagtcgcggggcccaagtcttccttcttcgtccgaaaggaggggaggggggactcgctgctacaagcctcgccccctgtgccactcagctccgccccgccgcgtccggtcgccggtcccccgggtcatctgcgggcggggtcccctctccctcccccgtgtctcgtgtccccggggcctcaccgccccccgtgctgtggccgtgtccgtgccccgggggtagggggcgcagaatggcgcttccccttctcctctggctccggggtttgcatgggagaatcctctttccacgatgccgctgggcgacgtggcgtgggggcagggggacggtgggggagccctcgcccccgactctcggtcggcctccccgccccaggcgtcactcagtgatcacgggtaaagagaactgtttcaaaaagcttacttgttgac

SEQ ID NO: 114899 - DNA, 4469 bp, Homo sapiens
tgggggcggggcctcgtggtgttgaagtggggggcggggcctctcagtgttgcagcgtgacctatttttttcccccatctcgcctttctgtcttctcctcttccctgctcccacttcctggctggtctcccactctggtgccactccttcctccctgtctccataacttttctcttttctgtaccaccggttccttgaccccgacctcctctcttttcctgacctgtctcggtgctcctttatatggctccatcttttcctccatgtgtccgccctacctgtcaccctttttctcacatctgccccttttcccttgcctcttttcattgaccccatgccgtgtgcttgcagctgctcctggaacacctggagtgcctggtgtccaggcacgagaggtcactgcgcatgaccgtggtgaagcgccaggcccagtccccgggtggggtctcctcggaggtagaagtgctcaaagctctaaagtctctcttcgagcaccacaaggccctggatgagaaggtccgggagcggctgcggatggcgctggagcgcgtggcagtgctcgaggaggagctggaactgagcaatcaggagactctgaaccttcgagaacagctgtctaggcggcggtcagggctggaagagccgggcaaggatggggatgggcagactcttgccaatggcctgggtcctggcggggattccaaccggcgcacagcagagctggaggaggccctggagcggcagcgcgccgaggtgtgccagctgcgggagcgcctggcggtgctgtgccgtcagatgagccagctggaggaggagttgggcaccgcgcaccgtgagctgggcaaggcagaggaagccaactccaagctgcagcgcgacctcaaggaggcgctggcgcagcgggaagatatggaggagcggattacaacactggagaagcgctacctgagcgcccagcgggaggccacgtctctgcacgacgccaacgacaaactggagaacgagttagctagcaaggagtcgttgtatcggcagagtgaagagaagagccgtcagctggccgagtggttggacgacgccaagcagaagctgcagcagacgctgcagaaagcggagaccttgcccgagatagaggcgcagctggcgcagcgcgtggcggcgctcaacaaggccgaggaacgtcatgggaattttgaggagcggcttcggcagctggaggcccagctggaagagaagaatcaagagctgcagcgggcccggcagcgggagaagatgaacgatgaccacaataagcggctgtccgagacggtggacaagctgctgagcgagtccaacgagcgcttacagcttcacctcaaggagcgcatgggggcgctggaggagaagaactccctgagcgaggagatagccaacatgaagaagcttcaggatgagttgctgctaaacaaggagcagctcttggccgaaatggagcggatgcagatggagatcgaccagctgcgggggaggccaccatcctcctactccaggtctctccctggcagtgccctggagctccgttactctcaggcacccactttaccttctggtgcccacctggatccctatgtggctggcagtggtcgggcaggcaagaggggccgctggtcaggggtcaaggaggagccctccaaggattgggagcggtctgcccctgcgggctccataccacccccattccctggggaactggacggctccgatgaggaggaggcagaggggatgtttggggccgagctgctgtcccccagtgggcaggctgacgtgcagacgctggccatcatgcttcaggagcagctggaggccatcaacaaggagatcaagctgatccaagaggagaaggagacaacagaacagagggcagaggagctggagagtcgggtgtccagctctggcttggactcgttgggccgctaccgcagcagctgctccctgcccccctccctcaccacctctacccttgccagcccctcccctcccagctctggccactcaacaccccgcctggcaccccctagccctgcccgtgagggcaccgacaaggctaatcatgtccctaaggaggaagctggagctccacgaggggaggggccggccatcccaggagacaccccaccacccactccccgctctgcccgtcttgagagaatgacccaggccttggcactgcaggcggggtccctggaagatgggggacccccacggggaagtgagggcaccccagattctctgcacaaagcccccaagaagaagagcatcaagtcatccataggccgtctctttggcaagaaagagaagggacgaatgggacccccaggccgggacagctcttctctggctggaacaccctcagatgagacactggccactgaccctctggggctagccaagctgacaggcccaggagacaaggaccgaaggaacaagaggaagcatgaactcctggaggaggcctgccgccagggcctaccttttgctgcctgggacgggcccaccgtggtgtcctggctggagctgtgggtgggcatgcctgcctggtatgtggccgcctgccgggccaatgtcaagagcggtgccatcatggccaacctgtcagacacggagatccagcgcgagatcggcatcagcaacccgctgcaccgactcaagctacgcctcgccatccaggagatggtctcgctcacctcgccctcagcccccgcctcctcccgcacttccacaggaaacgtgtggatgacacacgaggagatggagtcccttacggccacgaccaagcccatcctggcatatggcgacatgaaccacgagtgggtggggaacgactggctgcccagcctggggctgccccaataccgcagctacttcatggagtcgctggtggacgctcgaatgttagatcaccttaacaagaaggagctccggggccaactcaagatggtggacagctttcacagggtgagtctacattatgggattatgtgcctgaaacggctcaactatgaccggaaggacctggagcggaggcgggaagaaagtcagacccagatccgagacgtgatggtgtggtccaatgagcgggtcatgggttgggtgtccgggctgggcctgaaggaatttgccacgaacctcacggagagcggggtacacggggcactgctcgccctggacgagaccttcgactactccgacctggccttgctcctgcagatccccacgcagaatgcacaggcccggcagcttctggagaaggaattcagcaaccttatctccttaggcacagacaggcggctggacgaggacagcgccaagtctttcagccgctccccatcctggcggaagatgttccgggagaaggacctccgaggcgtaactcccgactcagctgagatgttgccccccaactttcgttcggctgcagcgggagccctgggctctccggggctccctctccgcaagctgcagccagaaggccagacttctgggagttcccgggcagacggcgtttcggtccggacctattcctgctagtgcaggcctccaggtgaggaccgtgctgggcgaccttgggggtgcggggcggcacggtggatcttcactgctccacgcgctgcccggcgtcatgcaggtgacctcactcggacggaagaatcttcccgaggctgggctgttccctctcctgcccggactgtggcctcgccggggagagcgggcgggggagctcgcgccgaggactggaccatctgtacagaccagcgggagtgcgcgcgcccgcctcgcacagggccggggcctggaccaaaccacatgaactggactgagagggggaagaagcggggaggaagaaatcccgccccaaacgtccgctttccttttctctactttgtaatttattgatcagtttctgttgggagacgggtgtcctttacccgcgggaagggggcggggcttccctcccgggccgcatgcggggagaggctgctccctcccctttttcctgcccagtcgcggggcccaagtcttccttcttcgtccgaaaggaggggaggggggactcgctgctacaagcctcgccccctgtgccactcagctccgccccgccgcgtccggtcgccggtcccccgggtcatctgcgggcggggtcccctctccctcccccgtgtctcgtgtccccggggcctcaccgccccccgtgctgtggccgtgtccgtgccccgggggtagggggcgcagaatggcgcttccccttctcctctggctccggggtttgcatgggagaatcctctttccacgatgccgctgggcgacgtggcgtgggggcagggggacggtgggggagccctcgcccccgactctcggtcggcctccccgccccaggcgtcactcagtgatcacgggtaaagagaactgtttcaaaaagcttacttgttgac

SEQ ID NO: 114900 - DNA, 4288 bp, Homo sapiens
tgggggcggggcctcgtggtgttgaagtggggggcggggcctctcagtgttgcagcgtgacctatttttttcccccatctcgcctttctgtcttctcctcttccctgctcccacttcctggctggtctcccactctggtgccactccttcctccctgtctccataacttttctcttttctgtaccaccggttccttgaccccgacctcctctcttttcctgacctgtctcggtgctcctttatatggctccatcttttcctccatgtgtccgccctacctgtcaccctttttctcacatctgccccttttcccttgcctcttttcattgaccccatgccgtgtgcttgcagctgctcctggaacacctggagtgcctggtgtccaggcacgagaggtcactgcgcatgaccgtggtgaagcgccaggcccagtccccgggtggggtctcctcggaggtagaagtgctcaaagctctaaagtctctcttcgagcaccacaaggccctggatgagaaggtccgggagcggctgcggatggcgctggagcgcgtggcagtgctcgaggaggagctggaactgagcaatcaggagactctgaaccttcgagaacagctgtctaggcggcggtcagggctggaagagccgggcaaggatggggatgggcagactcttgccaatggcctgggtcctggcggggattccaaccggcgcacagcagagctggaggaggccctggagcggcagcgcgccgaggtgtgccagctgcgggagcgcctggcggtgctgtgccgtcagatgagccagctggaggaggagttgggcaccgcgcaccgtgagctgggcaaggcagaggaagccaactccaagctgcagcgcgacctcaaggaggcgctggcgcagcgggaagatatggaggagcggattacaacactggagaagcgctacctgagcgcccagcgggaggccacgtctctgcacgacgccaacgacaaactggagaacgagttagctagcaaggagtcgttgtatcggcagagtgaagagaagagccgtcagctggccgagtggttggacgacgccaagcagaagctgcagcagacgctgcagaaagcggagaccttgcccgagatagaggcgcagctggcgcagcgcgtggcggcgctcaacaaggccgaggaacgtcatgggaattttgaggagcggcttcggcagctggaggcccagctggaagagaagaatcaagagctgcagcgggcccggcagcgggagaagatgaacgatgaccacaataagcggctgtccgagacggtggacaagctgctgagcgagtccaacgagcgcttacagcttcacctcaaggagcgcatgggggcgctggaggagaagaactccctgagcgaggagatagccaacatgaagaagcttcaggatgagttgctgctaaacaaggagcagctcttggccgaaatggagcggatgcagatggagatcgaccagctgcgggggaggccaccatcctcctactccaggtctctccctggcagtgccctggagctccgttactctcaggcacccactttaccttctggtgcccacctggatccctatgtggctggcagtggtcgggcaggcaagaggggccgctggtcaggggtcaaggaggagccctccaaggattgggagcggtctgcccctgcgggctccataccacccccattccctggggaactggacggctccgatgaggaggaggcagaggggatgtttggggccgagctgctgtcccccagtgggcaggctgacgtgcagacgctggccatcatgcttcaggagcagctggaggccatcaacaaggagatcaagctgatccaagaggagaaggagacaacagaacagagggcagaggagctggagagtcgggtgtccagctctggcttggactcgttgggccgctaccgcagcagctgctccctgcccccctccctcaccacctctacccttgccagcccctcccctcccagctctggccactcaacaccccgcctggcaccccctagccctgcccgtgagggcaccgacaaggctaatcatgtccctaaggaggaagctggagctccacgaggggaggggccggccatcccaggagacaccccaccacccactccccgctctgcccgtcttgagagaatgacccaggccttggcactgcaggcggggtccctggaagatgggggacccccacggggaagtgagggcaccccagattctctgcacaaagcccccaagaagaagagcatcaagtcatccataggccgtctctttggcaagaaagagaagggacgaatgggacccccaggccgggacagctcttctctggctggaacaccctcagatgagacactggccactgaccctctggggctagccaagctgacaggcccaggagacaaggaccgaaggaacaagaggaagcatgaactcctggaggaggcctgccgccagggcctaccttttgctgcctgggacgggcccaccgtggtgtcctggctggagctgtgggtgggcatgcctgcctggtatgtggccgcctgccgggccaatgtcaagagcggtgccatcatggccaacctgtcagacacggagatccagcgcgagatcggcatcagcaacccgctgcaccgactcaagctacgcctcgccatccaggagatggtctcgctcacctcgccctcagcccccgcctcctcccgcacttccacaggaaacgtgtggatgacacacgaggagatggagtcccttacggccacgaccaagcccgagaccaaggagatcagctgggagcagatcctggcatatggcgacatgaaccacgagtgggtggggaacgactggctgcccagcctggggctgccccaataccgcagctacttcatggagtcgctggtggacgctcgaatgttagatcaccttaacaagaaggagctccggggccaactcaagatggtggacagctttcacagggtgagtctacattatgggattatgtgcctgaaacggctcaactatgaccggaaggacctggagcggaggcgggaagaaagtcagacccagatccgagacgtgatggtgtggtccaatgagcgggtcatgggttgggtgtccgggctgggcctgaaggaatttgccacgaacctcacggagagcggggtacacggggcactgctcgccctggacgagaccttcgactactccgacctggccttgctcctgcagatccccacgcagaatgcacaggcccggcagcttctggagaaggaattcagcaaccttatctccttaggcacagacaggcggctggacgaggacagcgccaagtctttcagccgctccccatcctggcggaagatgttccgggagaaggacctccgaggcgtaactcccgactcagctgagatgttgccccccaactttcgttcggctgcagcgggagccctgggctctccggggctccctctccgcaagctgcagccagaaggccagacttctgggagttcccgggcagacggcgtttcggtccggacctattcctgctagtgcaggcctccaggtgacctcactcggacggaagaatcttcccgaggctgggctgttccctctcctgcccggactgtggcctcgccggggagagcgggcgggggagctcgcgccgaggactggaccatctgtacagaccagcgggagtgcgcgcgcccgcctcgcacagggccggggcctggaccaaaccacatgaactggactgagagggggaagaagcggggaggaagaaatcccgccccaaacgtccgctttccttttctctactttgtaatttattgatcagtttctgttgggagacgggtgtcctttacccgcgggaagggggcggggcttccctcccgggccgcatgcggggagaggctgctccctcccctttttcctgcccagtcgcggggcccaagtccctctccctcccccgtgtctcgtgtccccggggcctcaccgccccccgtgctgtggccgtgtccgtgccccgggggtagggggcgcagaatggcgcttccccttctcctctggctccggggtttgcatgggagaatcctctttccacgatgccgctgggcgacgtggcgtgggggcagggggacggtgggggagccctcgcccccgactctcggtcggcctccccgccccaggcgtcactcagtgatcacgggtaaagagaactgtttcaaaaagcttacttgttgac

SEQ ID NO: 114901 - DNA, 1095 bp, Homo sapiens
ggggaagggagggaaacccatgtggagcccggcgatcgttgtgacatcgggaagggaagtccaaagggaggaatcctggagaggaacagggaggagggtgctccaggctgaaccgctgctcgctctccctccaggccagacttctgggagttcccgggcagacggcgtttcggtccggacctattcctgctagtgcaggcctccaggtgaggaccgtgctgggcgaccttgggggtgcggggcggcacggtggatcttcactgctccacgcgctgcccggcgtcatgcaggtgacctcactcggacggaagaatcttcccgaggctgggctgttccctctcctgcccggactgtggcctcgccggggagagcgggcgggggagctcgcgccgaggactggaccatctgtacagaccagcgggagtgcgcgcgcccgcctcgcacagggccggggcctggaccaaaccacatgaactggactgagagggggaagaagcggggaggaagaaatcccgccccaaacgtccgctttccttttctctactttgtaatttattgatcagtttctgttgggagacgggtgtcctttacccgcgggaagggggcggggcttccctcccgggccgcatgcggggagaggctgctccctcccctttttcctgcccagtcgcggggcccaagtcttccttcttcgtccgaaaggaggggaggggggactcgctgctacaagcctcgccccctgtgccactcagctccgccccgccgcgtccggtcgccggtcccccgggtcatctgcgggcggggtcccctctccctcccccgtgtctcgtgtccccggggcctcaccgccccccgtgctgtggccgtgtccgtgccccgggggtagggggcgcagaatggcgcttccccttctcctctggctccggggtttgcatgggagaatcctctttccacgatgccgctgggcgacgtggcgtgggggcagggggacggtgggggagccctcgcccccgactctcggtcggcctccccgccccaggcgtcactcagtgatcacgggtaaagagaactgtttcaaaaagcttacttgttgac

SEQ ID NO: 114902 - DNA, 4348 bp, Homo sapiens
tgggggcggggcctcgtggtgttgaagtggggggcggggcctctcagtgttgcagcgtgacctatttttttcccccatctcgcctttctgtcttctcctcttccctgctcccacttcctggctggtctcccactctggtgccactccttcctccctgtctccataacttttctcttttctgtaccaccggttccttgaccccgacctcctctcttttcctgacctgtctcggtgctcctttatatggctccatcttttcctccatgtgtccgccctacctgtcaccctttttctcacatctgccccttttcccttgcctcttttcattgaccccatgccgtgtgcttgcagctgctcctggaacacctggagtgcctggtgtccaggcacgagaggtcactgcgcatgaccgtggtgaagcgccaggcccagtccccgggtggggtctcctcggaggtagaagtgctcaaagctctaaagtctctcttcgagcaccacaaggccctggatgagaaggtccgggagcggctgcggatggcgctggagcgcgtggcagtgctcgaggaggagctggaactgagcaatcaggagactctgaaccttcgagaacagctgtctaggcggcggtcagggctggaagagccgggcaaggatggggatgggcagactcttgccaatggcctgggtcctggcggggattccaaccggcgcacagcagagctggaggaggccctggagcggcagcgcgccgaggtgtgccagctgcgggagcgcctggcggtgctgtgccgtcagatgagccagctggaggaggagttgggcaccgcgcaccgtgagctgggcaaggcagaggaagccaactccaagctgcagcgcgacctcaaggaggcgctggcgcagcgggaagatatggaggagcggattacaacactggagaagcgctacctgagcgcccagcgggaggccacgtctctgcacgacgccaacgacaaactggagaacgagttagctagcaaggagtcgttgtatcggcagagtgaagagaagagccgtcagctggccgagtggttggacgacgccaagcagaagctgcagcagacgctgcagaaagcggagaccttgcccgagatagaggcgcagctggcgcagcgcgtggcggcgctcaacaaggccgaggaacgtcatgggaattttgaggagcggcttcggcagctggaggcccagctggaagagaagaatcaagagctgcagcgggcccggcagcgggagaagatgaacgatgaccacaataagcggctgtccgagacggtggacaagctgctgagcgagtccaacgagcgcttacagcttcacctcaaggagcgcatgggggcgctggaggagaagaactccctgagcgaggagatagccaacatgaagaagcttcaggatgagttgctgctaaacaaggagcagctcttggccgaaatggagcggatgcagatggagatcgaccagctgcgggggaggccaccatcctcctactccaggtctctccctggcagtgccctggagctccgttactctcaggcacccactttaccttctggtgcccacctggatccctatgtggctggcagtggtcgggcaggcaagaggggccgctggtcaggggtcaaggaggagccctccaaggattgggagcggtctgcccctgcgggctccataccacccccattccctggggaactggacggctccgatgaggaggaggcagaggggatgtttggggccgagctgctgtcccccagtgggcaggctgacgtgcagacgctggccatcatgcttcaggagcagctggaggccatcaacaaggagatcaagctgatccaagaggagaaggagacaacagaacagagggcagaggagctggagagtcgggtgtccagctctggcttggactcgttgggccgctaccgcagcagctgctccctgcccccctccctcaccacctctacccttgccagcccctcccctcccagctctggccactcaacaccccgcctggcaccccctagccctgcccgtgagggcaccgacaaggctaatcatgtccctaaggaggaagctggagctccacgaggggaggggccggccatcccaggagacaccccaccacccactccccgctctgcccgtcttgagagaatgacccaggccttggcactgcaggcggggtccctggaagatgggggacccccacggggaagtgagggcaccccagattctctgcacaaagcccccaagaagaagagcatcaagtcatccataggccgtctctttggcaagaaagagaagggacgaatgggacccccaggccgggacagctcttctctggctggaacaccctcagatgagacactggccactgaccctctggggctagccaagctgacaggcccaggagacaaggaccgaaggaacaagaggaagcatgaactcctggaggaggcctgccgccagggcctaccttttgctgcctgggacgggcccaccgtggtgtcctggctggagctgtgggtgggcatgcctgcctggtatgtggccgcctgccgggccaatgtcaagagcggtgccatcatggccaacctgtcagacacggagatccagcgcgagatcggcatcagcaacccgctgcaccgactcaagctacgcctcgccatccaggagatggtctcgctcacctcgccctcagcccccgcctcctcccgcacttccacaggaaacgtgtggatgacacacgaggagatggagtcccttacggccacgaccaagcccatcctggcatatggcgacatgaaccacgagtgggtggggaacgactggctgcccagcctggggctgccccaataccgcagctacttcatggagtcgctggtggacgctcgaatgttagatcaccttaacaagaaggagctccggggccaactcaagatggtggacagctttcacagggtgagtctacattatgggattatgtgcctgaaacggctcaactatgaccggaaggacctggagcggaggcgggaagaaagtcagacccagatccgagacgtgatggtgtggtccaatgagcgggtcatgggttgggtgtccgggctgggcctgaaggaatttgccacgaacctcacggagagcggggtacacggggcactgctcgccctggacgagaccttcgactactccgacctggccttgctcctgcagatccccacgcagaatgcacaggcccggcagcttctggagaaggaattcagcaaccttatctccttaggcacagacaggcggctggacgaggacagcgccaagtctttcagccgctccccatcctggcggaagatgttccgggagaaggacctccgaggcgtaactcccgactcagctgagatgttgccccccaactttcgttcggctgcagcgggagccctgggctctccggggctccctctccgcaagctgcagccagaaggccagacttctgggagttcccgggcagacggcgtttcggtccggacctattcctgctagtgcaggcctccaggtgaggaccgtgctgggcgaccttgggggtgcggggcggcacggtggatcttcactgctccacgcgctgcccggcgtcatgcaggtgacctcactcggacggaagaatcttcccgaggctgggctgttccctctcctgcccggactgtggcctcgccggggagagcgggcgggggagctcgcgccgaggactggaccatctgtacagaccagcgggagtgcgcgcgcccgcctcgcacagggccggggcctggaccaaaccacatgaactggactgagagggggaagaagcggggaggaagaaatcccgccccaaacgtccgctttccttttctctactttgtaatttattgatcattccttcttcgtccgaaaggaggggaggggggactcgctgctacaagcctcgccccctgtgccactcagctccgccccgccgcgtccggtcgccggtcccccgggtcatctgcgggcggggtcccctctccctcccccgtgtctcgtgtccccggggcctcaccgccccccgtgctgtggccgtgtccgtgccccgggggtagggggcgcagaatggcgcttccccttctcctctggctccggggtttgcatgggagaatcctctttccacgatgccgctgggcgacgtggcgtgggggcagggggacggtgggggagccctcgcccccgactctcggtcggcctccccgccccaggcgtcactcagtgatcacgggtaaagagaactgtttcaaaaagcttacttgttgac

SEQ ID NO: 114903 - DNA, 1903 bp, Homo sapiens
tgggggcggggcctcgtggtgttgaagtggggggcggggcctctcagtgttgcagcgtgacctatttttttcccccatctcgcctttctgtcttctcctcttccctgctcccacttcctggctggtctcccactctggtgccactccttcctccctgtctccataacttttctcttttctgtaccaccggttccttgaccccgacctcctctcttttcctgacctgtctcggtgctcctttatatggctccatcttttcctccatgtgtccgccctacctgtcaccctttttctcacatctgccccttttcccttgcctcttttcattgaccccatgccgtgtgcttgcagctgctcctggaacacctggagtgcctggtgtccaggcacgagaggtcactgcgcatgaccgtggtgaagcgccaggcccagtccccgggtggggtctcctcggaggtagaagtgctcaaagctctaaagtctctcttcgagcaccacaaggccctggatgagaaggtccgggagcggctgcggatggcgctggagcgcgtggcagtgctcgaggaggagctggaactgagcaatcaggagactctgaaccttcgagaacagctgtctaggcggcggtcagggctggaagagccgggcaaggatggggatgggcagactcttgccaatggcctgggtcctggcggggattccaaccggcgcacagcagagctggaggaggccctggagcggcagcgcgccgaggtgtgccagctgcgggagcgcctggcggtgctgtgccgtcagatgagccagctggaggaggagttgggcaccgcgcaccgtgagctgggcaaggcagaggaagccaactccaagctgcagcgcgacctcaaggaggcgctggcgcagcgggaagatatggaggagcggattacaacactggagaagcgctacctgagcgcccagcgggaggccacgtctctgcacgacgccaacgacaaactggagaacgagttagctagcaaggagtcgttgtatcggcagagtgaagagaagagccgtcagctggccgagtggttggacgacgccaagcagaagctgcagcagacgctgcagaaagcggagaccttgcccgagatagaggcgcagctggcgcagcgcgtggcggcgctcaacaaggccgaggaacgtcatgggaattttgaggagcggcttcggcagctggaggcccagctggaagagaagaatcaagagctgcagcgggcccggcagcgggagaagatgaacgatgaccacaataagcggctgtccgagacggtggacaagctgctgagcgagtccaacgagcgcttacagcttcacctcaaggagcgcatgggggcgctggaggagaagaactccctgagcgaggagatagccaacatgaagaagcttcaggatgagttgctgctaaacaaggagcagctcttggccgaaatggagcggatgcagatggagatcgaccagctgcgggggaggccaccatcctcctactccaggtctctccctggcagtgccctggagctccgttactctcaggcacccactttaccttctggtgcccacctggatccctatgtggctggcagtggtcgggcaggcaagaggggccgctggtcaggggtcaaggaggagccctccaaggattgggagcggtctgcccctgcgggctccataccacccccattccctggggaactggacggctccgatgaggaggaggcagaggggatgtttggggccgagctgctgtcccccagtgggcaggctgacgtgcagacgctggccatcatgcttcaggagcagctggaggccatcaacaaggagatcaagctgatccaagaggagaagtgcgcctggtgcgggaatcctc

SEQ ID NO: 114904 - DNA, 217 bp, Homo sapiens
caactccaaagtcacattgcctggtacatggcaggtgccctataataagaatcattccttttctctgttactgcttgccccagaaagcaggagggacataaacgtgtggcccagggccttcaggaggacaccctccttcctctcccccacgcgaagccctctcccaccatccattaacactccctgcccctcagtccacaggaaacgtgtggatgac

SEQ ID NO: 114905 - DNA, 174 bp, Homo sapiens
atgcgattaacaatattatattggataaattacataaccctcccatgtgtaagtttaaaataaaagtcagaaggattttgagggttaaataagtatatattaataacagtacataaaacacactgtaaaataggctaggcacggtggctcacacctgtaatcccagcactttgg

SEQ ID NO: 114906 - DNA, 715 bp, Homo sapiens
tgcctttagtttcagctacctgggaggctgaggtgggagaatcagggaaaatcgcccgaggctatagtcgaggctgaagttagctgtaatcatgccattgctctccagcttgggtgaaagagaaagaccctttctttaaaaactcttaaaaatagaactaccgtgtgatccagcaatcctgctgctgggtactgctgctgggtatatacccaaaagaaagaaatcagtacattaaagagacatctgcactctcatgtttgttgcaccattgttcacaatagccaagatttggaagtaacctaagtgtctatctatagatgaatggataaagaaaacatggtacatatacacaatgaagtactattcagctgtaaaaaagaacgagatcctgtcattcgcagcaacatggatagaactggaatgtcattatattaagtgaaataagccaggcacagaaagacaaacatcacatgttctcacttatttgtgggagctaaaaattaaaacaattgagatagaaagtagaaggaagtttaccaggggctgggaagggtagtgggggactgtggggatgtttaattggtacaaaaactagtttaaaagaataaataggacctagtatttgctagcacaacagggtgactatagccaataataattatacattttcaaataactaaaagagtataattggattgtttgtaacacaaaggat

SEQ ID NO: 114907 - DNA, 199 bp, Homo sapiens
aaagccgcggacacggaagggaggcgaccaccccgctggggtgctggggtcgccaagtttcaggttccctctccgggtgggggcggagtcggttgccgtagcaacggaggctggggccttgcctttatagactgcatcagacttgatcaggttatattttccactgtttcatgaactgctttcatctgccctgttaacc

SEQ ID NO: 114908 - DNA, 198 bp, Homo sapiens
gcagtatgtcccatccctagaatatctggcacctggttaagtgttcagtacatatttgttgaatgggtaaatgaatgagagctggagggaaatccaaactcaggggtgcctgtgccacagcaaacactctccctctcacaccacctggaatagagatcagctagagcagaggctgctaagagagggaacagaggctcc

SEQ ID NO: 114909 - DNA, 229 bp, Homo sapiens
ttgcaacagcaagcatggactttgcagacagaaagacttgggtttgaatcccagctctgtcaccatccgactgtgtgatatggggttttgcaggctcatccttggggccaggactatagagaggcaagtgaccagacgccgaagacaaaaattcctccaggttcaaacttgccctaccctgcttcgatgcataagcagttgactcaataaagatgtgtctctgacccag

SEQ ID NO: 114910 - DNA, 2124 bp, Homo sapiens
attttatggaaagttatatatgaagagtttattattaagcattcctttcatcagtttaaatgtttaattcctcccaggcgtttttcctccaattttatatttgatttttcattcaattcacagttggtatcattaaaaaaaattctaatacaattagctagaccttctgagaaaaatgttagaattaaactcaagcagtcagtatagtatatttcttaaccgactggttttagcttatcagaaagtaattattttatgtatttaaatacatttacaaagaaaatgaggcttttaaacagacctcactatttaacattgtacccagtagtggtgagcatgcttagtacccaaattttggtttctaaatgccattccccactaaaaggaaccagggttccttggagaaatggctgattccatgtttggagcaggggaagtgggtggtgtggctaaaatactttttattaagaaaataaaataaaaagcaagatagtatttgaagactaatggggtaatgtcagaagggaacaggcgccaagttgaaggtattctcactggccaaatttaggacaacttagaataatcactcttactggtgataatactaagaaggaaaagaagttcataatgatgaaagtagagaaaaaagaaaactctatacaattatttgaagaatgtcttcttttaaatgtacatggaatgatagatttggaaaaattaccattttacaacccttaatgtaattaaatctggcaaaaatcgatggtaaaacccattaagtggaaaaaattttaaggaactttgtttacaaggtgtcagaacatcacagatatctattgcaaaagaattgcctttacagtgagatttggctatcaaactgcatttcactacttctggaataagccagcattatgtggctcttgatgggatgcggtatgaagcatgtgtgatcatccttgatgtactgccgaaaatgtttacctcaaatttaattaaatcttttgtctagacttatcttcctgtttaaagaaatacaggaatagaggaacaagttgaattacacagtatggaaataaatagacaagtccagagttggtataggacaactggacttttttttatatatttattttaaaatggttttcttaaatttatttttttaaacataacacgaggaagctgttaaaactggtgtaatagctcaaaagaactaagtattccagatttcgggagggatgaagagggagatattcagaaaccttcaccagattcctcccaacttgatcatagtggattaatgacgtgctttgtggatgtggttagtcaatgacaccagcttgacggatctttctttctgcaccaaaccccattgagttatctggtccccttggctgacgaagagccattaggcgaggatcactggcatcatccagggtgatgttcttcaagcgactgaccaaccgatcaggtcgaggagctgcaacagccttggggccctcacagactcgccaaacattccaggcactgcacttgccatcctcaacttctttcatatggaaaaagagcttcttgctatcccctacttcatagttaatgaagccaaactgatcttgcacacattccactggccctacgcaggggtgtgatgttgtaagccatagtttgtgcattttggccctggtctggacttttcaaaaagcaaatgtagtaaaacaaaaagtggtctctgctagattaagacaagagacataaccaaatggaaagtgtgatcctttattagcttctgattcataaaaaaacctataagagacatttggggggatatttggggaaataggaagatggaatgggtagtagataatgtggtatatttgatttttctagaagtgataattgagttacgtaggataatgttctaattcttaggagatgcatgcagaagttttttttttaagttttgaaaagtcatgatgttgacagcatattttcaaataaatatgtacaaaatcagtcaattgttttttgtggtggatctatatgtggtggatgttcattggtcatttaaaacatttttctatgtgtgtcaatttttaataaaaatgcaaaaagtgattggataaagaa

SEQ ID NO: 114911 - DNA, 2184 bp, Homo sapiens
attttatggaaagttatatatgaagagtttattattaagcattcctttcatcagtttaaatgtttaattcctcccaggcgtttttcctccaattttatatttgatttttcattcaattcacagttggtatcattaaaaaaaattctaatacaattagctagaccttctgagaaaaatgttagaattaaactcaagcagtcagtatagtatatttcttaaccgactggttttagcttatcagaaagtaattattttatgtatttaaatacatttacaaagaaaatgaggcttttaaacagacctcactatttaacattgtacccagtagtggtgagcatgcttagtacccaaattttggtttctaaatgccattccccactaaaaggaaccagggttccttggagaaatggctgattccatgtttggagcaggggaagtgggtggtgtggctaaaatactttttattaagaaaataaaataaaaagcaagatagtatttgaagactaatggggtaatgtcagaagggaacaggcgccaagttgaaggtattctcactggccaaatttaggacaacttagaataatcactcttactggtgataatactaagaaggaaaagaagttcataatgatgaaagtagagaaaaaagaaaactctatacaattatttgaagaatgtcttcttttaaatgtacatggaatgatagatttggaaaaattaccattttacaacccttaatgtaattaaatctggcaaaaatcgatggtaaaacccattaagtggaaaaaattttaaggaactttgtttacaaggtgtcagaacatcacagatatctattgcaaaagaattgcctttacagtgagatttggctatcaaactgcatttcactacttctggaataagccagcattatgtggctcttgatgggatgcggtatgaagcatgtgtgatcatccttgatgtactgccgaaaatgtttacctcaaatttaattaaatcttttgtctagacttatcttcctgtttaaagaaatacaggaatagaggaacaagttgaattacacagtatggaaataaatagacaagtccagagttggtataggacaactggacttttttttatatatttattttaaaatggttttcttaaatttatttttttaaacataacacgaggaagctgttaaaactggtgtaatagctcaaaagaactaagtattccagatttcgggagggatgaagagggagatattcagaaaccttcaccagattcctcccaacttgatcatagtggattaatgacgtgctttgtggatgtggttagtcaatgacaccagcttgacggatctttctttctgcaccaaaccccattgagttatctggtccccttggctgacgaagagccattaggcgaggatcactggcatcatccagggtgatgttcttcaagcgactgaccaaccgatcaggtcgaggagctgcaacagccttggggccctcacagactcgccaaacattccaggcactgcacttgccagtgcgctgatgaagaatcacggagaactccacctcatctcctgcctggagctcaaggccatcctcaacttctttcatatggaaaaagagcttcttgctatcccctacttcatagttaatgaagccaaactgatcttgcacacattccactggccctacgcaggggtgtgatgttgtaagccatagtttgtgcattttggccctggtctggacttttcaaaaagcaaatgtagtaaaacaaaaagtggtctctgctagattaagacaagagacataaccaaatggaaagtgtgatcctttattagcttctgattcataaaaaaacctataagagacatttggggggatatttggggaaataggaagatggaatgggtagtagataatgtggtatatttgatttttctagaagtgataattgagttacgtaggataatgttctaattcttaggagatgcatgcagaagttttttttttaagttttgaaaagtcatgatgttgacagcatattttcaaataaatatgtacaaaatcagtcaattgttttttgtggtggatctatatgtggtggatgttcattggtcatttaaaacatttttctatgtgtgtcaatttttaataaaaatgcaaaaagtgattggataaagaa

SEQ ID NO: 114912 - DNA, 296 bp, Homo sapiens
aagttggaagatcatttttatttatttagttagttactattattatttttaaaccagtcaagtacggtagtaaagaaggtcacttttagacaacacagaagtgactttgttcataagggagctggactacatggtaactaggattccttccaaattccaaattttagaatttgccagaaatcatcacctcacttttcaagtcacaaaagaaaaacctaacagccccccatcttagagagcagtaaagggaagaaatgctttgagtcttaatattacggtaaaaaaggaaacacatg

SEQ ID NO: 114913 - DNA, 841 bp, Homo sapiens
aatttttttttgaagggaggtgtctactacaagacttctaatacttcagacatagcatttggaagctcaggctgtgaaattaagctgctgtgagcattcctaacgataatttgtgaaagtaagtttcaattaattcatctttctgttttcaaagtaccaatccgtctgcatcagccctggacactatctcctaaactttcctttggcctgtggaggtcactggtggtactgaagtacctgccaacctcaagaacagtgaaaaagcactctctggaaaaaccatttacccaagccaggtatgggagacagttgtcagatgaacacgtaaataaggccatgccccatttttagttttgtaatttatacggggaatgggggactctttgttccatccctccccagcatcacatctcagggttcggggctgaccaggattccgtaagtccacatggtgctggatcattcctccttcacccccctgtggaaaagtctgttcatagaggggttgtggcaaccctccataagaagcctcatcgtttttcttcttggctgtctcataacacaatgcaggccacagccagggatggaaaacctggaagctgacaagtgcgctgaaatcctggcattatgctggactgctgttttgtggcactggctatgactgtcacgtctcacttaagacacagggtggacatgaactcaaggcttgtagaagcccctgccttaggcagactcctcgaagcccaatggcagaacccctgccgaggtttcatgtgcacattgagtgcagggttcctccggatctgggggaactctaccagaaacccatccttcacaccca

SEQ ID NO: 114914 - DNA, 731 bp, Homo sapiens
agcttgcctcctcctcggttacagagagggtgattccactggccccttagtcatgctttttatcctgaaattggtgaatgagatgagtcagttgctaagtgtaggcggcaggctgtttggaatctctagtgggtgtgtcagtcagtgcaagagttcattggtaaaaaggggctgagactcaagttacagtcttttttaagtctatgcttttaaagcatagtgaggagagggagcaggcagttagaatgagctctaccttgcctcatttcttgggggaataaaggaactagttcttttaataccttatttccaagggcctaaattacttgtttgtggtctctttttctcattgtagtttaatccagtggccatcttctagctgttttcttgtttttatcctttttttttggtagggatggtgtctcactatgttgcccaggctggtcttaaactcctggccttctcaaactcctgattctcccaccttgggctcccaaagtgttgggattacagacataagctgccacgcccaacctgttttcttgtttttagaagtaaacattaatcatattttggctagagaaatgggaggtttttttcattcttataattctcaaagaaaaacccaaccagcttgttgcctcagtaaaattaaagagaaaaaactagagacactacaataacgtttctgtttaaattttcattttatctataaatatttttaatgtaac

SEQ ID NO: 114915 - DNA, 631 bp, Homo sapiens
atccctaggattccaacacaagtatggaggtgtcgtcacacatcaaccatgaacagcaagaataacccctcaagactagaccccgcacaaagcagggactaccccactccttctctcattaatcctaccacactctctaccatggcccctgaggacctaaactgtattttgcattttcaaccaaattgatattatttttattagcataatcaatttttcttctctcctgaattactttccattagcattttaatctctgatggcacagtatttttttaattctcttgtatatcaaaattttaactttccccagaagcaaatgtaggatttgatataagtctggatcccaaaacggaactcccagaagacctcgattacaaccaaagacctggattatagttccatcttgaaagttatttctagaagatggatctgccatccagaacggggaaatgaggctgggcagaatagccctaaaaaggagtagggagatgagagaaaggaagaaaaattgctggttcatggccatcgacattatgctttcttcaagtgaagatctatgatttgattaagttcctgattctagaatggcatctaggcctaggacaaacatccccaactggggaaactg

SEQ ID NO: 114916 - DNA, 392 bp, Homo sapiens
atctcacccaactcaatttagatgtggatctttgaagagggtgggaaaggtgaactataggatatgggggatatggctccatacttctctgtggtacccagggaggtgatattatgtatttctattctatttctcctgcaaaggcaagctggaatcctcaactcatcaaccttaatttggagtctgcagatgggttgctgacctcttggctttcaaattctctgtaatctgtgtgggtttaatcctggggatttgatgaattgtccaacaacccccatataataatagaatttcaggcaccttagagatcagctccttcaaatcccaccttcccctccccctgttttagagagaggaaactgagtatagagatgggaagggcttacttgagg

SEQ ID NO: 114917 - DNA, 354 bp, Homo sapiens
cacaaactgtgagtctactcgtaatagacagattttaataataaaataccaactgggaaaatctaataaatgctcctaatagtcatcctacagaaactctcaaagtatctccagcgaaaaacgcacttttaaaaaaacaagcatcttttaaagtttttttttcttttatacagtaactttatggtacatgtatctttattgacactggcttatcagtgtagcaaccaacagaaaaaaaaaaaaacaagcataaaaataatgttcccatagtgtgactatctagctaaggatttcatacctaaatttctagtgtgtcaatgcccctagaaatacaatcactggccaggcgcagcg

SEQ ID NO: 114918 - DNA, 250 bp, Homo sapiens
acagaatatagggcactacgttctgtagttgtcttggtgtcagaacccagctcattttcccctgacagaccacaagggatgatctaaatttctcaggttgtcatgaattgcagggacaagagagtgtgtccaaagaattcacatccctaacttcctattaatataaatacttctatttatccatcctcctacagagaccactgctccctaggcacccaaaatatgtctgactgagattctagtaaaagtc

SEQ ID NO: 114919 - DNA, 278 bp, Homo sapiens
cttcaaagcagggccctttttcctgcagaactggttgttaaatatttgccagcacagcactgcctgaatccattctcctaccgtccatccatcctcttattccttcatctgactgtctcttcatccatccatctgtccatttgcccagctatatagtcacctaaccaaatttatccatttgctcatccatctatttatctgtgcatctattcattcatccatttatttattcatccatccatccctctatgagcctgttcgtctacccatccacctgc

SEQ ID NO: 114920 - DNA, 491 bp, Homo sapiens
aaactttctttctacaaaaaatcaaaagcttagctgatagatcatgaaaatagattatgaacagtgaaattcctgagaaggctgaaagtgcggggaaccaaagcaggggagattagccttagtccggaggagggagaagcagatggaagtcagcagcctgccttgtttttacgtgtaatatttaaattttcaaattgtattacaggagggcctactttctgtttttatcaagagtttttcttttgttcaaagacactggttatgggaatattttgaaagggtaagaaacgctggtataaaaggtgttgcagattaatttgaagttcttacgaaacagtccctcaaaatgaagggttatttttggttttgttatgttcgagttgctttgttttctttgttttttgctttaccaattactgatggcttgcttttctataactgtgagaggagatcactgttctcctgcagaaagtgggagggaggcttgatgg

SEQ ID NO: 114921 - DNA, 354 bp, Homo sapiens
cagaattgactgccattggtgacttgctacagtggggatgcaggagagatttctagatggaaagattgatgggatgatgtcaacattaactaggatagagaacacagagaatagaacatgtttgggtgataggaggttccctgtttgtacttggtaaatatgagatgtatacaggaaaccccaacagaaatgtccagtaaatgactggatagaagaatgcaaactctgcaaaatataactgagatagaaacatggatacagatgaaattagctgaaacatcatcattaaagcctccaagtggataaaatctcttagagggtcaggtgttagaaaaagcagggagaatagaccag

SEQ ID NO: 114922 - DNA, 702 bp, Homo sapiens
ctggctggaagatatttggttggagaaaaactcggagctatctttcagggttataaaccagaatgattttgaagtctgcagcagctatccccaaaatagatatttggcatcatggagcgcaagctttttaaagattgcagttggcatttaggtcaggattggtggaggctggctgttgtagagaccatcagttttgtcatatgttttacttctattatctcccagttgtcaggattctaagtgctgtggcatctgatacatgaacgtacggatttccagcacccttttcagtgttgtttctctaacttagcttctgtaatgattaagcgtggtccatttttatgttctctcccctgaatttacttactgcttcttcttttgccctttgagtacatttataatatttggctatagacttcaaaaatttttcttggctgggcgcggtggctcacgcctgtaatcccagcactttgggaggccgagacgggaggataatgagatcaggagatcgagaccatcctggccaacatggtgaaaccctgtctctactaaaaatgcaaacaattagccgggcgtgttggcgggtgcctgtagtcccagctactcagaaggctgaggcaagagaatggcatgaacacgggaggcggagcttcgcgccactgcactccagcctaggcgacagcgagactccatctcaaaaaa

SEQ ID NO: 114923 - DNA, 323 bp, Homo sapiens
caatagtccaggagtagactgactgccttgagggcagtgagttcattatcaaaagaagagcataaacagaatctgagggacattcttgagtaatatgtaacgttgctttggataatctctaaggttttttgtagagtaaagattctaggatttgctgttctccaattgactaatgaagagatctcttaggctttgggataagagagaccacgtttcaagtctaattattaatactatctgcgggaccttacttatttccactttactttcctcttctgtagaatgggtagacttatttggaatgcggtaaggattacattaac

SEQ ID NO: 114924 - DNA, 192 bp, Homo sapiens
tctcaggtactgctcttccgagacttctgcctgacacctggaggaggcaggcccttggtggaactctaggaggcaccagctgaggaaaggggatctcaggaggtagggagagagcagagtgggcagccagctgtgggttcaaatcctggcctaccactttaacagggcgatctggaacaagtgacttctggt

SEQ ID NO: 114925 - DNA, 2533 bp, Homo sapiens
tacggcgttcttttaggggtggagccggcaggaaatttaaactgaagccgcggccgaaaacgccaagagattgatgctgtagctgccctgagataaccaggactgtggaatcgggaagagctcatggagctcgcgaatgtaatacggaggcctctgaggaaggagtacggaggccgagaaggagccggcatttgatgagcgaaccgggaaagggagacgattgcctcgagctggagagttccatggctgagagtaggctccgggccccggacctaggagtttccaggtgtctaggaaaatgccagaagaactcaccaggtgccaggaagcatcccttttccggaaagtccttttacttggatctgcctgctggcaagaatctccagtttttgacgggggccattcagcaactgggtggggtaattgagggttttctgagcaaagaagtaagttacatcgtgtccagccgcagagaagtaaaggcagagagcagtgggaaaagccatagaggctgccctagccctagccccagtgaggtcagagtggaaacatcggccatggttgatccaaaaggcagccaccccaggccttcacggaaacccgttgactcggtgcctctaagcagagggaaggagctgctgcagaaggctatcagaaaccaggtgagctggggcaagatgggacagagccggtggtctccagcatagggagggatttcactcttcttcccaggttcttctgaagcacccacacaaaatgcacactctgcgatatgtagtattgtcattatttccttcttctacatcaggtagtggaggctcagacaagttatttagccattcacctagagagtaagtgttgaagccagagccacctccaactctggagcctaccaagagaactgtggggatgtgggatgtggcgggacagggttgctgggtacagaagccagacttcttttacaagtaactctaggctgggtgtggtggctcacgcctataatcccagcactttgggaggctgaggtgggtggaccacttgaggccaggagttcaagaccagcttggccaacatggcgaaaccccatctctaccgaaaaattagcagggtgtggtggcacgcacctgtagtccccgctacgcaggtggctgaagcagaagaatcacttgaacctgagaggtggaggttgcagtgagccgagattgtgccactgcactccagcctgggcgatagagctagactctgtctcaaaaaaaaaacaaaaaacaagtaactctttattccttgtgtgaaaatccagggctgttaaagtttagtggcaggaggaggagttaaggtgatcttgtgagaagagtcatgctggtgacatcaggaggggtacatggctgtgatgggggaggtggtgctgctggactgagccagtggagggggaagatctgcagctagcatagtttcatgctcagtgaggatgatggtcaccgtgtttgttgtgtacttactgtgctgagagctttcctcgcagaggccctcccaacgaacagctctctcagaagcatctgttccttcctggtcacgaggtggccagagcacaatgtataggcagaccagtggtccttcctctcccaatgtggccatgtggaggacaggatgtcttcctgggggttgggatggactctctgggcactgtactctctctcctacctgcctccctgcagtccctcccatggatgactcaggcctcccagaagcaatttctatctgtccccttcactttcaggccttggggagtctctgctcctacctgactctgtgttgtaatttcaggggagcatcagtggaggaggcagtgggggcagcagcagcctcctgaccaatgcccgctcttggggagtgaggattctgcacgtggatggtaccctttctgtgctgggctcctgtggagggagaattggtgactttgaccaggagtgtcagcttttagaaggatcatggtcatgtgagcttctggtcaccggaagccagaaatactcagctgccatgttgatccacaaaggtgggaggatgtggggaagggggaaagcggtgaggacgcagagtgcaggctgtggcctcggcatcccgcaggaggtccctagaacatgccgtttcatgtcacctgctacagctctcccccagctagtatgatgatccgttttacaaatgcagaaatgatcttaatattcatgaccactggccaggcgaggtggctcacacctgtaatcccagcactttgggaggccaaggcgggtggatcacaaggtcaagagttcgagaccagcctgaccaacgtggtgaaaccccgtctctactaaaaatagaagcattagccgagcctggtggtgcgtgcctgtaatcccagctactcaggaggctgaggcaggagaatcacttgaacccaggaggcagaggttgcagtcagccaagatcatgctactgcactccagcctgggtgacagagcgagactccgtctcaaaaaaaaaaaacgacaaatat

SEQ ID NO: 114926 - DNA, 6355 bp, Homo sapiens
tacggcgttcttttaggggtggagccggcaggaaatttaaactgaagccgcggccgaaaacgccaagagattgatgctgtagctgccctgagataaccaggactgtggaatcgggaagagctcatggagctcgcgaatgtaatacggaggcctctgaggaaggagtacggaggccgagaaggagccggcatttgatgagcgaaccgggaaagggagacgattgcctcgagctggagagttccatggctgagagtaggctccgggccccggacctaggagtttccaggtgtctaggaaaatgccagaagaactcaccaggtgccaggaagcatcccttttccggaaagtccttttacttggatctgcctgctggcaagaatctccagtttttgacgggggccattcagcaactgggtggggtaattgagggttttctgagcaaagaagtaagttacatcgtgtccagccgcagagaagtaaaggcagagagcagtgggaaaagccatagaggctgccctagccctagccccagtgaggtcagagtggaaacatcggccatggttgatccaaaaggcagccaccccaggccttcacggaaacccgttgactcggtgcctctaagcagagggaaggagctgctgcagaaggctatcagaaaccaggtgagctggggcaagatgggacagagccggtggtctccagcatagggagggatttcactcttcttcccaggttcttctgaagcacccacacaaaatgcacactctgcgatatgtagtattgtcattatttccttcttctacatcaggtagtggaggctcagacaagttatttagccattcacctagagagtaagtgttgaagccagagccacctccaactctggagcctaccaagagaactgtggggatgtgggatgtggcgggacagggttgctgggtacagaagccagacttcttttacaagtaactctaggctgggtgtggtggctcacgcctataatcccagcactttgggaggctgaggtgggtggaccacttgaggccaggagttcaagaccagcttggccaacatggcgaaaccccatctctaccgaaaaattagcagggtgtggtggcacgcacctgtagtccccgctacgcaggtggctgaagcagaagaatcacttgaacctgagaggtggaggttgcagtgagccgagattgtgccactgcactccagcctgggcgatagagctagactctgtctcaaaaaaaaaacaaaaaacaagtaactctttattccttgtgtgaaaatccagggctgttaaagtttagtggcaggaggaggagttaaggtgatcttgtgagaagagtcatgctggtgacatcaggaggggtacatggctgtgatgggggaggtggtgctgctggactgagccagtggagggggaagatctgcagctagcatagtttcatgctcagtgaggatgatggtcaccgtgtttgttgtgtacttactgtgctgagagctttcctcgcagaggccctcccaacgaacagctctctcagaagcatctgttccttcctggtcacgaggtggccagagcacaatgtataggcagaccagtggtccttcctctcccaatgtggccatgtggaggacaggatgtcttcctgggggttgggatggactctctgggcactgtactctctctcctacctgcctccctgcagtccctcccatggatgactcaggcctcccagaagcaatttctatctgtccccttcactttcaggccttggggagtctctgctcctacctgactctgtgttgtaatttcaggggagcatcagtggaggaggcagtgggggcagcagcagcctcctgaccaatgcccgctcttggggagtgaggattctgcacgtggatgaaatgatgatgcacgtgcaacagctgtctcttgcgtctttatgtgtgaaaaaacaacagccaaagaagccagagggaacatgtccagcagcagagtcaagaacacggaaagtggccagactgaaggccccgttcctcaaaatcgaagatgaaagcaggaagtttcgtcctttccatcatcagtttaaatcctttcctgaaatttcttttcttggacccaaagatgcaagtccctttgaggccccgacgaccctgggcagcatgcaccataccagagaatccaaggatggagagccaagcccacgatcagctgcccacaccatgcccaggaggaagaaaggctactgcgagtgctgtcaggaggccttcgaggagctccatgtgcatcttcagagtgcccagcaccggagctttgccctggaagcccatctatatgcagaagtggacaggatcattgctcagctcagccacagctttgcagacatccctttccaggctggcctccccaggtggtcaggttccccagcttctgattgtgaccctctctgtcctgagactctgcacccccatcagccctcccatcccagggcagcatctcccaggataaggaaagaagacagctgccaggcatcaggtatcccagagcaggatgggacagtggacagcacgcaggcaccagctgaacgtgcagggactggtgaggtacctggacctatagcaagctgccaggacctgggggtgtcagttgatgtgtttgtggaccccccaggataccagtgtccaggagccctgcttgccaatgcctcctgcctagctctggttttatggaactctcctctggcccagacctggcactttttggccacaagcggaaggttcagttccccagtggcagtgctaagaagagagtgggggcctcctggccacaggcttcattttttgtcccaatagcccccaacccctgcggcaccaggacaactagtggcaagcgtcttccctctcttccccttacaggccatgagtccaggctcctcgcctccctccagcccttgtgccactcacagacctgcctctctctcccagaccccttcccctggcagcccacagacagaccagcagagttctgggccacacagccctcctggctggggaaagggtggcccccagggcctgaggattctgagtgtacagccactggccctgtatcccaggaggctggccagctcctcagctgccccacagctccaggctggccatcagctcccctgtactcagctaccagtgtgcagccctcgggagcacctgtagagagcaggtctacctccctcctgcagcccctgccagccagtgcgggagccagctgttcccgatgcctctgggccccccagcctctccaggtgccctgtctccctgtctcccagccctggtcccaaccccagccccagccccagccccatgctggcagagagctgctcctacgagtccccaaggtgcttggctcttcacagggccaggcagctccagattgaagggccacagatacaacttactcctctgctgggtgctgcacacccggccagggctgaccaggacgcaggaggggcagaaccccaggacttccccaaaagagctagaaggaggcccgggcctggcctttgaagtccagcaagcagctgtcacgctcagctccatggagctgacagagccacccctcccactggccaggtctttgggagagaatctgggctgggggctgccctctcctacccctgcctcctgccatgttcctgaccaggcagagtctacagtgggcttgcccagctgaggctggccgcccacgccaggaggcagaggcgaagttggcatggggagggaccacaaaggagctggggcagcaggagtcctggcccggcttcctggccctccacaggcccttgcctctctgcagagccgcgggttagctgttggtgtgctccacccccaaccccggcctcctttctcacgagcatgtggccgctcctgctttccaaaatgactgtgtttgtcccctcccccagccccccacgctcccgcacacagatcctcaggaacatatgaagcagaggaggggcttgggctgcaccactcacagagctccctcccccaggcacttagttggggcccagcactgacctttcccctgagcccaggatgtggccagagccccctctgggacccctctcgccccttctctgcctcctcagcttgagctgcctgcccgaagttcggctgttccggggccagtgtgtcacctgccaacttccacatcaccctcctccctcgctccctcctctccttccccaaggacctccccccatttctggcagccaagccattaatctggagacagaaatgggtttgctatcgattctctggccactttttctttcattacaatttgtaccgtgattcttctcacccttctctgcgtccatgcatttaaagagttgtctctttaaatgttgaagcttccggaagcctgatgctattctgtgtctcctttcaaaggaagaagggggggcccagctatgggtgaggactcaagttattagtttggaaatagagcaactatgtgtacagcccaccttagaggtcatgttacccccttcctgttaaattttacaattaattttggttcaggaaatgtaaataaatttgttaattacaaatagcaaagagatggggctggaatgccatatgtcggtccttgatctgccctccagtgacccaaggcagggctgcgggccagcagcgatggacagaatcactagatggtgtgatgggacctcctgcaagtcacacatgtgtgagtgccacaaccctcctgccggccttgcccaagggctccagggagcagggctgctctgtccctgcccagcctcctttacccagtctcatctggtcacttccttggctctgctgcctggggagtggtcgcctgcagaggacatgcccctccatccctcccaagaaaactcctttgccccggcggacattcctgttaagggcccactcctcttccctgaagccagaccgtggcttatgtctgcacgctgctgggttcgtccctttccttttgtgacatgggggttgcctcattccccatgacaccacccctctgcatgaggaagtttccccttgcccctgtctcagacttggatacctttacctgctgctcacacaaagcctgtggtgccgggttcgggtgccctcattgtcaactgcaggacccattccccgaacctcacatccgtgtacccttgccttcccctcctatctcaatgatcatgaccttggacatctctgccaggccaaaccccaaggctggaacactcctcagccatttctccattgcggcttcctggctgtagactcaggttagaggtgaacccagaacacctgagacttgacccaggatggatgggtgctgcttgatgtgaatgaggtcccgcagtggctccttggcgtgagcactgctcagactcctttccactccagccccctttccacatcgcaccagatgacttttacccagacccagtgggcattgccttatcttgcagtcagtcccttttcaacatgttgccgtttctttctgaagaggtgtcctccctccacaagtcacactgtctgtccctggccctccagcccacctcgccaaccactcttgttggtttccttctcagacttgccacctttcccttctgccccaaaatgccatgctcctctcctggaaaacacttgagttgattcagtaaatcgacttcaaatacttgaaggctcccaccttctgttctctggctccttcctgcggtctatacctaccgcctcctcttcacctccttcccttccacacttccttcctgggtagctctgcctgaagcattccactaagatcatctattccaaggtcatggacaggctactggtgaccaaagttggttccttttctcctttctttcctccttgaagcctggctcccttggtcgcagcagcccctcagtggcctggttctcctgtccccctgcccttcctcaccattgcccattccctcgttcgttcattcagcacaggccttgccgtctgccctgagtcagctccgagacacctgaagagccctccagccctaactactttactcagactaggtccccaggcctttgttcttgcctcttctcgctgagcctttcacttctcggcagatgtgaccgattggtagctccaccccaactcccttctgctgggtggaatgcaggagctagctgcctccaactcactgtgacctcagaaaaatgcctttattactcgggcctcagtttcctcgtctttaagtaaggggcttggatgagatgatttcaggaccctttccaataataaaatactgtgactgccagcaaatctttta

SEQ ID NO: 114927 - DNA, 6290 bp, Homo sapiens
tacggcgttcttttaggggtggagccggcaggaaatttaaactgaagccgcggccgaaaacgccaagagattgatgctgtagctgccctgagataaccaggactgtggaatcgggaagagctcatggagctcgcgaatgtaatacggaggcctctgaggaaggagtacggaggccgagaaggagccggcatttgatgagcgaaccgggaaagggagacgattgcctcgagctggagagttccatggctgagagtaggctccgggccccggacctaggagtttccaggtgtctaggaaaatgccagaagaactcaccaggtgccaggaagcatcccttttccggaaagtccttttacttggatctgcctgctggcaagaatctccagtttttgacgggggccattcagcaactgggtggggtaattgagggttttctgagcaaagaagtaagttacatcgtgtccagccgcagagaagtaaaggcagagagcagtgggaaaagccatagaggctgccctagccctagccccagtgaggtcagagtggaaacatcggccatggttgatccaaaaggcagccaccccaggccttcacggaaacccgttgactcggtgcctctaagcagagggaaggagctgctgcagaaggctatcagaaaccaggtgagctggggcaagatgggacagagccggtggtctccagcatagggagggatttcactcttcttcccaggttcttctgaagcacccacacaaaatgcacactctgcgatatgtagtattgtcattatttccttcttctacatcaggtagtggaggctcagacaagttatttagccattcacctagagagtaagtgttgaagccagagccacctccaactctggagcctaccaagagaactgtggggatgtgggatgtggcgggacagggttgctgggtacagaagccagacttcttttacaagtaactctaggctgggtgtggtggctcacgcctataatcccagcactttgggaggctgaggtgggtggaccacttgaggccaggagttcaagaccagcttggccaacatggcgaaaccccatctctaccgaaaaattagcagggtgtggtggcacgcacctgtagtccccgctacgcaggtggctgaagcagaagaatcacttgaacctgagaggtggaggttgcagtgagccgagattgtgccactgcactccagcctgggcgatagagctagactctgtctcaaaaaaaaaacaaaaaacaagtaactctttattccttgtgtgaaaatccagggctgttaaagtttagtggcaggaggaggagttaaggtgatcttgtgagaagagtcatgctggtgacatcaggaggggtacatggctgtgatgggggaggtggtgctgctggactgagccagtggagggggaagatctgcagctagcatagtttcatgctcagtgaggatgatggtcaccgtgtttgttgtgtacttactgtgctgagagctttcctcgcagaggccctcccaacgaacagctctctcagaagcatctgttccttcctggtcacgaggtggccagagcacaatgtataggcagaccagtggtccttcctctcccaatgtggccatgtggaggacaggatgtcttcctgggggttgggatggactctctgggcactgtactctctctcctacctgcctccctgcagtccctcccatggatgactcaggcctcccagaagcaatttctatctgtccccttcactttcaggccttggggagtctctgctcctacctgactctgtgttgtaatttcaggggagcatcagtggaggaggcagtgggggcagcagcagcctcctgaccaatgcccgctcttggggagtgaggattctgcacgtggatgaaatgatgatgcacgtgcaacagctgtctcttgcgtctttatgtgtgaaaaaacaacagccaaagaagccagagggaacatgtccagcagcagagtcaagaacacggaaagtggccagactgaaggccccgttcctcaaaatcgaagatgaaagcagatgcaagtccctttgaggccccgacgaccctgggcagcatgcaccataccagagaatccaaggatggagagccaagcccacgatcagctgcccacaccatgcccaggaggaagaaaggctactgcgagtgctgtcaggaggccttcgaggagctccatgtgcatcttcagagtgcccagcaccggagctttgccctggaagcccatctatatgcagaagtggacaggatcattgctcagctcagccacagctttgcagacatccctttccaggctggcctccccaggtggtcaggttccccagcttctgattgtgaccctctctgtcctgagactctgcacccccatcagccctcccatcccagggcagcatctcccaggataaggaaagaagacagctgccaggcatcaggtatcccagagcaggatgggacagtggacagcacgcaggcaccagctgaacgtgcagggactggtgaggtacctggacctatagcaagctgccaggacctgggggtgtcagttgatgtgtttgtggaccccccaggataccagtgtccaggagccctgcttgccaatgcctcctgcctagctctggttttatggaactctcctctggcccagacctggcactttttggccacaagcggaaggttcagttccccagtggcagtgctaagaagagagtgggggcctcctggccacaggcttcattttttgtcccaatagcccccaacccctgcggcaccaggacaactagtggcaagcgtcttccctctcttccccttacaggccatgagtccaggctcctcgcctccctccagcccttgtgccactcacagacctgcctctctctcccagaccccttcccctggcagcccacagacagaccagcagagttctgggccacacagccctcctggctggggaaagggtggcccccagggcctgaggattctgagtgtacagccactggccctgtatcccaggaggctggccagctcctcagctgccccacagctccaggctggccatcagctcccctgtactcagctaccagtgtgcagccctcgggagcacctgtagagagcaggtctacctccctcctgcagcccctgccagccagtgcgggagccagctgttcccgatgcctctgggccccccagcctctccaggtgccctgtctccctgtctcccagccctggtcccaaccccagccccagccccagccccatgctggcagagagctgctcctacgagtccccaaggtgcttggctcttcacagggccaggcagctccagattgaagggccacagatacaacttactcctctgctgggtgctgcacacccggccagggctgaccaggacgcaggaggggcagaaccccaggacttccccaaaagagctagaaggaggcccgggcctggcctttgaagtccagcaagcagctgtcacgctcagctccatggagctgacagagccacccctcccactggccaggtctttgggagagaatctgggctgggggctgccctctcctacccctgcctcctgccatgttcctgaccaggcagagtctacagtgggcttgcccagctgaggctggccgcccacgccaggaggcagaggcgaagttggcatggggagggaccacaaaggagctggggcagcaggagtcctggcccggcttcctggccctccacaggcccttgcctctctgcagagccgcgggttagctgttggtgtgctccacccccaaccccggcctcctttctcacgagcatgtggccgctcctgctttccaaaatgactgtgtttgtcccctcccccagccccccacgctcccgcacacagatcctcaggaacatatgaagcagaggaggggcttgggctgcaccactcacagagctccctcccccaggcacttagttggggcccagcactgacctttcccctgagcccaggatgtggccagagccccctctgggacccctctcgccccttctctgcctcctcagcttgagctgcctgcccgaagttcggctgttccggggccagtgtgtcacctgccaacttccacatcaccctcctccctcgctccctcctctccttccccaaggacctccccccatttctggcagccaagccattaatctggagacagaaatgggtttgctatcgattctctggccactttttctttcattacaatttgtaccgtgattcttctcacccttctctgcgtccatgcatttaaagagttgtctctttaaatgttgaagcttccggaagcctgatgctattctgtgtctcctttcaaaggaagaagggggggcccagctatgggtgaggactcaagttattagtttggaaatagagcaactatgtgtacagcccaccttagaggtcatgttacccccttcctgttaaattttacaattaattttggttcaggaaatgtaaataaatttgttaattacaaatagcaaagagatggggctggaatgccatatgtcggtccttgatctgccctccagtgacccaaggcagggctgcgggccagcagcgatggacagaatcactagatggtgtgatgggacctcctgcaagtcacacatgtgtgagtgccacaaccctcctgccggccttgcccaagggctccagggagcagggctgctctgtccctgcccagcctcctttacccagtctcatctggtcacttccttggctctgctgcctggggagtggtcgcctgcagaggacatgcccctccatccctcccaagaaaactcctttgccccggcggacattcctgttaagggcccactcctcttccctgaagccagaccgtggcttatgtctgcacgctgctgggttcgtccctttccttttgtgacatgggggttgcctcattccccatgacaccacccctctgcatgaggaagtttccccttgcccctgtctcagacttggatacctttacctgctgctcacacaaagcctgtggtgccgggttcgggtgccctcattgtcaactgcaggacccattccccgaacctcacatccgtgtacccttgccttcccctcctatctcaatgatcatgaccttggacatctctgccaggccaaaccccaaggctggaacactcctcagccatttctccattgcggcttcctggctgtagactcaggttagaggtgaacccagaacacctgagacttgacccaggatggatgggtgctgcttgatgtgaatgaggtcccgcagtggctccttggcgtgagcactgctcagactcctttccactccagccccctttccacatcgcaccagatgacttttacccagacccagtgggcattgccttatcttgcagtcagtcccttttcaacatgttgccgtttctttctgaagaggtgtcctccctccacaagtcacactgtctgtccctggccctccagcccacctcgccaaccactcttgttggtttccttctcagacttgccacctttcccttctgccccaaaatgccatgctcctctcctggaaaacacttgagttgattcagtaaatcgacttcaaatacttgaaggctcccaccttctgttctctggctccttcctgcggtctatacctaccgcctcctcttcacctccttcccttccacacttccttcctgggtagctctgcctgaagcattccactaagatcatctattccaaggtcatggacaggctactggtgaccaaagttggttccttttctcctttctttcctccttgaagcctggctcccttggtcgcagcagcccctcagtggcctggttctcctgtccccctgcccttcctcaccattgcccattccctcgttcgttcattcagcacaggccttgccgtctgccctgagtcagctccgagacacctgaagagccctccagccctaactactttactcagactaggtccccaggcctttgttcttgcctcttctcgctgagcctttcacttctcggcagatgtgaccgattggtagctccaccccaactcccttctgctgggtggaatgcaggagctagctgcctccaactcactgtgacctcagaaaaatgcctttattactcgggcctcagtttcctcgtctttaagtaaggggcttggatgagatgatttcaggaccctttccaataataaaatactgtgactgccagcaaatctttta

SEQ ID NO: 114928 - DNA, 6235 bp, Homo sapiens
  misc_feature (43)..(43): n is a, c, g, or t
  misc_feature (45)..(45): n is a, c, g, or t
agcgggttgtcgggaaggggagaaagaaaggcggaagggtcgnantagcgaggcgagggcggagtcgggagggggctaggaagtgaccagcgggagacgattgcctcgagctggagagttccatggctgagagtaggctccgggccccggacctaggagtttccaggtgtctaggaaaatgccagaagaactcaccaggtgccaggaagcatcccttttccggaaagtccttttacttggatctgcctgctggcaagaatctccagtttttgacgggggccattcagcaactgggtggggtaattgagggttttctgagcaaagaagtaagttacatcgtgtccagccgcagagaagtaaaggcagagagcagtgggaaaagccatagaggctgccctagccctagccccagtgaggtcagagtggaaacatcggccatggttgatccaaaaggcagccaccccaggccttcacggaaacccgttgactcggtgcctctaagcagagggaaggagctgctgcagaaggctatcagaaaccaggtgagctggggcaagatgggacagagccggtggtctccagcatagggagggatttcactcttcttcccaggttcttctgaagcacccacacaaaatgcacactctgcgatatgtagtattgtcattatttccttcttctacatcaggtagtggaggctcagacaagttatttagccattcacctagagagtaagtgttgaagccagagccacctccaactctggagcctaccaagagaactgtggggatgtgggatgtggcgggacagggttgctgggtacagaagccagacttcttttacaagtaactctaggctgggtgtggtggctcacgcctataatcccagcactttgggaggctgaggtgggtggaccacttgaggccaggagttcaagaccagcttggccaacatggcgaaaccccatctctaccgaaaaattagcagggtgtggtggcacgcacctgtagtccccgctacgcaggtggctgaagcagaagaatcacttgaacctgagaggtggaggttgcagtgagccgagattgtgccactgcactccagcctgggcgatagagctagactctgtctcaaaaaaaaaacaaaaaacaagtaactctttattccttgtgtgaaaatccagggctgttaaagtttagtggcaggaggaggagttaaggtgatcttgtgagaagagtcatgctggtgacatcaggaggggtacatggctgtgatgggggaggtggtgctgctggactgagccagtggagggggaagatctgcagctagcatagtttcatgctcagtgaggatgatggtcaccgtgtttgttgtgtacttactgtgctgagagctttcctcgcagaggccctcccaacgaacagctctctcagaagcatctgttccttcctggtcacgaggtggccagagcacaatgtataggcagaccagtggtccttcctctcccaatgtggccatgtggaggacaggatgtcttcctgggggttgggatggactctctgggcactgtactctctctcctacctgcctccctgcagtccctcccatggatgactcaggcctcccagaagcaatttctatctgtccccttcactttcaggccttggggagtctctgctcctacctgactctgtgttgtaatttcaggggagcatcagtggaggaggcagtgggggcagcagcagcctcctgaccaatgcccgctcttggggagtgaggattctgcacgtggatgaaatgatgatgcacgtgcaacagctgtctcttgcgtctttatgtgtgaaaaaacaacagccaaagaagccagagggaacatgtccagcagcagagtcaagaacacggaaagtggccagactgaaggccccgttcctcaaaatcgaagatgaaagcaggaagtttcgtcctttccatcatcagtttaaatcctttcctgaaatttcttttcttggacccaaagatgcaagtccctttgaggccccgacgaccctgggcagcatgcaccataccagagaatccaaggatggagagccaagcccacgatcagctgcccacaccatgcccaggaggaagaaaggctactgcgagtgctgtcaggaggccttcgaggagctccatgtgcatcttcagagtgcccagcaccggagctttgccctggaagcccatctatatgcagaagtggacaggatcattgctcagctcagccacagctttgcagacatccctttccaggctggcctccccaggtggtcaggttccccagcttctgattgtgaccctctctgtcctgagactctgcacccccatcagccctcccatcccagggcagcatctcccaggataaggaaagaagacagctgccaggcatcaggtatcccagagcaggatgggacagtggacagcacgcaggcaccagctgaacgtgcagggactggtgaggtacctggacctatagcaagctgccaggacctgggggtgtcagttgatgtgtttgtggaccccccaggataccagtgtccaggagccctgcttgccaatgcctcctgcctagctctggttttatggaactctcctctggcccagacctggcactttttggccacaagcggaaggttcagttccccagtggcagtgctaagaagagagtgggggcctcctggccacaggcttcattttttgtcccaatagcccccaacccctgcggcaccaggacaactagtggcaagcgtcttccctctcttccccttacaggccatgagtccaggctcctcgcctccctccagcccttgtgccactcacagacctgcctctctctcccagaccccttcccctggcagcccacagacagaccagcagagttctgggccacacagccctcctggctggggaaagggtggcccccagggcctgaggattctgagtgtacagccactggccctgtatcccaggaggctggccagctcctcagctgccccacagctccaggctggccatcagctcccctgtactcagctaccagtgtgcagccctcgggagcacctgtagagagcaggtctacctccctcctgcagcccctgccagccagtgcgggagccagctgttcccgatgcctctgggccccccagcctctccaggtgccctgtctccctgtctcccagccctggtcccaaccccagccccagccccagccccatgctggcagagagctgctcctacgagtccccaaggtgcttggctcttcacagggccaggcagctccagattgaagggccacagatacaacttactcctctgctgggtgctgcacacccggccagggctgaccaggacgcaggaggggcagaaccccaggacttccccaaaagagctagaaggaggcccgggcctggcctttgaagtccagcaagcagctgtcacgctcagctccatggagctgacagagccacccctcccactggccaggtctttgggagagaatctgggctgggggctgccctctcctacccctgcctcctgccatgttcctgaccaggcagagtctacagtgggcttgcccagctgaggctggccgcccacgccaggaggcagaggcgaagttggcatggggagggaccacaaaggagctggggcagcaggagtcctggcccggcttcctggccctccacaggcccttgcctctctgcagagccgcgggttagctgttggtgtgctccacccccaaccccggcctcctttctcacgagcatgtggccgctcctgctttccaaaatgactgtgtttgtcccctcccccagccccccacgctcccgcacacagatcctcaggaacatatgaagcagaggaggggcttgggctgcaccactcacagagctccctcccccaggcacttagttggggcccagcactgacctttcccctgagcccaggatgtggccagagccccctctgggacccctctcgccccttctctgcctcctcagcttgagctgcctgcccgaagttcggctgttccggggccagtgtgtcacctgccaacttccacatcaccctcctccctcgctccctcctctccttccccaaggacctccccccatttctggcagccaagccattaatctggagacagaaatgggtttgctatcgattctctggccactttttctttcattacaatttgtaccgtgattcttctcacccttctctgcgtccatgcatttaaagagttgtctctttaaatgttgaagcttccggaagcctgatgctattctgtgtctcctttcaaaggaagaagggggggcccagctatgggtgaggactcaagttattagtttggaaatagagcaactatgtgtacagcccaccttagaggtcatgttacccccttcctgttaaattttacaattaattttggttcaggaaatgtaaataaatttgttaattacaaatagcaaagagatggggctggaatgccatatgtcggtccttgatctgccctccagtgacccaaggcagggctgcgggccagcagcgatggacagaatcactagatggtgtgatgggacctcctgcaagtcacacatgtgtgagtgccacaaccctcctgccggccttgcccaagggctccagggagcagggctgctctgtccctgcccagcctcctttacccagtctcatctggtcacttccttggctctgctgcctggggagtggtcgcctgcagaggacatgcccctccatccctcccaagaaaactcctttgccccggcggacattcctgttaagggcccactcctcttccctgaagccagaccgtggcttatgtctgcacgctgctgggttcgtccctttccttttgtgacatgggggttgcctcattccccatgacaccacccctctgcatgaggaagtttccccttgcccctgtctcagacttggatacctttacctgctgctcacacaaagcctgtggtgccgggttcgggtgccctcattgtcaactgcaggacccattccccgaacctcacatccgtgtacccttgccttcccctcctatctcaatgatcatgaccttggacatctctgccaggccaaaccccaaggctggaacactcctcagccatttctccattgcggcttcctggctgtagactcaggttagaggtgaacccagaacacctgagacttgacccaggatggatgggtgctgcttgatgtgaatgaggtcccgcagtggctccttggcgtgagcactgctcagactcctttccactccagccccctttccacatcgcaccagatgacttttacccagacccagtgggcattgccttatcttgcagtcagtcccttttcaacatgttgccgtttctttctgaagaggtgtcctccctccacaagtcacactgtctgtccctggccctccagcccacctcgccaaccactcttgttggtttccttctcagacttgccacctttcccttctgccccaaaatgccatgctcctctcctggaaaacacttgagttgattcagtaaatcgacttcaaatacttgaaggctcccaccttctgttctctggctccttcctgcggtctatacctaccgcctcctcttcacctccttcccttccacacttccttcctgggtagctctgcctgaagcattccactaagatcatctattccaaggtcatggacaggctactggtgaccaaagttggttccttttctcctttctttcctccttgaagcctggctcccttggtcgcagcagcccctcagtggcctggttctcctgtccccctgcccttcctcaccattgcccattccctcgttcgttcattcagcacaggccttgccgtctgccctgagtcagctccgagacacctgaagagccctccagccctaactactttactcagactaggtccccaggcctttgttcttgcctcttctcgctgagcctttcacttctcggcagatgtgaccgattggtagctccaccccaactcccttctgctgggtggaatgcaggagctagctgcctccaactcactgtgacctcagaaaaatgcctttattactcgggcctcagtttcctcgtctttaagtaaggggcttggatgagatgatttcaggaccctttccaataataaaatactgtgactgccagcaaatctttta

SEQ ID NO: 114929 - DNA, 3401 bp, Homo sapiens
  misc_feature (43)..(43): n is a, c, g, or t
  misc_feature (45)..(45): n is a, c, g, or t
agcgggttgtcgggaaggggagaaagaaaggcggaagggtcgnantagcgaggcgagggcggagtcgggagggggctaggaagtgaccagcgggagacgattgcctcgagctggagagttccatggctgagagtaggctccgggccccggacctaggagtttccaggtgtctaggaaaatgccagaagaactcaccaggtgccaggaagcatcccttttccggaaagtccttttacttggatctgcctgctggcaagaatctccagtttttgacgggggccattcagcaactgggtggggtaattgagggttttctgagcaaagaagtaagttacatcgtgtccacctctccaggtgccctgtctccctgtctcccagccctggtcccaaccccagccccagccccagccccatgctggcagagagctgctcctacgagtccccaaggtgcttggctcttcacagggccaggcagctccagattgaagggccacagatacaacttactcctctgctgggtgctgcacacccggccagggctgaccaggacgcaggaggggcagaaccccaggacttccccaaaagagctagaaggaggcccgggcctggcctttgaagtccagcaagcagctgtcacgctcagctccatggagctgacagagccacccctcccactggccaggtctttgggagagaatctgggctgggggctgccctctcctacccctgcctcctgccatgttcctgaccaggcagagtctacagtgggcttgcccagctgaggctggccgcccacgccaggaggcagaggcgaagttggcatggggagggaccacaaaggagctggggcagcaggagtcctggcccggcttcctggccctccacaggcccttgcctctctgcagagccgcgggttagctgttggtgtgctccacccccaaccccggcctcctttctcacgagcatgtggccgctcctgctttccaaaatgactgtgtttgtcccctcccccagccccccacgctcccgcacacagatcctcaggaacatatgaagcagaggaggggcttgggctgcaccactcacagagctccctcccccaggcacttagttggggcccagcactgacctttcccctgagcccaggatgtggccagagccccctctgggacccctctcgccccttctctgcctcctcagcttgagctgcctgcccgaagttcggctgttccggggccagtgtgtcacctgccaacttccacatcaccctcctccctcgctccctcctctccttccccaaggacctccccccatttctggcagccaagccattaatctggagacagaaatgggtttgctatcgattctctggccactttttctttcattacaatttgtaccgtgattcttctcacccttctctgcgtccatgcatttaaagagttgtctctttaaatgttgaagcttccggaagcctgatgctattctgtgtctcctttcaaaggaagaagggggggcccagctatgggtgaggactcaagttattagtttggaaatagagcaactatgtgtacagcccaccttagaggtcatgttacccccttcctgttaaattttacaattaattttggttcaggaaatgtaaataaatttgttaattacaaatagcaaagagatggggctggaatgccatatgtcggtccttgatctgccctccagtgacccaaggcagggctgcgggccagcagcgatggacagaatcactagatggtgtgatgggacctcctgcaagtcacacatgtgtgagtgccacaaccctcctgccggccttgcccaagggctccagggagcagggctgctctgtccctgcccagcctcctttacccagtctcatctggtcacttccttggctctgctgcctggggagtggtcgcctgcagaggacatgcccctccatccctcccaagaaaactcctttgccccggcggacattcctgttaagggcccactcctcttccctgaagccagaccgtggcttatgtctgcacgctgctgggttcgtccctttccttttgtgacatgggggttgcctcattccccatgacaccacccctctgcatgaggaagtttccccttgcccctgtctcagacttggatacctttacctgctgctcacacaaagcctgtggtgccgggttcgggtgccctcattgtcaactgcaggacccattccccgaacctcacatccgtgtacccttgccttcccctcctatctcaatgatcatgaccttggacatctctgccaggccaaaccccaaggctggaacactcctcagccatttctccattgcggcttcctggctgtagactcaggttagaggtgaacccagaacacctgagacttgacccaggatggatgggtgctgcttgatgtgaatgaggtcccgcagtggctccttggcgtgagcactgctcagactcctttccactccagccccctttccacatcgcaccagatgacttttacccagacccagtgggcattgccttatcttgcagtcagtcccttttcaacatgttgccgtttctttctgaagaggtgtcctccctccacaagtcacactgtctgtccctggccctccagcccacctcgccaaccactcttgttggtttccttctcagacttgccacctttcccttctgccccaaaatgccatgctcctctcctggaaaacacttgagttgattcagtaaatcgacttcaaatacttgaaggctcccaccttctgttctctggctccttcctgcggtctatacctaccgcctcctcttcacctccttcccttccacacttccttcctgggtagctctgcctgaagcattccactaagatcatctattccaaggtcatggacaggctactggtgaccaaagttggttccttttctcctttctttcctccttgaagcctggctcccttggtcgcagcagcccctcagtggcctggttctcctgtccccctgcccttcctcaccattgcccattccctcgttcgttcattcagcacaggccttgccgtctgccctgagtcagctccgagacacctgaagagccctccagccctaactactttactcagactaggtccccaggcctttgttcttgcctcttctcgctgagcctttcacttctcggcagatgtgaccgattggtagctccaccccaactcccttctgctgggtggaatgcaggagctagctgcctccaactcactgtgacctcagaaaaatgcctttattactcgggcctcagtttcctcgtctttaagtaaggggcttggatgagatgatttcaggaccctttccaataataaaatactgtgactgccagcaaatctttta

SEQ ID NO: 114930 - DNA, 5080 bp, Homo sapiens
tacggcgttcttttaggggtggagccggcaggaaatttaaactgaagccgcggccgaaaacgccaagagattgatgctgtagctgccctgagataaccaggactgtggaatcgggaagagctcatggagctcgcgaatgtaatacggaggcctctgaggaaggagtacggaggccgagaaggagccggcatttgatgagcgaaccgggaaagggagacgattgcctcgagctggagagttccatggctgagagtaggctccgggccccggacctaggagtttccaggtgtctaggaaaatgccagaagaactcaccaggtgccaggaagcatcccttttccggaaagtccttttacttggatctgcctgctggcaagaatctccagtttttgacgggggccattcagcaactgggtggggtaattgagggttttctgagcaaagaagtaagttacatcgtgtccagccgcagagaagtaaaggcagagagcagtgggaaaagccatagaggctgccctagccctagccccagtgaggtcagagtggaaacatcggccatggttgatccaaaaggcagccaccccaggccttcacggaaacccgttgactcggtgcctctaagcagagggaaggagctgctgcagaaggctatcagaaaccaggtgagctggggcaagatgggacagagccggtggtctccagcatagggagggatttcactcttcttcccaggttcttctgaagcacccacacaaaatgcacactctgcgatatgtagtattgtcattatttccttcttctacatcaggtagtggaggctcagacaagttatttagccattcacctagagagtaagtgttgaagccagagccacctccaactctggagcctaccaagagaactgtggggatgtgggatgtggcgggacagggttgctgggtacagaagccagacttcttttacaagtaactctaggctgggtgtggtggctcacgcctataatcccagcactttgggaggctgaggtgggtggaccacttgaggccaggagttcaagaccagcttggccaacatggcgaaaccccatctctaccgaaaaattagcagggtgtggtggcacgcacctgtagtccccgctacgcaggtggctgaagcagaagaatcacttgaacctgagaggtggaggttgcagtgagccgagattgtgccactgcactccagcctgggcgatagagctagactctgtctcaaaaaaaaaacaaaaaacaagtaactctttattccttgtgtgaaaatccagggctgttaaagtttagtggcaggaggaggagttaaggtgatcttgtgagaagagtcatgctggtgacatcaggaggggtacatggctgtgatgggggaggtggtgctgctggactgagccagtggagggggaagatctgcagctagcatagtttcatgctcagtgaggatgatggtcaccgtgtttgttgtgtacttactgtgctgagagctttcctcgcagaggccctcccaacgaacagctctctcagaagcatctgttccttcctggtcacgaggtggccagagcacaatgtataggcagaccagtggtccttcctctcccaatgtggccatgtggaggacaggatgtcttcctgggggttgggatggactctctgggcactgtactctctctcctacctgcctccctgcagtccctcccatggatgactcaggcctcccagaagcaatttctatctgtccccttcactttcaggccttggggagtctctgctcctacctgactctgtgttgtaatttcaggggagcatcagtggaggaggcagtgggggcagcagcagcctcctgaccaatgcccgctcttggggagtgaggattctgcacgtggatgaaatgatgatgcacgtgcaacagctgtctcttgcgtctttatgtgtgaaaaaacaacagccaaagaagccagagggaacatgtccagcagcagagtcaagaacacggaaagtggccagactgaaggccccgttcctcaaaatcgaagatgaaagcaggaagtttcgtcctttccatcatcagtttaaatcctttcctgaaatttcttttcttggacccaaagatgcaagtccctttgaggccccgacgaccctgggcagcatgcaccataccagagaatccaaggatggagagccaagcccacgatcagctgcccacaccatgcccaggaggaagaaaggctactgcgagtgctgtcaggaggccttcgaggagctccatgtgcatcttcagagtgcccagcaccggagctttgccctggaagcccatctatatgcagaagtggacaggatcattgctcagctcagccacagctttgcagacatccctttccaggctggcctccccaggtggtcaggttccccagcttctgattgtgaccctctctgtcctgagactctgcacccccatcagccctcccatcccagggcagcatctcccaggataaggaaagaagacagctgccaggcatcaggtatcccagagcaggatgggacagtggacagcacgcaggcaccagctgaacgtgcagggactggtgaggtacctggacctatagcaagctgccaggacctgggggtgtcagttgatgtgtttgtggaccccccaggataccagtgtccaggagccctgcttgccaatgcctcctgcctagctctggttttatggaactctcctctggcccagacctggcactttttggccacaagcggaaggttcagttccccagtggcagtgctaagaagagagtgggggcctcctggccacaggcttcattttttgtcccaatagcccccaacccctgcggcaccaggacaactagtggcaagcgtcttccctctcttccccttacaggccatgagtccaggctcctcgcctccctccagcccttgtgccactcacagacctgcctctctctcccagaccccttcccctggcagcccacagacagaccagcagagttctgggccacacagccctcctggctggggaaagggtggcccccagggcctgaggattctgagtgtacagccactggccctgtatcccaggaggctggccagctcctcagctgccccacagctccaggctggccatcagctcccctgtactcagctaccagtgtgcagccctcgggagcacctgtagagagcaggtctacctccctcctgcagcccctgccagccagtgcgggagccagctgttcccgatgcctctgggccccccagcctctccaggtgccctgtctccctgtctcccagccctggtcccaaccccagccccagccccagccccatgctggcagagagctgctcctacgagtccccaaggtgcttggctcttcacagggccaggcagctccagattgaagggccacagatacaacttactcctctgctgggtgctgcacacccggccagggctgaccaggacgcaggaggggcagaaccccaggacttccccaaaagagctagaaggaggcccgggcctggcctttgaagtccagcaagcagctgtcacgctcagctccatggagctgacagagccacccctcccactggccaggtctttgggagagaatctgggctgggggctgccctctcctacccctgcctcctgccatgttcctgaccaggcagagtctacagtgggcttgcccagctgaggctggccgcccacgccaggaggcagaggcgaagttggcatggggagggaccacaaaggagctggggcagcaggagtcctggcccggcttcctggccctccacaggcccttgcctctctgcagagccgcgggttagctgttggtgtgctccacccccaaccccggcctcctttctcacgagcatgtggccgctcctgctttccaaaatgactgtgtttgtcccctcccccagccccccacgctcccgcacacagatcctcaggaacatatgaagcagaggaggggcttgggctgcaccactcacagagctccctcccccaggcacttagttggggcccagcactgacctttcccctgagcccaggatgtggccagagccccctctgggacccctctcgccccttctctgcctcctcagcttgagctgcctgcccgaagttcggctgttccggggccagtgtgtcacctgccaacttccacatcaccctcctccctcgctccctcctctccttccccaaggacctccccccatttctggcagccaagccattaatctggagacagaaatgggtttgctatcgattctctggccactttttctttcattacaatttgtaccgtgattcttctcacccttctctgcgtccatgcatttaaagagttgtctctttaaatgttgaagcttccggaagcctgatgctattctgtgtctcctttcaaaggaagaagggggggcccagctatgggtgaggactcaagttattagtttggaaatagagcaactatgtgtacagcccaccttagaggtcatgttacccccttcctgttaaattttacaattaattttggttcaggaaatgtaaataaatttgttaattacaaataaaaaaaaaaaaaaaaaaaaaaaaaaaaaaaaaaaaaaaaaaaaaaaaaaaaaaaaaaaaacgaaaagaaacaaaaagatcaaccctataggagaggaactacatgtacaggtcatacagctaatatgagagacaaagagtgcatccgcataagacgggcgtcagataaaaaagaagctgaagagacaaagaaaacaacacacaaccatgtacaagacaaacaagacgaacgtcgaggcactgaaccctgcaaggaggacaaacccaaactagacggacatagccacaatcaaggagaggggcgacacacaccgtaagagagcgaacacagcgcaaatcagaaacaaacacactgaatcaccgaaaaagaatcacacgctccacataaaccaggcattagaggccccggctgcaccatcgccccagcaaagggacggggaacaatcagacaaggaacgac

SEQ ID NO: 114931 - DNA, 467 bp, Homo sapiens
cagggtctagtctgtgctattatagcacacagactgagctgtcagtgagggccacctggcttcaggactctcttttcaaacttcttactttgctcctctttattgttttctaggagtttccaggtgtctaggaaaatgccagaagaactcaccaggtgccaggaagcatcccttttccggaaagtccttttacttggatctgcctgctggcaagaatctccagtttttgacgggggccattcagcaactgggtggggtaggtaacctgctcttctcctgcgatgccatgtgcctttgcaggcttagagcaggagttggatggggattatatctatggtttccaagtattttcttttttgagacagagtcttgctctataacccaggctggagtgcagtggcatgatctcagctcactgcaacctctgcctcccgggttcaagcaattctcctgcctcaacctcccag

SEQ ID NO: 114932 - DNA, 840 bp, Homo sapiens
  misc_feature (777)..(777): n is a, c, g, or t
  misc_feature (789)..(789): n is a, c, g, or t
  misc_feature (793)..(793): n is a, c, g, or t
  misc_feature (795)..(796): n is a, c, g, or t
  misc_feature (808)..(808): n is a, c, g, or t
tacggcgttcttttaggggtggagccggcaggaaatttaaactgaagccgcggccgaaaacgccaagagattgatgctgtagctgccctgagataaccaggactgtggaatcgggaagagctcatggagctcgcgaatgtaatacggaggcctctgaggaaggagtacggaggccgagaaggagccggcatttgatgagcgaaccgggaaagggagacgattgcctcgagctggagagttccatggctgagagtaggctccgggccccggacctaggagtttccaggtgtctaggaaaatgccagaagaactcaccaggtgccaggaagcatcccttttccggaaagtccttttacttggatctgcctgctggcaagaatctccagtttttgacgggggccattcagcaactgggtggggtaattgagggttttctgagcaaagaagtaagttacatcgtgtccagccgcagagaagtaaaggcagagagcagtgggaaaagccatagaggctgccctagccctagccccagtgaggtcagagtggaaacatcggccatggttgatccaaaaggcagccaccccaggccttcacggaaacccgttgactcggtgcctctaagcagagggaaggagctgctgcagaaggctatcagaaaccaggggagcatcagtggaggaggcagtgggggcagcagcagcctcctgaccaatgcccgctcttggggagtgaggattctgcacgtggatgaatgatgatgccgtgcacagctgctcntgcgtcttatgngtgnannacacagcaaganccgagggactttccccgcaagtcagaacggac

SEQ ID NO: 114933 - DNA, 5910 bp, Homo sapiens
tacggcgttcttttaggggtggagccggcaggaaatttaaactgaagccgcggccgaaaacgccaagagattgatgctgtagctgccctgagataaccaggactgtggaatcgggaagagctcatggagctcgcgaatgtaatacggaggcctctgaggaaggagtacggaggccgagaaggagccggcatttgatgagcgaaccgggaaagggagacgattgcctcgagctggagagttccatggctgagagtaggctccgggccccggacctaggagtttccaggtgtctaggaaaatgccagaagaactcaccaggtgccaggaagcatcccttttccggaaagtccttttacttggatctgcctgctggcaagaatctccagtttttgacgggggccattcagcaactgggtggggtaattgagggttttctgagcaaagaagtaagttacatcgtgtccagccgcagagaagtaaaggcagagagcagtgggaaaagccatagaggctgccctagccctagccccagtgaggtcagagtggaaacatcggccatggttgatccaaaaggcagccaccccaggccttcacggaaacccgttgactcggtgcctctaagcagagggaaggagctgctgcagaaggctatcagaaaccaggtgagctggggcaagatgggacagagccggtggtctccagcatagggagggatttcactcttcttcccaggttcttctgaagcacccacacaaaatgcacactctgcgatatgtagtattgtcattatttccttcttctacatcaggtagtggaggctcagacaagttatttagccattcacctagagagtaagtgttgaagccagagccacctccaactctggagcctaccaagagaactgtggggatgtgggatgtggcgggacagggttgctgggtacagaagccagacttcttttacaagtaactctaggctgggtgtggtggctcacgcctataatcccagcactttgggaggctgaggtgggtggaccacttgaggccaggagttcaagaccagcttggccaacatggcgaaaccccatctctaccgaaaaattagcagggtgtggtggcacgcacctgtagtccccgctacgcaggtggctgaagcagaagaatcacttgaacctgagaggtggaggttgcagtgagccgagattgtgccactgcactccagcctgggcgatagagctagactctgtctcaaaaaaaaaacaaaaaacaagtaactctttattccttgtgtgaaaatccagggctgttaaagtttagtggcaggaggaggagttaaggtgatcttgtgagaagagtcatgctggtgacatcaggaggggtacatggctgtgatgggggaggtggtgctgctggactgagccagtggagggggaagatctgcagctagcatagtttcatgctcagtgaggatgatggtcaccgtgtttgttgtgtacttactgtgctgagagctttcctcgcagaggccctcccaacgaacagctctctcagaagcatctgttccttcctggtcacgaggtggccagagcacaatgtataggcagaccagtggtccttcctctcccaatgtggccatgtggaggacaggatgtcttcctgggggttgggatggactctctgggcactgtactctctctcctacctgcctccctgcagtccctcccatggatgactcaggcctcccagaagcaatttctatctgtccccttcactttcaggccttggggagtctctgctcctacctgactctgtgttgtaatttcaggggagcatcagtggaggaggcagtgggggcagcagcagcctcctgaccaatgcccgctcttggggagtgaggattctgcacgtggatgaaatgatgatgcacgtgcaacagctgtctcttgcgtctttatgtgtgaaaaaacaacagccaaagaagccagagggaacatgtccagcagcagagtcaagaacacggaaagtggccagactgaaggccccgttcctcaaaatcgaagatgaaagcagatgcaagtccctttgaggccccgacgaccctgggcagcatgcaccataccagagaatccaaggatggagagccaagcccacgatcagctgcccacaccatgcccaggaggaagaaaggctactgcgagtgctgtcaggaggccttcgaggagctccatgtgcatcttcagagtgcccagcaccggagctttgccctggaagcccatctatatgcagaagtggacaggatcattgctcagctcagccacagctttgcagacatccctttccaggctggcctccccaggtggtcaggttccccagcttctgattgtgaccctctctgtcctgagactctgcacccccatcagccctcccatcccagggcagcatctcccaggataaggaaagaagacagctgccaggcatcaggccatgagtccaggctcctcgcctccctccagcccttgtgccactcacagacctgcctctctctcccagaccccttcccctggcagcccacagacagaccagcagagttctgggccacacagccctcctggctggggaaagggtggcccccagggcctgaggattctgagtgtacagccactggccctgtatcccaggaggctggccagctcctcagctgccccacagctccaggctggccatcagctcccctgtactcagctaccagtgtgcagccctcgggagcacctgtagagagcaggtctacctccctcctgcagcccctgccagccagtgcgggagccagctgttcccgatgcctctgggccccccagcctctccaggtgccctgtctccctgtctcccagccctggtcccaaccccagccccagccccagccccatgctggcagagagctgctcctacgagtccccaaggtgcttggctcttcacagggccaggcagctccagattgaagggccacagatacaacttactcctctgctgggtgctgcacacccggccagggctgaccaggacgcaggaggggcagaaccccaggacttccccaaaagagctagaaggaggcccgggcctggcctttgaagtccagcaagcagctgtcacgctcagctccatggagctgacagagccacccctcccactggccaggtctttgggagagaatctgggctgggggctgccctctcctacccctgcctcctgccatgttcctgaccaggcagagtctacagtgggcttgcccagctgaggctggccgcccacgccaggaggcagaggcgaagttggcatggggagggaccacaaaggagctggggcagcaggagtcctggcccggcttcctggccctccacaggcccttgcctctctgcagagccgcgggttagctgttggtgtgctccacccccaaccccggcctcctttctcacgagcatgtggccgctcctgctttccaaaatgactgtgtttgtcccctcccccagccccccacgctcccgcacacagatcctcaggaacatatgaagcagaggaggggcttgggctgcaccactcacagagctccctcccccaggcacttagttggggcccagcactgacctttcccctgagcccaggatgtggccagagccccctctgggacccctctcgccccttctctgcctcctcagcttgagctgcctgcccgaagttcggctgttccggggccagtgtgtcacctgccaacttccacatcaccctcctccctcgctccctcctctccttccccaaggacctccccccatttctggcagccaagccattaatctggagacagaaatgggtttgctatcgattctctggccactttttctttcattacaatttgtaccgtgattcttctcacccttctctgcgtccatgcatttaaagagttgtctctttaaatgttgaagcttccggaagcctgatgctattctgtgtctcctttcaaaggaagaagggggggcccagctatgggtgaggactcaagttattagtttggaaatagagcaactatgtgtacagcccaccttagaggtcatgttacccccttcctgttaaattttacaattaattttggttcaggaaatgtaaataaatttgttaattacaaatagcaaagagatggggctggaatgccatatgtcggtccttgatctgccctccagtgacccaaggcagggctgcgggccagcagcgatggacagaatcactagatggtgtgatgggacctcctgcaagtcacacatgtgtgagtgccacaaccctcctgccggccttgcccaagggctccagggagcagggctgctctgtccctgcccagcctcctttacccagtctcatctggtcacttccttggctctgctgcctggggagtggtcgcctgcagaggacatgcccctccatccctcccaagaaaactcctttgccccggcggacattcctgttaagggcccactcctcttccctgaagccagaccgtggcttatgtctgcacgctgctgggttcgtccctttccttttgtgacatgggggttgcctcattccccatgacaccacccctctgcatgaggaagtttccccttgcccctgtctcagacttggatacctttacctgctgctcacacaaagcctgtggtgccgggttcgggtgccctcattgtcaactgcaggacccattccccgaacctcacatccgtgtacccttgccttcccctcctatctcaatgatcatgaccttggacatctctgccaggccaaaccccaaggctggaacactcctcagccatttctccattgcggcttcctggctgtagactcaggttagaggtgaacccagaacacctgagacttgacccaggatggatgggtgctgcttgatgtgaatgaggtcccgcagtggctccttggcgtgagcactgctcagactcctttccactccagccccctttccacatcgcaccagatgacttttacccagacccagtgggcattgccttatcttgcagtcagtcccttttcaacatgttgccgtttctttctgaagaggtgtcctccctccacaagtcacactgtctgtccctggccctccagcccacctcgccaaccactcttgttggtttccttctcagacttgccacctttcccttctgccccaaaatgccatgctcctctcctggaaaacacttgagttgattcagtaaatcgacttcaaatacttgaaggctcccaccttctgttctctggctccttcctgcggtctatacctaccgcctcctcttcacctccttcccttccacacttccttcctgggtagctctgcctgaagcattccactaagatcatctattccaaggtcatggacaggctactggtgaccaaagttggttccttttctcctttctttcctccttgaagcctggctcccttggtcgcagcagcccctcagtggcctggttctcctgtccccctgcccttcctcaccattgcccattccctcgttcgttcattcagcacaggccttgccgtctgccctgagtcagctccgagacacctgaagagccctccagccctaactactttactcagactaggtccccaggcctttgttcttgcctcttctcgctgagcctttcacttctcggcagatgtgaccgattggtagctccaccccaactcccttctgctgggtggaatgcaggagctagctgcctccaactcactgtgacctcagaaaaatgcctttattactcgggcctcagtttcctcgtctttaagtaaggggcttggatgagatgatttcaggaccctttccaataataaaatactgtgactgccagcaaatctttta

SEQ ID NO: 114934 - DNA, 5105 bp, Homo sapiens
tacggcgttcttttaggggtggagccggcaggaaatttaaactgaagccgcggccgaaaacgccaagagattgatgctgtagctgccctgagataaccaggactgtggaatcgggaagagctcatggagctcgcgaatgtaatacggaggcctctgaggaaggagtacggaggccgagaaggagccggcatttgatgagcgaaccgggaaagggagacgattgcctcgagctggagagttccatggctgagagtaggctccgggccccggacctaggagtttccaggtgtctaggaaaatgccagaagaactcaccaggtgccaggaagcatcccttttccggaaagtccttttacttggatctgcctgctggcaagaatctccagtttttgacgggggccattcagcaactgggtggggtaattgagggttttctgagcaaagaagtaagttacatcgtgtccagccgcagagaagtaaaggcagagagcagtgggaaaagccatagaggctgccctagccctagccccagtgaggtcagagtggaaacatcggccatggttgatccaaaaggcagccaccccaggccttcacggaaacccgttgactcggtgcctctaagcagagggaaggagctgctgcagaaggctatcagaaaccagaaatgatgatgcacgtgcaacagctgtctcttgcgtctttatgtgtgaaaaaacaacagccaaagaagccagagggaacatgtccagcagcagagtcaagaacacggaaagtggccagactgaaggccccgttcctcaaaatcgaagatgaaagcaggaagtttcgtcctttccatcatcagtttaaatcctttcctgaaatttcttttcttggacccaaagatgcaagtccctttgaggccccgacgaccctgggcagcatgcaccataccagagaatccaaggatggagagccaagcccacgatcagctgcccacaccatgcccaggaggaagaaaggctactgcgagtgctgtcaggaggccttcgaggagctccatgtgcatcttcagagtgcccagcaccggagctttgccctggaagcccatctatatgcagaagtggacaggatcattgctcagctcagccacagctttgcagacatccctttccaggctggcctccccaggtggtcaggttccccagcttctgattgtgaccctctctgtcctgagactctgcacccccatcagccctcccatcccagggcagcatctcccaggataaggaaagaagacagctgccaggcatcaggtatcccagagcaggatgggacagtggacagcacgcaggcaccagctgaacgtgcagggactggtgaggtacctggacctatagcaagctgccaggacctgggggtgtcagttgatgtgtttgtggaccccccaggataccagtgtccaggagccctgcttgccaatgcctcctgcctagctctggttttatggaactctcctctggcccagacctggcactttttggccacaagcggaaggttcagttccccagtggcagtgctaagaagagagtgggggcctcctggccacaggcttcattttttgtcccaatagcccccaacccctgcggcaccaggacaactagtggcaagcgtcttccctctcttccccttacaggccatgagtccaggctcctcgcctccctccagcccttgtgccactcacagacctgcctctctctcccagaccccttcccctggcagcccacagacagaccagcagagttctgggccacacagccctcctggctggggaaagggtggcccccagggcctgaggattctgagtgtacagccactggccctgtatcccaggaggctggccagctcctcagctgccccacagctccaggctggccatcagctcccctgtactcagctaccagtgtgcagccctcgggagcacctgtagagagcaggtctacctccctcctgcagcccctgccagccagtgcgggagccagctgttcccgatgcctctgggccccccagcctctccaggtgccctgtctccctgtctcccagccctggtcccaaccccagccccagccccagccccatgctggcagagagctgctcctacgagtccccaaggtgcttggctcttcacagggccaggcagctccagattgaagggccacagatacaacttactcctctgctgggtgctgcacacccggccagggctgaccaggacgcaggaggggcagaaccccaggacttccccaaaagagctagaaggaggcccgggcctggcctttgaagtccagcaagcagctgtcacgctcagctccatggagctgacagagccacccctcccactggccaggtctttgggagagaatctgggctgggggctgccctctcctacccctgcctcctgccatgttcctgaccaggcagagtctacagtgggcttgcccagctgaggctggccgcccacgccaggaggcagaggcgaagttggcatggggagggaccacaaaggagctggggcagcaggagtcctggcccggcttcctggccctccacaggcccttgcctctctgcagagccgcgggttagctgttggtgtgctccacccccaaccccggcctcctttctcacgagcatgtggccgctcctgctttccaaaatgactgtgtttgtcccctcccccagccccccacgctcccgcacacagatcctcaggaacatatgaagcagaggaggggcttgggctgcaccactcacagagctccctcccccaggcacttagttggggcccagcactgacctttcccctgagcccaggatgtggccagagccccctctgggacccctctcgccccttctctgcctcctcagcttgagctgcctgcccgaagttcggctgttccggggccagtgtgtcacctgccaacttccacatcaccctcctccctcgctccctcctctccttccccaaggacctccccccatttctggcagccaagccattaatctggagacagaaatgggtttgctatcgattctctggccactttttctttcattacaatttgtaccgtgattcttctcacccttctctgcgtccatgcatttaaagagttgtctctttaaatgttgaagcttccggaagcctgatgctattctgtgtctcctttcaaaggaagaagggggggcccagctatgggtgaggactcaagttattagtttggaaatagagcaactatgtgtacagcccaccttagaggtcatgttacccccttcctgttaaattttacaattaattttggttcaggaaatgtaaataaatttgttaattacaaatagcaaagagatggggctggaatgccatatgtcggtccttgatctgccctccagtgacccaaggcagggctgcgggccagcagcgatggacagaatcactagatggtgtgatgggacctcctgcaagtcacacatgtgtgagtgccacaaccctcctgccggccttgcccaagggctccagggagcagggctgctctgtccctgcccagcctcctttacccagtctcatctggtcacttccttggctctgctgcctggggagtggtcgcctgcagaggacatgcccctccatccctcccaagaaaactcctttgccccggcggacattcctgttaagggcccactcctcttccctgaagccagaccgtggcttatgtctgcacgctgctgggttcgtccctttccttttgtgacatgggggttgcctcattccccatgacaccacccctctgcatgaggaagtttccccttgcccctgtctcagacttggatacctttacctgctgctcacacaaagcctgtggtgccgggttcgggtgccctcattgtcaactgcaggacccattccccgaacctcacatccgtgtacccttgccttcccctcctatctcaatgatcatgaccttggacatctctgccaggccaaaccccaaggctggaacactcctcagccatttctccattgcggcttcctggctgtagactcaggttagaggtgaacccagaacacctgagacttgacccaggatggatgggtgctgcttgatgtgaatgaggtcccgcagtggctccttggcgtgagcactgctcagactcctttccactccagccccctttccacatcgcaccagatgacttttacccagacccagtgggcattgccttatcttgcagtcagtcccttttcaacatgttgccgtttctttctgaagaggtgtcctccctccacaagtcacactgtctgtccctggccctccagcccacctcgccaaccactcttgttggtttccttctcagacttgccacctttcccttctgccccaaaatgccatgctcctctcctggaaaacacttgagttgattcagtaaatcgacttcaaatacttgaaggctcccaccttctgttctctggctccttcctgcggtctatacctaccgcctcctcttcacctccttcccttccacacttccttcctgggtagctctgcctgaagcattccactaagatcatctattccaaggtcatggacaggctactggtgaccaaagttggttccttttctcctttctttcctccttgaagcctggctcccttggtcgcagcagcccctcagtggcctggttctcctgtccccctgcccttcctcaccattgcccattccctcgttcgttcattcagcacaggccttgccgtctgccctgagtcagctccgagacacctgaagagccctccagccctaactactttactcagactaggtccccaggcctttgttcttgcctcttctcgctgagcctttcacttctcggcagatgtgaccgattggtagctccaccccaactcccttctgctgggtggaatgcaggagctagctgcctccaactcactgtgacctcagaaaaatgcctttattactcgggcctcagtttcctcgtctttaagtaaggggcttggatgagatgatttcaggaccctttccaataataaaatactgtgactgccagcaaatctttta

SEQ ID NO: 114935 - DNA, 5047 bp, Homo sapiens
ggggtcgttaatagctgaggcgatggtgcggagtcgtggagggggcttaggaatgtgaccagtcgtggagacgattgcctcgagctggagagttccatggctgagagtaggctccgggccccggacctaggagtttccaggtgtctaggaaaatgccagaagaactcaccaggtgccaggaagcatcccttttccggaaagtccttttacttggatctgcctgctggcaagaatctccagtttttgacgggggccattcagcaactgggtggggtaattgagggttttctgagcaaagaagtaagttacatcgtgtccagccgcagagaagtaaaggcagagagcagtgggaaaagccatagaggctgccctagccctagccccagtgaggtcagagtggaaacatcggccatggttgatccaaaaggcagccaccccaggccttcacggaaacccgttgactcggtgcctctaagcagagggaaggagctgctgcagaaggctatcagaaaccaggggagcatcagtggaggaggcagtgggggcagcagcagcctcctgaccaatgcccgctcttggggagtgaggattctgcacgtggatgaaatgatgatgcacgtgcaacagctgtctcttgcgtctttatgtgtgaaaaaacaacagccaaagaagccagagggaacatgtccagcagcagagtcaagaacacggaaagtggccagactgaaggccccgttcctcaaaatcgaagatgaaagcaggaagtttcgtcctttccatcatcagtttaaatcctttcctgaaatttcttttcttggacccaaagatgcaagtccctttgaggccccgacgaccctgggcagcatgcaccataccagagaatccaaggatggagagccaagcccacgatcagctgcccacaccatgcccaggaggaagaaaggctactgcgagtgctgtcaggaggccttcgaggagctccatgtgcatcttcagagtgcccagcaccggagctttgccctggaagcccatctatatgcagaagtggacaggatcattgctcagctcagccacagctttgcagacatccctttccaggctggcctccccaggtggtcaggttccccagcttctgattgtgaccctctctgtcctgagactctgcacccccatcagccctcccatcccagggcagcatctcccaggataaggaaagaagacagctgccaggcatcaggtatcccagagcaggatgggacagtggacagcacgcaggcaccagctgaacgtgcagggactggtgaggtacctggacctatagcaagctgccaggacctgggggtgtcagttgatgtgtttgtggaccccccaggataccagtgtccaggagccctgcttgccaatgcctcctgcctagctctggttttatggaactctcctctggcccagacctggcactttttggccacaagcggaaggttcagttccccagtggcagtgctaagaagagagtgggggcctcctggccacaggcttcattttttgtcccaatagcccccaacccctgcggcaccaggacaactagtggcaagcgtcttccctctcttccccttacaggccatgagtccaggctcctcgcctccctccagcccttgtgccactcacagacctgcctctctctcccagaccccttcccctggcagcccacagacagaccagcagagttctgggccacacagccctcctggctggggaaagggtggcccccagggcctgaggattctgagtgtacagccactggccctgtatcccaggaggctggccagctcctcagctgccccacagctccaggctggccatcagctcccctgtactcagctaccagtgtgcagccctcgggagcacctgtagagagcaggtctacctccctcctgcagcccctgccagccagtgcgggagccagctgttcccgatgcctctgggccccccagcctctccaggtgccctgtctccctgtctcccagccctggtcccaaccccagccccagccccagccccatgctggcagagagctgctcctacgagtccccaaggtgcttggctcttcacagggccaggcagctccagattgaagggccacagatacaacttactcctctgctgggtgctgcacacccggccagggctgaccaggacgcaggaggggcagaaccccaggacttccccaaaagagctagaaggaggcccgggcctggcctttgaagtccagcaagcagctgtcacgctcagctccatggagctgacagagccacccctcccactggccaggtctttgggagagaatctgggctgggggctgccctctcctacccctgcctcctgccatgttcctgaccaggcagagtctacagtgggcttgcccagctgaggctggccgcccacgccaggaggcagaggcgaagttggcatggggagggaccacaaaggagctggggcagcaggagtcctggcccggcttcctggccctccacaggcccttgcctctctgcagagccgcgggttagctgttggtgtgctccacccccaaccccggcctcctttctcacgagcatgtggccgctcctgctttccaaaatgactgtgtttgtcccctcccccagccccccacgctcccgcacacagatcctcaggaacatatgaagcagaggaggggcttgggctgcaccactcacagagctccctcccccaggcacttagttggggcccagcactgacctttcccctgagcccaggatgtggccagagccccctctgggacccctctcgccccttctctgcctcctcagcttgagctgcctgcccgaagttcggctgttccggggccagtgtgtcacctgccaacttccacatcaccctcctccctcgctccctcctctccttccccaaggacctccccccatttctggcagccaagccattaatctggagacagaaatgggtttgctatcgattctctggccactttttctttcattacaatttgtaccgtgattcttctcacccttctctgcgtccatgcatttaaagagttgtctctttaaatgttgaagcttccggaagcctgatgctattctgtgtctcctttcaaaggaagaagggggggcccagctatgggtgaggactcaagttattagtttggaaatagagcaactatgtgtacagcccaccttagaggtcatgttacccccttcctgttaaattttacaattaattttggttcaggaaatgtaaataaatttgttaattacaaatagcaaagagatggggctggaatgccatatgtcggtccttgatctgccctccagtgacccaaggcagggctgcgggccagcagcgatggacagaatcactagatggtgtgatgggacctcctgcaagtcacacatgtgtgagtgccacaaccctcctgccggccttgcccaagggctccagggagcagggctgctctgtccctgcccagcctcctttacccagtctcatctggtcacttccttggctctgctgcctggggagtggtcgcctgcagaggacatgcccctccatccctcccaagaaaactcctttgccccggcggacattcctgttaagggcccactcctcttccctgaagccagaccgtggcttatgtctgcacgctgctgggttcgtccctttccttttgtgacatgggggttgcctcattccccatgacaccacccctctgcatgaggaagtttccccttgcccctgtctcagacttggatacctttacctgctgctcacacaaagcctgtggtgccgggttcgggtgccctcattgtcaactgcaggacccattccccgaacctcacatccgtgtacccttgccttcccctcctatctcaatgatcatgaccttggacatctctgccaggccaaaccccaaggctggaacactcctcagccatttctccattgcggcttcctggctgtagactcaggttagaggtgaacccagaacacctgagacttgacccaggatggatgggtgctgcttgatgtgaatgaggtcccgcagtggctccttggcgtgagcactgctcagactcctttccactccagccccctttccacatcgcaccagatgacttttacccagacccagtgggcattgccttatcttgcagtcagtcccttttcaacatgttgccgtttctttctgaagaggtgtcctccctccacaagtcacactgtctgtccctggccctccagcccacctcgccaaccactcttgttggtttccttctcagacttgccacctttcccttctgccccaaaatgccatgctcctctcctggaaaacacttgagttgattcagtaaatcgacttcaaatacttgaaggctcccaccttctgttctctggctccttcctgcggtctatacctaccgcctcctcttcacctccttcccttccacacttccttcctgggtagctctgcctgaagcattccactaagatcatctattccaaggtcatggacaggctactggtgaccaaagttggttccttttctcctttctttcctccttgaagcctggctcccttggtcgcagcagcccctcagtggcctggttctcctgtccccctgcccttcctcaccattgcccattccctcgttcgttcattcagcacaggccttgccgtctgccctgagtcagctccgagacacctgaagagccctccagccctaactactttactcagactaggtccccaggcctttgttcttgcctcttctcgctgagcctttcacttctcggcagatgtgaccgattggtagctccaccccaactcccttctgctgggtggaatgcaggagctagctgcctccaactcactgtgacctcagaaaaatgcctttattactcgggcctcagtttcctcgtctttaagtaaggggcttggatgagatgatttcaggaccctttccaataataaaatactgtgactgccagcaaatctttta

SEQ ID NO: 114936 - DNA, 537 bp, Homo sapiens
ggctactgcgagtgctgtcaggaggccttcgaggagctccatgtggtgagccccttccccattaagcagctgctcccagagtgccctgagggagcctgctcactggggatgagtccttcctatgcgatctctatgctgctatggctgtcctccagggccagagcatgggctgggaggtcagcttccgtgtccccctccccccaggcctcatctaatgccctgtgctcctctcccccgccggcagcatcttcagagtgcccagcaccggagctttgccctggaagcccatctatatgcagaagtggacaggatcattgctcagctcagccacagctttgcagacatccctttccaggctggcctccccaggtgagtgccacgctggcaggcacaactgtgtctgctctctcctctgttgccctctgggtgggaagagaccctcaggttggtggctgctgggaccagactgtgatgttttcctcttttctcaccttcctttccccttatcctcagtcctgtttgttttggggctggcca

SEQ ID NO: 114937 - DNA, 503 bp, Homo sapiens
tctacttaatacctctccatgccaaccccgttgtcatttcccagcggccgcctctataacgggcacttttcagggacaaagaattggtccgttaatgttcctcaaattcgaacgcgcctaggaatagttcggggatcctgttgaagtgcagatcaggattccgtaggtaggggtggggttccaaattctacatttctagtatcttcccacacgatggtgatcctccttgtccctgaatcatggaggagggcaattagggagatgtgagcctggatgcatggtggccttggctatcttaggtgttcttgcccattaaccaagctgggaggaaccgtgtgaatgcatatctatccctgttaataaaagggtagtttgaaggagatgctgacaggagaataattagaaatgtttttcttcccaatccaactatatgcaatacactttataatattcattttagaaatgtcatagataagatttgtaaacattgacatttagcaata

SEQ ID NO: 114938 - DNA, 411 bp, Homo sapiens
gctgagcagttttagtatcaggagctccatctaatctgtttaattttaataaatccctgactgggagagggagtgaaaaaaaaaagagagagagaaactctggaccaaataatacttcttttgagttacttggctaataattactgtagagagaaaactttttgtgcaattatgattcgttgctcctttagcaaaaaaaatccaactgatcaattcatccaagagtcattgtgcaccctatgccctgtccctggactcccatcaggaatttagcagagaaccgaacagacaaaatccctgccctcgcagagcttaaattctagtggagggaaggcagacgattaacaaatgggaaaatgaaataggtcggatgtcagatgccgagcgccatggatactgatgaatgaagca

SEQ ID NO: 114939 - DNA, 285 bp, Homo sapiens
gttccagctacttgggaggctgaggcatgagagtcacttgaacccaggaggcagaggttgcagtgagctgagatggcacccctgcactccaatcttggtaacagagcaagactgtctcacacagacacacgaaaggcatattgataataattcaacttatagaaattgagattaaattgtttgtttgcctaataagaatttccaatattttggggtcttttatgcaagacacagtactaaacacaatggaaaactatagagtaattgacattaccaggacataag

SEQ ID NO: 114940 - DNA, 551 bp, Homo sapiens
gccaggctggtctcaaactcctgaccccaggtgatctgcccgcctcggcctcctaaagtgctgggattatatgagccaccgtgcctggccacttttctcattttcagtgtaaggtgcaatttactttgtcagtgtggattttagaagtcattttattgactggcatttttctagactaaaatataagtagtaagtagagactaataattaacagagtgaaaagtgagatgtaccaaaacatcttactgaattgctctaaacttctacattgccacatcttaattatagctattgggtctcttaaatattttctctaaaacttgcttctagaaaaatgttggtaatacactgaaaacatgtaaattgagagatcctataggaatattcattatttaatatttttatacagctatctaataagtaatgtctttggttttttccatagatatgttttttccatacaagaaaatttcttccatgcaagaaaaatcaaagagacattttattgacctcttgtttagatattcatggagaatgccccaaaacgaacg

SEQ ID NO: 114941 - DNA, 523 bp, Homo sapiens
ggggtacactaatagaaaacccctgggggtttgtttaaaaaaaaggccaggtgtacggtccggattccgggatatcgggggacgtggctgaagtcagtcgggccgcccgcttgctgcacggcagccgtgggactggcacaggctcctcggcagcattatgggcagctggtagagcggccacttctgagagccggatgggccttccgaggtcgggccgtgccccgctgggcagcgcagagggggtgtgtagggcacgcgacttggagccaggtccagacccatcctggctcctctcagggctccttcccctgcccccattccaccccagccctgctggctgtcccgcaggacccagcgccgcggtagccttctctgaactgcggctcaggcggaggtgtcactcctgcctccagcccaggagggcaggtcaggttatgcaacgcgtgccgcgcgatctccccccacctccaacccccttttctcccgggtccacaccgcagttcccaccgctccgggtgtcctc

SEQ ID NO: 114942 - DNA, 328 bp, Homo sapiens
tgggaggtgattgaatcatggagcagacttcccccttgctgttcttgtattctcacaagacctggttgttggaaagtgtttggcacctctcggccgggcgcggtggctcacacctgtaatcccagcactttgggaggccgaggcgggtggatcacaaggtcaggagaccaagaccaccctggctaacacagtgaaatcccgtctctactaaaaatacaaaaaaattagccaggcgtggtggcaggtgcctgtagtcccagctactcgggaggctgaggcaggagaatcatttgaacccggggggcgcagattgcagtgagccgagatc

SEQ ID NO: 114943 - DNA, 727 bp, Homo sapiens
aaccacccaagtttacatccctaaacccattcattcacctaatggggctctataggataaattctatgggagcataacttttctgaccttacctcaaatacaagaacatttagagctgctaggtacttaagcctcatctaatctaattttcacattttgttctagagaaattgaaacccagaggtgtgacttactctgagtcacatagctggctggtgatggatgttctttacacttaccaccctgccgccttatttctttctacatagtctccttttctcttccgaaaatgtggtgattctgtaccataatttgtttgttttggcatcatttttctttattttttactccccgggacctgtgaagccttccttagaacttaggattctataatgggttgcttaaaaattggtaccttcctataaacttgattttattttttcacgcttagtatgtacttctgtctgggtatagagtatacttggaacagaaaagttactacttagattctattgtagactacatgctgtgctctaaccgaagactagtgttttcaagttacaaaagcaggagatacatagggttggattaagatgtattaaattcttaggacatttgtgggaacattatagattatataaccctgtgatctttgatgaaatcattcagtaacaaagttgaatgattccgtatcaagaaatacctattatttttaggagcacatatg

SEQ ID NO: 114944 - DNA, 92 bp, Homo sapiens
tgttcaatccagatgtttgttgggacagaaataacccagagccctggaacaaactgggtcccaatgatcaatacaagttctgctcagtgaat

SEQ ID NO: 114945 - DNA, 744 bp, Homo sapiens
tttattctgtagattaaaggtatcattttaataaggatatatgtatactatttaaagtagcaatttttatttaaagttgtgaaatgagttcaagcatgttaattagtaaggctgttactacagtcctgaagtaaaatgcacacttacttaaatagtaagtaaagcagttttcatttcctggaattttcttcaataaaacgactattgggtggacttacatcatgcacatatttaccataagagaggtccagtttttatgttcagcaaaagatgaagggaggaaaggaggaaaggagggagggagagagagaaataatagagcactagtgagataaatttaacatcccaatagtgaacactgcctgcctgcattcccctcactgaccacaagctctgacgtggatagggaacgggaatgtgctattttttcattcggctctcataaatcttttattgtgtgagtattctacatggtcccttattctggtgtttaaagatcctaattttcctgcaacatgatctctgcaagctaactctttaatccagaagcaagcagtctaggataattttgactctgagcaatctctgcttcatttgttgacttcatttgttgactaaggccctcggaagaagtgaccgttttatattagaggcatgatggagaaactggacagagctcctttttgctggctgttcatcaggagtggggcttcaccgtcatttcagtaggagtctgtatgagat

SEQ ID NO: 114946 - DNA, 553 bp, Homo sapiens
atgtttgcaaaatgattggatgcaaagtgggcttaattcataaaagcaataaaatgttgcttattgactgaacagatgaactagctgaggggagataatttggagtgttcttattggaaatgctttgaagaaatgtaatgatagtggagagacagagtcttattagctgtggtaaatatattttcctacagaaggattaggagattttgaaataactggaaaataaccctcaaatgtttagttatagtgacatttggatcaagcatgtgcaacttttaaccttggaaatttatatattccttgatatgcacaatttgaaatccagagataaatttctgatgtcatgggaaaaatctagcactgggagttaggaccactgggcttgagcctcagttcagtcactaactctacctcttcaccctgtaaagtcaggaaataatcaatgctctgcaataggtacatgctggagagatcgaatgcgccctcacagtctcgtctctcgaggggcatggaggctggtgcagtgtggtgaaatgccccaaagagctccaac

SEQ ID NO: 114947 - DNA, 639 bp, Homo sapiens
ttaaaaaattttaagtgtaaaagcatgagtatactttatgtggccaaatctgcttctattttcttacaacagtaagtgtaacagtgcctttactgtcacacttgaaaggcaccatctaatctatccaagatatttaagttctctacatattttctagtaagttatttccttacgaatatttaaatcgtcatctacttaaacattttttggtatgaatatgattttaactttaaaaatgcccttaattctatggtatgactatgattctaattttaaaaatgtccttaattctaataccatataaaaatcatattatcccatccatttggaagaccacattgttttataaaatatttaaattaatttacatctaattatatacttcttagtgtagtcttttgctttatctgtgcctatgccatatatatactattttcattcttatagcttccaggatatgttccttctcaattatcttcttcaaaatttatttgatgcttttgcagctttttcccccttctaggtacatttgaaagttattctaatacatttcatgaatgtattttttgatgatcttaaccagtattatatttatacatttacttgagataaactgatattgtgataatgttgtgtctt

SEQ ID NO: 114948 - DNA, 269 bp, Homo sapiens
aatcttcacagcaacccagtgaggtaggcaccattattttccccattttaaagggaaagaatcaaaccccagagaggttaagtaactttctcagagacgtataatggaagagctgggattcaaaccccaggagtggcttgtgctcttaacccaatgctatctctagttgacacttaggtcatagatttggtctttttttttttttaattttaacttttattttagattcagggggtagatgtgcaggttatataggtatattgcacaat

SEQ ID NO: 114949 - DNA, 227 bp, Homo sapiens
cgggagggacactgtaactctgagtgtgcactaccttggtacagttctcagagaattccttaccatttgtgtgacttggctttgtttggaagataatggttcctgcaggtaccatgaactgacagagaagaccattgtcagcacagccctgaacactgtgaaaacatgtgacctgagcaaacatcagaaaacattttgacttgagaccacataattaacctcttaag

SEQ ID NO: 114950 - DNA, 376 bp, Homo sapiens
ttagattccatttttgaagaagaaattcagtggggattacataaatgacaaaatgtatagtttgactaagggtctaagttttactgtcctcagatgaagagcataatgggatgcagaattttatttgaattaaaatgctggtgcattttatgagggaaaaacatcaataaaagagcattaggggtaccttggctctgtgattaggagacatacttctaaataagaacattatttatcaaggctggtaacataacaagaagaatgctggaatatggtttattgctcttggttattttggtcctttttccctcatttccttaaacttatcttcaatttcaaacaaacaggaaaccttgttagagggcaatgtaatatg

SEQ ID NO: 114951 - DNA, 220 bp, Homo sapiens
atttgaatgactagtgtcccattgggcaccagaagtcagttcaggtatgattctgtctcaccaaaggcctgtgacagcaacttttcaagcatagaaatctctgggcccctggagacaacacatccctccaagccctgcgcccctggtggcaatccagcccttcaagctgtaacacaaggtggattccagtccagtggagagaaatctgccatgtggtgtc

SEQ ID NO: 114952 - DNA, 401 bp, Homo sapiens
tatgctggtggctccctgaggtgctggtgcactcaggcaaaatgaaccgaacatctgtattctatttgctaatgagcaatcatcatttgtacctttttccagcctgggattcagctgcttggaatactaatgccattagaaattggaatcttttttgaaaaacacatactcttttagcaaaacccggtttcactcactgacatttttatggttcctgggattccttggcaattcactgctggttacaaagcccttaattccccctgggcccctctccgccatgcctgcacctatctgtgtaatatttgggtgtgtgggtggggattgggatccagaagacttgactggtcctagacttgccttttcaactaattcagtgactatgatcggacaagtcaatg

SEQ ID NO: 114953 - DNA, 421 bp, Homo sapiens
taggtacttcataaattaggagctgtctgtagaccctttctttaaagaagagtttattaaactaatgcctttatgatttgattataggtttcgcttaagttttctttagctgtgttgtttcagagccatgtaaacgagctgtttaagagcacttgtagacattaaagtatatttttatttaattctgtttctctgttggcctgaaagcagaatatcttttataaaatcaactagtgattattcctaacaagaaagtgtaaatagaattctaatttaataattagctcattagctctcctatagcatttttaacttgagactactatatgttgagctaacctaacaacaatgttttggttttattttctatattgaaatagatttgaaggcaaggggaaaacttttgtttcgttttgttttg

SEQ ID NO: 114954 - DNA, 195 bp, Homo sapiens
ggaccgcttgagggagacagagtttcgctgttgcaggctccagtgcagggcaggatctcggctcagcgaaacactgtctcccaaaagatatcacttactattaccttcacacattgtgcaattatcaccactctctaataccagaacatttccatcaccctggaaagaaacctggtacctgtttgcaatcgctcc

SEQ ID NO: 114955 - DNA, 641 bp, Homo sapiens
ttgaaattggaaggcagaggttatagtgacccgagatggtggcactgcactccagcctgggcaacagagcgagactccgtctcaaaaataaataaatgagggagcagctacctacccccttgccgtgcgggtcatcgttgtacatcttcatagctttgtgtttggcttcctggaaacctgttgttgccaattgaaagctgaaataccctcagagctgcacctgtgaaactctggcagtgaacttggtgaaaactcaggggcttggcgtcttgtaggaggctgcgctgcaggatgcgtggggctaggggctggcttgggtgggcttgggcctctggcttgactagtctggtggattttggtgttttcttgttttgtgctgcccatgtgtctctgtttagacagagaggattccttcttattccttctttgcccagaagccaaatggcgcaatctttgttttgtgcctgagcccctttctgtttgtttctccagaagcttgaattcgtgtccctgcctgtccagagcagaggagcccgtggtgtaacgagggagggggcagccctcacagtgcctctctgagctgcggccacagtggcaggcacgcggatctctctggaggaatgtatctgaggttgcgtctg

SEQ ID NO: 114956 - DNA, 739 bp, Homo sapiens
cgcctggctaatttttgtacttttagtagagacagggtttcaccatgttggccaggctggtctcgaactcctgacctcgagtgatccgcctgcctcgacctcccaaggtgctgggattccaggcgtgagccatcgcgtccggcctattattttatatatattggataaatgaatgaacccgtgcgttcacctgccctgggacccgcctggcctcttttggaaccactgatcgtgcatctcagctgcttctggctgacttgggtctgtcctcacggctcctccttgctcagcctctggccccgctgcaagacttgcccactacggccctttccatggccacaggatctggtcctgtccatcgtctgtgcatctgatgtttctttcttcctttatggtccagaggcgggaattccaccctggtgtgaacctgccaggactgccctgtgcactccaggagtccaggagtgagacccacgctggagtctggtggtgggcatgcgggtctgggcacaggctcggtctgcatagaacccacgtggtcccagcaagggtgctgtgggcccagaagcgcccatgcctgagagcgtccaggaccaggcagagctgggccttaagggcccttggaccagtgtctgtctgcagggagcccccggtagccactcggatcagcccgagggaagattctggacgagaccgtggccgtcccccgggtggcccatggacagcagcaggggctccc

SEQ ID NO: 114957 - DNA, 208 bp, Homo sapiens
ttgatgttgtaaccactgcctccagctagacagctgcgatgttagttcattggtggttaactcattttcagcattgctacctgcttttgatgatatctgataatagttttccagggaaattcatcattgaagcccacccacaattcctgagtaatgactccactctcctcccagttgcccaagcaggaaactgtaggggtgattttat

SEQ ID NO: 114958 - DNA, 298 bp, Homo sapiens
ttgaagatattggggtggttccatggaatgaaaaaaagaaaggttaataaattagttttctgattcaagaagtttagctgatgaacccagggatacctggaaaactcgtttcttactatgcaaaaccacacagcagccttcctaaaattattactgatataatcttttcttaagctcatccagtgcagtataatatgggtaaaaaaggtcaaagaaactgacttactgctaaaaatatgtgaactttgtgaataattgctatgtcaattctagtgagagtcatcataggcctttccat

SEQ ID NO: 114959 - DNA, 164 bp, Homo sapiens
gcaaacactattcttctatcataaaagtgataccacagcttctgtaaagttttgcaccaggtagtacttataattaacttgggtacagttttttgtttgtttgtttgttttgagacagattctcgctctgtcgcctaggctggagtgcagtggcctgatctctg

SEQ ID NO: 114960 - DNA, 332 bp, Homo sapiens
ggcctccttgtcatgaccctatacctggacgcccaccgcccacctctgctgcctcacacacactgctcccgcagccctcagccttctctgctgagccaacacaccaagtttgtgcatacctcaggctggctgtccctgaagaccctcaccctagaagattccaagcaaagaccctctcccatcctctgaggctctgtacagccattggcgcctcaccccacagaggcaagggtttaaatgaattcactcactccatagccagatacccagcattcactcggttgtaccggctgatggggtacaaggatgagcagagcctgcactaggtgtcc

SEQ ID NO: 114961 - DNA, 109 bp, Homo sapiens
atgctgtcccttacctctgatgagaaagctgcaaagtgtgtgtgggtccctcttggcctctctcttgatgtcccctgcctaacctgggtggtacacacactccacctct

SEQ ID NO: 114962 - DNA, 175 bp, Homo sapiens
tcgcaccaccatggtgtcagagaaggacacatagagagaaggaacaaggaattcctatccttcccagacaggatgttatcagcagagacctagtggagagcctaaacttccaatcccacccagcagtaatgaggccaagtaagaagaaacctggactttcacccacctctgggaa

SEQ ID NO: 114963 - DNA, 471 bp, Homo sapiens
ggcctcaactgcatgtgcactgggacagacagatctgtgttggaatgcgggctcctttatcttccagctgttaccttgggtgcatcttttccttcttggagcccttttcttggtctgttcacaggggatcttcattaggaggtgctgaagggatttcacggctaatggttttgtaggccctctgttaactgaagccctttgcaaatgcccttgaagaaatgctgtttctcccaacatcttccacggagattggtgctcagaccaaggtgggtgcagagctgatgtctcctcctctaccagtggtgcttgaaaaatggtggcatgaggctgaatttccccatgctctgaatgactggggagagtggccacaaatctgaacagcccagatgtaatttctgactctgggcacctgtgtcttgcagaagggaggaaggtggacagatttagctgcaggatgcacagtgcgctgct

SEQ ID NO: 114964 - DNA, 461 bp, Homo sapiens
agaggatccctctacgagcgcagcagaggccatagacattactcctatcctaggcagtggataacacagacctgtctagagcagaattttatttctgagaccacagttattttttttctctctatataatgctatagtaaatagtatagcatttttgcagaggtgatccaaacttctccaaagttattttagttttcatgttgaaacgattttttaataagaaaaaaatacttttatagtgaagttgatcagtctgtgctaaccttctctgtatttctgataattccttctactgtgaaatcatttataacaggtatcttttgttgttatggtctagcaccttcacactccatacctgatggtactggaacactttctaattggtgctcctggcattttatgtcttcttggaagcaggcagttggagcagaaacttggctcctagacttttttgaacatcc

SEQ ID NO: 114965 - DNA, 383 bp, Homo sapiens
gggaaggtggtcgggaggggtcctggagcggtggcaggtgatcagagactctgcagtaaacagtcatgaaacagcaattacagtctcctggaaaagataatttgctttctctctcaagtcccacttatgtgtttgtagattagatttggctgtaaagaaagaaaatggcagcatgtaataaacattaacgccttaaagtagggggaaaagccctctattaacagctaactcaagtaactcatttagctactcggtaagaaaaaaatacagctaaagtatgtcagctactctaaaacatgccaaagcaaaggtgcaaagttattgcatctattttgaaaggaaacacgcacgtatgttctaaaaccagagtcaaaaattacaaa

SEQ ID NO: 114966 - DNA, 385 bp, Homo sapiens
tactaaaatgacactgttctgaatcatgcagtctttgcaaataacaagctggctgaaaaatatctaaatataattttaatttttgaactttttcttctaattggaaaattagctcatacctgtaatcccagcactttgggaggctgaggcaggcagattgcttgaggtcaggagttcgagaccagcctggccaacatggtgaaaccccatctctgctaaaaatacaaaaattagccggacgtggtggcgggcgcctgtaatcccagatactcaggaggctgaagaaggagaatctgttgagcctgggaggcagaggttgccatgagctgagatcacggcactgtactccagcctgggcgacaagagcaagaactctgtctcaaaa

SEQ ID NO: 114967 - DNA, 219 bp, Homo sapiens
aaaatcctggggaagaagaggagataacaaagaaggggactaatccctggactcttcaatgagaagtaaaatctgttctgtttcaatcttttgtcttctcaactgttaacactagtggttagagactgttggttttttttcactttggtaataccctaaagtagccaggatgacagttttggatatgaagacattatttatttcccccggctccatgaa

SEQ ID NO: 114968 - DNA, 526 bp, Homo sapiens
cttatgtgatcttctaaaccctgcaaatcaaaaggtaaggaacattctgccaagcaacgcaggccccacaacagcctttcttctaactttacgacacgatttcagccacacagaaacacaactgaggagagagccacggagcccgaacttggtcggggttgggcccacatgcacagggggaggcccacatgcacagcgggaggtgcacacggcaccctcgttacctccagccctggctcccgggcaggcgaggggagaagagaggagagaggagaggaggctcaggaccctgggaccagccctggctccccgggaggcgaggggagaagagaggagagaggagaggaggctcaggaccctgggaccagccctggctccccgggaggcgaggggagaagagaggagagaggagaggaggctcaggaccctgggaccagccctggctccccggcaggcaaggggagaagagaggagagaggagaggaggctcaggaccctgggaccactggggctagggtagacacag

SEQ ID NO: 114969 - DNA, 694 bp, Homo sapiens
agtgtctcttcttataagggcagtaatcccataggaccaggggcccactctcaagacctcatttaaccctcattacctcccaaagttctattttacagatgagaaaactgaggcattggggagatttaaataatttgcttagggctacctagagtagggtggcagagctcagaatagagaatatgagtaatatgagtcattgtaaataatcacacatctaccagcaaataataccttttttctccaatcaggtgaactccatcaaggtaggaaccatgcttttaatactattaatactattaatatttccaactagtaaaatactgaatgtgcagtgaatattacaaaatagtacagtaatagtcattgttatcagatctaataccttttggcattaactattagataaagtacaaaagtggtaaatacatggtctttttaattgtatgcaatttttcaaatgccgtctgagggaaggaatcattattatctgttagtttgaaagcagacaagtaaatcccacctttgattagttcacttgtttttaaaatttcatttcctactttgaagagaagacattgcaagcaaaagcatgttgctccagatttggattccagactggcagaggaaggacgaagctttgaaactctggtgctcttagtaacattcttctgtcatcttccacttgtgatat

SEQ ID NO: 114970 - DNA, 432 bp, Homo sapiens
atgggaggccaaaaggaagaggaaacccagccagaccctggcagaaagcttaggcttgggtggagggaagaattttataatggcaggtgggcggttggaggttgaggatgttgctgctatttggattgggaaagagagctaagctggctgagggatgcagacagctcccagagcccattggaggctgggagcaccatggatgctattaccagtatgcagtacagctgaagtgtgccagggtgcaatcatcagcccaggtgacaagccctcatcctccccttcctccacccagtcctcaccaggtaacatttcccagcttctcctctctccaaacatcctgcgtgggcacgatgcccaagcctgcgacgtgagccacctcttcctatgctgccgactcaggacctcagcctcctttcgcccatccttctgtct

SEQ ID NO: 114971 - DNA, 211 bp, Homo sapiens
tgttacttatggtttgggtgaaaaaactttgaaaagtaataccttacagggcaaaaataatctgttgacaagacaggactcaaaatgttgactttccacgtttctcagattcaaaacagcctcaggcccttgtgacctcattcaccagaagttcttgggctgctttcaattcccagagacttcattatagaatccagatattctggtgtgt

SEQ ID NO: 114972 - DNA, 593 bp, Homo sapiens
gatggttcttttaatttataaaggaaatattccaagagttcttttaatttataaaagaaatattccaagaaaaccaaaatgaagaattttaattttcttaatgaaaataagagtggtttatttaaaaatgatttgaaaaagtaactgattttttaatgattgccattctaactggtgtgagatggtatctcattgtggttttgatttgcatttctctgatggccagtgatgatgagcattttttcatgtgtcttttggctgcataaatgtcttcttttgaggagtgtctgttcatatcctttgcccacttgttgatggggttgtttgtttttttcttgtaaatttgagtcctttgtagattctggatatttgccctttgtcagatgagtagatttcaaaaattttctcccattctataggttgcctgttcactctgatggtagtttcttttgctgtgcagaagctctttactttaattagatcccatttgtcaattttggcttttgttgccattgcttttggtgttttagacatgaagtccttgcccatgcctgtgtcctgaatggtattgcctaggttttcttctagagttt

SEQ ID NO: 114973 - DNA, 360 bp, Homo sapiens
ctgcccgctccctgcagtctctcagtggctaagggagggccttgtcctaatcatatgtgggtgtgtgtatgcatatgcatacgtatgcacttataatggaaatatataatttataccttacatattatatatacaaaatgtagaatctgccggtcgcggtggctcacgcctgtaatcccaagactttgggaggctgaggcgggcggatcacaaggtcaggagatcgagaccatcctggctaacacggtgaaaccctgtatctactaaaaatacaaaaaaattagccgggcatggtggcgggtgcctgtagtcccagctactcgggaggctgaggcaggagaatgacgtgaacccaggagg

SEQ ID NO: 114974 - DNA, 454 bp, Homo sapiens
cataggctcactgtctgaagatcatcttcctgagatcttcgaagtgggtaactctgtccattgggatgactaccttctaatatgcaaaaggtatgataagcgtgaacaaataatcttgtgattataactgctggtttgcagatctgctagttctaaatttcaaagctttgggaaaggcttttatgttttctctagagaagtggttagctcatggctaagagttataaagaacataagattgaagcaatacataatgtcacagaatgtcaaatgaaaaggcattaaagacatgtgaaattatttactttcattgagtcttaactacaaaagaaatctgctgaccagcaatgaaagctggagaggggcttctccacatttggtaggagtgatgagagcattcgaagggatttcaacatttcctttttaactaaggggaatttttcactttaaagtt

SEQ ID NO: 114975 - DNA, 138 bp, Homo sapiens
ttttttgcagatacggaaaaggtgatcctcaaatttatatggaattgcaagggtttctgaataaacaaaaaaaatcttgaaaataaagaacaaatttggtcagagcatggtggctcatgcctgtaatcccagccgagg

SEQ ID NO: 114976 - DNA, 598 bp, Homo sapiens
gtttaatattttgactttaaagtctcttgggacttccaggcatacaatcatatcatctgaaaatgatgattttatcccttttccctaattttttatatctctattttatttttcttttatatttgccttgggtaatataaattccatacatgctgagtttgcataaatatattatttttagacaaagttagctaatttttattattaagcttgctggggaaggatcaactggggatgactaggcaattggatatacaggctcgaggctcaagagagtaatatgggatctgataatttgaaatctgagagtcatcaatgtaggagcaatcactgaagccatgagagcagatgaaagggctccaggaggaacaatgtatagcaagaggagagaaaagagtctaggacagaacccgaagaaacatcaacatgtaggagactgactgaacaagtaatcctgtagcagagaagttgaaaaaacaaaagtgttttgcaatagaaggaaaaaaagatggcatttcaaaaagggggaaaggtctgcaagctcttgagaaagctaaggagtgtccttcggattgggcaatttgaaggctgttggtga

SEQ ID NO: 114977 - DNA, 641 bp, Homo sapiens
ctttggcaaaagtatgtatctatacttcaaaacatttctttataatggtttcttagaagtggaattactcttagagtggaattactcttaaatagataaaaccataattaaacttcttgatagatattggcaaactgctttccagaaagtttcacgtgatttacaatcatatcagcattgtgggagaaaacccaagtcactctctcaagttcccagtgttgtcacttgctaatctctgcaagtggcctgtaccattactgctttgtagagtttattgtgattttctttgtaatctttttgtaaatgtcccatggacaacagaagcatttttttttaattttgcagtttgctgagaaaagtgttatacccattaattaatcaactttaccaaataaaagtttcatcttctatgttatcatgcatctactttttctgcaatatactgaagaaggatctattttgggtttcttgatcagtagtagattaaaaatacattctaaaatccttcattagaattagtttctcctcatatttcagatgacttttgatttgtccatgtttatgctcttctaggtacatgaatgttgagtctcatgattgttgagtcttccttagaagttttaccctttagaaataaaaag

SEQ ID NO: 114978 - DNA, 352 bp, Homo sapiens
cagtttagataataataatgttagctcacatttatgaaacatttgctatattctagacattcttcaaagttctttagatgcggtaacatttaattttcaatatagcctattagggtaggtgcttttattatacttgtttttacagatgaggacattaaaacttagagaggttcattaactttctgccctaagttatagagctattgcaaggcagtgaagcccatgctcttaacacatgaatttggatctagagcctatgctttcagtcactataagatattgtcacaatattatgaaaatgctaccgaggctgtaaactgacaaagaggcacttggatttggtgatcataag

SEQ ID NO: 114979 - DNA, 777 bp, Homo sapiens
gactactgacctcgtaatccgcccgcctcagcatcccaaagtgctgggattacaggcatgagccaccgctcccggcccggcaggccccctagaagatgccaatcaaaataaactgcattcttgagacacagggcaagaaattaaagctatccacctcctcaaggcccaggactacgtggaagagacatcgagtcatgaatatggaatgacttcacctgacttcacttgaaattcacttaattttcaactctgttggctatgaggtctctcaaaacagaattttggcttttccagattggcaaatagctcttagttaaatgtggctttcaagtatgtgtttactcctttatgtttcaattttccttcaagttttgggactcagtctggctctctttgctcctcagcttgcagacgcctattgtgggaccttgtgattgtttgccacagccgcttcaaccttctgcaaccagcaagtcaatagtcatcaacatggtggccagaccatctaccaacaaaaagatcacaatttgctgaaggctccaagtctcactctgttgcccaggctggagtgcagtggcatgatctcggctcaccaccttaccacaacctccacctcccaggttcaagtgattctcctgcctcagcctcccgagtattacagctcattgggaggatgttgcgggagaatggcttgagcccgagaggtatggattacatgagacatgattgcaccactatgctccagcctaggtgacaaagtgagaccctgtctcaatt

SEQ ID NO: 114980 - DNA, 742 bp, Homo sapiens
gggtctggaagtgacaaaacaaactggaggctgaaacaaactgctggggtttcatgaatagccagaaaacaagaagaaggaaatcctttcttctctcctaatggaagaaattaattggagtccagcggtcaagggagaagcatagtttgcagagaccttgttctggcctcttatagctgaatatagacaagggggtttatgttatttttatgccagttttcttgtctccagaatagtaataaaagtaagaccaattgtttattttataataggatgacaagcatttctttaattaattttatttttttctcagaagcattaaaatataaggtctaattggctaaatattgctcaatatatatttgtgcattttgcattgcctcattaagtgcaaaaacctttatagactctcatcctgcttactcctgacaactttggtactttaccaaattaatataattctattctcaaagaattagtaaatcatatagctcctgagttttttccaggaacttttccagataagaagattaatcaatggcttcttctttgctactaaataaactaccatttttcaattagaatataagaaatttaaacaccattaatggattaaaatgctgggttctttaataactttgcattctgaatgaataatatattacttttaagaggatcatgaagtttcactaaataaaagaccttatattttaaatgtgtatttttgaatgtgaaaaaaaaa

SEQ ID NO: 114981 - DNA, 807 bp, Homo sapiens
gcggcagtaccgctgcccggagacccgccgcacgcgctctgccctgcctaccaggaaaaggaggaggtgggcagctgctggaatgactcgcgttggagccttttgtgccaggaggaggggacctggtttctggctggaatcagagactttcccagtggctgtctacgtccccgagccttcttccctctgcagactcatggcccatggatcagccatgtgactcggggagcctacctggaggaccagctagcctgggattggggccctgatggggaggagactgagacacagacttgtcccccacacacagagcatggtgcctgtggcctgcggctggaggctgctccagtgggggtcctgtggccctggctggcagaggtgcatgtggctggtgatcgagtctgcactgggatcctcctggccccaggctgggtcctggcagccactcactgtgtcctcaggccaggctctacaacagtgccttacattgaagtgtatctgggccgggcaggggccagctccctcccacagggccaccaggtatcccgcttggtcatcagcatccggctgccccagcacctgggactcaggccccccctggccctcctggagctgagctcccgggtggagccctccccatcagccctgcccatctgtctccacccggcgggtatccccccgggggccagctgctgggtgttgggctggaaagaaccccaggaccgagtccctgtggctgctgctgtctccatcttgacacaacgaatctgtgactgcctctatcagggcatcctgccccctggaacc

SEQ ID NO: 114982 - DNA, 313 bp, Homo sapiens
aaagctattctaaaccttctctaacaaagcttaaaaacatcctaagaaagactgtaaaggtcaaacatcctcaaagagattaatctccttccagaacaaagtacagagtattttaaaggaagacaggaatccagacattgaacaacagtggtgatgtcaaatatccaattaaaattactagacatgtggggaagcaagcaaatgtgaccctaccaagaaaaaaaaatcagttgatagaaacagagcagtgactttctagttaccaaagctaatgattttaatttagttgtgatcatcctatttgatccatttg

SEQ ID NO: 114983 - DNA, 478 bp, Homo sapiens
atccagcagggtgtctgctgtgctcctgatccagcgaggcgcccattgccactcctgatcggactgaaggcttgccattgttcctgcacggctaagagcctgggttcgtcctaatcgagctgaacactagtcactgggttccacggttctcttccgtgacccacggcttctaatagagctataacactcaccgcatggcccaagattccattccttggaatccgtgaggccaagaaccccaggtcagagaacacgaggcttgccaccgtcttggaagcagcctgccactatcgggagctctgggagtaaggacccccagtaacatttggtgaccacgaagggatctccaaagcaatgggaaacgttccccccaaggcagaaacgcccctgagatgtattctggagaattgggaccaactggactctcacatgctaagaaataaacgacttatattcttctgcagtaccacctggccac

SEQ ID NO: 114984 - DNA, 321 bp, Homo sapiens
taggtagtctcatccggtctcctgacttcagataccatttctgtgctgatgatgccccagttcattccacatgtgggtatcattctgacttaccccaccagtctctgctggggtgtctaattagcatctcaggtctgatgtgtcccagatccctggttcaccccttacctctaagcacacttcccccatagtcttccgccatccttccatctgcttggccaaaaatcttgaagtcatccttgatgcccatctttctcacgtgttgcctctaatctaccagtaaaaccttttggctcttcacttcaaaatgtcttcagaatc

SEQ ID NO: 114985 - DNA, 374 bp, Homo sapiens
caagattatgccgacatggctgttagaagacaagacaaattagcagactcatgctcatttctgtcattgaacaattcgtctcattccttcctcaaggcgctgccgttttcctgctctccgtccgtgggggtgtttgtttacacatctctcgcaagaaaagcgcttctctctggcttccctctgcctccccccctccttcctgccctctcccctgccttcccttcctccttccttctctccctccctccttttctccccgttcctttcttcccttctctctgtccttcccccttccttcctttactgatgtaacaaccttggtgtgccgtggctaagccacactccacccctgacctgcgggggatgagtcaaac

SEQ ID NO: 114986 - DNA, 290 bp, Homo sapiens
cagttaaaaccatagaaatgtagtcggatgaaagaatatagagaaaaataaagatacttgagtcaaaaaccaatacatcagaaattgtaaagagcttagaacaatgcctaatacaaagtaagcagtcagtaaatattaactattatttttattatgtcatttctagaagttctattttatttttttccacacatgctttgtttttcttcagtgtcccaattttaaacagaacaactatctccaattcactgagtacagattagtgagttacttcaacatcaaaactaaaa

SEQ ID NO: 114987 - DNA, 359 bp, Homo sapiens
ttcaaacccctgcctgttgtttcccgtgagtgcacggtgatcagagtaacacagagttaccttgttgagcccaggtagatcctccgtgactagcaggagtccgagataagcacgtctctgtgctctcggaggcagtgatcgtcacgtgatagtcgagagctgtctgtgatgcgtagggaggtgtccgctgagcacttggtaccagcatgaggttattcagcacttggcagacatttgctcataatcccccctgctggggacgcttgtcacaggcaggtcttacctggtcaacacctgcccaaggcccctgggctctcaggccttgcatctgattctttgcacttttcctcccagcacgg

SEQ ID NO: 114988 - DNA, 223 bp, Homo sapiens
cagtgaatgaatggaaaatagttaatataactatatcaaaaaaggcaaaagagaaggtgagaggatattacttagtgaaatcttttatcttctgaagccaattaatagtcactgtctaaagcttctgactcaaggatagctatatgacactgtttagtaatacagaggtaacaccactattattagtatagctaacacttattacatacttagcatgtgaaag

SEQ ID NO: 114989 - DNA, 410 bp, Homo sapiens
cctgctcgcccctctctgctgctccgcccctgctctggaggcccctccttcaggactcatcctggagctaaacatgcccccgaggcttcctcacctccctctctgtttctcaatcccactccacccctacggcacctgcaactctcccagacacagagttgccagagtgtcctgtgccctgctcccagcctggggtttccttgagggcagtggttctatccagtttgtgtctggaggcccggtgctgagctctggcctggtataaggctgacattggtaatggttcgttcaccactcacggatccctggcctgcaattttatgccaagcctgggtggcacgtgaggaaggagtggacagcatcccgtcttccagaagctcccgggctagctgcagagaggggcggagcag

SEQ ID NO: 114990 - DNA, 622 bp, Homo sapiens
tactttcatctcagtaaaacagtcagagtgatccttttaaaacataacctaagccattccccattacccttcaatgtttcctcatttcatggaaaataagaaccactatctgaggactagagattcaaggtgagcaaagtggattaagcacagctcttaaaatttctgtaatatgctattgtagccctctacttgtctttagataaagaagttgaaatttttgcctcaaagatgatggttgaactgagatctgaagaaaaagcaggaattaaataagaaaagggacagattaaaataactttcccagcaggggaaacagcaaacttaaaggttctaaggcacaagagagcatggcatatatgaagaaccaaaagagtggccagatatccagacatctagaaggtctagctaagtacttaggaagtagtataaacagaaaagaaaaaattgtggcctcttttttaaaaaaatgattttagttaattttaaagactggaagaagaagagattaaattagttatatttataaatacttggaatagtacctgacacgtagtaatcatcaatgtttggttaaataaatcctaataaatatattgcatctaccttttttgacttaaat

SEQ ID NO: 114991 - DNA, 678 bp, Homo sapiens
atctcctgactcgtgatctacccacctcggcctcccaaactcctgggattgcaggcgtgagccatcgcgctcagcctagaatactcatattattaacattcccataaatattatttagagaaggtttagcatcacttatcccttatttgaaaatgctttctataaatttaatatataaaataaggtggcttttccgttcagcttctgtttctcaagaggattactgagttcttggtgtagcccattcataaatagggccaaaaatgtatagtcttatgtatgttgaaaaaggtccttaggtaattccagtacttttagctgaaaatcattgatttagttttaagttctacctattgcaacaggagttctccatccttgttacgtgttagtagtgtcagggaagacttaaaaattaccagtgcctgggtccctctccagacctttgaactggaactaatgggtggggcttgagcatccacttttagaaatgtttccagtgattcaatgtgtagctctatttcccatcagatttctctgatttcttgtggcattcaattttttctattttggtatcatgattattttcaggtctcatttcctgtcttaggctttatgtctcctggggtagggaccttgccttcttcatttctgtatgttttttgaacacatgaactgatc

SEQ ID NO: 114992 - DNA, 660 bp, Homo sapiens
gtgatctacttttagtagcacagattgattcaaaattaaagaggcttttaaacactctgaattaattgctttaattttttatgtctgagtatagatgtgctatatccactgttgaatttcagtccctggtcatcatcctctgggcaggaaccctaagttcaaaggtactcaactggacagaaagaactatttttcgtgtaatgcataattatgataattatgtaaatgtatgcgttcctaaaagtttagtaagctgcaaaataagacaggattatgcaatggcaagtttatttacttgtctttctactttattaatctttcttatctaaatgaaaatatacagagaaaactgctgctccttgtttctcctcaaagttgtgttgaaagcaaacttttcattagaaatgctgaagttattttatttctcattgaggataatgaatacagaacttaaacggttactgcatagtgtaaaataagaataacttagcataatataaagttttgtcatttttatgacttctgggccattgatattaagatattactgctgaaacagtgactctgccttggagctaaaggacctgggttcatgactgaagaggttggaaggtcagaatagtctattatatatagtttttttcctgtttacttctcagg

SEQ ID NO: 114993 - DNA, 528 bp, Homo sapiens
tctatcttcagaatttaggctccatttgacttagttttcctgaaatatgtagaaaactaatggtgaaagaggacctaattcttgaattatctgcttgaactgtgttgctagttattccaagtagaatttgtaaaatggtccatcattctctaagcaaaatgagggaaataacaattattttctagaaatttcatatatattgaatattacaaaatcatgtaactagaaatgtttaaatggtcacactgggccaggcacggtggctcacgcctgtgatcccagcactttgggagaccaaggctggtggattacaagatcaggagtttgagaccatcctggccaatatgatgaaaccctatctctactaaaaatagaaaaattagctaggtgtggtggcgcatgcctgtagtcccagctgcttaggaggctgaggcaggagaatcgctggaacccgtgaagcggaggttgcagcgagccgagattgcaccactgcgctccagcctgggcaacagagcgagactccatctc

SEQ ID NO: 114994 - DNA, 461 bp, Homo sapiens
gcgccttttcttcggtgttccgtgcaggactgccggctgcttctgcccccgaaggtcccgtcggcggcggggcacagatcctgcgggcgctgcctcagggctcccatgttgggcactgcgagaacccagtgtctccctcacctcgctttgtcttggccctagaggctgggcctgttaccccattttgcagattgagaaggcgctcagggagctgggtgctttgcgcaaaaccaggcagcgaggacagaagtcccgccgtgtggccctcatcgaagccccgtggggcctccagagaccacacgggcctgagcccctgcacttctgtgtcgcaggagctgatttaatggagttcctgcctcagaccacaaggttcggagcgcccgcccacccctgcccctcctgggcaccctgcccaccaggtcacctgcacctgctctgaataaactgtgaagtcaagccac

SEQ ID NO: 114995 - DNA, 785 bp, Homo sapiens
gtgggtggagctcctcttcctctcaggctccgagacggccccagcagcgtccaccgctgtccatatgccaggagggtggctgggcaggctgctgtctaggccaggctaacccctgcggtgggcgtgggtgtcaccagggccgatggcgcttgtgcagaaacccacgtctctgagctgccagcagccaagctgtcctgatgacattcccgggtgggcgcacaagcctgcactgtccgtatagaatcggcccaggctgtgcagcaggggaacccggagcccggaccccgccacggaggccaggctgccgtgcaccatcctgggtgtcctcgtggtgctccgggcgcaggtggcagcagccatggaggagctggaccggcagaagattggaggattctggagggaagtcggtgtggcctccgatcaaagcctggtgctgacggccccgaagcgggtggagggcttgttcctcaccttgagcgggagtaacctgaccgtgaaggttgcatataacagctcaggaagctgtgagatagagaagatcgtgggctcagaaatagacagtacgggaaaattcgcttttcctggtaagtgcagttgccctgtgatggcaggtggaacccggctgtgcacacagctaggccttattgttccccatgctgttccctgcactgttccccatgctgttccctgcactgttctctgtgctgttccctgcactggtccccagtgctgttccctgaactattccctgtgctgttccccatgttgttccctgcactgtccct

SEQ ID NO: 114996 - DNA, 693 bp, Homo sapiens
tcctcccgacatgtcgcagaagccctagggactgttccgcagctctagatggcccagtggggaggggctgccctgtgggcattgctgtctgatggcctgaaggcaccgcttggagggacacatgcctggggacagtgggctcacagatgtcttgctgctttgccaccgagcctcacagccatctgctgacctctcagagcccagcaggcccctgcccgggggttcgtggaatgcccctgggggtctcagacccactgctcagctcttggccaggctccgtatctctctagattggaggattctggagggaagtcggtgtggcctccgatcaaagcctggtgctgacggccccgaagcgggtggagggcttgttcctcaccttgagcgggagtaacctgaccgtgaaggttgcatataacagctcaggaagctgtgagatagagaagatcgtgggctcagaaatagacagtacgggaaaattcgcttttcctggtaagtgcagttgccctgtgatggcaggtggaacccggctgtgcacacagctaggccttattgttccccatgctgttccctgcactgttccccatgctgttccctgcactgttctctgtgctgttccctgcactggtccccagtgctgttccctgaactattccctgtgctgttccccatgttgttccctgcactgtccct

SEQ ID NO: 114997 - DNA, 934 bp, Homo sapiens
gtgggtggagctcctcttcctctcaggctccgagacggccccagcagcgtccaccgctgtccatatgccaggagggtggctgggcaggctgctgtctaggccaggctaacccctgcggtgggcgtgggtgtcaccagggccgatggcgcttgtgcagaaacccacgtctctgagctgccagcagccaagctgtcctgatgacattcccgggtgggcgcacaagcctgcactgtccgtatagaatcggcccaggctgtgcagcaggggaacccggagcccggaccccgccacggaggccaggctgccgtgcaccatcctgggtgtcctcgtggtgctccgggcgcaggtggcagcagccatggaggagctggaccggcagaagattggaggattctggagggaagtcggtgtggcctccgatcaaagcctggtgctgacggccccgaagcgggtggagggcttgttcctcaccttgagcgggagtaacctgaccgtgaaggttgcatataacagctcaggaagctgtgagatagagaagatcgtgggctcagaaatagacagtacgggaaaattcgcttttcctggccacagagagatccacgtgctggacaccgactacgagggctacgccatcctgcgggtgtccctgatgtggcggggcaggaactttcgcgtcctcaagtactttactcggagccttgaggacaaggaccggctggggttctggaagtttcgggagctgacagcagacactggtctctacctggcggcccggcctgggcggtgtgccgagctcctgaaggaggagctgatttaatggagttcctgcctcagaccacaaggttcggagcgcccgcccacccctgcccctcctgggcaccctgcccaccaggtcacctgcacctgctctgaataaactgtgaagtcaagccac

SEQ ID NO: 114998 - DNA, 1046 bp, Homo sapiens
gtgggtggagctcctcttcctctcaggctccgagacggccccagcagcgtccaccgctgtccatatgccaggagggtggctgggcaggctgctgtctaggccaggctaacccctgcggtgggcgtgggtgtcaccagggccgatggcgcttgtgcagaaacccacgtctctgagctgccagcagccaagctgtcctgatgacattcccgggtgggcgcacaagcctgcactgtccgtatagaatcggcccaggctgtgcagcaggggaacccggagcccggaccccgccacggaggccaggctgccgtgcaccatcctgggtgtcctcgtggtgctccgggcgcaggtggcagcagccatggaggagctggaccggcagaagattggaggattctggagggaagtcggtgtggcctccgatcaaagcctggtgctgacggccccgaagcgggtggagggcttgttcctcaccttgagcgggagtaacctgaccgtgaaggttgcatataacagctcaggaagctgtgagatagagaagatcgtgggctcagaaatagacagtacgggaaaattcgcttttcctggccacagagagatccacgtgctggacaccgactacgagggctacgccatcctgcgggtgtccctgatgtggcggggcaggaactttcgcgtcctcaagtactttagtaagcttggccctggggggctctgcccagctgctgctctcccagggactgcccgcccagcccccctgtgccccacagctcggagccttgaggacaaggaccggctggggttctggaagtttcgggagctgacagcagacactggtctctacctggcggcccggcctggtgagcccaggggccttggggtggaggctgggctgggccctgtgggctgactctgcagctcctcatgctggcctatcctgcagggcggtgtgccgagctcctgaaggaggtgagcctgacccccgaccctggcctgtgctgaagttcccgggcccctggcccagtccctggccctgtcaggagcccccg

SEQ ID NO: 114999 - DNA, 521 bp, Homo sapiens
tgggcactttgctgcctttcagctcaggaagctgtgagatagagaagatcgtgggctcagaaatagacagtacgggaaaattcgcttttcctggccacagagagatccacgtgctggacaccgactacgagggctacgccatcctgcgggtgtccctgatgtggcggggcaggaactttcgcgtcctcaagtactttagtaagcttggccctggggggctctgcccagctgctgctctcccagggactgcccgcccagcccccctgtgccccacagctcggagccttgaggacaaggaccggctggggttctggaagtttcgggagctgacagcagacactggtctctacctggcggcccggcctgggcggtgtgccgagctcctgaaggaggagctgatttaatggagttcctgcctcagaccacaaggttcggagcgcccgcccacccctgcccctcctgggcaccctgcccaccaggtcacctgcacctgctctgaataaactgtgaagtcaagccac

SEQ ID NO: 115000 - DNA, 1087 bp, Homo sapiens
tcctcccgacatgtcgcagaagccctagggactgttccgcagctctagatggcccagtggggaggggctgccctgtgggcattgctgtctgatggcctgaaggcaccgcttggagggacacatgcctggggacagtgggctcacagatgtcttgctgctttgccaccgagcctcacagccatctgctgacctctcagagcccagcaggcccctgcccgggggttcgtggaatgcccctgggggtctcagacccactgctcagctcttggccaggctccgtatctctctagattggaggattctggagggaagtcggtgtggcctccgatcaaagcctggtgctgacggccccgaagcgggtggagggcttgttcctcaccttgagcgggagtaacctgaccgtgaaggttgcatataacagctcaggaagctgtgagatagagaagatcgtgggctcagaaatagacagtacgggaaaattcgcttttcctgcttctgtagtgtctccaaccactcaagtgctgggactgggtgggggcaggatggagttagaccctgcagaccctggccttcgaggtccgtccccctcagacgtctcccccaacgccatggccggctcttgaaggccacagagagatccacgtgctggacaccgactacgagggctacgccatcctgcgggtgtccctgatgtggcggggcaggaactttcgcgtcctcaagtactttagtaagcttggccctggggggctctgcccagctgctgctctcccagggactgcccgcccagcccccctgtgccccacagctcggagccttgaggacaaggaccggctggggttctggaagtttcgggagctgacagcagacactggtctctacctggcggcccggcctggtgagcccaggggccttggggtggaggctgggctgggccctgtgggctgactctgcagctcctcatgctggcctatcctgcagggcggtgtgccgagctcctgaaggaggtgagcctgacccccgaccctggcctgtgctgaagttcccgggcccctggcccagtccctggccctgtcaggagcccccg

SEQ ID NO: 115001 - DNA, 252 bp, Homo sapiens
tggtgctgcagacccatccttcccgatggctgcagtccagggccgggcgggagacactggggctgcccacattgatgggtgcacaggtgtgaggctcagaaggaaaacctgtcccagtggctggaacagggctgactcctgaaggctcatggttggggggtgcaggtgcgaggccccaggcagacaaggccaaggggctataccacagggaccacctggcagcaagggtgtctggctcctgggctaggagga

SEQ ID NO: 115002 - DNA, 539 bp, Homo sapiens
atcctgtctgtgctattcactagctgtttgctcacataaaagtcatgtaacttccctgagctgtgatttacacattagtgagtagaaatcatagttccacctcatatgggtgatgttaaagttgaatggaagagacgcataaggcaaggtatgggagagcagcaggtgcacggaccttccatgctctcttcagttaaaccgcattcccaacacctggaggtgttcatcaactctcttctctccaggctccagttccccctacccttccggaggtcagtgggtggggctaaaagttccagccctctaatcacttggtgtttctggtgaccagtcccatgttgagattatctaagggcccagctataaatcaccttattacaataaactcaggtgtactcttaagggggcttgttatgaataacaaaagacacctgatcactcaggcaactccaagggttttagaagctctaggccagaagctgcagacaaagatcaaaaatatttcttatggcagtagtttaatagattgttttttcaaa

SEQ ID NO: 115003 - DNA, 328 bp, Homo sapiens
ttctgttccaggattcagagtattgaaatttgttacctagaacacaaactttgctgggaaacaaagaatgtcacacttaacattctatgtaaataattttaatattccagagttacagatgtccttatatcatttctcatctgttgaagaaatttagtaaatacaattgacttttgtctttttggctaactaaccagaaggtactgttagttattaatacaacataagtttctctttttttttttaaatggtcgaactagtttggggtggaaccagtatcatagatgtaaattctatgttcttgagtaagaagaacccctcttacctt

SEQ ID NO: 115004 - DNA, 369 bp, Homo sapiens
taaatggaatcatagaatatgtggtcttctgtgtttggcatttttcactcagcaggttcatccatgttgtggcatgagtcattttcccaggttcatccgtgttgcagctcgattcagtgtcagtgtctgtgcttctcctgtgggtggaactgagacttggattggttttagtgttgggagtggtcagagaggttttgctcacctctgtcacatggttgaatctgtggctgtgtgctatcttgaaggtttttaggtttgcttgtgttttcttcctattgaaaaggttgaagtttattttaacccgtattatttgaaggaccacatcaaatccttgctattgaaatcctttagttgataatcttatgaaca

SEQ ID NO: 115005 - DNA, 535 bp, Homo sapiens
ggtcattaacccctccctagggtgactataatggattccaacctatgtcaggaaagtcctgtgaaaactgataagttgagacttttaagtgccttgagatcttagaagagataaacaaacaatatccctgtgttttgtgagcatgttatgggctgcccttgaaatctgattctccatgcactggccatgctctgtcctttgcttggtgaccaggtgtagaacacacttaggagtagcaataaaaacagctaacatctattaaactgttactgtgtgctgggcactgtagtttaacgctcacagcaacattctaaggtacaaatgacgaaacagagaggttaagtaacttcccaaagttgcacagttgataagccagagccagtatctgcactccgggctccagagtccaggctctgctcttacccgagataagaagcagataagccgggcgcgttggctcacgcctgtaatcccagcactttgggatcacgaggtcaggagattgagaccatcctggctaaagtggtgaaaccct

SEQ ID NO: 115006 - DNA, 435 bp, Homo sapiens
tgtaattcagaaggaccagaaactcacatttcctgtggcctcaactatttggtttgaagaaaggcagcgtacacagtgtgcaggaggctagttttgccccaccccctataccattccagaagcccactgggaactctcacagggccctgaacgcccctgctctgccttagctctgtcttagaagtccctacagctgcctgcaccactccccacgcctacctgcttaggctcctggtgcctgtcaccttcctaccagtaggaggctctgctttttgccatggccctgagagctctgtgggagggcagaagctggggctttgagtccctgaggacccagctgacttacctgctggagctggctgcctggactctcagctgctttgtgcagagagaccctcctgccttgggcagcccagctttccctgccagccttcc

SEQ ID NO: 115007 - DNA, 374 bp, Homo sapiens
gaaggccaggatgtttcttactcctccgtttcactgtcatttgtggaatcggtctgctgcaggctgggcattgggcctagggctacacacatcacctcacccggcagctctgtgtggatggctgtagatgacccaagggggccttatgaggaaatcagggctcagagaggttaaggaacttgttctaggtcacacagacagaatgtggcagggcggggactagaaccgaggctggtttgatccacctgaaacccagactcgtaactgactctcacaggtgtctgaagtgtttgtgttctggtctccatattagaaagtgaaccttggtcaatccttaacatttagttttcctataaacagggtcagttcttagc

SEQ ID NO: 115008 - DNA, 577 bp, Homo sapiens
aggcgtgcaggtattttgatgaaggacatgggagctgcccgtttggagggaacggtttttataagcatgtgtaccctgatggccgtagagaggagccacagagacagaaggtgggaacatcaagcagatacccggcccaatgaaggaaccacttctgggaactcattgaggaaagagagaacagcagcccctttgacaacgatgaagaagaggttgtcacctttgagctgggtgagttgttgcttatgcttttggctgcagttggggacgatgaactaacagactctgaagatgagagcgacttgtttcatgaggagctggaagatttttatgacttggatctatagcaaccttgtgtggcgtgtgaactggtctgctgaccccagacagcagctgttccctgtggtggtgtggcagtgcctgtgttctctcctaggcaggcctgtcaactccaggtgctggcataagaatttttacccagggcctgtcttttcaacccctcacctttccccaaggagtgtgttgttttccctcttgaaaaaaagttagaaaaataaatcttaaagttagttttctg

SEQ ID NO: 115009 - DNA, 579 bp, Homo sapiens
ggaaaaaaaattaaggaaagtagatccaggaggaaagctggtatttgtctcactaaggtgacaacaaaactttctagtacagaggttatatctagcagttgaaaatacaaaactggagcagttcatgtgactaaacttgattctttacttaagcaaagttaaatcagtaaaactacttttaaaattaatgccttttaaaaccaaatacaggattctcagccaggcatggtagctcatgcctgtaatcctaacactttgggaggctgagccaggcaggatcacttgagctcaggagttcaagaccagcctaggcaacatggtgaaaccccgtctctctctcttttttttttttctgagacggagtctcgctctgtcgcccagactggagtgcagtggcgcgatctcggctcaccacaacctctgccccccaggttcaagcgattctcctgcctcagcctcccgagtagctgggattacaggcatgtgccaccacgcctggctaattttgtatttttagtagagacagggtttctccatgttggtcaggctggtctggaactcctgacctcaagatccacc

SEQ ID NO: 115010 - DNA, 618 bp, Homo sapiens
ataatagattatgggtaaaaagcgagattttgtgtccacgttgttttttgtcattggaagttcaaggattgacaaggtttgatgaatatggcctgcaatgcccatgccttacattctttttccagttacttttatgtaactttagaatattgtttaaaaaaatccctaatagagagtgaaagttgctttatgccttagcaagtattttagttcattactcaaagtcaagattcgtatccacactttgcttaccacagtgtgaggatctaaaccatatgtcagtgatggggagttaccttcatgtgccaattttggttgtgagggatggggttggctattgggggcctctttttggaacacgacttgacaatatgtattaagagtcttgaaaatgtttgcactccctgatccaataattctattcctaaaaatgtcctaagggcataattagaagagtggtttaagatttatggacaaaatattcatagagtgttatctagaatagcaaaaaagtaacatatatatatatatacacacacacacatacatatacacatatataaaaatgtagcctaactatccaaaagagaatggttaagtagactaaaatacaagaca

SEQ ID NO: 115011 - DNA, 493 bp, Homo sapiens
ggtcctgggggaggcgcctgcgcgcggtgaggtagtttttgcgtttggctttgccgccgcggtgtagtccgcgggggcgtctcgcgcgggcagactgccgcccctcaagcgtggttcctgccgggaatgactggggttggtcctgaagagaccacctggccaaccaagccgaggcaggctcagagcgccgcggggagcgcaaagccgcgcgcgcctctgagctccgggcagccgctgttcctcccggcggccgaacggtccgcgcgcagggcggtgtttcggcagccggagaccgcgcggtagccgcgcctgtattcccagcgctttgggaggccgaggctggagggtcgcttgagcccaggaattccagactagcctgggcaacagagcgagaccccatcacttttgtttcttttcttttttttttttttcctttttttgagacggagtctccctctgtcgcccaggctggagtgcagtggcgcgatctcgg

SEQ ID NO: 115012 - DNA, 358 bp, Homo sapiens
tgtttatagatttcgaacaagtggagatgataagagactcagaaagcctcaatgaaatggagctggctcactcttccttctctgaaatgcagacagctgtgagtgacatgggcctctggagaatgcaagtctttgccatggcacggctccgtttcttaaagttaaaacgtcaaactaaagtgttattgaccctattattggtatttggaatcgcaatattccctttgattgttgaaaatataatgtatgctatgttaaatgaaaagatcgattgggaatttaaaaacgaattgtattttctctctcctggacaacttccccaggaaccccgtaccagcctgttgatcatcaataacac

SEQ ID NO: 115013 - DNA, 568 bp, Homo sapiens
gactatgataatacctcatgggcaggtctaaatcaatatgcttagcaaacccgaagtttaccagcgtagtggaattagctgggaaaacagcccctgtctaagaggttttaaaattgcttcattccttctattcaaagttcaaccctcatcctggggaaggaaatggattctcatttttgtgtcttagttgatacttaatacgttccaggcccctcttctttgaagtgtgtgctctgtgtgtgtgtgtgtgtgtgtgcatacatgcatgaatacccgtttgcgtgcacagatctgtagcagcaaaactctttgtacaccacattcacaggagaagccaaggctcccaaacgtacccttttgcctggtcaagatgagctcaggagctgtgctgtgctgaggctgtggtaggcaaaggcttttaacacctggaatgaagctgagcaagagatggcagaagccaacacctgcggtcagagccagagctgtgtgtgtgccacagccctgtcagttacaggattctgccctggaagactgttttctagtttagtgtgagagaaggttggggata

SEQ ID NO: 115014 - DNA, 252 bp, Homo sapiens
ctggaggcctcacacttcctcatttcaaaaacatactacaggaaacgtagtgtaatcctgattacaaaacattactggagtaatcaaaatagcatggtactggcataaagacaaacatatagaccaaagaaacagagcagacagccagaaataaacatgcatgtatatggtcaaatgatctttgacaagagtgcaaagaatacatgatgtggaaaggatagtctcttcaacagatggggctgggaaaactgg

SEQ ID NO: 115015 - DNA, 636 bp, Homo sapiens
cccgggtgtggtgagtctaggggtcctggcgctgtgggccggggtgggcacttggggaggagtgcgatggggtagacggacatcttccctccaggctgctcgggcagggctggaggggagtgggcttcaatctcagcgtcctcacactgcttctgtccagagctttgcgcaccggtctcctaccccgccggcagccgcaagggatcgcagaaggtccctagggaattcaggccgaagagcaaactctggtgccctgaagtgtccgttgccccctcgcgggacctcctggatcacctggcggcgctgccactttctgtatcctgttcctcaggccttctctttgtttaactctgtgtgcccagggttgcccttggggtccttctccttgagctgggacttgattaagcgactactttttttttttttttgaagaaaaaaatcagttggcttaaaaggcacattaggatctactcctctatcacaacttcaggctgcgtcgcctgcctccttgccctttgtttatgctcttcccgttacctggattgtccttttttcctccttttaagactcctactcttcactatcgaggtttcacctcttctgggaaaactttctgagaccgccacccagaattga

SEQ ID NO: 115016 - DNA, 288 bp, Homo sapiens
acacaattatgaaacgtttgcccgagtcgcacaggccactgtcccctttgtgctctttacattttttgttgctatctttaaagtcctagactgtaatcttttctacagttctccatgctaccctctagtgagggtaaaaagggactgcagataccttcttgtgaaatttgagtttgttctgcaaaaccctcgcaaacactgttcccccatcccttcacaaatgcccttccctcctccttgcccagctaactcctgtcctctagatctcactgtaactgtcatttcttc

SEQ ID NO: 115017 - DNA, 415 bp, Homo sapiens
gtgaataagaaatggagtggagtgagggctgggggaggtggcatttccaggtagtcagtgtgtccaggcagcttcctccccagcactcctctcccccagcacccgccactgggcgggaagccacagcacctcccctcctggtgtccagaggccaaggtcacaccagagccctgtgtgccttcacctcctctggggccagtggtgtttgtcactggggcaatgtgtggctgtgcccggctctggcagtgctggggtgacattcatgccgtgtgagctgtgacgcctctgcaggcagagggacggcaccacccaggctggtgacagtgatgggggaggggtgaggtgggctgtcacctgtccaaggcagccggggaggtgacatgttgtgtacccatcccacagtctgcagggagga

SEQ ID NO: 115018 - DNA, 139 bp, Homo sapiens
accctcacagacacacacagaatattgtttgaccagctatctgggcatcccatggcccagtgaagctgacacataacgttaaccatcacaagtagggacccctgtttttattctcttcttaataggcttggggagaggt

SEQ ID NO: 115019 - DNA, 382 bp, Homo sapiens
ctgtctcccaaatgatcacagactttttcctccacttttgtcactgccactgcccttagcattactctgcctttagagaaagtctcttaattggtttggttgcttccttcagtctttattatacagaccactacacgcacatctgacagagacttttcacctttttatggttgaatgactgaaattcccagaataaaattaaaaccaccccacccatctctactaaaaatacaaacattagctgagcatgggggcgggatcctgtaatcccagctacttgggaggcttaggcacttgaatgagaatcacttggacccaggaggtggaggttgcagtgagcaatgattgtgccactgcctgggcaacagagtgagactctgtc

SEQ ID NO: 115020 - DNA, 647 bp, Homo sapiens
cagagatagtgcttggggaggcaggaatgctggtcttctaagagcatgctgggctttttctctttccttcctaaagccagtggcctgctcaccgcccttctttctgagcagctctctcaaggccaggctaaggacaaggcatagatgtggagctgaaaggttaagctccctaccctccacccctgctggtctccagaaggggacaattggaattcaaatatccagtgtcatgaagccaaggagagaggtggcataggagtctataaagccagcccactagcttctctctcctgggaactccctggtttatgagctgccaacccgagcttcatgggtgaaaaaagcacccagacttccagaaaattgtctgagaatgacagccttccagctctgccttcagtctccatcccccatgtcctgcatcctggatctagcaacaatattctgatgcacaccatctcttttctttggcttctctccctccatgacacaaaggccagagtatgatagcctgcctagaaatcaagaccatgataactaattaaagtcatagacttccagactgttaaatcttagtgtggcattagacatgatctaatctaacatccccattttatagacggggaaactaaggcccagagagaaag

SEQ ID NO: 115021 - DNA, 269 bp, Homo sapiens
gggaaatgacacaaattaaacaaaaataaacataaaagccaaaagaaatgtaaaactattctatgttcttgaaacactcttgacgtgtatcagtgatttctttcatgtaagccactaaggtttaagatctattacttgtaacaggaagctggagtatatgtctctgtaataattggccacatcatcattttgacttgatttctaagtggatgcacatccatttctaagtggatgtatctccatagtgaaaataataccacttgccatag

SEQ ID NO: 115022 - DNA, 167 bp, Homo sapiens
gatgaagggtcagctcaggggtggtttccttctcggtcttctttcctgtagtggataatgacataacagggaggggaacaggagcaatagttcttctttggtggatcagtccttacagcgcttgttgacctctaagagtttttaatttaaaatactcattatatcat

SEQ ID NO: 115023 - DNA, 721 bp, Homo sapiens
gtcactaaaattttctgctgtcaatatttggactcatttcctccaagtctttgaataggagaatttagttggttggtcagctgggtacaattgtttgtacccacaaaaactctctagggcccattttttcctgacaatgaattgggtatttagatagagaattgcattcatgcatgtaggggactttcaggcttaggcacaccctgaagcaataatgtcttaaatcaggaatcacttaatttccacagtggcatccggtacttccatgggaagtaagctgagaattattatgcaggttactgtcccctcctcaatatctttccttggtagtgacactaccttattctgcttccacacattcctgtccatcattggagagactcactggaagttgaagggaaatggcattccaagtgagtgatgtgggctgacatacctgggatgtccctgaggctgccactctcagcatgcctcggtactttggatgccatggtagttaccacacctgccagtgttgggtttaggccctggttacaagtgtctctgtattttgttttttaatgtgttttggacccaaaggcccttctttaacttctttccatcttagcaaaggagtaaaaaagttatggctgaatggggaaagctaagttaaaagttggcttctgggaaccctcaccctaagcttttgctgcctggacaacttccccttactttctgaaga

SEQ ID NO: 115024 - DNA, 441 bp, Homo sapiens
cagcacatctatgatgctttagtcaagcattttagttgcaaataacagaaacctatgtcaaactttaagaaaaagaggacatttcattatcatcaacatcagcatctcatgaaacccaaaggcaactggcctccaaaaaggctggaacagggacctggaaggccaggaagtaccaaggtcagtatttttgttttttgttctacttttctatgtgcacctgattcattgtacccaaatttgccatcaaaccttcctaatttacttctcctgtcatcaagtgaccagcccagctgaattatcgttactcagtttcaattccaaattaccaggagaatgtagctctgatcaccccaatttgaaaagttatcttttcctagttctattgtctttggccagcagggcggagccatctaccacaaaaatggctgccatggctcacct

SEQ ID NO: 115025 - DNA, 369 bp, Homo sapiens
ctgctggaggcggccagggaggcaggggtgtgggcgacactgggaatgcagccatcgtagctgaggagtccaagtgggcccatgactggaagtctcctgcttctactaagaattttttttttcaagacaggagttttgctcttgtcgcccaggctggagtgcagtggcccacctcgacctcccaaagtgctgggattacagacatgagccacctggccgtatccagttatctgttgatatcagtatggatttggggacatttattttatgctgttataaaccaatgctatggccattgactcattccaggtttggcccctgggatctccctcaggctggcccctgggttctttcaacaattccccatct

SEQ ID NO: 115026 - DNA, 625 bp, Homo sapiens
ggaccacagccagagatactggccgtgagctggaagcatccagtttgatgtcagttgctctattttcatttcaccaaatacaccaacaattggggaagccatttgtgtattcactcatagagagtgcagctaacttaaataaacattgctcaattcagcagaagatctggaggcacactattcctgtattggacacaattaaaattgtttaaagattttattaagtttctgctttagaaaacaaggatattcctttgtgaagaacaaaacccagtgtgttccagctgtaattcaatgttttgaaagctatttccacaaacttttcccagcagccacactcatccctagagatgatccacattcagaagaaaatgacagatgatgcacgttcagaggagaatactatgtgtcttcattgcacaaagataaaccttgcctaatcctcacattcagcacatggggcatttttgaaggtactaggtcagtatttgttctctgtttcagcgttgtacagataaactcaatgataaccattttggtattgtttccttcatatttattaaataaacaatattaatatctaatctaattggtggaagatttggctattacatctctaataatg

SEQ ID NO: 115027 - DNA, 694 bp, Homo sapiens
ctctatcctatacctaggagatcatccaacctaagttatcaagttttctgaagatggcttttttcctgtattatattgagtacctgcaccatgatggatataatcagacccccactcatcaacaatgctgcaagtgccaaccttggagaatttttaattggtttagaaatgatgtgagtttatctgtacgacaaagacctagaagcagaactgctgaggcaaagggaatgaggtgacggcataacagcatactaagagtgtccccattccacacaagccgtttctgacttccacttcagagatgagggttaactgtccttggatttcaaataaatggaatcataaaataggtactctattgtgtctagcttctttcatttaacaatggttttgaaattcatctacagtgtttttttattgccagatggtattcaattgcgtgactatatcgcactttgcccattcttatgttgagagatttaagttgtttcaagtttttggctataatgaacaagcctgctataaacatttttgtacaagtgtttttataaacataaaaagagtcttccaaagtagttaaaccatttatacttttattagaaatttatggagttctagttattccatattcttgccaaccgtaagttgttccgcggagacactacgtttagtgagggagaatctgtatatgtga

SEQ ID NO: 115028 - DNA, 746 bp, Homo sapiens
gacttcctgacctgcagtccccccaccccaacacatctctctctctcacacacacacacacacacactccacacgcacatgcgtgcacatctagagagcgtctggagttcagcgtgatcaagacccagcttcctgtgcctctgcgaagggcactgccccctcctttccttccacctgactagcggagacctgcgggttgtccttgtccctcttcaccggcagtctgtaaccaaggtcctcccactttcacctcctataactttctctgatctctgtctacttctcaccaccactagatccgaaaccattcctgcctgctccccgctgaactgctgtgatggtgtctttaagaggcccttaggttttctctctgggcagccgggggagagcttatggcacagtactgcgcacccttgacataactaactccatcttagaaaaagacttcattttatatttcatagggtgctttgccaacaagggcaagatgttttgtttaataaaaaatagaaggtcaggcgctgtggctcatgcctgtaatcccagcacgttgggaggctgaggtgggtggatcacgaggtcaggagttcgagaccagcctggccaatatagtgaaaccccgtgtctactaaaaatacaaaaattagctgggcgtggtggcaccgtgcctataatctcagctactcaggaggctgaggcacaagaatcgcttgaacccgggaggcataggttgcagtgagccaaaa

SEQ ID NO: 115029 - DNA, 427 bp, Homo sapiens
tcactttaccctatcttgttcctcatttctccctactttatattaattctaaagagatacggagtaaaatatgtgtcgtatttggaagcagtacttccacagaattttagagcacaaaaattaatttcaggcatcagtcctctatcttatattaacatattatcttattaagataaattttattaggaggctgaggcgggtggatcacctgaggtcaggagttcaagaccagcctgactaacatggtgaaaccccatctctgctaaaaatagaaaaattagccggacgtggtggcgtgtgcgtgtaatcccagctacttgggaggctgaggcaggagaatcgcttgaacctgggaggtggaggttgcggtgagccgagatcgtgccattgcgctccagcctgagcaacaagagtgaaactccatctc

SEQ ID NO: 115030 - DNA, 212 bp, Homo sapiens
actattccacttaacatttctactacaagtagaaatgctccctgccagcggttgattctagagatgtcttagcctccaccatccctgtttaatgaagtctaataacaggcctctctttacccctcacatctctccttagattgaaatgtcactgtgcctcctcacagtgcacggcaaaagcatctccccacccaccccccatgcttatccag

SEQ ID NO: 115031 - DNA, 372 bp, Homo sapiens
aaagagggcttatggaagatgaatgctggaaaggttagtgaaggccagaaatagcaagttggtaagtttgacgtttatattttgtcagaaagcttaaagctgtatgttaggaagttcacatttcatctcgaagagttatttagaatttagggacctggattgccagtcatctttgtgattccgaatgtatttctcaggtcttaaactttaagcatttaaagcctgcatgattatgcagaaaagtaaaaatcttcatctatatttcatagattattgagattattgttaagtaacttgtaggtaattaattcatgacttagcaatggaggttctctttgtgtcagcttgagttactaatatcttttgatgatg

SEQ ID NO: 115032 - DNA, 807 bp, Homo sapiens
aaatgttcataacagcaacagtcacaagaaccaaacaggggaatcgacccaagtatccatcaacagatgaattaataaagtatcatatatccacacaatggaaaattattcagccttgaaaagtaatgaaattctgatatatgccacaacatggatcttgaaagtattatgctaagtgaaacaagccagacacaaacaaaacaaatattatatgattccacttatatgaggtaccttgaataggccaatttataaagggataaagtagaacagaggttgccacaggctgcaggggcaggtggggagggtggagagggtagaaggaatagggagctattattaaatgggtacagagtttctatttgggatgatgaaaagttctggaaagggatacgtggtgatggttacacaacgttgtgaatgtgcttaatgttgctgaatcatacacttaaaaaactgtgaaaacggcaaattttgttatgtacattttattacaataagaaaggttaacaactcaacacttgaggctgggcacagtggctcacccctgtaatcccagtactttgggaggctgaggtgggtggatcacctgaggtcaagagttcaagaccagcctggctaacatggtgaaaccccatctctactaaaaatgcaaaaattagccaggtgtggtggcgtgcgcctgtaatcccagctactcaggaggctgggacatgagaatcgcttggactttggtagcagaggttgcagcgagctgagattgtgccactgcactccagcctgggcaacaagggcaaaactcagacc

SEQ ID NO: 115033 - DNA, 295 bp, Homo sapiens
aaagacttgaacagacacttcatcaaagaagctgtacagataataagcacatgaaaagatgttcagcatcattattaatagggaagtgcaaattataacaagataccattgaacacctattagaatagctggtaataacacatgctgagatatgcagagccactttcagacattttgtctgaaattggaaattttacatttccaccacaggtttagctacctgggaggtggaggttgcagtgagctgagatcacgccactatactccagcctgggtgacagaacgaggctgtctc

SEQ ID NO: 115034 - DNA, 209 bp, Homo sapiens
attctatgagatcagcattaccataataccaaagccagaaaaaaaatcacaagaaaattacagtgcaatgtatcttatgaatatagacacaaaaatctttcagtaaaatactagcaacccaaatctaaccatatattaacgtcattatacactatgaccaggtgggatttatcccaggaatgcaaagttcatttaacgtaataaaatcg

SEQ ID NO: 115035 - DNA, 797 bp, Homo sapiens
tccttaataaaaaaggttttggggaaccagtgttacctagacctccttctctgatccagaatgaatgtggccaaggagagcaggctagtgagaaaaatgaatgcatctcagaagatatgggagatgaagacaaagaggagaggcaggagtctagggcatctgactggcactcaaaaaccaaggatttccaggaaagctcaattaaaagcttgaaagagaaacttttgttggaggaagaaccaacaaccagtcatggtcagtcttcccaagggattgttgaagaaacttctgaagagggaaactctgtacctgcttcacaaagtgttgctgctttgaccagtaagagaagcttagtccttatgccagagagttctgcagaagaaatcactgtttgtcctgagacacagctaagttcctctgaaacttttgaccttgaaagagaagtctctccaggtagcagagatatcttggatggagtcagaactaataatggcagataaggaggttggtaacaaggaagatgctgagacaggcaacgtagcctatatctaccttctcatccagtaaccaggtatcctgcccgctatgtgacccatgctttccacccacaagagattgaacgaacatgccatgtactgaaatggtctgatggaggaagatacagtcatgactcggagaacaaaaagcaggccaagaacaagaagtgacactgggaacagctggcccaaacttctctagacgtgacaagaatcgggaagtgtaagctcggctaattcctggtcccatcaacaaagaac

SEQ ID NO: 115036 - DNA, 354 bp, Homo sapiens
catcttcatgaagagctacaggacaaggcttctgactttttttaggttagcttagtgtcattgtctgttggtgactgaaggaagctagctggcgcagcccccatgtgtgcaaggcccccgagtacacctgatagagccctatctggtgtatatgggtgcatgtcgctggcatcagcaccctgccggggtgagggtagttcctggagctactgggatgaaatgcagagctcccaacctggaggagtgcatggcccagtggaggagacagggcagtgaccaagtacagtggactgtgcagtagctgacccaggaagaggggcctcagccagggcagtgggcggacggccacacggg

SEQ ID NO: 115037 - DNA, 1627 bp, Homo sapiens
agcgaggtgtggctgtggaaaaagacagggttaagcaatttttttaaagcactacatatttattgatagaatatctctccaggcagtattcacatgctttaaactgaagctcgtagcttggcagtgcagtttaagcaaataaactcaggctgttgaacacaatgattaacaggaagcaggggaggggacatagttactagactctggccgggacaagaggctgaggttaaggtcttagagccgatgacttgcagaatggtcacctcacccacttgcaatttcatggtgggaacaggtggaccccctggaatcagaacctctctgaggacatctgtttttgtgtagacacaggttgcaggttagcaggagaacaggcaagccaaatgcaaaggagccacttcagaaatgtgtcacagaaaagtgaaaatgcaacctagtggtaagtgaagaggggaagaagaaagaaaaaggaccagaaccgtgaactgaagggacagggaacagccagacgagagcttcagccatcacgaggatgatttcggaacctggagaaaatgtaagttaaatatatctacactctgatcctatctcaagagagagatattttactcatttcctggttgtgaatgatgggctcttggaagcactgtctttttagcgcgtctcttatctctgccctgatttttgtatttgtttacaatactgagttatgggagaataaacgttttctgagggcagctctgtccaatgcttcactgttagcagaagcctgtcatcagatttttgaggggaaagttttttacccaacagaaaatgcattgaaaactacccttgatgaagctacctgctatgagtacatggttcgaagccactatgtaacagaaacactctctgaagaagaggctgggttccctttagcttacacagtgaccatccacaaagacttcggcacttttgagaggctcttcagggcgatttatatgccccaaaatgtctactgtgtgcacctggatcagaaggcgacggatgcctttaaaggtgcagtgaaacagttactcagctgcttcccaaatgcttttctggcttccaagaaggagtcggttgtctatggggggatctccaggctccaggctgacctgaactgcctggaagaccttgtggcctctgaagttccctggaagtatgtcatcaacacctgcgggcaagactttcccctgaaaaccaacagggaaatagttcagtatctgaagggatttaaagggaaaaatatcacccccggagtgctgcctcctgaccacgctgttggacggactaaatacgtccaccaagaactgttaaaccacaaaaattcctacgtgattaaaacaacaaaattaaaaactcctcctcctcatgacatggtgatttactttggcacggcctacgtggctctcacaagggactttgctaacttcgtcctccaagaccagctcgcacttgacttactctcctggtccaaggacacctacagccccgacgaacatttctgggtgacactcaacaggattcccggtatgtacgtctcttaacttttatttttacgaataaacactgcatggtcaatactaaataagttgctttgaaaaga

SEQ ID NO: 115038 - DNA, 1569 bp, Homo sapiens
gagatcgtgccattgcactccagcctgggcaacgagagcgaaactccgtttcaataaataaataaaataaaataaaaagttgcttgtctactacatacagacaatgctaggagccagaaacatgaggaatacatgagctcggcgccaatggaacatgctttcacaccgggtgcagctaaccaccacatcatacaaaactcgtcgctgacgttttagatgtataatctgattggcatggactcacagaggagggagtaagggaagagtaagaagatttcaaaggagagacacaggttgcaggttagcaggagaacaggcaagccaaatgcaaaggagccacttcagaaatgtgtcacagaaaagtgaaaatgcaacctagtggtaagtgaagaggggaagaagaaagaaaaaggaccagaaccgtgaactgaagggacagggaacagccagacgagagcttcagccatcacgaggatgatttcggaacctggagaaaatgtaagttaaatatatctacactctgatcctatctcaagagagagatattttactcatttcctggttgtgaatgatgggctcttggaagcactgtctttttagcgcgtctcttatctctgccctgatttttgtatttgtttacaatactgagttatgggagaataaacgttttctgagggcagctctgtccaatgcttcactgttagcagaagcctgtcatcagatttttgaggggaaagttttttacccaacagaaaatgcattgaaaactacccttgatgaagctacctgctatgagtacatggttcgaagccactatgtaacagaaacactctctgaagaagaggctgggttccctttagcttacacagtgaccatccacaaagacttcggcacttttgagaggctcttcagggcgatttatatgccccaaaatgtctactgtgtgcacctggatcagaaggcgacggatgcctttaaaggtgcagtgaaacagttactcagctgcttcccaaatgcttttctggcttccaagaaggagtcggttgtctatggggggatctccaggctccaggctgacctgaactgcctggaagaccttgtggcctctgaagttccctggaagtatgtcatcaacacctgcgggcaagactttcccctgaaaaccaacagggaaatagttcagtatctgaagggatttaaagggaaaaatatcacccccggagtgctgcctcctgaccacgctgttggacggactaaatacgtccaccaagaactgttaaaccacaaaaattcctacgtgattaaaacaacaaaattaaaaactcctcctcctcatgacatggtgatttactttggcacggcctacgtggctctcacaagggactttgctaacttcgtcctccaagaccagctcgcacttgacttactctcctggtccaaggacacctacagccccgacgaacatttctgggtgacactcaacaggattcccggtatgtacgtctcttaacttttatttttacgaataaacactgcatggtcaatactaaataagttgctttgaaaaga

SEQ ID NO: 115039 - DNA, 1521 bp, Homo sapiens
gttcactgctggacgcctctgggcaatcttaccctcctgggaactgagagagacaatgctaggagccagaaacatgaggaatacatgagctcggcgccaatggaacatgctttcacaccgggtgcagctaaccaccacatcatacaaaactcgtcgctgacgttttagatgtataatctgattggcatggactcacagaggagggagtaagggaagagtaagaagatttcaaaggagagacacaggttgcaggttagcaggagaacaggcaagccaaatgcaaaggagccacttcagaaatgtgtcacagaaaagtgaaaatgcaacctagtggtaagtgaagaggggaagaagaaagaaaaaggaccagaaccgtgaactgaagggacagggaacagccagacgagagcttcagccatcacgaggatgatttcggaacctggagaaaatgtaagttaaatatatctacactctgatcctatctcaagagagagatattttactcatttcctggttgtgaatgatgggctcttggaagcactgtctttttagcgcgtctcttatctctgccctgatttttgtatttgtttacaatactgagttatgggagaataaacgttttctgagggcagctctgtccaatgcttcactgttagcagaagcctgtcatcagatttttgaggggaaagttttttacccaacagaaaatgcattgaaaactacccttgatgaagctacctgctatgagtacatggttcgaagccactatgtaacagaaacactctctgaagaagaggctgggttccctttagcttacacagtgaccatccacaaagacttcggcacttttgagaggctcttcagggcgatttatatgccccaaaatgtctactgtgtgcacctggatcagaaggcgacggatgcctttaaaggtgcagtgaaacagttactcagctgcttcccaaatgcttttctggcttccaagaaggagtcggttgtctatggggggatctccaggctccaggctgacctgaactgcctggaagaccttgtggcctctgaagttccctggaagtatgtcatcaacacctgcgggcaagactttcccctgaaaaccaacagggaaatagttcagtatctgaagggatttaaagggaaaaatatcacccccggagtgctgcctcctgaccacgctgttggacggactaaatacgtccaccaagaactgttaaaccacaaaaattcctacgtgattaaaacaacaaaattaaaaactcctcctcctcatgacatggtgatttactttggcacggcctacgtggctctcacaagggactttgctaacttcgtcctccaagaccagctcgcacttgacttactctcctggtccaaggacacctacagccccgacgaacatttctgggtgacactcaacaggattcccggtatgtacgtctcttaacttttatttttacgaataaacactgcatggtcaatactaaataagttgctttgaaaaga

SEQ ID NO: 115040 - DNA, 1265 bp, Homo sapiens
  misc_feature (1226)..(1226): n is a, c, g, or t
agcgaggtgtggctgtggaaaaagacagggttaagcaatttttttaaagcactacatatttattgatagaatatctctccaggcagtattcacatgctttaaactgaagctcgtagcttggcagtgcagtttaagcaaataaactcaggctgttgaacacaatgattaacaggaagcaggggaggggacatagttactagactctggccgggacaagaggctgaggttaaggtcttagagccgatgacttgcagaatggtcacctcacccacttgcaatttcatggtgggaacaggtggaccccctggaatcagaacctctctgaggacatctgtttttgtgtagacacaggttgcaggttagcaggagaacaggcaagccaaatgcaaaggagccacttcagaaatgtgtcacagaaaagtgaaaatgcaacctagtggtaagtgaagaggggaagaagaaagaaaaaggaccagaaccgtgaactgaagggacagggaacagccagacgagagcttcagccatcacgaggatgatttcggaacctggagaaaatgtaagttaaatatatctacactctgatcctatctcaagagagagatattttactcatttcctggttgtgaatgatgggctcttggaagcactgtctttttagcgcgtctcttatctctgccctgatttttgtatttgtttacaatactgagttatgggagaataaacgttttctgagggcagctctgtccaatgcttcactgttagcagaagcctgtcatcagatttttgaggggaaagttttttacccaacagaaaatgcattgaaaactacccttgatgaagctacctgctatgagtacatggttcgaagccactatgtaacagaaacactctctgaagaagaggctgggttccctttagcttacacagtgaccatccacaaagacttcggcacttttgagaggctcttcagggcgatttatatgccccaaaatgtctactgtgtgcacctggatcagaaggcgacggatgcctttaaaggtgcagtgaaacagttactcagctgcttcccaaatgcttttctggcttccaagaaggagtcggttgtctatggggggatctccaggctccaggctgacctgaactgcctggaagaccttgtggcctctgaagttccctggaagtatgtcatcaacacctgcgggcaagactttccctcaaggtttgtnttttcttgtattaactgacacgttgccttttgtttcggt

SEQ ID NO: 115041 - DNA, 827 bp, Homo sapiens
agcgggatgaagcaagaaggcacattggaaaggtctatgtttccagtataagacagggagctgaggatgtctccccactgcccaataatcaggaattgaaggcagcctctcacagacagtcagcaagaatctgaggccttcagcccaacaagccagaaggaaatgaattcgctaacaaccacatgacactggaagcagacctttctccaattgagaagagaccacagtcctggtcaacatctaggttgcagctttcaaatgagaccctgagccagaggacccaacaaagccatgcgcagactcctgacccacggaagtgaaacatgactcctacagtcaccacggagtgtttgagtgacacgaagtctccatgtcatggatggccaggcagctgctgaatgaggcatgctcacgttctgattccccagattaatcaacctcactcctgccatctattccatccctctgcaatctcctactcacttgaatatcataagtctacgtttttttgtccacaaggagaaaataattcttataactttagtccctagactgttacttttcaaagtattctttagggaacagaaagagaatgcatcaaatcatgtctgcagctactgtccctactgaaatgtggcacatcttgtgtgccattagcccccatggctttatattcttttccacaaaaccattactcatgttttaattttctgccctgtttccctcagactgagttgcatttttaaaaatgatatctcaagatctttaagacaccgtacagtgggttacccttttattatcctcctgttcaagccttggcatgaaaa

SEQ ID NO: 115042 - DNA, 680 bp, Homo sapiens
catcacttaatttgtgtggattcaatgtagtacttagcacatggcaaattcaagttttgctttttgcaactttgtacaatttttttatttttccaaatatttttgatccgtggttggttgactttgcagatgcattaactcatggatatggaggactgattttactctgaaggaacccaacccagtctgtgttgagtggggtggggctgaggcctagggaataggctattcagaaaaggcttccctgaggaaatgatgcctggagctataatttaaagaaggagttaaatttggcttggcaaagaaggaaagttccagagaaatgaagagctcctacttataggaaattaaagctcctcccatctgccttcaagtttccctaaggaaagtctggatcttcagcaagaagtttcacccttataggagaaaaagttgtatttaagatccagggcatttatcttaaggatggagttgcattcaaaagtggtatctcacgtcatctgaaatcttagtctcttatttttgtgttttttcctacttccagtggaattaatgataaacactgagattacttctaatgggaatgggtattctctgcaaaggatttttcctctttcccagggctactgtagatgaagacttttggcaggctgcattgattggcattgggctatattact

SEQ ID NO: 115043 - DNA, 200 bp, Homo sapiens
ctgggtttggggtttcgtagcagcaaaggcagcaagagcttgaagcagagctcaccatgaggccattaggcattgctgagcggcctggggaccagggagctcccgggagctctctcccaccccccacagaccccagagaatcaggcagctcttccctgagcccccggcagcaatgtgctattgaaacttctaaaactagg

SEQ ID NO: 115044 - DNA, 129 bp, Homo sapiens
cataggcctcctacctggtctctctgctccagctctcaccgccctacactctattcacaacccttctgagttgtgcactgatccttccaaaacatcaatcacacaattttactcctctgcttaaaactc

SEQ ID NO: 115045 - DNA, 232 bp, Homo sapiens
tctcccagaagacgggcattctccctgcccctggccttgagacgtccccaccgtaaaacaaatcttaaaaaaaaacaaaaaaaccccaaagaactattgtctgaattttgccatctgaacataaccttagcagagagcttttccatagcatggtagagttgctacaccacaagaagacttcctcaacctgacaaaattgacaaaaccttcaacacaaaacctctgctaactt

SEQ ID NO: 115046 - DNA, 429 bp, Homo sapiens
acaaaggccatgaaagataatttaacagaggaaatttaatgaaggaaatagtcacaaagatgttgaggaggtgaaaagccaccagggtatggaaagaagcccagagtttaacagcagcattagctgttttgtaccagcatcagttgaagtaaacttccaaacattcgcactctttctttcatagacctaaggacattaaagaagaaaaaaatcctccctaaacatttggagtattcttcgtaagttgcttaatatcagtaagattaaaaggtaagtagtgtggctcacgcctgtaatcccagcacttgggaggtcaaggcgggtggatcacgaggtcaggagttacagaccatcctgaccaacatggtgaaaccccatctctactaaaatacaaaaaaattagctgggcgtggtgcacgtgtctgtagt

SEQ ID NO: 115047 - DNA, 442 bp, Homo sapiens
aaaaaaaaaacaacgcaaactactaaaaagtgtcattaaaaaataaaataaccaaatacaatgtatgaaccttcacacactagattaaattagatactgaatcaaaaagcaaaagttatgaaagacattttaagaacaattagggaagttgaaatacagactgtatattaaataatattattgaattagtgttaattttcctagatatgataatggtattgtgattataaagaagaacattcttattcttaagaaatgcttgctaaagtgtcatgatgtctgcaacttaccttcaaatggttctaaaaaaaaaaagagggagagagaaagaaggtacagtcaatgtggcaaacattaacagccggaaaatctacatgaaggggataaggatacttcctgtactgctcttttaactcttctgtaggtttgaactttaaaaaaa

SEQ ID NO: 115048 - DNA, 541 bp, Homo sapiens
caacgttcccagccacagttctgtgagctatggttcagactgaagtcttttgcttattttggtgataaaagctgaacatggtttgtgctgaagttccagctggttatcggagtggctgaccaggtcagtctgctttgtgaaggggaatccaggcccctcttgccctcattttgcagcctgaacacatgctcactttccactcccacgtgtgaagcatgaacacacgcacacctccgcccagttatgcagtcgggctcacggctaaaaaccgattttccaaatgatcgggcaggatcacgcatggatgacggaagctctggctctgcccccacactaattgccgtgcgatcccgtgcaggtttctttacttctctgggcgtgtttcctcaccggcaaaatgggaacacttaacgaggaaactttgcagagagcattcagctttcaaactctgactccccaagcgtgtgacatattttttaataactcctttctcattatttcccttttacctccttgctttgaatcttgagacacaacagaa

SEQ ID NO: 115049 - DNA, 263 bp, Homo sapiens
tggggggctcttttccgaaaaactgcccacccagcatttctgtttttttaatgggaaacaaagataagtagaaagtgttgttaatgcctttgattatagaatcagtttacaaaatgtagaagaaatcacagcattagggaattagaattttacaaataccattgtcgtaacagattcaggcaaacaccagtggatgctgagagcattgagtgaaaggtttttggggaactggctagtcacacaatctggaagtatcagcccac

SEQ ID NO: 115050 - DNA, 321 bp, Homo sapiens
tagggaagtggggagtagtgttgtcacgggagccctgggggcctgtcatgggcattaggagtctgagcaggcttgcaggggaaaggagaattggaaattctcccgtgcctcacagatatataaataaagcacaataaggactataatgaggaaataaatgtcataaaaatgtttgatagcagatggaacatacaaacacaaaaagatgccaatagcctccagccaagagaaataagggaaggagctcggtctaggtgaccccgaagctctgttttagcttgcatattctgtaatttctatgctttgatttattgaatttca

SEQ ID NO: 115051 - DNA, 299 bp, Homo sapiens
gaggaactcaaacacatcaccttcaaataagattaatcatagaccctcatagaactcttaagagtattaaacgtggtaatgcatgtaagtgctttgcagagttcacaacatttagtagatgttagctgtttgtaatcatcgtcatcattatatatccttatgatttgtccttgggaaaaactacttttgatctaagtggattattatctatctcccagctctgctggccaggtttttatttagttgtgtaatcttggacaagttacctaacttttttgagtctgaatatatttaatctg

SEQ ID NO: 115052 - DNA, 209 bp, Homo sapiens
cttcccaataataagcaaagctctgaggaataattttgtacacaagtttttgcataggtccatactattcctctggaatacattcctggaagtagacttgatgagctattggatgtggattgttctccagccatggtgagccaaggaatattccatagatagaaggagagagcctatcactcctaacctccccaatgcttggtggccat

SEQ ID NO: 115053 - DNA, 120 bp, Homo sapiens
tttgtatatggtggctttggagaaagaacaggacttgggtagaagtggtcagagcccagcttgaatgggggtgacttgaagttggaggaagagtaggacaggtctggaaaggccaggagc

SEQ ID NO: 115054 - DNA, 244 bp, Homo sapiens
accttgccccaaccgcttccgaatcacctgttatttgtcaaaaatgcagattcctgcccccaactctgatttgttgaattaggatgaggaagaggggacagcgcccagaaatctgcactctcggctggcaccccagccatcacttatgcacctgaatgcttgagaaattctgtcgcagaacatggactttggagtgtcacagacctgggttccagtcccagctctgccacaaagtagctgcgtg

SEQ ID NO: 115055 - DNA, 940 bp, Homo sapiens
agcggagttgaagtggtaggaaatttttacataggagagtatggtgatcatatttgcattttagaaaataatggatagcagtttgttaggggaacaaaggacagagacagggagactatttaaaacattaataaaaaataccagtgacagatgatgaggcgtctgcctgatgggaatggagaagaggagatggattcagaaactacttaggagaggcaggcagtccaaggctgatgcccaaagaagccatcaagacccgtgctacttccagctccttctgtcctcataatcatagatgattgctccacatccagagtctcgctcagtttccaggctggagtgtaatggcgtgatcttggctcactgcaacctctgcctcccagcttcaagtgattcccctgctttagcctcccaagcagctgggactacaggcatgcaccagcatggccggctaatttttttttgtattttagtacagatggggtttaaccatgttggccaggagttcaagaccagcctggacaagatggtgaaacggggtctctactaaaaatacaaaaaaatcagcggggtgcggtgggcaggcgcctgtaatcccagctagtcgggaggctgagcacgagaatcgttgaagccgggcggcagtttgcagcgagcggagatcgccgccagtgcactccaggcctgaggcgacagacttcgtctcaaaaaggaaaacaacagtgcgagagaaacgaaacacagggagcagggcaggtgggccaggaaaaaggtaaacacccgggcccgggacatttacctctaaaagttgagatcccaaaaagtcgcagactccaagtcttaaaacaggaattcgtacacagggggtctgggaagttgtgagagcgagagtacgcagggagacaagatggcaacaaaacgtccaagaaaaggggaggaa

SEQ ID NO: 115056 - DNA, 653 bp, Homo sapiens
caacaaaagaagtgctttatcttcatggcctcgttggagctgggaacattctggacctcagtgctggagcctgctttcacttcctctactaccacagtctcagacttggcctgacagggcacttcagaccttctcctgaccaaccagtccaggtccgactggttttcccaaaagtgctcactgcatcgcatagagactgtagtgcacattaaaatgaattacgtccggagaatacaagatgatcagatatgaaccgttttgactccaacaattataatggctctgtgctgtgtgtcaggggctatgaaacaggcgttaaaaagaatgaggtgactggctgggcacggtggatcacgcctgtaatcccagcactgtggaaggctagggcggatcacttgaggtcaaaagttcgagaccagcctggccaacatggggaaaccctgtctctaccaaaaatacaaaaattagccaggcatggtggcgtgtgcctgtagtcccagctactcaggaggctgaggcaggagaatcacttgaacctgggagacagaggttgcagtgagctgagatcctgtcattgcactccagcctaggtgacagagcaagactccatctcaaaaaaaaaaaaaatgaggtgacttatgtgtgtccagcat

SEQ ID NO: 115057 - DNA, 545 bp, Homo sapiens
gagcaggtttctcgggacaccccaggccgtgacgtcgcagcgtcacagccaccgtcatcgattttgcagcagttcccctcctcctgtcccttccccatcagactggtaaaggctggagagagtgggagcacggtgcctccgttcctcatgttgccacgctgtggggagacgtgtgggcagggacaggcgatggccgagccccattcctcttgttgccatgctgtggggagctgtatgggcagggacaggtgatggccaagttcctgcccgcctgccagccggggcgcccaaaaagccacggggatcccaggggtccctccaggacagacagcgcccaagcctttgtcttgtttgaggaagaagaaagggtggtgagggtggccacgtccccacctggccatggttcggttcgttttccgtcattgccgaaaggctgatgagcatggggatgatgcttccccagtgaggtgaggtgtccagtggccaggacaagaggcaggtgtgggtgtggaggaaaggtgggcctggccctgagagagccgaga

SEQ ID NO: 115058 - DNA, 359 bp, Homo sapiens
gcgtgattcaaactgatcagagcagtgccatatattgagcacaacatgataaatagagccaggtttcacacttgctctgtaatgaatgcacagtcccactgctaatcggctatctgattctgatcatgtaccaaataagtttcagtttcttcatctataaacttagaataaaaaccaatgccttgatgcaaataagttttataaagtataaattgatatgcaaatgtcaggtcatgactaaatgctgataacttatcaaaaatgttaaaaatgaggctgggagcggtggctcatgcctgtaatcccagcactttgggaggctgaaggggggtggattgcttgagcccagcattttgaga

SEQ ID NO: 115059 - DNA, 786 bp, Homo sapiens
agtatatcaaatccaaatacaatttacttggcaatacctactcttttagattacatgtaccgtctttttgtacaaatattgaagtatgacatggactggtaacaagactactctgtagcctctaaaatatcttacaattgtttctaattttttaatataaaagaccctttagttaagaccaataagaaagaatgctttcttcaagactcaaatacggtctgggtatggcagctcacgcctgtaatcccagcactctgggaggccgaggcatgagccaccgcacctggtctgttttaggtgttttatatatcatttcaattaatccaataatttcatgaaggaggtactatccacattttacatttaaagaaactaaattccaagaggttaagtaacttttccaggttataaaattactttctgacaaagctattaattcaaagttaagtatatgtgactcgaaagtctcgtgtaccacatgaattttcaatctatatgttacatcaataaaagaatgggtagcatgcccacccatgtaaaaatctgttttaatagtaaaaacaaaacagaaaaataaaaagacttagtaacatattaatgtcagtgagtattccaaaaaaaaaaaaatactgactgggtacagaggaatacgactcacaaaagtgagctctggaagataagactaggaaaaaaaggtggggcagggaggagaaagaacacagaaagccaagaatgttaggctatagaatatggatttagaaattaggaaaccataaaaggtgaggt

SEQ ID NO: 115060 - DNA, 235 bp, Homo sapiens
agttaacaatttgataattgtgctcttcttctaaggtgaggtttttactcccaaccaccatataggagaatgattagaaaacaatcatttttaaagaacaaaaagaaaaatccactagcattttgttttatattgtgttttgttacaagatacatcgtactctaggccaggcgcggtggctcacacctgtaatctcagcactctgggagaccaaggcagactgatcacttgaggt

SEQ ID NO: 115061 - DNA, 413 bp, Homo sapiens
tgagggagttgtttgtataatggaaagtgattaactgtgattttctcttgttagggctctcctccctagaattcttctattcccccaggggtttctcagtgctaaatgttgctgatacagactagagtcaggcctttctcttgttacacataatctagagaaagtaactcatgttcccaaataaatatgtccaaaataaggagacaaatgagcgcaagcacctcaaaaggcaagtaaaagataacaaactgtgtgtatgtgtgtgttttcttgttttatgttgttaatatctttgtgtatatagtagaagcaaaggcagatggaataaaaagaaaagtctaataaattttctaaaagatattaacaacatgaaacaagaacaaaaacttacttaataggaccaaaggaaaata

SEQ ID NO: 115062 - DNA, 498 bp, Homo sapiens
ctccgagcgttttctattgcggaggttggtgtggcttgggcggttggctgggaggaaagtaactaaagagcagaggagtgtagggtttgccgtcgcttcggtcccctcctcaatctcctgccttcaagccggtcttcctcagaggttctcgtgtttagatcagcttgtctctaaacttctccgctccttcctgggacagagacctggctgtcccgagaatgttgcgtcccttgaaactttctcacatgaattagtattctcaggtctcagtttgcagaggtcgggattatgtgccaggtgctgtcacctcttgtaaaaacacttgcttcttcagcccttccccttagactctgtcacctacttcaccccgtttggagataatctgccgatctgtgtatccagctccttgtctgtctcccgtctgaccatctttgataatttcagagcctatgtggccaacccattcaacatcgggcctcgtctttagcgacccttata

SEQ ID NO: 115063 - DNA, 108 bp, Homo sapiens
atctaaactgtacctaaaattgcccacacaacaaagtacataagaatactattcttggccgggcgcagaggctcatgcctgtaatcccagcactttgggaggccgagg

SEQ ID NO: 115064 - DNA, 735 bp, Homo sapiens
agcggaagaagtataatgcctaatgcctaatttttgtcacctggaaataattccagcttcactaacatttatcatatgactgaataatcccagtgccttcacatgtccttatgtcagcaagacacttgtccttataagccactaaaggaaaagaggaaatgtttccatgagggtggggctcctcatttactcacctgagcacagctggtaccttgtgctgtttacaggtaaccagtaaatggaggtatagattatgcgatctggctttaagaaaaccaacccttacaaagtaggtaactgcaaagaaaacatggattggagataatactaatgatacaagcacatgccacaaaagtaaatggtcagccaaccctttccatacccttaggcaagacacctaaccagccacatcacacccccaaaaacatatcttgatcagatgggacaagttgcagccaagtgaatgaggaagaacctggttttcaacagaaactggtaccgtagagaaagtgctttgaaaacaaatgtttggaaaatatttctattgtttagtgtttttgttgctaaaaatgatgtaactaggtcatctacaaaagctctcatatctgcagacttttaaaatccggaaacagaactgtaaagattcatttgaaaaaaaacatgaacatttcagtggattttgaacccatttgttaaaaatataaaaatgcaacacttgattagtttgcatgaaaa

SEQ ID NO: 115065 - DNA, 322 bp, Homo sapiens
ctcccccccgcacccccgcctagcgtccttcccccaatcccctcaggctcggctgcgcccggggccgcgggccggtacctgaggtggcccaggcgccctccgcccgcggcgccgcccgggccgctcctccccgcgcaacctggaacaactttaaccaaggtctatgctgtacattatcttctgaaccctctctgtgcttagctcaatcactgagtgctaaccctaagttggcagtcatgtatttataatcaaatactgatatatgttctgaaggctgcataaacagaagacatatcatacttcagtatcatataattaccac

SEQ ID NO: 115066 - DNA, 490 bp, Homo sapiens
ggatgcagtggtgagcagtgagtcatttctgatttaatgatccacaacatatggaccgtttccgtccaaggaagtgcaaatcctttttcgaagtagcagagtacaacttagaaagaaataattctttcatttcattaagatcagtgatgaaagaatacttttaaatttcccctaggtagaaatgagaatattctgtctcctaaaatccaatgtctgtattatatttttccactatattgtactttgcctaaattaacctttttttcttttttttctgttttttttgtttgtttgtttgtttgtttgtttgagacagagtttcgctcttgttgcccaggctggagtgcagtggcacgatcttgactcatcgcaacctccacctcccgggttcaagcgattctcctgcctcagcctcctgagcagctgggactacaagcatgcaccaccacgcccagctaattttgtacttttagtagagatggggtatctc

SEQ ID NO: 115067 - DNA, 573 bp, Homo sapiens
aatgaggaaaacacataagtcattcttaccataattttataacatatattttggaatgctaagaaacacagcatatataaaacaaattggccagtcatggtagctcacacctgtaatcccagcactttgggaggccgaagtggacagatcacctgaggtcaggagtttgataccagcctagccaatgtggtgaaaccccgtctctactaaaaatacagaaaaaattagctgggtgtggtggcacatgcctgtagtcacagctactcgggaggctgagactggagaattgcttgaaaccaggaggtggagggcgcagtgggccaagatcatgccactgcattccagcctgggtgacagagcgagactccatctcaaaaaaataaaaaaaatagataaataaaaatacaacaaattaggaggacaatgatggaagttgtttgcagatgatatgcttttttaagaataacttaaaagattcaaccattaactaccatgatttataaatattttgaataactcactcaaatataatgtcagtccaaaaaattgtataggtcaatggtatatatttag

SEQ ID NO: 115068 - DNA, 476 bp, Homo sapiens
ttctaggggattctcagtcttggtgcaaagagatggggaaattctttgaggaattgaggggtccatggagccgtgaactgaggagagatggtggaaggggtggggagctcttgagtagtgaagaggggtgcgtgggaaactggtgacttctggaaggagttgcaggatgacgggtttgctcctgaaatccaggggactgggggacaggtggagatgtttggtgtgctaaatctttcaagtacaagatgagccatcgttgaagctcaaggttccaagtaagcatcacaggacattttctccccaaagaggagagataggatgggtgtgtgtgtgtgtgtgcgtgtgcgtgtgtgcacagaatttacagtgaaactgctttcctggagggagggccagaagccctacgagtgggagatggtcaaagtgcgatcgctgacaaagtggcaagagctctctgcacacctgcctggctgccg

SEQ ID NO: 115069 - DNA, 189 bp, Homo sapiens
ctttttcttctacacatttggtaattaatgaatggttgaacaaagttcaaaatttttgactgttttcaatctcttatttttaaaactgcagactgtcaacacataaaaaaactgatgttgacagtttctgggttacaaaaaacttatttttcccaaacagaacaagacataatgataactcagtaacaa

SEQ ID NO: 115070 - DNA, 203 bp, Homo sapiens
acacacatacacacactctctctctctctttaaaaagtatgaaaactattcttagctcacagggactttacaaaaacaagaccttgggctagatttggcccacaggcatagtcctcttggtctagatacaagtcctctctgaggtgtactgcaaatatattctcccagtttgtagcctgcctttttgtaatggcatctaccga

SEQ ID NO: 115071 - DNA, 555 bp, Homo sapiens
cacaactctgtggagacagatgagaaggtggcaaaacgaggcaggagatatccaggtgaaaggtgatggtatcttacacgtttatagacagggtcccagtgggctccacttttgagggaggaatagttctgacaccttattttctgtggaaagtaactgggcagatggtgatctcattgaagaggtaagtatggttggggtaaatcaaccaagagtttgattttggatatgtagaaatgtcaagtaggcagttgactattaccagtctggggctcagagaagaggcctgggcttgagatgtaaatttggaaaccttcagcatatcaacagtgactcaaagctgtagaagttgttaaggtcatttagggagagaatatgaaaagagccaggaccaggcttaggtggctccaacattaaagaggagggattcctaaatgtaaaattatttgagaagagatcatacattcatagactgttttaaaagtcaggtgagctaagatccaaatccggtcttagcacaaaagctgcccctagaagagggagatgtcatgtgtg

SEQ ID NO: 115072 - DNA, 5099 bp, Homo sapiens
gaattaggggaactcagaaatccatcccccaccccacggccctacctagaagacttaggaatgtgggtccccagcgccgccatctgagactccagagtcgaggctcctagcatcccctacgtagaacactgagaaattccgactgcgggaccccagtctccgagagaccccagattctattcctggagcctgagagcccgaagttcacgcccctgagtctgggctccgcacctccctggggaccgcgtcggggtcgcgcaggagccgggctgcctcgagccggggctggaggctccccgggaggactctgctgggccgctcagccatgcctgagggagcccaaggactgagcctctccaaacctagcccaagcctcgggtgtggccgaagaggtgaagtgtgtgactgtggcaccgtgtgtgagactcggacagctcctgcagcccccaccatggcctccccccgaggttctgggagctccacatccctgagcacagtgggctctgagggggatccagcccctgggcccactccagcctgctcagcctccaggccagagccccttccagggcctcccatccgcctacatctctctccggtggggatcccaggttcagccagaccctcaaggctggagcgtgtggcccgggagatcgtggagacagaacgggcctatgtcagggacctccgcagcatcgtggaggactacctgggccctctgctggacggcggggtcctggggctgagcgtggagcaggtgggcacgctgtttgccaacattgaggacatctacgagttcagcagcgagctcctggaggacttggagaacagcagcagcgccgggggtattgccgagtgcttcgtgcagaggagcgaggattttgacatctacacattgtactgcatgaactacccgagctccctggccctgctccgggagctgtcgttgtctccgccagcagccctgtggctgcaggagcgccaggcccagcttcgccactcgctgcccctgcagagcttcctgctgaaacctgtccagcgcattctcaagtaccatctgctgctgcaggaactagggaagcactgggcggagggcccaggcactgggggtcgcgagatggtggaggaagctattgtgtccatgacagcggttgcctggtacatcaacgacatgaagcgcaagcaggagcatgcagcgcgcctccaggaagtgcagcggcggctgggtggctggaccggaccagagctcagtgcttttggggaactggtgttggagggcgcgttccgaggaggcggagggggtggcccccggctacgagggggtgagcggctgctcttcctgttctctcggatgctgctggtggccaagcgcagggggctggagtacacctacaaaggccacatcttctgctgcaacctgagcgtgagcgagagtccccgagaccctctagggttcaaggtgtctgatctgaccattcccaagcacagacacctgctccaggccaagaaccaagaagagaagaggctgtggattcactgtctccagcgcctcttctttgagaaccaccctgcctccatccctgccaaggcaaagcaagttctccttgaaaacagcctgcattgtgcccccaaaagtaagcctgtcctagagcccctgacacccccacttgggtctcctcgacctcgagatgctagaagttttacccctgggcgaaggaacacagctccatctcctgggccctctgtgattcgccgaggccgcaggcagtctgagccggtgaaggacccttatgtcatgttcccacagaacgctaagcctggattcaagcacgctggcagcgaaggggaactctaccctccagaatctcagccaccagtttcaggctctgcaccccctgaggacctggaggatgctggacccccaacactggacccctctgggacctcaatcactgaagaaatcctggaactgctgaatcagcgaggccttcgagatccagggccgtccacccatgacattcccaagttccccggagactcccaggtgcctggcgacagcgaaaccctcacattccaagccctgcccagccgggactcttcagaagaggaggaggaggaagaggaagggctggagatggatgaacgggggccttccccactccacgtcctggaagggctcgaaagttccattgcagctgaaatgcccagcattccctgccttaccaaaattcctgacgtgcccaaccttcctgaaattcccagccgctgtgaaattcccgaaggttctcgccttcctagtctctctgacatttccgatgtttttgagatgccctgccttccagccatacctagtgtccccaacacccccagtctgtctagcactcccaccctctcctgtgactcctggctccaagggcctctgcaggaaccagctgaggctccagccaccaggagagaactgttttctgggagcaatcctgggaaactgggagagccgccttcaggaggcaaggcagggccagaggaggatgaagaaggggtatcattcacagacttccagccccaggatgtcacccaacatcagggattcccagatgagctggcattccgctcttgctcagaaatccggagcgcctggcaggcattggaacagggacagctggcccggccaggcttcccagagccactgctgatcctggaggattcggatctgggtggagacagcgggagcgggaaggcaggagccccgagttcagaaaggacggcgtcccgagtgcgagagctggcccggctttacagcgagcggatccagcagatgcagcgggcggagactcgggcatcagccaatgccccgcgccgccggcctcgggttctggcccaaccccagccatccccctgtctgccccaggagcaggcagagccagggctcctgcctgcctttggacacgtgctggtatgtgagctggccttcccactgacatgtgcccaggagtctgtccccctgggtcctgctgtctgggttcaagctgccatacctttgtcaaagcagggaggcagcccggatggccagggtctacatgtttccaatttgcctaagcaagaccttccgggcatccacgtttcagctgctacccttttgcctgagcaaggaggttcccggcatgtccaggctccagccgccacacctttgcccaagcaagaaggccccctgcacctccaggtgccggctcttacaactttctctgatcaaggccacccagaaatccaagttccagccaccactcctttgcctgagcataaaagtcacatggttataccagctccatccaccgccttttgtcctgagcagggacactgtgcggacatccacgttcccaccactccagctttgcccaaggagatttgttctgatttcacagtttcagtcaccacccctgtgcccaagcaagaaggtcacctagacagcgagagcccaaccaatatcccactgacaaagcaaggaggttccagggatgttcagggcccagaccctgtctgcagtcaacccatccagcctttgtcttggcatggaagcagcctggatccccagggcccaggcgacaccctaccacccttgccatgtcacctcccagaccttcagattccaggtacctcacctttgcctgcacatggaagccacctggaccatcggatcccagccaacgccccactgtctttgtcccaggagctcccagacactcaggttccagctaccacacctttgcccctgccacaagtcctcacagacatctgggtccaagccctcccaacttcacccaagcagggaagcctcccagacatccagggtccagcggctgcacctccacttccggagccaagccttacagatacacaggtccaaaaactcacaccttcgttggagcagaagagcctcatagatgcccatgttccagctgccacacctttacctgagagaggaggctctctagacattcagggcctctcacccaccccagttcagaccaccatggttttgtccaaaccaggaggctccttagcctctcacgttgccaggttggagtcttcagacttgacgccacctcatagtcccccaccttccagccgtcagctcctgggccccaatgcagctgccctctccagatacctggcagcctcatatatcagccaaagcctggctcggcggcaggggcctgggggaggggcccccgcagcctcccggggctcctggtcctctgctcccacgtcacgggcatcttcgccgcccccccagccccagccaccacctcccgcagccaggcggctcagctatgccacgacggttaacatccacgtgggcgggggtgggcggctgcggccagccaaggcccaggtccggttgaaccaccctgctctcttggcctccacacaggaatctatgggccttcacagggcccagggggctcctgatgcccccttccacatgtgagccaggacatgaggcttccctgaagcaaggatttcagccagatgccatagaccctcagaacttgacctggaagtccagacactgaacgcaggcctcaaaactgctgcggccttccaactcctggtatctgcatcggcgaatggcccttcttgccttgatccacagggatggggaagggaatgtcattaatgttttgttaatactgattctttcatgcaatgatgtgtattttcccattctggaggctgtgggagatgacaagacaatgaatgggaaggtctgacacagaacaaatcagcggttctgaaagcttggggaatctcagactcctttgagaattattggaaaatggacccactataacttggcgtgtgtgtgaactgcttgatgcccatccaggaaagccaagttaagaagctttgcttcaagtagacactagaaatccattcccttggcaatttatacagttcacgtctcccaccatccgttcatctcacccaccctgccatctctccacctatccatctggatattgctccatctagctttcccgctccatctacccatcttccaatccatcatctcacgtatctgccttgcttatccaactgtc

SEQ ID NO: 115073 - DNA, 5178 bp, Homo sapiens
gaattaggggaactcagaaatccatcccccaccccacggccctacctagaagacttaggaatgtgggtccccagcgccgccatctgagactccagagtcgaggctcctagcatcccctacgtagaacactgagaaattccgactgcgggaccccagtctccgagagaccccagattctattcctggagcctgagagcccgaagttcacgcccctgagtctgggctccgcacctccctggggaccgcgtcggggtcgcgcaggagccgggctgcctcgagccggggctggaggctccccgggaggactctgctgggccgctcagccatgcctgagggagcccaaggactgagcctctccaaacctagcccaagcctcgggtgtggccgaagaggtgaagtgtgtgactgtggcaccgtgtgtgagactcggacagctcctgcagcccccaccatggcctccccccgaggttctgggagctccacatccctgagcacagtgggctctgagggggatccagcccctgggcccactccagcctgctcagcctccaggccagagccccttccagggcctcccatccgcctacatctctctccggtggggatcccaggttcagccagaccctcaaggctggagcgtgtggcccgggagatcgtggagacagaacgggcctatgtcagggacctccgcagcatcgtggaggactacctgggccctctgctggacggcggggtcctggggctgagcgtggagcaggtgggcacgctgtttgccaacattgaggacatctacgagttcagcagcgagctcctggaggacttggagaacagcagcagcgccgggggtattgccgagtgcttcgtgcagaggagcgaggattttgacatctacacattgtactgcatgaactacccgagctccctggccctgctccgggagctgtcgttgtctccgccagcagccctgtggctgcaggagcgccaggcccagcttcgccactcgctgcccctgcagagcttcctgctgaaacctgtccagcgcattctcaagtaccatctgctgctgcaggaactagggaagcactgggcggagggcccaggcactgggggtcgcgagatggtggaggaagctattgtgtccatgacagcggttgcctggtacatcaacgacatgaagcgcaagcaggagcatgcagcgcgcctccaggaagtgcagcggcggctgggtggctggaccggaccagagctcagtgcttttggggaactggtgttggagggcgcgttccgaggaggcggagggggtggcccccggctacgagggggtgagcggctgctcttcctgttctctcggatgctgctggtggccaagcgcagggggctggagtacacctacaaaggccacatcttctgctgcaacctgagcgtgagcgagagtccccgagaccctctagggttcaaggtgtctgatctgaccattcccaagcacagacacctgctccaggccaagaaccaagaagagaagaggctgtggattcactgtctccagcgcctcttctttgagaaccaccctgcctccatccctgccaaggcaaagcaagttctccttgaaaacagcctgcattgtgcccccaaaagtaagcctgtcctagagcccctgacacccccacttgggtctcctcgacctcgagatgctagaagttttacccctgggcgaaggaacacagctccatctcctgggccctctgtgattcgccgaggccgcaggcagtctgagccggtgaaggacccttatgtcatgttcccacagaacgctaagcctggattcaagcacgctggcagcgaaggggaactctaccctccagaatctcagccaccagtttcaggctctgcaccccctgaggacctggaggatgctggacccccaacactggacccctctgggacctcaatcactgaagaaatcctggaactgctgaatcagcgaggccttcgagatccagggccgtccacccatgacattcccaagttccccggagactcccaggtgcctggcgacagcgaaaccctcacattccaagccctgcccagccgggactcttcagaagaggaggaggaggaagaggaagggctggagatggatgaacgggggccttccccactccacgtcctggaagggctcgaaagttccattgcagctgaaatgcccagcattccctgccttaccaaaattcctgacgtgcccaaccttcctgaaattcccagccgctgtgaaattcccgaaggttctcgccttcctagtctctctgacatttccgatgtttttgagatgccctgccttccagccatacctagtgtccccaacacccccagtctgtctagcactcccaccctctcctgtgactcctggctccaagggcctctgcaggaaccagctgaggctccagccaccaggagagaactgttttctgggagcaatcctgggaaactgggagagccgccttcaggaggcaaggcagggccagaggaggatgaagaaggggtatcattcacagacttccagccccaggatgtcacccaacatcagggattcccagatgagctggcattccgctcttgctcagaaatccggagcgcctggcaggcattggaacagggacagctggcccggccaggcttcccagagccactgctgatcctggaggattcggatctgggtggagacagcgggagcgggaaggcaggagccccgagttcagaaaggacggcgtcccgagtgcgagagctggcccggctttacagcgagcggatccagcagatgcagcgggcggagactcgggcatcagccaatgccccgcgccgccggcctcgggttctggcccaaccccagccatccccctgtctgccccaggagcaggcagagccaggtgaggtccgggtatgtggttggcagaggtggtccccgctggagtagtggtcctgactcgatcctcttttcgcattcagggctcctgcctgcctttggacacgtgctggtatgtgagctggccttcccactgacatgtgcccaggagtctgtccccctgggtcctgctgtctgggttcaagctgccatacctttgtcaaagcagggaggcagcccggatggccagggtctacatgtttccaatttgcctaagcaagaccttccgggcatccacgtttcagctgctacccttttgcctgagcaaggaggttcccggcatgtccaggctccagccgccacacctttgcccaagcaagaaggccccctgcacctccaggtgccggctcttacaactttctctgatcaaggccacccagaaatccaagttccagccaccactcctttgcctgagcataaaagtcacatggttataccagctccatccaccgccttttgtcctgagcagggacactgtgcggacatccacgttcccaccactccagctttgcccaaggagatttgttctgatttcacagtttcagtcaccacccctgtgcccaagcaagaaggtcacctagacagcgagagcccaaccaatatcccactgacaaagcaaggaggttccagggatgttcagggcccagaccctgtctgcagtcaacccatccagcctttgtcttggcatggaagcagcctggatccccagggcccaggcgacaccctaccacccttgccatgtcacctcccagaccttcagattccaggtacctcacctttgcctgcacatggaagccacctggaccatcggatcccagccaacgccccactgtctttgtcccaggagctcccagacactcaggttccagctaccacacctttgcccctgccacaagtcctcacagacatctgggtccaagccctcccaacttcacccaagcagggaagcctcccagacatccagggtccagcggctgcacctccacttccggagccaagccttacagatacacaggtccaaaaactcacaccttcgttggagcagaagagcctcatagatgcccatgttccagctgccacacctttacctgagagaggaggctctctagacattcagggcctctcacccaccccagttcagaccaccatggttttgtccaaaccaggaggctccttagcctctcacgttgccaggttggagtcttcagacttgacgccacctcatagtcccccaccttccagccgtcagctcctgggccccaatgcagctgccctctccagatacctggcagcctcatatatcagccaaagcctggctcggcggcaggggcctgggggaggggcccccgcagcctcccggggctcctggtcctctgctcccacgtcacgggcatcttcgccgcccccccagccccagccaccacctcccgcagccaggcggctcagctatgccacgacggttaacatccacgtgggcgggggtgggcggctgcggccagccaaggcccaggtccggttgaaccaccctgctctcttggcctccacacaggaatctatgggccttcacagggcccagggggctcctgatgcccccttccacatgtgagccaggacatgaggcttccctgaagcaaggatttcagccagatgccatagaccctcagaacttgacctggaagtccagacactgaacgcaggcctcaaaactgctgcggccttccaactcctggtatctgcatcggcgaatggcccttcttgccttgatccacagggatggggaagggaatgtcattaatgttttgttaatactgattctttcatgcaatgatgtgtattttcccattctggaggctgtgggagatgacaagacaatgaatgggaaggtctgacacagaacaaatcagcggttctgaaagcttggggaatctcagactcctttgagaattattggaaaatggacccactataacttggcgtgtgtgtgaactgcttgatgcccatccaggaaagccaagttaagaagctttgcttcaagtagacactagaaatccattcccttggcaatttatacagttcacgtctcccaccatccgttcatctcacccaccctgccatctctccacctatccatctggatattgctccatctagctttcccgctccatctacccatcttccaatccatcatctcacgtatctgccttgcttatccaactgtc

SEQ ID NO: 115074 - DNA, 284 bp, Homo sapiens
tgttaaatccaactctgagacactgaatttctggttccttctttttcttactggctgttccattctttgcagatatggatgcaggtaactattcattttcttcatggcagcgcttgtcttgttttggagagagaggaaaggcaccactttgtactgtagcgttcccttccctccttgttctgtgtaccatcctgttttgtttcattttatctttttcttcagttgaacattccaccctgttttgtcccttagttgtctttttagcagtagtcccaagcagcttc

SEQ ID NO: 115075 - DNA, 421 bp, Homo sapiens
gctgggccgcactggcgcactctttatttcttctttttagggtgactcttttcttgtattttcctttctgattcttctttctctgaccagctcttagagtcctgtcttcattctacatgtctttgtcctctctgtgtatggtttcacttacacttaagacttaattataacatataaaatgactgtcaaatctattttcaacccctaacctctttcttgagaactctagaaacaaattttcagctagatactgaactctctacaggcatcagaaatgcaacttatcccaaattaaactcatttctccagaggaaggagagatatatttcacttcaatatccttcagtccttcatttaatgacacctccatctatccagtcactcaagtcagaaaaacataatgctccacaaggcatcttta

SEQ ID NO: 115076 - DNA, 287 bp, Homo sapiens
gtactctaaggatcctcatgcctcatccagtggggcagacaccggccacacggatggctctgtcctgtccagctggcctttcctgttcaggctgtgagtgtgtcagtgactctgggtcccaggcaggggtctgctgcagaggggagcagcacccagggatgcgagacctcaaatcccagggcaggtggcggcctgccaggagccggagcccgggaagccagacagcaggggtaggaacctcatgtcactgagcacctgcctcattccagccacttggcctccatacc

SEQ ID NO: 115077 - DNA, 383 bp, Homo sapiens
ttctctggaacatgagaataaaaactgtacctctccctagatgctgcggtaaggagttcatgagtgaatgcatgaaaagtgcataggaagcactcactacatatttattcttcttcttcttctctataaagcaaaaagaaataaaaggagaatacaaaacagcacgtacatattgcttagagcagtgctttcagatatgaatcatttctagaatggattatagaaggatgggagcttttagtatttagtagtttcctttcttctccctaagtttacaatccattttaaaaaatgaatgaattaagtatctccgaaacaaactggcaattgctctgaagacaagtttagcaatttccgtgaaataattctctggcttcggccaa

SEQ ID NO: 115078 - DNA, 394 bp, Homo sapiens
tattttattttgaaaataatttaaaaacaaagaagagtaactattttactaataaaagaatatttaaagtattaaaggactctaaattctctttactctcttttgaaattgcctttttttaaaatttaaaaacagcacatattcattataaaaatgtagaaaacacaggaagggacaatgatgaaaataagcatcacctttaattatactaattgttaggattttgttgtatagatttctgatattcttcttagaatattaacaaatatgtatcttttaaacagtgactatactccattttgataactatttaaaaaatttaatattatgaggagtattttctacatgtcattaaatattttcctataatgatattaaatgtattcctgctgtt

SEQ ID NO: 115079 - DNA, 494 bp, Homo sapiens
tggcacaatcagagctcactgcagccactaactcctgggctcatgtaatcctcctaccttagtcttccaagtagctgggattataggtaggtagaagccactgcacccagctccagaaatgtttctttttaaagtacagactctgcattgaattgtaaattttctttcaatagtataatgcacactgtacagaggcttttgggacacaggtttttaaaaccaccaaggagagttagcaaatataaatgacaattatgtacttaagtaacagaaacttaatttcatatatatatattatttatgatatatattaaataacctgggcttctgaagtatacacattggataaaggaatataatggaaaaatattgacccaggaattaggagacatgagttctcatgcacaaactcattgtgcaaccttgggtaaattagttaacctttatggactttcacactgtcctctgcaaaatgaggctattggagctgataa

SEQ ID NO: 115080 - DNA, 638 bp, Homo sapiens
taaaagtctatactttctcgagaatatgtataatgaggcacaatactcttcactgtctgtattgtactctacttatcaagcctagaaatgggctaaatgttaaatatgtatgtttcaggttatacagaactcaataatgtcagttaatcgagaaatttccttactttgtccttttaattcattgaaataaaactcatgctttgcttatctggaggttttaaaagttagattgtgcaaaactcattgtcttagtctattcctgttgctattgcaaaatacttgagactgggtgatatataataacagaaacctacttctcacagtttttgaggctgggaagtccaagattaaggttctgacagatttggtgtctggtgaggacttgctctctgcttccaagaccatgtctgttgctgcttcttctggaggtgacagatgctatgttctcacgtggtagaagagagaagaggtgcaaggaccaagcagctctctgaagcctgttttataaggatatttatcccattcacgaatgcagatcccccatggcctaatcacctcctgaagtccctacctcttaataccatcaccttggggtttacattccaacatgtgaaccttggaggggacgcatatattta

SEQ ID NO: 115081 - DNA, 480 bp, Homo sapiens
cggacctaacagggaagatgcagagggagcaggtatctgcatgtgaaggcgcaaccttgttggtgttgatggagttggtgtttgtcttgcaggcactggaaagccgttgacggatttagtgagtgccactggtgacaagctcttattaagacatccgagctgaggtgcaaaagatgggttggagttggcaaggcccaaagtgaggctaaaaagagagttgaggggagtgttccacacagaggaaggaacgtgtacgaaaacttggaggcaagagcggcatggcacttttgaggaactgcgagaagtagagtgtggccagggataatgctctggtcgggagatgtgtccattgaggctgcagaggaagcaggtatctgcatgtgaaggcggcaaaccttgttggtgttgatggagttggtgtttgtcttgcaggcactggaaagccattgacggatttagtgagtgccactggtgacaagc

SEQ ID NO: 115082 - DNA, 326 bp, Homo sapiens
  misc_feature (308)..(308): n is a, c, g, or t
ctaaaatagaagttcaatagcatttttcaaaataccagttgagacaacagatttggagttaagtttatgaaatatttactgagaaaaactacatcacacaaacacaaggtggcaagactttggtaaagaaggtacaagacttttaaaagacttttgtaagtatttaacattgccacaataactatgtactggttcctttataaacgtaaacaccactgattgtacatacaaaaaaaagagagaaaaaatcaaatatacttgtacacaaatgtttaaattattatgtccttctaccagtgtgtgctatngaaacttctaaaactagg

SEQ ID NO: 115083 - DNA, 285 bp, Homo sapiens
ttaatatgtaatgggtttattgttatttctaaatgatttagtaaatatttttaatgtttcagattgtgatttcaaatatagtaaatattgatagacataacccgcataaacagaagctctctgttgtccttgataagctctaagactgtgaagagttcccaagaccaaaaggtctgagaatctctgggctaggtcctgcttgataacaaaccacctcaaaaatccccctggcttaagcaacagtttatttcttgctcatgctacatattcagtgaaggtcagcat

SEQ ID NO: 115084 - DNA, 238 bp, Homo sapiens
aagaatgtcttcagctcccctgccccaggccccccggccacttcagtcagagccattccaggtggtctctgtctgattgggatgcgcaccctctgcccgtttaagaggctcagtcagttgcctccaaacatttgcagcagtcctgccagaaatcccctctggctcccggctagagtagaaatggaagaatttggagtcatgtaaacttggattccaatacagattttgcccaatttta

SEQ ID NO: 115085 - DNA, 756 bp, Homo sapiens
gagacggagatttactcttgttgcccaggctggagtgcaatggtacgatctcagctcacagcatcctccgcctcccaggttcaagtgattctcctgcctcagcctcccaagtagctgggattacaggcatgtgccactgcgcccggctaattttgtatttttagtagaggtggggtttcaccgtgttgcccaggctgatctccaactcctgacctcaggtgatccgcctgcctctgcctcccaaagtcctgggattacaagtgtgagccactgcgcctggcctaagcataactttttagacaaaaataaaaaaatctagtaatattttactacttggtgctgttaaagttggtgtctgaagccctgcaatcatttattcactttcagtacatcctttgttccttttgaaaaggtgtaagtcagtgcacttagaatcaggaaacttaatttttagattttgtttgcctgctataaatgacagcaaactcaaaaaccaaacctcttaacagtagtgagccagttttgtttcaacatgacttcagtatcccagccctattaaaaaatgcaaaatgcatacacacaccgcaaacagcatagacagacattatttaaacgttttttaaaatgtgagtaatgaagatgtcctccaagctccagaatgcttgtgaaagatccctgagcacggccccactaaggcatctctacaaaggcacaaagctgtagagacatttgggcattttactgactacatccaag

SEQ ID NO: 115086 - DNA, 472 bp, Homo sapiens
caggtttccaagattcttcatatgctgcctaatttttcaaaaatttgaaaaagagaagaaacatttctgtaaaaaatagttctttcacgtaaaaagagtagaagaaaaatgtcagagataaggggagggaaagaatgaaaagtctgtgagcaagatgtctgtctcgtatgtttgtgagtcagaggaagaattgggaaaaaaaaaaacctatggggagagagaaggaaacagattgggagactaatttaaagcagaatcaactaaaaggaagttgaagatttgaaaaaataagacagcagcatcaagaagagaaagtctgttgaaaagagaagcaataagaaaaacttgtagcaattcatgtatatgacaaattcaacccacgtttaaataaaaatgcaaagatttcaaaaacaccaaagaaggatttaatgaaaggttctcatcacccacaaataataaagattttttccct

SEQ ID NO: 115087 - DNA, 602 bp, Homo sapiens
atttcagttatttaccaggctgtatttattggtctccccctgccccactccaagtaaaaaatcagttcaagacaagacagaaccattttggccattttacagcaccctctcccctcaacagtcagcacagaagaaattatagctgtggccaggtgaggtggctcatgcctgtaatcccagcactcagagaggctgaggcaggaggatggcttgagcccaggagcttgaggccagcctgggcaacacagactgtcgtctgtattattttttaaataataaatatacatttttttaaaaaaagaaattatagctcacagtagtaaaaaaaaaaaaaaaaagaccattattcctcacccttaatacaaccagtcattaaatttagataagctatcatatttgaagagtgactgggaagaggtgggccctggaaaactttactacaacctgcttgaattgaccaacctttcatgcagctttacagtgaacactcagctcctttttcccattatacttccaaatatgaggaaaggggggtgggggcatggaggtcaatactcaggccttactcagccagctaacaggacactattaacacaaaggga

SEQ ID NO: 115088 - DNA, 360 bp, Homo sapiens
ccagggttgcaggtcaagggtgtgcagagctggatttaggccagactctgagctcctgatgcctgtggtgttggacatactgcttgtgcctttgcagtttggtgtgtataggagggtgttacacgggagctcctaccccatccgagccagagccaggtctcccctctgttgggtctcagtccccctgttacagaggagctcacctccaggatgctctgcttggcctctgcctctgggagcctgggagtggattctggagtggattccaggacctcttcatctgcacctgccccaggctttggagctggtgccttaatcctgatccaagccagtctatactctgtcttctagaattcttca

SEQ ID NO: 115089 - DNA, 345 bp, Homo sapiens
ttctcggcactctctgcaagtctgcgcctagacgcttcccacgggagaaaagaccaccaagtcgggcactgaccatgcccgaggtcacagagccaggccggccagctcacactcccaatcctggtgagggaggccgggcgagatctcagaggcaagaacaggtcactccagcagcccagagctgcgtcctctgacacctcctgctctgccagaggctatcctggctccagcccctccccacggcagggccaaccattaacccctggagtttggagaaagttgtgtgggaggaagtgctgtctgtcctggaacttggcagtgagtgtggtttcgccagcgtcattt

SEQ ID NO: 115090 - DNA, 176 bp, Homo sapiens
ctgcgccctctctgatcactgaattcttgatttctctgccagttcttctcctagcagtaaccaaccagcccagtcaccccaggcctcactgcctgctcagccaccaacatcctcccacatgtgcaacctggttcaaatgaacaagcacagcctgggagaggaaaggatgccacaaa

SEQ ID NO: 115091 - DNA, 207 bp, Homo sapiens
tgtcaacccatgaggccatcaaagcccttagagccaaagtggcttccatgactaacttattcttcctgcttccagttttcactaagatcttgacaggccgacttctctcctccctcttccaactctttcatgccttcaagaagatgtttaagaacatattttattcaggacgcttacttattttcagtgcagagctgacctgaataa

SEQ ID NO: 115092 - DNA, 339 bp, Homo sapiens
tgaaagtataagattggataaaattaaaagctaataattttacagtatttatgaacataattacttattagaagttgattgacatgtaggcggttttcaaattacattaataaagttcagggaatacattaataggcttgtcagtcaattcaagtactaaataaatgtcataaaaagtcaaccccacttaagctacatttcttctcaatgaacaaaagtaaactgatgtgtacacctcttcagtccctaaatttgtgagattgtctgatgctcaggggtatcagcatagttttgaagcatatgctctttgcctaacaatctgacaatcctttattcacc

SEQ ID NO: 115093 - DNA, 346 bp, Homo sapiens
agctttcttaaagcaacatacacctgtcctaagctgccctgtggaaaagggaaacccatatatattttagatggagtagggtttttaacacccttctagcctgaaatgccctctgaaggctaatgtaagctaaagaatcttctggctatagggttgaacagagagtcctacttcacatgcaattggtacagaaaatccagtattctttcttctatcaaagtagagtttgtaagccagggacacaaatttgtgatttccttatgctgtagcagataatccttaaaagaataaacactgaatgaatgaatgaatgaataaatggaaaatagaactgtttaagtgatct

SEQ ID NO: 115094 - DNA, 372 bp, Homo sapiens
ccaagctggaccagtgattggatcctcggtgtggtctggatttctgagtccaccccttacccaggagtctgaatactgttcattcatttatttcatcccatatacctggaagtgaagcctggaacgcaaataacatgcaaatttgtggctctttggcactttaaaaaaccaaacctgtctgtggaggctgccaaagaactttcctgaggccaaacacaccaatcaggacttccaacccaccctgctaactgtggccttctgttcttgctcctctcctgcacccctttcttctcacaatataacttcgaagtgaagtgcttgccacttttctacctgtaaaactcacactcatgacagtaaaacataagaaag

SEQ ID NO: 115095 - DNA, 336 bp, Homo sapiens
ctaaagttgtgtttttttaactgcctgctttttattgcaggtatatgaaattgttgtgcatatttcaaagaagaatagaatgcagggtaactctcaaacttgttatttggaattaggtcagataattttgtaaatactgttatcagtatatcacaatgtcattagtgtcccttcaagttaagggcatggaaataaagatggtctaatgtgccaggccaaagaggaaaacttttcagcttagcaaagtgacttcaaatacatggggagaattgaagcagtcatttcaaatgcaaacaaaaagttgtatttttatggattacaatatccttagctaaa

SEQ ID NO: 115096 - DNA, 608 bp, Homo sapiens
agtcgactctgtaggatccccaagcagttaatacagactcacacacacacaatttattattacccatccttggtgcttggcccagctgcagcacttattggggttattaacaaagacaaggcctagattttaacctgatatcaacctgaaagctgggtcaagatctcagagaaagagagaaaattgagcgggaaggagaatgcctctttttcttgtggaaagtccttgaggagttgcaattaaagacctagtgtacttgaaagtatctcttccaatctgaaaataaattgaacttcctgaactgcttttggaaaaccaaagcctggaagattttttgactttcatccttcctgcgtcagcttttggaagagaaacagggaacaatgaacaattaaaagaaacccactgcattaacaatcagtagatttgggggtcggggagacagaaaggctaatgattctaactttttaattgtgtgaagcctaaagaattatggaattacctagaacttaagcttttcatcttttttcatttgatctctagccaagtaactactgtagaataatttaatattctctgagtcgtcaataataaggcttgcaatgtga

SEQ ID NO: 115097 - DNA, 382 bp, Homo sapiens
ctgcacagaaaggggtggattattatcagagggctttggtacaaatctcacctatatgcctttaggtaagtcactgagacttgttctctgtgtgttaggaaagttctctaacacttgctttcttccttagaaaaacagaaatgctagtgggctctaaggaggttcaacatctcaatggatgcccatcatagacccatcagcagttgttaatttgcaggaataactttatggtaccagattaggatgaaaaccctgcaatttcatgcccagtcacttaccttgagccccctccctgagcagagaagctgtaggctgtgtgagggtctccagtcctctctgtgcatctctgagccattgtgtaaccaccccaatgctgacaggg

SEQ ID NO: 115098 - DNA, 466 bp, Homo sapiens
tctggctactggacttctcctggccttctttaaggagaacgggacaaaactgctactcttaagacaaatattccttggttcaaatgcaataccaacagttcccatcctgtggaccaaggagaccaggaatccatttgtgcatcaagctctgcctgtagaatgaataatgtctctaaatatatcaaccatttactactactaaattgacaagtactaaattcgtaactgtttttaattatatactttccaattcagataataaaagtgcagaaatatggtatatgtactaatagcaggcgggggaaagggacttacataatggaacattttttatactgtcatgtttaatatttgtgaagcattactaaacactgtacaagaattatatttatattgaagtcaattcctcaaaattgtagctacactacaaatttccccaaccacctactaaacaatcatagagaac

SEQ ID NO: 115099 - DNA, 279 bp, Homo sapiens
catccccaaccccaacccgaactccaaccccattctctacagaacctttcttaatgtctctactggtcttttgtgctatgactggtccctgtgctatgacttcatctagttcttggcctcctcaaggccttggggtgtttgatactttgtggctctttgtctgaaccctttctcccttggtctgaatgatgttgacctctccttgtcctcataccacaatgactgttttcttctttgttgtatccttccctggctaagctcccataaatcatgcttgga

SEQ ID NO: 115100 - DNA, 337 bp, Homo sapiens
aaaaaaaaatatatatatatatatatatgtataaacacaccctacagtatgaatttgtgaaggaagaccatctgatttatgtgtataaaacattaggtctgttctaaaactggtagttctttcttttaatcactccctcctattatgctatatgagaggcttatcatgttcatgttttatgttccatattacacaaggccatttgggattctttgtctttggaaaaattgataaagagtattttattaaaatattcagttgtcactttgggaggccaaggtgggaggctctcttgagcccaggagttcgagaccagcttgggcaacatagtgagacc

SEQ ID NO: 115101 - DNA, 243 bp, Homo sapiens
tgtgctgctggtcgctctagagatccccctggcagctgggtgcaggtctggctggctgggtcgggctgcgtaattcagtaatcatgaatccatggacggtgctcacaggaacaggaaggctgaacacagggtttttctttcatttctcagaggattgctctgtgcaaaaggaagaatgggaaactcagagtacacgtgttagttttgtttttttgttcacgacagggtctcactctgtcaccc

SEQ ID NO: 115102 - DNA, 122 bp, Homo sapiens
aagttatggactgcatgttcacgtccccccaaaattcacaggaaatcttactatccaatgcgatgatatttggagacgggacctttgggaggtcgttgggttcaggtgaggtcatgagggtg

SEQ ID NO: 115103 - DNA, 1064 bp, Homo sapiens
acccgcaggtgagctgcagaggcgcgcgtggtccctgccccacccgcgcggagccagagaggaggcggttgtcaaggcgacgtggaagcagcagccgcagcacctgagccgctactgccgctcactcaggacaacgctatggctgagcctgggcacagccaccatctctccgccagagtcaggggaagaactgagaggcgcataccccggctgtggcggctgctgctctgggctgggaccgccttccaggtgacccagggaacgggaccggagcttcatgcctgcaaagagtctgagtaccactatgagtacacggcgtgtgacagcacgggttccaggtggagggtcgccgtgccgcataccccgggcctgtgcaccagcctgcctgaccccgtcaagggcaccgagtgctccttctcctgcaacgccggggagtttctggatatgaaggaccagtcatgtaagccatgcgctgagggccgctactccctcggcacaggcattcggtttgatgagtgggatgagctgccccatggctttgccagcctctcagccaacatggagctggatgacagtgctgctgagtccaccgggaactgtacttcgtccaagtgggttccccggggcgactacatcgcctccaacacggacgaatgcacagccacactgatgtacgccgtcaacctgaagcaatctggcaccgttaacttcgaatactactatccagactccagcatcatctttgagtttttcgttcagaatgaccagtgccagcccaatgcagatgactccaggtggatgaagaccacagagaaaggatgggaattccacagtgtggagctaaatcgaggcaataatgtcctctattggagaaccacagccttctcagtatggaccaaagtacccaagcctgtgctggtgagaaacattgccataacaggggtggcctacacttcagaatgcttcccctgcaaacctggcacgtatgcagacaagcagggctcctctttctgcaaactttgcccagccaactcttattcaaataaaggagaaacttcttgcca

SEQ ID NO: 115104 - DNA, 431 bp, Homo sapiens
tcggatgcaagtgtcccatcaccagcccacatagagaaattggataatgaaaaactgaaccccaccagagcaacagccacagtggcctctgtcagccatccacaagggcccagtagttgcagacaggagaaagcaccttctccaacaggtcctgctctaatctcaggtgcctcacctgttcattgtgcagctgatggcacagttgagctcaaagcaggtcctagtaagaatatacctaacccttcagcctcatcaaagacagatgctagtgtgccagtggctgtaactccctcccctttaacatcttgggtggcctacacttcagaatgcttcccctgcaaacctggcacgtatgcagacaagcagggctcctctttctgcaaactttgcccagccaactcttattcaaataaaggagaaacttcttgcca

SEQ ID NO: 115105 - DNA, 1202 bp, Homo sapiens
acccgcaggtgagctgcagaggcgcgcgtggtccctgccccacccgcgcggagccagagaggaggcggttgtcaaggcgacgtgggtaggaggagaggacagagggaggaggaaggatgggcggtgttggcgtagccgcagggaggtgactgaagcgagcctggcctcttgcatcctccgcctgtgtacctccctcccctttttttccgccttctgccagcagaagcagcagccgcagcacctgagccgctactgccgctcactcaggacaacgctatggctgagcctgggcacagccaccatctctccgccagagtcaggggaagaactgagaggcgcataccccggctgtggcggctgctgctctgggctgggaccgccttccaggtgacccagggaacgggaccggagcttcatgcctgcaaagagtctgagtaccactatgagtacacggcgtgtgacagcacgggttccaggtggagggtcgccgtgccgcataccccgggcctgtgcaccagcctgcctgaccccgtcaagggcaccgagtgctccttctcctgcaacgccggggagtttctggatatgaaggaccagtcatgtaagccatgcgctgagggccgctactccctcggcacaggcattcggtttgatgagtgggatgagctgccccatggctttgccagcctctcagccaacatggagctggatgacagtgctgctgagtccaccgggaactgtacttcgtccaagtgggttccccggggcgactacatcgcctccaacacggacgaatgcacagccacactgatgtacgccgtcaacctgaagcaatctggcaccgttaacttcgaatactactatccagactccagcatcatctttgagtttttcgttcagaatgaccagtgccagcccaatgcagatgactccaggtggatgaagaccacagagaaaggatgggaattccacagtgtggagctaaatcgaggcaataatgtcctctattggagaaccacagccttctcagtatggaccaaagtacccaagcctgtgctggtgagaaacattgccataacaggggtggcctacacttcagaatgcttcccctgcaaacctggcacgtatgcagacaagcagggctcctctttctgcaaactttgcccagccaactcttattcaaataaaggagaaacttcttgcca

SEQ ID NO: 115106 - DNA, 375 bp, Homo sapiens
aattgttatttgattttttctgtggttttctggctaactttgatgctctttacaagcaagaaataaagataaaagtggagttataacttttagggtgaatgttaaaggcatgccaccaacaaacatacagagcccctaggcaaagactgggagacttactggttccaggcatctctaaggaagtttatttccaaacaatggctggcctctaagataactaagcagagacttcaggtggccatacacaacaaataatatggactttacagaattagttcagaaaggttatcaaacaaaaaataaatattgacgaggggagataatctggtttccagaattttcacattatgttattttaaatgtccagtttgcaac

SEQ ID NO: 115107 - DNA, 762 bp, Homo sapiens
agacatggtggtgagtgcctgtagtcccagctacttagggggctgaggtgaaaggatcactcgagcccaggaggttgaggctgcagtgagccaagatcacaccactgactccagcctgggtgacaaagtgagaccttgtctcaaaaaaaaaaaaaaatcttttcttttttaattaactaagttagtaaataagaccaagtaatatccaaagacctcttaaaacagattcctgagtatcctagatgtataagaaaaatgagatctataacctaaactttaatgactaatgaaagaatacacatttaggatttgtacatttaatatgttgaaaatcaaaacataaagccaaaatgaacatctgcatagttcctctgtacctacaagctaccctcaaggataccaaaaacctcgttttaacaaatccatgccatcccttgtccatttctggctgccaatgtattgaatgctttttaaggtccaactacaatgcaccaagttaaaatgtttttttaattcctacctttctgtaattcagatcacatgttacactgccctgctctaaaccaccattttacttgatttaaaactattatgtgaactctaagtgctttgcttgagttgtcatggtttgtgaaatgtgttaagtcatggtagttaagcggcagagctctgagctctggagcagactgcttgcgtgcaaatcagagctctgctgctgtgcttaactctccatgcctctttgctcatctgtaaaagggggta

SEQ ID NO: 115108 - DNA, 1194 bp, Homo sapiens
gccgtggtggctggttccctgtctcttcagtagagagtctagaccccacccagtcttcatgtacggccgaccgcaggctgagatggaacaggaggctggggagctgagccggtggcaggcggcgcaccaggctgcccaggataacgagaactcagcgcccatcttgaacatgtcttcatcttctggaagctctggagtgcacacctcttggaaccaaggcctaccaaccattcagcactttcctcacagcgcagagatgctggggtcccctttggtgtctgttgaggcgccggggcagaatgtgaatgaaggggggccacagttcagtatgccactgcctgagcgtggtatgagctactgcccccaagcgactctcactccttcccggatgatttactgtcagagaatgtctccccctcagcaagagatgacgattttcagtgggccccaactaatgcccgtaggagagcccaatattccaagggtagccaggcccttcggtgggaatctaaggatgccccccaatgggctgccagtctcggcttccactggaatcccaataatgtcccacactgggaaccctccagtgccttaccctggcctctcgacagtaccttctgacgaaacattgttgggcccgactgtgccttccactgaggcccaggcagtgctcccctccatggctcagatgttgcccccgcaagatgcccatgaccttgggatgcccccagctgagtcccagtcattgctggttttaggatctcaggactctcttgtcagtcagccagactctcaagaaggcccatttctaccagagcagcccggacctgctccacagacagtagagaagaactccaggcctcaggaagggactggtagaaggggctcctcagaggcaaggccttactgctgcaactacgagaactgcggaaaagcttataccaaacgctcccacctcgtgagccaccagcgcaagcacacaggtgagaggccatattcttgcaactgggaaagttgttcatggtctttcttccgttctgatgagcttagacgacatatgcgggtacacaccagatatcgaccatataaatgtgatcagtgcagccgggagttcatgaggtctgaccatctcaagcaacaccagaagactcatcggccgggaccctcagacccacaggccaacaacaacaatgg

SEQ ID NO: 115109 - DNA, 721 bp, Homo sapiens
gccgtggtggctggttccctgtctcttcagtagagagtctagaccccacccagtcttcatgtacggccgaccgcaggctgagatggaacaggaggctggggagctgagccggtggcaggcggcgcaccaggctgcccaggataacgagaactcagcgcccatcttgaacatgtcttcatcttctggaagctctggagtgcacacctcttggaaccaaggcctaccaaccattcagcactttcctcacagcgcagagatgctggggtcccctttggtgtctgttgaggcgccggggcagaatgtgaatgaaggggggccacagttcagtatgccactgcctgagcgtgcccggacctgctccacagacagtagagaagaactccaggcctcaggaagggactggtagaaggggctcctcagaggcaaggccttactgctgcaactacgagaactgcggaaaagcttataccaaacgctcccacctcgtgagccaccagcgcaagcacacaggtgagaggccatattcttgcaactgggaaagttgttcatggtctttcttccgttctgatgagcttagacgacatatgcgggtacacaccagatatcgaccatataaatgtgatcagtgcagccgggagttcatgaggtctgaccatctcaagcaacaccagaagactcatcggccgggaccctcagacccacaggccaacaacaacaatgg

SEQ ID NO: 115110 - DNA, 595 bp, Homo sapiens
taagcagcctgaagtaatctgtgaaaatggttcgctattcacttgacccggagaaccccatgaaatcatgcaaatcaagaggttccaatcttcgtgttcactttaaggacactcgtgaaactgctcaggccatcaagggtatgcatatacgaaaagccacgaagtatcttaaagatgtcactttacagaaacagtgcataccattccgacgttacaatggtggagttggcaagtgtgcgcaggccaagcagtggggctggacacaaggtcggtggcccaaaaagagtgctgaatttttgctgcacatgtttaaaaacgcagagggtaatactgaacttaagggtttagatgtagattctctggtcattgagtatatccaagtgaacaaagcacctaagatgctccgccggacctacagagctcatggtcggattaactcatacatgagctctccctggcacattgagatgatccttactgaaaaggaacagattgttcctaaaccagaaaaggaggttgcccagaagaaaaagatatcccagaagaaactgaagaaacaaaaacttatggcccggaagtaaattcagcattaaaa

SEQ ID NO: 115111 - DNA, 453 bp, Homo sapiens
gccctggttaaggctgttcactaactatgcagtaacactttgcctacagtggggagcctggacatcattggaggacatcataaatcatgctggctgtacgcacttcagatcatgccagacaatcatactacatactcttcctgccgaattccctctccccctctctgagatgactattccacagcgcttcctgccctcaaaccttccactcactcccacactgttgcacacttcacagagacagatgaggcagtgactcatcttcccaccagtgtttaccaacttctctgtatctgtgcccatgtcctctgcccccttccggtctcagtggaagcagcgtgcccttccccttgtccccgtcaacaccgccacttgtttcctagatcacatctctctttacctactcgaaagcttccttcccgcagttactccctttctcttctgcagcctcca

SEQ ID NO: 115112 - DNA, 713 bp, Homo sapiens
acaaaacagctggaggcagaacagcactcagctggagcattggtggttcagtggtagaattctcgcctgccacgcgggaggcccgggttcgattcccggccaatgcagcagctgaaagctttttggcagctcctggaaaaagaaaacttggagaaataagttaacttggagggataagctagtgcgggccttcaaagggaggagctttttttactgggagaaactagaagactcggggatacatattttgtgacctctcactgaaatatgagtgtttgatttttgttttctaattctaattttagaaaatttggaaagtagagaaaaatgcaaagaaacaagactatccccaagaggcaatgaatgttcaaattttgatgtattttttccagtttttaatatatatacgtagttaagatcatagaacttaacacagcttcaccttctgctctgtttgtttgaagttcacagtgcctcttaatccatagtcagaaaatagagtaacagttgcctgggtttgaagaaaaggagaattgggactgactgcttacagatgcccggtttctttttggggttatggagatgttctagaattaaatagaggtgatgggtgcacaactttgtgaatgtactaaaaactacctagttgaacactttgaaaatggtgaaatttttgttatgtgaaatgttatatgaattatatctcaatttaa

SEQ ID NO: 115113 - DNA, 1503 bp, Homo sapiens
  misc_feature (620)..(620): n is a, c, g, or t
  misc_feature (1087)..(1087): n is a, c, g, or t
  misc_feature (1231)..(1231): n is a, c, g, or t
  misc_feature (1254)..(1254): n is a, c, g, or t
gtggagtgacggtcatgctgcggcgtggacacttggcattcagggacgtggccatagaattccctcaggaggagtggaaatgtctggaccctgctcagaggactttatacagggaagtgatggtggagaactacaggaacctggtctttctgggaatctgtcttcctgacctgagtgttatctccatgttggagcaaaggagagatccccggaatctgcagagtgaagtgaaaatagcaaacaatccaggtggcagggagtgcatcaaaggtgtgaacgcagagagcagctctaaattgggaagcaatgccggaaacaagtctcttaaaatcaacttggattaacctttcagttacatctgagtgaactgcagctatttcaagctgaaaggaatatttctggatgtaaacatgtcgaaaaacctatcaacaacaattccttagtttcaccacttcaaaaaatttattctagtgtcaaatcccacattttaaataaatacagaaatgattttgatgattctccatttctcccacaagaacaaaaagcacaaataagggaaaaaccgtgtgaatgtaatgagcatggcaaagcctttagagtgtcttcaagccttgctaacnatcaagtaatccacactgcagataacccttacaaatgtaatgaatgtgacaaggtcttcagtaacagttcaaaccttgtacaacatcaaagaattcatactggagagaagccttacaagtgtcatgaatgtggcaagctcttcaatcgaatttcactccttgcacgacatcagagaatacatactggagagaaaccttacaaatgtcatgagtgtggcaaagtcttcactcaaaattctcaccttgcaaatcatcacagaatccacactggagagaaaccttacaaatgtaatgagtgtggcaaggtcttcaacagaaatgcacaccttgcacgacatcagaaaattcatagtggagagaaaccttacaaatgtaaggaatgtggcaaagcattttcagggggttcaggccttactgctcatcttgtaattcacactggagagaaactttacaaatgtaataaatgnggcaaggtcttcaatcgaaatgcacaccttaccagacatcaaagaatccatactggagagaaaccttatgaatgtaaagaatgtggcaaggtcttcaggcacaagttttgtctaaccaatcatcatagaatgcacacgggagancaaccttacaaatgtaatgaatntgggaggccgaggcgggtggatcatgaggtcaggagatcgagaccatcctggctaacaaggtgaaaccccatctctactaaaaatacaaaaaattagccgggcgcggtggcgggcgcctgtagtcccagctactcgggaggctgaggcaggagaatggcgtgaacccgggaagcggagcttgcagtgagccgagattgcgccactgcagtccgcagttcggcctgggcgacagagcgagactccgtctc

SEQ ID NO: 115114 - DNA, 1561 bp, Homo sapiens
  misc_feature (148)..(148): n is a, c, g, or t
  misc_feature (678)..(678): n is a, c, g, or t
  misc_feature (1145)..(1145): n is a, c, g, or t
  misc_feature (1289)..(1289): n is a, c, g, or t
  misc_feature (1312)..(1312): n is a, c, g, or t
tgggcctcgaatagagtaaggtgatacagtgggtcgatgagcatgatttgcctagtgcaggagtccatggtgtccactgacctagatgcctctgcgatgtcagtcagcgagataatgataacgcccgcgtgggtcaagcaggagacgnttcatgaagcgaaatccgagtagtgggagttcatgtaggtcgattactggtatctatcgaagaggtagtccatgcggagctcgatattaatttacgcgtcggactgaaggagagatccccggaatctgcagagtgaagtgaaaatagcaaacaatccaggtggcagggagtgcatcaaaggtgtgaacgcagagagcagctctaaattgggaagcaatgccggaaacaagtctcttaaaatcaacttggattaacctttcagttacatctgagtgaactgcagctatttcaagctgaaaggaatatttctggatgtaaacatgtcgaaaaacctatcaacaacaattccttagtttcaccacttcaaaaaatttattctagtgtcaaatcccacattttaaataaatacagaaatgattttgatgattctccatttctcccacaagaacaaaaagcacaaataagggaaaaaccgtgtgaatgtaatgagcatggcaaagcctttagagtgtcttcaagccttgctaacnatcaagtaatccacactgcagataacccttacaaatgtaatgaatgtgacaaggtcttcagtaacagttcaaaccttgtacaacatcaaagaattcatactggagagaagccttacaagtgtcatgaatgtggcaagctcttcaatcgaatttcactccttgcacgacatcagagaatacatactggagagaaaccttacaaatgtcatgagtgtggcaaagtcttcactcaaaattctcaccttgcaaatcatcacagaatccacactggagagaaaccttacaaatgtaatgagtgtggcaaggtcttcaacagaaatgcacaccttgcacgacatcagaaaattcatagtggagagaaaccttacaaatgtaaggaatgtggcaaagcattttcagggggttcaggccttactgctcatcttgtaattcacactggagagaaactttacaaatgtaataaatgnggcaaggtcttcaatcgaaatgcacaccttaccagacatcaaagaatccatactggagagaaaccttatgaatgtaaagaatgtggcaaggtcttcaggcacaagttttgtctaaccaatcatcatagaatgcacacgggagancaaccttacaaatgtaatgaatntgggaggccgaggcgggtggatcatgaggtcaggagatcgagaccatcctggctaacaaggtgaaaccccatctctactaaaaatacaaaaaattagccgggcgcggtggcgggcgcctgtagtcccagctactcgggaggctgaggcaggagaatggcgtgaacccgggaagcggagcttgcagtgagccgagattgcgccactgcagtccgcagttcggcctgggcgacagagcgagactccgtctc

SEQ ID NO: 115115 - DNA, 433 bp, Homo sapiens
agtagagatggggtttcaccatgttagctaggatggtctccaactcctgagctccagtgatctgcccgcctcagcctcccaaaagtgctgggattacaggcgtgagccaccacacctggcccatactctgcatttctaacaagctaacaagatggtgccaatgctgctgatccacagaccacactaagtagcaagagtctagagctgtgctgcccaaattggtagccaccagccacatgtggctatttaaattaatgaaaattaagtagcgttataaattacttcttcagtttccctagccacccttcaaatgctcaagagtcatgtgtggctagctaccctaccgaatagcacatcatcacagaaaagtccgctgcatggcagtggtatagagaattgacccatagtaactctcctacagctgatttttaga

SEQ ID NO: 115116 - DNA, 433 bp, Homo sapiens
agtcgaattaatttttctgaatttcagcttcttcatctgtaaactgaagaaaatacttgcatggattagtagaggagagtttatgagactatgcaggtgaaggtctccagtaagggacagctattagtaccacagttatttagatcatctttcccactagtccattaacagtatcttgccgcatcttaccctccttagtgttttctgaattgaatggaagcagcccaaattgacagcatctgctgcctggctcttactgagctattagtttttcaacatctgttttgaatttcagaaagaaatttccatttttaggcaacagaagcattttcctgttgtatttcaatatgtctcaatcctgaaatgattagaacttctgcttgattgaatccaagtcagcaaagccatggagaacagcccagcccacgaatat

SEQ ID NO: 115117 - DNA, 734 bp, Homo sapiens
caaaagcagcacctgcttctctaaaactaagatggatcacttgcattcacttaacctactaaaattaaagttgtgtccaagtagcaattatgagacattactctagtgatagtcaatctttttttgaatttctgtttacctcatattttctgtgaccaagagttgtttcttaaatatgtctaattttcagttctacatttgaaaatcaatatgattatttatgttctttatcttcataatttaaaagaggcttgtgttagtgttatttgtttctttctctaccacagctaataatttttctgccgcagtttatactagaaaaaattcttatgatcagcattgtgtaataaaaaaacatgcaggctttggatttagtagatttaggtttaaaatctctgcttccccgctttctagctatctgactttggacatataataacttctctgtgcctgtaaaaagcctcaaaataatgtctatagcataagaaaatctataaaaataataaaaaccataggaacagtaatttctacctttccagttttcagaatgaagatgaagattagcattgatgggatgtaataagtagtcaacaaaagggagccattattgaattgaatttttcttcctcctttgcaatgactcctggcctacttacatattaatataattatgttccatgaattaatttaaaaggtagtgagaagtccagtaaaaaccaagaaagtctaatatg

SEQ ID NO: 115118 - DNA, 764 bp, Homo sapiens
agcatagcaacagcagcgtagctgaacatcttacggatggcccaggctccaaaggctcgtttcctaagtgagagagagcctggctgaagctgtattaccattcattctccagcctccgaagtctcaaagcatcacttccaccatactctaactgtcaagacaaacacaaaggcccagagaaggggtctcactatgttgtctggagtgctgtggtggagtggagtggctattcacagagcctgttctgctgggacacagaatcacttgctccatctcatacattgatgatgattaatttgtatgtgtaccttccaaaaaagatggttgtgtttgaatggaggccttctggacaggaaaattgcaaagtacaattaacatttgagtctgtctgagtcatgaagaaatggagattactgaaaataattcattttggtatcttcttacatcctgagagactaatctttccaagttcatctgaggctcctcttctccatgacaacctcatccagggatttcttcctgtcctggtgttttatgacatgtggaaggggactgtagcaggtgatctccaaagtctctggagacttactaatgtgcatcctcatctcgcttgtaaggataatagccttcctccaaacctcacacacttttggaggagatcactttttttaaagtgcatggaaatgttttgaaacagtgaaatctataatgataggtttcataattctaacatccacaccatatggtaaggacaaataacacta

SEQ ID NO: 115119 - DNA, 821 bp, Homo sapiens
agcatagcaacagcagcgtagctgaacatcttacggatggcccaggctccaaaggctcgtttcctaagtgagagagagcctggctgaagctgtattaccattcattctccagcctccgaagtctcaaagcatcacttccaccatactctaactgtcaagacaaacacaaaggcccagaaactgccagactgtcttctgaagtggctataatatttacactcccatcagcagtgtagaaggggtctcactatgttgtctggagtgctgtggtggagtggagtggctattcacagagcctgttctgctgggacacagaatcacttgctccatctcatacattgatgatgattaatttgtatgtgtaccttccaaaaaagatggttgtgtttgaatggaggccttctggacaggaaaattgcaaagtacaattaacatttgagtctgtctgagtcatgaagaaatggagattactgaaaataattcattttggtatcttcttacatcctgagagactaatctttccaagttcatctgaggctcctcttctccatgacaacctcatccagggatttcttcctgtcctggtgttttatgacatgtggaaggggactgtagcaggtgatctccaaagtctctggagacttactaatgtgcatcctcatctcgcttgtaaggataatagccttcctccaaacctcacacacttttggaggagatcactttttttaaagtgcatggaaatgttttgaaacagtgaaatctataatgataggtttcataattctaacatccacaccatatggtaaggacaaataacacta

SEQ ID NO: 115120 - DNA, 577 bp, Homo sapiens
agcatagcaacagcagcgtagctgaacatcttacggatggcccaggctccaaaggctcgtttcctaagtgagagagagcctggctgaagctgtattaccattcattctccagcctccgaagtctcaaagcatcacttccaccatactctaactgtcaagacaaacacaaaggcccagaaactgccagactgtcttctgaagtggctataatatttacactcccatcagcagtgtagaaggggtctcactatgttgtctggagtgctgtggtggagtggagtggctattcacagagcctgttctgctgggacacagaatcacttgctccatctcatacattgatgatgattaatttgtatgtgtaccttccaaaaaagatggttgtgtttgaatggaggccttctggacaggaaaataatcacatccttcctgagataatgagcacacaattgcctggatacctgaaggaatggagacagcggcagaaaacactgcagagaggtggaaacatccgttaatatctcaacaatcccattactgctaccaacaataataatggatgcatagaacatcgatc

SEQ ID NO: 115121 - DNA, 921 bp, Homo sapiens
agcatagcaacagcagcgtagctgaacatcttacggatggcccaggctccaaaggctcgtttcctaagtgagagagagcctggctgaagctgtattaccattcattctccagcctccgaagtctcaaagcatcacttccaccatactctaactgtcaagacaaacacaaaggcccagaaactgccagactgtcttctgaagtggctataatatttacactcccatcagcagtgtagaaggggtctcactatgttgtctggagtgctgtggtggagtggagtggctattcacagagcctgttctgctgggacacagaatcacttgctccatctcatacattgatgatgattaatttgtatgtgtaccttccaaaaaagatggttgtgtttgaatggaggccttctggacaggaaaatatggagagtgcgtgctttggattcaagactgggaatgaggggaccagaaacctattctgtggctgtttcttgttaggactttcctaagcctctggaaaagtgcaaagtacaattaacatttgagtctgtctgagtcatgaagaaatggagattactgaaaataattcattttggtatcttcttacatcctgagagactaatctttccaagttcatctgaggctcctcttctccatgacaacctcatccagggatttcttcctgtcctggtgttttatgacatgtggaaggggactgtagcaggtgatctccaaagtctctggagacttactaatgtgcatcctcatctcgcttgtaaggataatagccttcctccaaacctcacacacttttggaggagatcactttttttaaagtgcatggaaatgttttgaaacagtgaaatctataatgataggtttcataattctaacatccacaccatatggtaaggacaaataacacta

SEQ ID NO: 115122 - DNA, 962 bp, Homo sapiens
agcatagcaacagcagcgtagctgaacatcttacggatggcccaggctccaaaggctcgtttcctaagtgagagagagcctggctgaagctgtattaccattcattctccagcctccgaagtctcaaagcatcacttccaccatactctaactgtcaagacaaacacaaaggcccagaaactgccagactgtcttctgaagtggctataatatttacactcccatcagcagtgtagaaggggtctcactatgttgtctggagtgctgtggtggagtggagtggctattcacagagcctgttctgctgggacacagaatcacttgctccatctcatacattgatgatgattaatttgtatgtgtaccttccaaaaaagatggttgtgtttgaatggaggccttctggacaggaaaatatggagagtgcgtgctttggattcaagactgggaatgaggggaccagaaacctattctgtggctgtttcttgttaggactttcctaagcctctggaaaaggttcaatcctgctgatgctctccatggagatggtcagcaagtgcaaagtacaattaacatttgagtctgtctgagtcatgaagaaatggagattactgaaaataattcattttggtatcttcttacatcctgagagactaatctttccaagttcatctgaggctcctcttctccatgacaacctcatccagggatttcttcctgtcctggtgttttatgacatgtggaaggggactgtagcaggtgatctccaaagtctctggagacttactaatgtgcatcctcatctcgcttgtaaggataatagccttcctccaaacctcacacacttttggaggagatcactttttttaaagtgcatggaaatgttttgaaacagtgaaatctataatgataggtttcataattctaacatccacaccatatggtaaggacaaataacacta

SEQ ID NO: 115123 - DNA, 436 bp, Homo sapiens
gtgcctggacataggtcttcccagagccagatctggaattctctctccatccttgtcccgcccctggatgtgctaaagtagcagaaagaacactgagccaggagtcaggaaagcaactctctctgcttatctcctagtgccgctagacctctgtggctttaggtgataaaaaatggggtcacacaggcttccatttagtaaacccacttgccctgggctttcacaccttcgtctcattctcccttgataccaacgaggaggtaggcagggttggttttgtgatgtcattccctagttgaggaaaccaagacaccgtgagtctatgtgagtggtgtgaagtcaccagcaagtttgaacgatgaggttttggtacagccattttgatatggtcatgaggacattttgatgtcacctaaaaagcaaactatccaactta

SEQ ID NO: 115124 - DNA, 928 bp, Homo sapiens
gttctgggaatcaggacatggatatctttggagcccgctattgcttctacctacaactggtgttacaggacttggcccacttaatcttgcaaattctttctgcccctctcctgtgcttaatgagatctgttctctatgaatgttcaggacctcaggagtagggaccccaaaggctgggggcaaagtagatgtgacaggtgccaagcataggatgtgtgaccagattcggtcatgtgattacattgtgaagtgacccaggcattttcattaagaaggaaagtggttgtaggaggaggaaattgaacacaacccacacatgggtggttggaaaatctgagacctctcgtgggcatgctcatccatttcactcaccggtacaggggaaattcttagacctgtcagtgcaactatttgaaataaacatccaagaaaggcagcaaacttcaggtaggatgaagtcagaagtccaccctgaagcacagtaaaagccacaagacagaagtgactgatcccatcccagggatcctaaagaagattatcatcagacttctcattggaaactttggaagtcggaaggcagtaggctgataaattcaaaatgctaaaaaagaaaaccaatgaaaacatgctaaccaagaaaaaaaaatgctacatggctgaagaaatcatgcagaaatcttagcaacattttaaatgatccaacaaggtctgttgcccattgcgcaaatatgggcaaacatgagctggtatagcttatttttatgggtgcagggagcatgcagttatctccactagcatgtttttgtttgtttgctttgagatggattctcactccagcctgggcaacaagagggcaactccatctcaaaaaaataaataaataaaataaatgaatacataaataaaaggcataataagcaaattgcta

SEQ ID NO: 115125 - DNA, 394 bp, Homo sapiens
ttagaaatgcagcaggcagccgggtgtctgaggtagaagggcctgtggtgttgggggtcaacggcaagggctgagcagtcaagcattcctgggttcaaatcccagctcatcctccttgtgagtttcccggggctgccgtaaccatgatcgcaaatgtggtggcgtaaaaccagaaatgtattctctcacagttctggatgccagaagttcaaaattgaggtgtggccagggccgtgctccctgggaagggagaagcccttccttgcctgtccagcccataaaggctgtcagcagtcctgggccttccagggctggtggccacatcatgctgtcgtcgacactctgctttgcctccgtctttacgtgaccttccgccctctgacttctcatcttc

SEQ ID NO: 115126 - DNA, 794 bp, Homo sapiens
gggtttcaccatattggccaggctggtcttgaacttctgacctcaagtgatccgcccacctcgacctcccaaagtgctcggattgcaggcgtgagccagcaggcccagccggcaaactttttcgaagagacagggtcttgctatgttgcccaggctggactcaaactcctgagctcaagcaatcctcctgcctcaacctcccaagtagctggtactgtggtcgaaggctgctgtgactggcatgtcaaacttttattgtgcttactttgtacacagaagtgtccaaggtgcaaagatgcctgaattatatgctggaacttgtgagtaaaaataaatgcagtaaagggaaataggcttgttataccaggcagaatattatactgaagaggtaccaagaaactgttgtaggaatgtagaggaggaagtgattaaatgagataatggatgtgaaagtgctttgtaaaccatgaaacagtatacccagtagaaaagatgattattattgttacaagtgcgctgatgttcctggaagaaaaataaagaataaattcaatcacaatgatgggaggttggcagggagccctgtggggcctgactccctgagcgagctcaacctgtccccaagtggcaaggctgatagagtccttggctagggaaagaagccattgtaaacatgaagacaagctgttcccagagcaccttctgtgcacctgtgtcatagtacttaccacatcctgcaagtgtctgaggcagtccaggtggacaataaacacttggactttggtggttggcag

SEQ ID NO: 115127 - DNA, 336 bp, Homo sapiens
gtaaggggttgggggagtggttttttaaattgaaaagtgatatctaatttgcttttttattttttctgacttttctggctgcagagtagagagggagaattgtggggtgggggatgagggcaataatcaaagcagggagaccagttagaaggatgccgccaagattcagaccaaatcaacaatggtgggaatagaaatggaaagatggggttggatcaggacaggttttggaagcagagctcttggaatatggatttgggagggtgaaggaaagagaaaaaacaggactgactcctcggctttgggcatgaacaacaggatggatgggcatgctgt

SEQ ID NO: 115128 - DNA, 248 bp, Homo sapiens
tgtttcctttgtcattctcatctgtaattccagattttctattagaactgtaaaacccctttacttctgtccttccgtccttccatccatccatccgtctgtccgtccttccatccatccatccgtctgtccgtccttccttccttcctttcactttttttttttttttttttttgggaaaaaggtcccctttttgccccccgggttggaagtgcggtgcctctaatctccggcctcagtgaaccccc

SEQ ID NO: 115129 - DNA, 177 bp, Homo sapiens
acaaggggtgtgattctctggacttaatcgtaacgagtaaggatgaaatagaagttatggaaatcatttcaaaaggatgtgccaatgccattttagagttcatagtaataaaaggagaatatgttagccacatttagatatgtaaacattgacaatgcttagaaaacagactttttt

SEQ ID NO: 115130 - DNA, 648 bp, Homo sapiens
ctgtaggagggtttgtgtcttgacctaacatatctttttggctcattatcatgtattatttgtgtggttttctctttgccttgtgttgtgtggtttcctcagccactcagtcaactggaatgcaggctcagtgtcacggccccagttctgtaccttgtgctccccaagcctggttcagggctgtgtgtacctagaaaagtttcagtaaatccttcttgagtccatttagtgtctacttaaggttgtggaacccttggcagtttgagaagcatcttgaccttctttttctcattctagaccagctgtatcatttgcagggctcagtgcaagcccccttgttcagaaattattaaaaatttcaaggctggggcccagcgtggtggctcatgcctataatcccagcactttgggagactgaggcgggcggatcacctgaggtcaggagtttgaaactagcctggccaacatggtgaaatccgtctctacttaaaatacaaaaaatagccgggtgtggtggcgggcatctgtaatcccagctactcgggaggctgagggaagagaatggcttgaacctgggaggcggaggttgcagtgagctgagatcgtgccattacactccagcctgggcaataagagagaaactccatt

SEQ ID NO: 115131 - DNA, 667 bp, Homo sapiens
ggactataatttgttcaaaatcacttatctaataaaggttaaagccaaaatttaaacatatatctgccagatttcaaagtctctgctctccccataatgatatgctgcttcccttctgaaaatatatctaatgaccaggcttttgccatatcagggattcagttaaattatgaaaagagttatctgaatttcagagaaaaagatgtaatatttttcacggtgccaaataaattgactatcctatggacaataatggcagctgtaccacaggacaaaaatattaaaatatttataatacaaggtttaataaccattatttttagtagcaagtatatttaaaaatgacttgagtgtcacccacctttctgatgtatttatcgtatataatcacacaatgtgaaaaacattatttggtttggggaaaacagaatacaaatgtttaaaacatttttaccttcttttaaaccctaatccatttggaaaaagtatcttcaatataattgtgtcattaaatcacaaaaatggaaattacgttaacagcaggatgttatcttttattgagggcaaatagcagggttgctgctaatgagaacatcatcaatttatcagcaaaaggtcagcctaaagagctctttacctaacttctccctaagtagttattttcccc

SEQ ID NO: 115132 - DNA, 666 bp, Homo sapiens
gtttgaaagtagttaggtgtatgtaggcagaacatgattaaaccaagtttatttgttttgtcctaaaacagttttagttaatgttggtaatcttccaattgactaattattttataatatttcatttgtatgtaataggcacacagcaagtacctgttgaatgagtcagtgaatttacatttgtcatttgttgacattaaatattcatcttggaaactatataagcttaaaagaatgcaaataatagagtttcatccaatatagtttgagtttttgtttggggattcctatttatgctgctactcacccaacacattttaaatatttgtttggggactagtatttacgtttctattctgatgaaaacgtgaagaaacaagaggaccaaatgatctctaaggaccattctaactctaaactcattttcagagaacaaagtagaccaggtgaataccaattcctgataaaaggtagaagataattatcaaaactaacagcagccattgcttttattggcaattcattagaagcattctcttcaaaacgtagaaaaagtcaagagtgcttaatattactgataatattcaacatcatttttatagacctaccactctagcaataaggcaacgaaaatgagatataaatgctgaaaaggagaagctacaa

SEQ ID NO: 115133 - DNA, 308 bp, Homo sapiens
ccaggagagcagaggggagctggcggccgaggtggggtcggtggtggggtgagcctgcggcgttgtggctccaaggcctgctggcctgaagtcacccccgggatgtgccccgtgtgggaccgtgcgggatgcagggaggagcgtggctctgggtgtggaggtggcgggctgctggcatcctgtcaccgaaccctccttccacaggaacgggggaatgagtgggagagcagtgggagagtgtgccctctcccccagactcctctctccctgtggcatgagaagggtgggatctggcttaccaggtgagt

SEQ ID NO: 115134 - DNA, 395 bp, Homo sapiens
gaccccatccctacaaaaaaaagtatatattttttacttcattatacaaaaatattaaagaattagctgggcgtggttgtgtgcgcctgtagtcccagctactagggaggttgaggtgggaggattgcttgcttgagcctgggaatttgaggctgcagtgagctataattgtgccactgcactctagtctgggtgacagagcaagacctgtctctaaaatcaaccgataaatcaataaaaataaataaaaaataaaatgatagcatggtgttttagggaactactttattttttattttcatttatttaatggtgtttgattaatcacttaaatattaaaaatcagttgtaaaaattttgatattgtccagacaaaatagactaagtcacagaac

SEQ ID NO: 115135 - DNA, 95 bp, Homo sapiens
agaagtcctgaaattaatgttgaaagcaaggcagtgggatgccactaaggaagcaaaagcagaggccgggtgcagtggctcatgactataatacc

SEQ ID NO: 115136 - DNA, 116 bp, Homo sapiens
agaacttggttctatttctgacttcaccactaatttgccataggctctggtgaatccctttccctctaccgaccttgccttcctctactgtgaaataaagtgttgtgatttgaatt

SEQ ID NO: 115137 - DNA, 667 bp, Homo sapiens
ctgactactgcggaaggtgagactattcaggcattaagcaactgccaccctaaggtggggactaagggagaacttagtgttacaggagctcaggaggcagggctgttcattgggatctgtagaagctggggctatgggggaggtgctgccactgggccagagccattgcccagagcagagaaagaagagaaatgcccaggagttgcctctcttcctgcccttctatctcctcccagtgccttccattggccaaacccacccagaagccagtttcccagcaaagaagccctgaaaaggtggtttgggagaatctaccccgtgactgaaggcagagtagaggaagggcacctagactagactagactagatttgaggcaaacgagcagatgacctgtgccatctatctctgacttggggttgtgttgaagcaggctgagctgacactgtgggcttccacgtagtatacaatcagtaaatggtaaatgttctttttttctttttacatctccatcctcattttttaccattcgtccccaaattcagacatattgatgtctttttagtttctaaaggtcactatgaactctatgactttgggacctgtggatatttaactccctctgagtccacatcgacagggatcctctaggcagccggccgatcactc

SEQ ID NO: 115138 - DNA, 737 bp, Homo sapiens
gaagattgcttattggatatatgtgtcagaaaccatgctcattgtttaggtctaaatttgatttgtagtttttagaatttaaatgttctttgaattttcaaagtatcaggggcttaactttgagctctgtctctggctagtccttgggactccattcaatatcttccatctgttatatataatttgttcacataattgttgcaggaatatcagaaatctaaatcatgggagtaattttatagggtcctatatgataataaaaatagtaactatcattacagaaaaactctagaatatgcaacaaattttacatgcagaaattctaagtattactacaaccgtgcaagttaggtgttttgggtggtatattttgaggcattatcatgttttaaaatctgtgtattctccccctcccctcccacttcccaatcctgccatttcatatgagtaaatggtcagacttgtgcttgttttgagtgagttttgaaacaaggtagaatgcagaaggctcttgcaagtctttttaaactctagagacatgagaagattgagacatagataaaatatcttaaccataaacacaaaggcagaaggatttcactgaaactagaaagttttcccagcttgacatgaagggagatggtgacattggagatggggatttcaaagcacaagtgacatgtcctcagcttccagcagagaagccaaaaggccagcgatattccagaggggaaatg

SEQ ID NO: 115139 - DNA, 679 bp, Homo sapiens
aaattgcagaagaataaacagcaagagctaaagttctcatttatttgtatgttacctgctcctggattacctatcgcaaattaggatgtttttggttaactttgatgggttttgagattgtcacttctttccatttaatctttgtatgcttagaaactgccagtttagtatggtattaggtgaaaagaaaatggttagaaatataaataaaatctttagtggatagtattgtaccaatgttaattttttagtttagaaacttatattatggctataaaaggtattaaccttagaggaagctgggtaaagggtatatgggaactgaactattttcacagttcttctgttatctgaaaattatttcaaaataagctaaaaaatgattagactaactctacagctacaaagttattagtgtatattgcaaaaccagagacaagtgatttgtgtgtgtctagggaatggacagagattctcttctatttggatggttgaaatccttgttcattttcattgacctgaaaaattgagagttgttgctgtatctcatgaggatgaagatgctgttagagtatgtttagtaaatgcagacttctttttctttttctgtgttatgaatatatgcataaatacacgacagataccaatttgcaaacatacatgcagtgtgtgcttctaa

SEQ ID NO: 115140 - DNA, 593 bp, Homo sapiens
tggtggccatcctttgggcactgtctcctttgcctgtgactctgtggcattcctcagtgcaggataactacagccttgaaacgatggctgtgaagtttcatttttatttcaaactctgtccattgctcttgtataagatcggacataagttcccaaaagaggaaaaattcattgtaagacagagagcatgtacaaaataagacagtgggaggagaggaaggaaccagagacagggcattctgagagctggaaggggctggagaaccacagcctgacctggcttggcctgggcagattgattgggtcccacgtgtggaagggaccctggcgagtgtactgtccagggcaggtgcaggtaggcctgcccctgtctgtccaggcccccactcttggtcaggcccaggtcagcagaacaccgaggaccttgtggacagcccttcgttatgtttgggctgctctgtctactgtcaacaccatcaacttgaacttctgcaccatgctgagcttgaactctcagaggggcaggagcctggcagctaaaagccctgctgttccactccctcacagtgggacttctaagcctttgtgtcccc

SEQ ID NO: 115141 - DNA, 362 bp, Homo sapiens
aagacaagcatgttcccctaactctcaccacccgggcgtgacgggaggtagaatgtgtatgtgtgtacgtgtgtctgcacacattgatctgcctgtgtacggtctacattttctttcattcactcattcactcatcaactcattccttccatggtttaggctccactcacttcacaaaacctggaaggcagaataagaagatgaaaggatgcggccaggcacggtgactcctgcctgtaattccagcactttgggaggccgaggtgggcagatcacctgagctcaggagttcgagaccagcctggccaacatggtgaaaccccatctctactaaaaatacaaaaattagccaggcttagtgg

SEQ ID NO: 115142 - DNA, 726 bp, Homo sapiens
tactttccaaactggcttaactgtctttattaactgttgttaacacatgaaaaatgttattgattgacttttagcagaatgatgaattaaacttagcttttctcattgtttctcaatataatactggtgttgttaccctcttttaaatgtctgatcagcatctacagatattcaaccccttaagtggggattagaaaagtcaatacacccataattaatcctaaacagctgatgtccatcattggtggacattggtcaatgaactgttgtcataattaatgttaaatgtataagagagaataatttggctttatactgttcatgttaaggcagctagacagaaaaaaatatataaaatcttccagaaaaatcttgaaatagatacattttagagtttcatatgccttagcattctacttgtttaagatactcatagggagttgtgaaaatgtgtcatattttgttctgattagtttcaggttttataaatttctatgtatcaaataaactgaatttattaagacataattaacctattttcacattttaatcatttaaggcatatataactgtaatcaaagcttcagatcaggatgatattcaatgttatcaaactgaattaatttaactctaatcaaaagcaaaaataccatgacattctggttaattcatgcacttttattttgggaaatgtgcaaagtctgttgaacttcttgaaaaaatgaa

SEQ ID NO: 115143 - DNA, 177 bp, Homo sapiens
ctcaccttctacccttcagattcactacagaaacttccttcttggcctgcatacatacctgcaaacaacctctcctctctcccagcggcgaacactagacttagagcctcaggggcgtgaactctccttgttgacctctgtagccttgtgaccgtattgtgaatatgcggctaacca

SEQ ID NO: 115144 - DNA, 281 bp, Homo sapiens
ctcgccttggcctcccaaagtgctgggattacaggcgtggggcaccgcgcctggccactttccatcttttctaagcatatttttaatacttgggatcattctctctatactgtttcttattcaacattaagttatcattttccctgtgttgaataatattcttaggaaaatgattgttagctcttgatagttatattagtgtatgatttcccttgctaattatttcaattgtttccagctatttgttattataaatcaagattttgtataaatcttcatac

SEQ ID NO: 115145 - DNA, 241 bp, Homo sapiens
attaagagtgaagatcatttgcacagttcactgatctagtttggtgtgtcctcttatccgttagtggaagtagaatggaaagagtgctctttaaacaatgagggagttcagtgtttatggttttgtactctgaattctaagttgttgagatacagttgttatataagtggcattactgtttgtcagaaatcatgaggaggaacaatttaatccagcatgaacgtgggtgcttgtgtttgag

SEQ ID NO: 115146 - DNA, 273 bp, Homo sapiens
tggtgtgtgtgaatgtgagcatttgagtgtgcatgtgtgtgtgtgcatgtggtacatgaatgaatgagaatgtgtatgtgtgtattgggaaagtgagtgtgattgtgtatgtgtgagtgtatgtgagcatatgtgagtgcaagtatatgtgcaggtgttcatgtatgtgtgtgtgtgtgcatgtgaatgcatatgtgtatgttggtgaacatcagcccgagagtgtggacaccagagtgagtgagagtgtgtatgagtgagtgcaggcgtgag

SEQ ID NO: 115147 - DNA, 396 bp, Homo sapiens
ctgggtctcttcaaagggcctcggtggcagaagttccaagtattctgaataggtgaggatcacattaggctttctagaatctcaactgccctgccctaaacccaaactgatatgcataaaacttaagaagttctgcccacaggctcttctgggtgtgtgtgagatacaactcatgtgagctgggacagtgcaggggtgaagagcctggactccactgccagatggcctgggtttaaatcctagttctggccacttgctagctatgtgaccttgggcaagttattttacctctcggtcccttagtttccttatctcctaagttcagagccagggtgtgtggcacctcccccggcccttgctcctattcttgccataaggaatctgcccccatgatcc

SEQ ID NO: 115148 - DNA, 677 bp, Homo sapiens
gttgtgtaaagttttgagctctctgttaattaatattagagaaaatctattcttcgaaatcttgctatgcttgcacttctctcagtagaggttatgtcatgtgatttagtttacaacttcaatgaatataattttcaaaatcgctacaactgcagaatgcccatatatttgtttctttttccttaccacctgatctggaaacatgaagaatgtatctttatacattaacaatgtgaagccactaccttgtacaagcaaaataatagctgtgcccttgatttatgatcattgtaccacatatgtgaagaattagacacaaatataaaatgtgcttgtgcaaagtatggatttgcatttttcttattacttaatagagcatcagaaatagatttttaaaataaaattattcataattaaatattaccaaaacaacaacaaaactgtggcattttggtagcctcttggagtaaggttccaaaatttcattttattatttattttttaatggtagcatagcagtgggcattaaaaaaatctaaggtccgtatttaaagctcttaaaaactgttagtgtgtgtacctttcatacatattattcttaagatatttcttattaccactttgatgtctatattttcaggtttattgtgctgtttctctactaacatagtattgga

SEQ ID NO: 115149 - DNA, 181 bp, Homo sapiens
gtgccttggttggaggcttctcagggtcctcaggggttcctgagtggctgccagagcaagtggtggctccctctggccttaagagggagtgtagcccagctgccaccaggccctcctgctgcccaggctgcccagccagccctgcttggagccttcagagggtgtgccctggctgcagtag

SEQ ID NO: 115150 - DNA, 305 bp, Homo sapiens
atgttgcagacagcagggaagggagtttagaatgagaaactttggaataaacataagccatctatctagcccttgcagtttatcttcatgcctttattgattattctcatttgccatctggctgaattagttattaaaaagtttctttgggattataaaacctagttatctaccttatacttggtacaataaaagagtttttagggaactcctataggggttataaaaaaaataactgatgggtcacacctgtaatcccagcactttggtaggctgaggtgggcagatcactggaggtcaggagt

SEQ ID NO: 115151 - DNA, 861 bp, Homo sapiens
ctcacctcagggtctgtgccttcttcataggagtgaatgctgaaagccatgccatcaaacgtgtggtccccccgcagcacagccaaagccagcccggccaccgtcagatttgctatctgcccagaaaactccatcttgtgaccagtacgctcaattatcctcagaattctgcaagaaaccacagatggagaagagcatcctaccttttaaaagtaaaacccatcctccttgcaagatttccttattgcaagacttttctttgagttttaatcactatctttatatcatttaggaattattaaataagagcactggctttggaatcagacaagttgacacctaaatcttagcttctctaatttctaactgtgtgggcaaataaagtaatctcacttagcttcagtttcctcacctgaaagtcaaaagtaatattacactcatctctaaagattgtcgtgaaaattaatgaaattgttacatgtaagccagaccctgcagggcctcgtaggactttataagacatttggattttattctacgtgtaatggaaagccactgagtggttttaaaagcaaagtaaggacatgacctgatatatacattaaaagattactccgggtgctatgtagaagatgacccatagagggtcaagaacggaggcagagagaccatttaggaggttattgtagacagtctggtgagagaaatggggctaggaataggatggtagtggtggagatggagagaagtaaaagaattccaccaaaatatttaagggattttaaaaatggatgtacagtgccgcatacaagagttagttattaattggctgtgagttagaaggagttaactagtactgtt

SEQ ID NO: 115152 - DNA, 398 bp, Homo sapiens
gtgaaggaaaacaactttaaaacactctttggtccttctcccctctttaaactcaaaagggtataatcatccccgggagagagcactccttttaaatggggctactcatcctggcttggctaatggtgaacctaccttgtgggttttaaatcaaccgtgacatcaggtggtattgggtgcctgagctggcattttgtgtaagtccaggagcccttgatagtgtgcgtcactggggttattgatcgtgggaagaagacagcttggctggcatctcaccttttcctctgagtggagaagctgacttgctttaagtgcccaaagcaaaattctgagtaagggtagatttgctctgttattgttttttggaatcttaaggcaagagagtgtctacttgttgg

SEQ ID NO: 115153 - DNA, 908 bp, Homo sapiens
aaccaaaaaaacaaggtatacaggcaacaaatagcatgatgaatagagtggtacctcacatctcaatactaacattgaatataaatggcctaaatgctccacttaaaagatacagaattgcagaataggtaagaattcaccaaccaactatctgtcgccttcaagagtctcacctaacacataaggactcacataaacttaaggtaaagggatggaccaagacatttcatgcaaacggacaccaaatgtgagcaggagtagccattcttatattagacaaaacaaactttaaagaaatagcagtttaaaaagacaaagagggacattatataatgaaaaaaaggccttgtccaacaggaaagtatcacaatcctaaacatatgcacctaacactggagctcccaaatttataaaagaattactaatagacctaaaaaattagacagacagcaacacaataatagtgagggattttaatactccactgacagcactgcacaggtcatcaagacagaaagtcaacaaagaaacagtggatttaaactataccttggaacaaatggagttaaaagatatatacagaatattccatccaacaaccacagaatatacgttctgttcaacagcacatgaactttctgtaagatagaccatatgatagccaacaaaatgagcctcaataaattttaagaaaattaaaattatatcaagcactctctcagaccacagtggaataaaactggaaatcaactccaaaaggaaccttcaaaaccatgcagatacatggaataacctgctcctgaatgatcattgggtcaaagatgaaatcaagatggaaatgtaaaagttcctcaaactgaatgacaataatgacacaacctatcaacctctgggatacagcaaaggtg

SEQ ID NO: 115154 - DNA, 384 bp, Homo sapiens
ccacagtgctgaattttcacaaattgcgaattaggaaattgttgctcattttacaatttggtttccctcaggattccttttaagtagccagctaccccagtacttttgaaatatgacttgcttataaaaatttgataggcttggcacggtggctcacacctgtaatcccagcactttgggaggccgatgtggggtggatcacgaggtcaggagttcaagaccaacatggtgaaaccctgtccctactaaaaatacaaaaactagccaggcatggtggcacatgcctgtaattccagctgctcgggaggccaggcagctaggcaggagaatcacttgaacccaggagatggaggttgcagtgagccaagatcatgccactgcact

SEQ ID NO: 115155 - DNA, 1282 bp, Homo sapiens
aaaaattagcaaggtgtggtggcacgcacctgtagtcctatctacttgggaggctgaggcggaagatcgcttgagcccaggagttgaggctgaagtgaaccatgatcatgacactgcactccagcctggacaacagagcaagactctgtctcttaaaaataatcatataataatgattttttaaaagaatggggatgtgtgaaggccaagctaaagagtttggtaacaagaagccagcagaaactttcaaccaagagaatgatgcagttggggtcgcataggttgggttaggggcaggggaagtgagggctggataaaaggaaaagtatttagaggattgcttcagttgcaaggcttgaagcattcaatgtagatggattcaagagatattgccaggtcttgttgatctttctttatatacacacacttactgggttgaattgggaggtgtggtctctgaagaaaacaggaaaggaatgatgagagaagttctcagaagacaatggaatagagcatctaaagggaggagtaaggagtttcaacagtgtaagaaagaatgaagatttgtcatttttaaagttgtgggaccctctgaaaatctgatagaagcagaagccagcacacagtttcaaaagtaaacagaagaggccaggtacggtggctcacacctgtaatcccaacactttgggaggccaaggtcggcggatcttttggggccaggagttcgagaccagcatggccgacatggtgaaaccctgtctctactaaaaatacaaaaattaatgctcctgtagtcccagctgaggcacaaggctgaggcaaaagaatcgcttgaactcaggaggtggagattgcagtgagccaagatcgtgccactgcactctagcctgggtgacagagcgagactccatctaaaaaaaaaaaaaaaaagtaaacagaagaatagagtgtaggagctagagaggcatgcagtttttaaatgatgatgatagaaagttagtatttattgagcatatcttacaggccaggctctgttctaagcactgtaaagaatttaatcttcaacaaccctataaggttgagttctggtattttcgcactgtacaggatgaggaatctgacacagaagttaaacagctaacccaaggccacatagcaaataaatggtggagttagaattagagccaaggattttttttttttgctccacaatagagatgacaagaagagggtagagagagattccagatactagaaagaaaaagtgaaactgaagggcacc

SEQ ID NO: 115156 - DNA, 558 bp, Homo sapiens
ggttaaaaccctgtctcctactaaaaatacaaaaaattaaccccggtatggtggtgtgtgcccagttagtccccagcctactcaggaggctgaggcaaaagaatcgcttgaactcaggaggtggagattgcagtgagccaagatcgtgccactgcactctagcctgggtgacagagcgagactccatctaaaaaaaaaaaaaaaaagtaaacagaagaatagagtgtaggagctagagaggcatgcagtttttaaatgatgatgatagaaagttagtatttattgagcatatcttacaggccaggctctgttctaagcactgtaaagaatttaatcttcaacaaccctataaggttgagttctggtattttcgcactgtacaggatgaggaatctgacacagaagttaaacagctaacccaaggccacatagcaaataaatggtggagttagaattagagccaaggattttttttttttgctccacaatagagatgacaagaagagggtagagagagattccagatactagaaagaaaaagtgaaactgaagggcacc

SEQ ID NO: 115157 - DNA, 295 bp, Homo sapiens
ccgatatttattatttttaatagagacaaggtttcgctgtgttgcccaggctgctctcgatttcctgggctcaggtgatcctcccaccttggcctcccaaagtggtgggattacaggtgtgagccaccacacccagcccatttgattttctagttcacagtaattacagagatgaggctaacagtgtgtcccatagagcaagaaactccaccatctagtccagtgactataccagcatctagtgcagagctgacagcagcaagcagtaacagctttacattgtgaaataagacag

SEQ ID NO: 115158 - DNA, 219 bp, Homo sapiens
tttacagtcaggaatggacaatgatgtctaatattattttaattcaatattgtaatagcctagacaaagaagaaagacatataaataaatgatttagaatctgtaaaggaagaactataactattattattatataagatgataatatagaaaaccaaaagtatttacagatgaattactggcattaatgaaagtaataaggtagaaggatataaaatt

SEQ ID NO: 115159 - DNA, 322 bp, Homo sapiens
  misc_feature (50)..(50): n is a, c, g, or t
  misc_feature (62)..(62): n is a, c, g, or t
  misc_feature (75)..(75): n is a, c, g, or t
  misc_feature (158)..(158): n is a, c, g, or t
agcagcttgtaagaaacagattatagtgtaaagaagagtatctaaaaaanctatttttaatntcttcagaggaanatagatactgcatccataaaacaagtatagaatgctataaaaaggaacactcaaaaacaacagagtgagactccatctcaaanaaacaaaaacaaccatgcccggttattttttttcacatttttagtagagacggggtttcaccgtgttagccaagatggtctccatctcctgaccttgtgatccccccacctcacccttccaaagcgctgggattacaggcgtgagccactgtgcccggccttgc

SEQ ID NO: 115160 - DNA, 1267 bp, Homo sapiens
ctttaaaactgggaaggaggaagacgaggccaggagccggagggtcaccaaggtagatttccagcagcgctagtccagctgaacactttccagccttgtttttcagcagctttgaggaaaagtatagtgatccgtatgtgaaactttcattgtacgtagcggatgagaatagagaacttgcttggtccagacaaaaacaattaaaaagacactgaacccaaaatggaatgaagaattttatttcagggtaaacccatctaatcacagactcctatttgaagtatttgacgaaaatagactgacacgagacgacttcctgggccaggtggacgtgccccttagtcaccttccgacagaagatccaaccatggagcgaccctatacatttaaggactttctcctcagaccaagaagtcataagtctcgagttaagggattttgcgattgaaaatggcctatatgccaaaaaatggaggtcaagatgaagaaaacagtgaccagagggatgacatggagcatggatgggaagttgttgactcaaatgactcggcttctcagcaccaagaggaacttcctcctcctcctctgcctcccgggtgggaagaaaaagtggacaatttaggccgaacttactatgtcaaccacaacaaccggaccactcagtggcacagaccaagcctgatggacgtgtcctcggagtcggacaataacatcagacagatcaaccaggaggcagcacaccggcgcttccgctcccgcaggcacatcagcgaagacttggagcccgagccctcggagggcggggatgtccccgagcttgggagaccatttcagaggaagtgaatatcgctggagactctctcggtctggctctgcccccaccaccggcctccccaggatctcggaccagccctcaggagctgtcagaggaactaagcagaaggcttcagatcactccagactccaatggggaacagttcagctctttgattcaaagagaaccctcctcaaggttgaggtcatgcagtgtcaccgacgcagttgcagaacagggaccatctaccactgccagtgccccagctgggagagcgcgttcatcaaactgtcacgggtggtgaggaaccaacgccatcagtggcctatgtacataccacgccgggtctgccttcaggctgggacagaagacaagatgctaggggcgcacatactatgtcatcataacaatcgaaccaaatggactcgacctatcatgcagctgcagaagatt

SEQ ID NO: 115161 - DNA, 170 bp, Homo sapiens
accaaccttgcctcccatgggtaaagccaatttattgtggtggattagtttttcgatgtgctcctagattcattttgctaatattttgttgaagattattgtatgcatgttcatcaagaatgctagcctgaagttttattttctgtgtgtttgccaggtgtttttttttt

SEQ ID NO: 115162 - DNA, 537 bp, Homo sapiens
tctgtctcaaaaaataaaaataaataaatcaataaataaatggctgggtgaatgttcgctgattgtgttgtgccctaataggcagtgggtcgctaacaactttaatgcctaaaagtgaactttgactaaagtgtctcttcctgactttgattcatgctgtgcttgttgctacccacctgctcttgctatttgtgacttaataaaataacataaagaacagacccagatgggagtggggaagaaatagacatattaggggtctgagaaagcagtgagaggtatacattttgtaattcacatttcagtagaatgaaatcaacaccctggaatagtgattctcaaccaggggacatttggcaacatctggagacatttttggttgtaacaactgggggattgcttttagcatctagtgggtagaggccaaggatgctgctaaacatcctaactaagcacagggcagcccctgacaacaaagaatcatctccctgaaaatgtcaatggtgccaacattgataaatcctgctcgaaaaccat

SEQ ID NO: 115163 - DNA, 771 bp, Homo sapiens
agggacttgacaatgagaggaagcctaggacgccagcaccacctccacctcgccaccacggcaggtgctcctgatgggtctcagggcgagcgcaccctctgccagtgacaggtcaggtgtgggctgtgaccagtctcagccaatgagacatcagggagggcccgcaggtggcctcgggcccggccagcctggatgctgaggccgacctacgaggctgactcgaggtggggaagagcagaacaggcaaacggccagtgctcaccctgctccctgccaggcagcactgtggatgggcttgtggcccacgtgagactgagcagggatttctgtcacttgcggcagaaaacctcccactggctagcaagcacctggtccatcccaagggacagactgacaggctatggcttgtccccatcatggaacacagcagagcgccgaaaagaaagagggggtatcctcccgtcctgaaaaggaaccagcgacgagagatgtcatctgttctcaaccaggggtaattttgctccctaggtaggttgccaggttaaggaaataaaaatgcagggcagccagttcaagctgaatttcagaccgtgcatgttaactagatgtcctgtatttactgtggcaaccttacccccaggggacatttggcaatgtctggaggcagttttggttgtcactggggatggttaggtgctaccagcatctggtgggaaggcaccgggggtgcttttaaacatttcacaatgcataggacagctgaggccaaaa

SEQ ID NO: 115164 - DNA, 481 bp, Homo sapiens
tggtggtgcgtgcctgtagacccagctcctccggaggctgaggcatgagaattgcctgaaccccagagacggaggttgcagtgagccgagatcctgccactgcacttcagcctgggcaactgagcgagactctgtctcaaaaaataaaatgaataaatacataaaatagattgtgatgacagatgcagaactctgtgaacatactaagaaccattgaattggatgctgtcaaagggtgagttgtgtggtatgataattctatctcaataaagcagttacaaagagaggaagagatggaataagaactggaagcacagtggcaatgggacagaattttaaggaatggtttgagactgagtggcaggaagactggggggtaaagctaagagaaccctaaaggaaaggggaccagcttgccccgtaagtggtgtggggctaggttaatagattgcctaatgcccaggagatgtcagtgtgccca

SEQ ID NO: 115165 - DNA, 602 bp, Homo sapiens
tgatcgcccctctctgtataatgatcgggctgccccgatggtgtctgtgagggatgtctgttggaggacgctggcaactgagtgactcaactgggtggggaggatctgccctccatgtgggcaggcaccatccagtcagccgggggcctggaagaagggtgaatcctggctctctgtcccggagctgggatgctcttctcctgcgcttggatgtcagaactccaggttctctggcctttggactctgggactcgtacgagtggtctccggagtctttgacctgggactgggaatgaccacgttccccaccatcctgaagcagctgacttgaaagaagggcagtagagtcttttgaagttgcaattacaatgccagctaggtgacaatactttgtagggctgggtcaggggtcttcaaaaggctctatgtactctgtatcagcatccaatatatggtgctggtttctcccgtagccaggattcacgggtccaggaatcaaggggaggaaatgggagtggcactgcgcatcatatcccctagggacccgctagcgaaattgttgcttcctgttcctgtgactttatgctctgctgggctggagg

SEQ ID NO: 115166 - DNA, 492 bp, Homo sapiens
tgcgctcggcctgttttttctttttaaactttttagggttaaaactttcaagcatgcagaaaagtagagaaacaatataattagcacctatatatccatcacctaaacacttaacattttgctatatttgcttcttctattttttatgaagtattttaaaataaataacatgccaggtgcagtggctcatgcctgtaatcttagcactttgggaggccgaggcaggtggatcacctgaggttaggaatttgagaccagcctggccaacatgtctctaccaaaaatacaaaaattagctgggcgtggtggcgcaggcctgtaatctcatctacttgggagcctgaggttgcagtgagctgagatcgccccactgcactccagcctaggtgtcagagcgagactccatctcaaacaaacaaacaaagtaaattacagacatcataatactgtaccccctaaatactcactatgcatctctaaacaataaagtct

SEQ ID NO: 115167 - DNA, 464 bp, Homo sapiens
gaaagcaacataagacaaaagggaaggtttctatatctatctctgcctcaccttccccaaaatgccccctctctctgtgatgttccataactgatgcaaaagaaaccagtaacaatgtatttttctccaccaaaaggcttgtagcaggtgtcaggactcagaggttaggaagcacacagggcttctaggagggagagtatgaggagaggaaccccactttaggtttctaactaactctgtgagttcctgaacagcacccaggctgcagacacagtactaagggagtgtcatttcatagaaatggaagtcctgataggggcacacaaaagcggaacagagtctcatttaaaatagccacttccttcagcatttaaagtacagatgatttcgtcaactcgcatgaaatgcataaggacaagggaacgtacacttcaacagactcttgatcacgtttgcagggattt

SEQ ID NO: 115168 - DNA, 379 bp, Homo sapiens
catcggttgggttttaagtaactggtttattacagcttgttgtcatacagtaattgcactaaataagacctctaaaattattcgtgctgctttaatttgggaatgggggaaactgtttcctgctagagattctaattttagtatacatgctgtggaagtgagtaccctgctagagattcttaaaatgtcacaattaagcaaatgcctttaaaaattctgcataaaatgtcgcatgcttatgtattgccccgtctactcaactaccagatcatctacagaattatttccttttctttgccttcttaggaaatcagcctttcatgcgcgagatgaccctgcattgattaactgagttactgtgagtggtatgactagggct

SEQ ID NO: 115169 - DNA, 652 bp, Homo sapiens
ggactcctttttagtttgcagtgctgcacgatgcattgtaaaactagtctgtgtgcatacacatgcgttatttctgcttacctctcatatgtgggaagctgaacattttagggattaagaaatctgcctccattgttgtttagaagcctctgctccttgcctggcactactggctgttgggaatgtgaagataaataagagtgactacccttgactggttcacagtttgttccagagacagataatgaggcaacagttccagtacagtgtgaatcctgctgcgataggaacacaaatgcagctttgagctcctgcagcttgtacttcttcaggggcttattctcttgtcctgtaagtagtacacttttgaggtaaggtgaagacaacagcactgttgcttgctcggtttgtgttttgtttgtttcttttgcgattggcataacggaacaaagaaataaaagatgtagttctgaggttatgcagttgagtggcccggctgggagcagccctctccaaccaaatcaggcctttctttcctcaaacaagataatctcaaaacataacctggtggttttatatgtcttcactgtggagatgttttgtgctgttcctctttttgtttataacctatttttcctttcaatagacttgg

SEQ ID NO: 115170 - DNA, 125 bp, Homo sapiens
tctactgcaccattcagaaaaaaaaaaaaaaatacatagaaaacaagtacatgaaaaagacaaggtaattattaactataagaaagacaaaactgagcctgggcgacagcacgagattccatctc

SEQ ID NO: 115171 - DNA, 440 bp, Homo sapiens
gggactacaggtgcctgccaccacgcccggctaattttttgtatttttagtagagacggggtttcatcgtgttagccaggatggtctcgatctctcacctcatgatctgcccgcctcggcctcccaaagtgctgggattacaggcatgagccacagcgcccggcctggatttattcttaactattttaatcttcctacctagctcttccaggggaagatgggaagcctgaataaaacagtggatgattagattaagctatgatattcaaaaatcaaccaagttccttctctaacattaactttcagctctatgattctgcatgcaatttgtaattgacatgtccagaaggcttgtgtgctgagcaatcatatctggtcaagatcaaatcctattcttagtatcaggtgctcaacaataatttgttgtctattgtcatgca

SEQ ID NO: 115172 - DNA, 532 bp, Homo sapiens
aaggaaggcacctttcaggggaattgtttactgttttaatttctgggcttttggtgattagggagatggaaaaggagctatcaggagagacaaggttgatgactaggaggaagccaagaagagtgtagaaaacaaataccttctgctttagctttggcacatttatattgacttaatttaccacttctagatacaagactagattgatgggaattgggaattagaaaaggtggagacaggccgggggttgtggctcacacctgtaatcccagcactttgggaggtcaaggcgggcggatcacgaggtcaagagatagagaccatcctggccaacatggtgaaaccctgtctctactaaaaatacaaaaatcagctgggcgtggtggtgcgcgcctgtagttccagctacttggaaggctgaggtgggagaatagcttgaacccgggaggcagaggttgcagtgagccgagatcgtgccactgcactccagcctgggtgacagagcaagactccatctcaaaaaaaaaaaaaa

SEQ ID NO: 115173 - DNA, 465 bp, Homo sapiens
aaaatcctatccaggctttctgtacatgactgctttgtcatttttcttttttcctaacaaggctcaagttttgtcaagatttccttttctaaaatagaactactttacagcacaagtagttttgtatttttcttttacctatccatatcattattttgatgtaaacaatgtttaaaaggacacagaaaatgtcctaggcttagaaaaagtctcggttgtgtgtaatcaaagagtagctctaaaagactggaaattgtgacaggcatagtattggtcatcagcagaagcagatgaaagacggatattttactgcttgatgaagtcactggaatgtccaggcgccctctgctctggagtttgtggtgtccgttcttgcagtttacaagagtcaacctctagcagcccctgggctttgtttgttggtttgtttatctgttttagactgagagttttttgctttgtttt

SEQ ID NO: 115174 - DNA, 212 bp, Homo sapiens
tgctgagattacaggcatgagccaccgcacctggccccaaattccttttagttcctcaatctgtaacgatggccaggaaaccctagctcagagtggggaaggaggccctctggagatagagtacctctgggagtactctggcatagagatactggttcagaagccagctggtcagctttgtagtcccaagaatgtagatttttctttttggg

SEQ ID NO: 115175 - DNA, 437 bp, Homo sapiens
atggggacagagtttctgtctgggaagatgaaaaagctctggagatggatggtggtgatagctacaccacagtgagtgtacttaataccactgaagagtacacttaaaaaatggttaaaatagtaaattttatgctatgcctattttagcacaataaaataatacacattcatggaaacagggcatttaaatcattatgcataataaagtgagaagctagttgtgatttgcaaagaattatagaaattatagggagaaacacaatctcaagagccaccctggagtccagagctctcgttttacagattcaggagtggaggctcaaagaatatatgctttcttaatgactggaacccagacggcaggacccccacacagggctccttgctgaccctttgctgccttcccccctcccttagaggggccattctttatta

SEQ ID NO: 115176 - DNA, 331 bp, Homo sapiens
taaggaggggccatgcttcagattctcccatccttcaaggctccattctccatagtctggttctgccggggtgtcctctgtagccctgatcctcaaacgtcatcgagcctcctgagcaatgccaacccgatgtctcactgattctctttcactcttctctcatgcaggaaaatccgtcttgaaggcagctcctctctgtgccgggggtgggtgatccagcctaagctagaatggcggcaagctcaaggcagctgtggccctcaggagagcgtctggagtccacagcacagtgggaagcgcaacggcagctagtctgagggtctggacgatg

SEQ ID NO: 115177 - DNA, 266 bp, Homo sapiens
attaaccattgcttaagttgttacaggtgagacagccaaaattgcctgagcgtgcacagtggaaaaaagctttaacgttttaattgttaccaccacgagcctggcaggccgactgcattggcatcacctaggactagataggaatgccataaaagcttgacccacttccagatcagggagacatttgagcattgcttcctgtctctgtgccaattgactttttttgggggcggggggtggagtttcactctgtcgccaggctggag

SEQ ID NO: 115178 - DNA, 710 bp, Homo sapiens
catcgtttttaatataatagaagaaatgaaatacaaagtcgaaaaatgagactggaaaagcccaggcactggcattttgtgttgtgctaagtgttccctcgtcaccttgcagtccgctggcagaagtgtggagcggacacaggagaaggctgggatggtgcttggaggctggggaacaggctgcactggcatttccagtgaagtgacttgggacacacttcctctttctgcctgaaaaggactgagggtgaggggccaccttgtcccgccctgggttgatccctcccagatgcccacatctccagggctgtgtcttcagcccagctctcgctcctgcctctgggcatgctggctcctggacaccccacatggattccctggatatctccaactcctctgctctataatgcccctgagcgtcttactcctcccccttggccgtgcctgtcttcgcagccccacaaaatatttttttctaccagtgtctcttacctgaatcagtacttcaagctgcccactcattttggccagaaacctgaattgcccttgagtctttctactacctcacctctgcaccacatcaatcataaatctcatgtactctctttcctaggtgtcttggtgtttcggaggtttctctgcaatgctgcttgcctagcctcagccactactatggctccttattgcacccatgttcactctgctgcccc

SEQ ID NO: 115179 - DNA, 327 bp, Homo sapiens
ttaaactctgttggacaagaggagctttccacagcttgggctgagaagccttgccctagaagtgctgttctgactagattgtatgaagggagtgggtgcaggagacaaaatggctaaaatgaaaatgggagccactggtgcccatctgcagctacagctcaagatgcctacagatgtggtcagtgtgacatgtgcaggagggaggggcagggggacgcgatgggcagggagggtgctcctggggacagtagcctgcccgctggcctttacttcttggccttaccctgggcagccacagcttccatggctttacgcatggtctcttca

SEQ ID NO: 115180 - DNA, 86 bp, Homo sapiens
tgaccatcatgagcctccttaacaagtccaagagtgagatgaccccagaggagctgcagaagcgagaggaggaggaatttaacacg

SEQ ID NO: 115181 - DNA, 604 bp, Homo sapiens
ctcgaacatcagactccaagttcttcagcttttggactctcgcacttagaccagtggtttgccaggggctctcgggccttcggccacagactgaaggatacactgtcagcttccctacttttggggttttgggactgggactggtttccttcctcctcagcttgcagacagcctatcatgggatttcaccttgtgatcgtgtgagtcaattctccttaataaactccccttcacatatacatctatcttattctgtccctctagagaaccctgactaatacatctagcattaaaaaaaaatgcaagtgataaactgggaaataatattcataatatatatgacagattaaatgtttgttattttttgttatattatttatgttactaccaaaatggcaaaaaaatgaataaaaataatacaaaattataaacagaagaagagacaatggacaaaggaaataaaatttttgaaagatggagaacaggtaaaaagatcaacagaactgaaaactcaagcatcaagtaactgtgaaggaaatgccagtgagaagcaagccaacccttgcaaggcagcactagaaagtctaggcatgggaagtactag

SEQ ID NO: 115182 - DNA, 542 bp, Homo sapiens
cacaatgctgactcaaactgaagaagatagattataaaaccagaatgcccgttttaatttacaaagagaaatataattgtcaaggggcgctaatattattgccctttgatcaacaccttctctacttgtaaaggacaattccatgaaaatccttatcttgtcagaaggttgcaagatgagtataaatacaggacttgacatgtcaatttattcagagatataatggccacatgtgtctacacagtgggatatgccggcacagtctctctcctggccgccctctgccccaaggtcacccttgctcctcttctcccattctcccttggatgcatcctccttctcctccttgcaggcttcctccagcaccatgaagtgctaagagtactatgtcctgaggtaagggcacctgcaacggagattgtgaagagaagactgtgggtttctgtggttacaagcacaactctgggtcaaaaacccattccaagtcctcagaggggcaagtcccttccattcagtattaatatagctcatcagtgcctctg

SEQ ID NO: 115183 - DNA, 309 bp, Homo sapiens
aaaatggcggatgtgaaagtggcagatatgaaagtagcggatgtgaaaatggtggatgtgaaaatggtggatgtgaaaggcgcatgtctcaggcaagaaggaaagcagagacctggtgcagtaagatggatgtatatccttccatgggaatactgccagcttccttccaggccttgcccctaaaagttaatctgggaagtgcaagactgtataagacccatgtctgttactcctacaagttcagaaaatacacgtgtacaagttactggcttcaggtgttacttgccaggtgattccacagaatcctag

SEQ ID NO: 115184 - DNA, 702 bp, Homo sapiens
catcccacatgttgttttctaatgtgacattgtcattctccatcaagaaatggagcctattttgccctcacttgaatctgggcttctgccttccatccttggggtgcctcctcttggaagttcacagccatattagaagaacaaatgccctgagaccaccatgctgtaagggggcccaaactagccaggtgaagaagaggccatgtaccaaagctctggacatgtgactaaagccttctggaaccgtctgtgccaacatcacccatcagctgaagggagtcaaggaagagatccagtcaatactagatggaacagaagaactgccaagctgagccctgaattcctgactcatagaattgtgatgaaataaaggttgttgtttgaggaccaaaaaaaaacacacaaaaaaaaaaaaaacactttgtggtgggcgcctctgggccctcagaaaaagtttgcccgacaaaacccactcggctttggatgcgccggcgaccaccaataggtaatgccggcacaaggtcgtccacagcactggttccaagaagcaaaatccgctggaccagacaagaggccggggattccaccaccgataaaaaacgcggggtggaaaaacgaggggtttctgacacaaatccggagaggggttacgggggcaacgcacgggcataacaagaggagtccgcagagaagtcaatatca

SEQ ID NO: 115185 - DNA, 794 bp, Homo sapiens
atattaggctatgttcagggatcagggaggctaattatgcttatattgccttgtagcattttggtaagaattaatgattgtgtagatgtccagatttaggtcagcaatattctaaaagttctcattgaactaatcatgtttataagtagcctgtactttctatcataataacaatagtggaaaagctagttgacataaaaggagcccagattttacttaagtaaaaacacaaaagcaaagatattttcccacataaattacaaaagcaaagatattttcccacataaatgtccccataaaacaagttgaaccaaagaggaaagatgacaggtaaccgtatgacacgctaagaaagtatcataatacttaagttaacttcaaccttttatttccttatcctaagcagcctcttttctctttatcatttagtcctgtgcttctcaactttgataagtaaaaaagttattgcactaaataaatcttattgaaatgcaggatctgattgagtgggtggggtagtgttctcattgttcagttcccacctatgagtgagaacatgcggtgtttggttttctgtccttgcgatagtttgctcagaatgatgtccttgctcactgatggacatttggttggctccaagtatttgctattgtaaatagtgccgcaataaacatacgtgtgcatgtgtctttatagtagcatgatttataatcctctgggtatatacccagtaatgggatggctggctcaaatggtatttctagttctagatcctagaggaatcgccacactgt

SEQ ID NO: 115186 - DNA, 785 bp, Homo sapiens
gagaaagtgctaagcaattggggattacacggagaactaggcccacagttagagggtcaggtctttgggctacctgacctaactttttcgccgtaaaaatgttaagcaaaaatcgaagtccgtcaaagtccgttccattaaaagcatgttaccagagcttgagccacagagaatctgaaaatccaaccttgctcctctttgagctgtaagggagagcctctagtgtaacagtgtcgagtttaatagttaaccagtgaagagaaaaatcttaatctagttcatttagagttagttaacgttacttggctagggtttttatcttgcttggattatgattaaattttaattgtcccactgagtccgtggataggcatatttgtagatttgctgaacacctggtgctagtcttttacgtttcaggtccctcggttcctgaatggtaatgactgaggtgctgttgggtccgttgagtaaccttgtggaagaggtgtgttgtagaatcgccccagggagttagtgacctttctcctttcttttgaagtgattggatggttagaactgatccataacagtgtgtgtccgagtagggaggataagtcttactataaagtgggtggcctcagttcttttgttagtaatatttttaggccactatggagagtcatggtataatcggaacccattgtacaacaatcacatgcaacttgcagattgtttgtcctgtgtcccggagcaaaaatcccattacataacctttgacttatgtatatcccaaagagcagata

SEQ ID NO: 115187 - DNA, 625 bp, Homo sapiens
taccagatacattcaccctaaagtcagggacaaggcaaatatgtgtatctctctgctgtttcttttgagggtattaaccactttaagacagaggggtaggaagaaagttagaggcataagaattgaaaagtatatgtgggagaaacaagtcaattaagaaaaattgaatttacaaaaaattcagtgaggtaggatgtaaaatttacaaagttagtagcttttcatataagcttttgataagtagcttttcatgtgggcaatcagaagatacaatagaaaggaacacccatttattatagcaacagaaagacaacataggagtaaatgtaacaagaaatgttacagtggtgaccttgtattgcagtgttgtgtagtgtaaggtaagattacagttttctgttgttccaaatttatgggagaaaaattttaaaatacttgaagatacaaaaatgtacttgaacaagcagagagatatttcatgtccttggatgggataactccacatcataaagtttttggttctcttcaggttacttttatgctaaactaattataaaaatattaagtttttttccagaaactagacaaattgactaaagtatattagggttgagagtgagcatgt

SEQ ID NO: 115188 - DNA, 842 bp, Homo sapiens
gaaacagaggaggacggaaggaataaacgaaagaaataaagagaaagaaagaaagaagagaaaggaacggaaggaacggagtttaatctactgagccaataagagcaattgcattttgcatactttatgcctgagttgagagagaagagtccaggaattcagtgggcttcaccttccttctttctctttctaaaaaagaaaaaggaaggaaggaaggaaggaaaggaaaggaaaagcatttatggaatagcctattaagattttggagacataagttgtgtttccagtgaaaatttagacatagacccttaagttatcaatttccttagctgcaaattgagggtattgtctaagggtgagttttgggaagcagccattcctgacttggggaaaagaggatgttggttctatgggctaaatggtcagcacccctctcctctccccactcccagtggaaactgtgcacatttcacctgaaggcacatatttctcaggttgacatttctgctacagtgtattagtcagggctctgcagagaaaaagaaccaataagatgacatctatataagatgacatggtttggctgtgtccccacccaaatctcattttgaagtgtagctcccataattcctgtgtgttgcaggagggacccggtaggagttaattgaatcatgggtttttccggtgctgctctcatgatagtgaataagtctcacaagagctgatggttttatgaagggcagttcccctgcacatgctctcttgcctgccgccatgttaagatgtgactttgcttctcctttgccttcaaccatgattgtgaggcctccctagctatgtgg

SEQ ID NO: 115189 - DNA, 762 bp, Homo sapiens
gacagaggagaagaaaaagctcaaacgacatcttgctctctttaggtctgaactggctgagaattctcctttagacagtgggcattaattataacaatatcttcataattaatgcccttcagattgtaacccaaagagaaaattattttgagcaaaggtcaaatactctttttattcttaagatgatgacaagaagaaaacaaatcatgtttccattaaaaaatgacacgaggctagtccaagtgcagtgatgtttacaaccaattgatcacaatcatttaacagatttctgtgttccttctcattcccactgcttcacttgactagccttaaaaaagcaacatggaaggccaggcacggtggctcatgcctgtaatcccagcactttgggaggcctagacgggcggatcacgaggtcaggagatcaaaaccatcctggctaacacggtgaaaccccatctctgctaaaaatacaaaaattagccgggcgtggtggcgggcacctgtagtcccagctacttgggagcctcaggcgggagaatggtgtgaacccgggaggcggagcttgcagtgatccgagatcatgccactgcactccagcctgggcgaaagagcgagactccccgtctcaaaaaaaatttttttgaaaaattcgtaaaccatacttttaagattatttcagtggatttttaaaaatcttgtacagaaatcagggttcttagctagcagtttttctcccacgcagtcactgtaatgtgacta

SEQ ID NO: 115190 - DNA, 470 bp, Homo sapiens
tatgttctctaggccttttagaaaacatggagttgttcctttggccatgtatatgcgaatctgtaagaaaggtgaaattgtagacatcaagggaacgggtactgttcaaaaaggaatgccccacaagtgttaccatggcaaaactggaaaagtctacaacgtgacccagcatgctgttggcatcgctgtaaacaagttaagggcaagattcttgccaagagaattaatgtgcgtattgagcacattaaacactctaagagccaagacagcttcctgaaacgcgtgaaggaaaatgatcagaaaaagaaagaagccaaagagaaaggtacgtgggttcaactgaagcaccagcctgctccacccagagaagcacactttgtgagaaccaatgggaaggagcctgagcagctggaacctattccctatgaattcatggcataataggtgttaaaaaaaaaaaaaaaagacct

SEQ ID NO: 115191 - DNA, 458 bp, Homo sapiens
tgagcccaggagttcaaggatgcatgcagtgagctacaacacactactacactccatctggagcaaggaagcaagaccctatgagaaaggaaagaaagaccgtatcagaaagcaaagacatagagaacaaagaagagaaagaaagaaaatatactagtgggactcatttaattggtcccatgaattgctctaaaatagttttacataagaaagacaatttgctttacataattctactggataacaaaataattggtggaccaatacaagaaaacaggtggtatgtgtgttgcctaagtccaatagcattttttttttttgagatggagtcttgctctatcgtccaggctggagtgcagtggcacaatctcagctcaccacaagctacgcctcccaggttcaagccattctccggcctcagcctcccgagtagctgggattacaggcgtgcaccacca

SEQ ID NO: 115192 - DNA, 396 bp, Homo sapiens
gtgccttgtgattccaagggaccatctggaaggagttccaccagccctgtgtgcctttcccacagttctagagttttaccaggctcagaatttcagtttttattattaaaatccctctggctcctatttgcctttttgaaggtgcctgttccagactacaagtcagctaaagccaaaagccacaggggcagagcaagacccgaataagcgcacgtcatccagggtgagcgaggcctactgccccatttaagctgccacctcagtgaccagcaattcccctgggaggaactggggacttggctaatggcaacccctggtccctggacacagggctttcttcccaggaacaaaaggcaggtgagatacaaccagcacccgctcacaggcacgaggagt

SEQ ID NO: 115193 - DNA, 606 bp, Homo sapiens
ggaagagtgtgtgtgtctgtgtgtgtgttcggggatggggggtgtctgagcttttgggtcctggaagacgtagaggaggcaaggccctccctccccatcaggctttcctcccaggagcagcagatcagcctcccagactccctggtagcatggccagccctgccctgggcaaccaggagttctgcctggtagaccctgcaccccgttaggaagccagtggggtggtatgttcatttgccccccaccatcactagtaggacacctgcaccactttctaccacattctctgggaccatcagagtacagatataccctcccattcagacaaatccaatctatgggaacttggggctgctaaacaagacatatttgggggataattattcaacttccctcaaagataatagaaaaagtggtgggtgtgttggctcacatctgtaatcccagcactttcaaaggccgtggcaggtggatcacctgaagtcaggagttcgagaccaacctgaccaacatggtgaaaccccgtctctactaaaaatacaaaaattagttgggtgtgatggtgagcactggtaatgccagctactcgggaggctgaggcaggaa

SEQ ID NO: 115194 - DNA, 426 bp, Homo sapiens
tcccccagcagtgctccaaaagcccaagggctactcctggttcttctccatccccccttagaacctgggattgtgtctctgcctcaaggtcagactccccaaaatgctagacagactgcactgtctctcagcagagacattgaatctgctatgtctccagggaactcaaccacaaaccacaacctctggaacagagcaggacacacagaggacagtgcagccatctcctcacccagggcaggtgttggtggatattcccaggtcattgccctttgtcaaggccctggatgctcaatacaaaggcctgcatctgggcagtcctagcctgctgtggaaaggtcattgcaccccacactgaggttgagaccccctgtgtgtccccagaaagagcttgtcattctgagatcccacagatctgtgcttctc

SEQ ID NO: 115195 - DNA, 419 bp, Homo sapiens
tcagaacaaggcctggcacctggagtcttatgtctagctactgttatgaagaacttaagggaggcggaaggatctcttgaagccaggagttggaaaccaacttggtctctacgaaaataaagatggacatagattagatgaatagaaataaaaaattagccgagcgtagtggcgcacgcctgtggtcccagctacttggaaagctgaggcaggagaatcacttgagcccaggagcttcaggctacacagtgagctaccactacactgaggcctggtgacaaagcaagacccagtctcaatcaaacaatcaataaaagggaatttaaaaaacgtttgcgtttgtgggtaaaaaaccaaattagacatgatttctaggtatgaagcaacgtggtgggagactgaaagtctaggtaaactgg

SEQ ID NO: 115196 - DNA, 368 bp, Homo sapiens
ctataaaacacctcccaggcggttgatgctttagaatgtactgtctatcccttttgtcttcagtattatctaaaagaaatgcttgttttgtacttggccctacttacacagttcaaggttaaagttgatttggaaaaattaagttctgcaaagaaaagctgtcagagtgaccataaatttatgaggcctattcaaatagcctctacccagtgtcttttgagtaacctttaaggctacaaaggactaaagggccttaaaaatcatgtctcttctttgccccagttcattttcattattttgctttgtttgatagttaacagagggttaccttgctggagtgaaattttgcctaaaaggaagcacagaag

SEQ ID NO: 115197 - DNA, 461 bp, Homo sapiens
catcactccgtactctgcttccgtcctcacttgaccttctcacctaccttcctttacgtcatcttccttctgagatgctctgtgtccaaattttattctttgtaaaaggatgccagtcattggatcagagaccaccttaatccaggatgacttcatcttaactaaattacatctgcaaagattctatttctaaataaacccacattctgaggttctgggtgggcatgctatttggcaggacaaagtcaacacaggacactcattttcaggattgatcgcatggtttgaggaagctgatggtgacatctcttcttaaatctgttttcaggaaaatcatactggtagccttcaagtggccatggtgggagcattgacccagggaaatccacatttcccaacacatgctggatacctgaggactccagagctactatctgctcatatctgctcaacattaaaaa

SEQ ID NO: 115198 - DNA, 409 bp, Homo sapiens
aagcgaaacactatcattcttcctggcagtgagccctatattttcctccaatctgccaggggcgttccttttgggaaataaaacccattttattattttttattattttgtataattattctgtataatttttctgtattattctgtattgctttataattattctgtgtaatttttaatgttttaagataactctgaattttttgttttatttttaaaatgtgcaaaagcctatcatgcaaatagatattggaaatcagaatattcaaaaccagaggtggtttcatagacgggatgggggtggtatgggtggtatggccatagacaagaagtggtttcatagaaaccttctggtctcaaatgaagaagcgacgtaacaatgatacaggctacagtgagtcaaatttgt

SEQ ID NO: 115199 - DNA, 557 bp, Homo sapiens
  misc_feature (500)..(500): n is a, c, g, or t
  misc_feature (550)..(550): n is a, c, g, or t
aaggtcttaccattcgtccaggccccaaattcaaacaccctcaatcgtttctgcttcctctttctgccttccagtcgggaggttctgtttagtgctttcttttcttttgcatccaaattcacatctccttgattcaaatccttcccataccttacctcaactgggtgatggcatcctactcccggtctctcctactcttgccggggcctacaccattctactcaaaaggtcagatcaatctttacaaaagtaaaactctaaccaatccaccggtccacttaaaatttttcaggctgggcgcagtggttcacacctgtaatctcagcactttgggaggtcaaaggcaggaggatcacctgaggttgggagttcgagaccagcctgcccaacatggagacactccatctctactaaaaatacaaaattatccgggcatgatggcgcacgcctgtaatcccagctactcaggaggctgaggcaggagaatcacttgaacctgngaggtggaggttgcaatgaggcgaggttgtgccattgcactccagcctgngcaacaa

SEQ ID NO: 115200 - DNA, 284 bp, Homo sapiens
gtcatttctgcttagtcttctccaatctgtgacagttcctcagcctttccttgtcttttgtgacattgatacttttcaagagtactagtctactgttttgtagaatgtttctcactttgggttttctatgattatattgaggtaatacatgttgacaggaataggaaatagcacagaagtgatcttgtgcccttcatagtgcatcctaccaggaggtatgtggtattgatttgtcttgttacctgtgataccagccttattacttggttcaggtgaagtctacc

SEQ ID NO: 115201 - DNA, 104 bp, Homo sapiens
tgaaacctctctggggttagtttctgctgaccccaggatcagtttctgctccttgccagccctggagaagccaacagtcaatgctcaatctccttgtctttttt

SEQ ID NO: 115202 - DNA, 736 bp, Homo sapiens
acaagagcaaaacttcgtctcaaaataataataataataataataataataataataataataatctacaatgtcatttcccatccaagcttgacttctacctttactttctgatatggttttgccatgtccccacccaaatctcatcatgaattataatccccataatcctgatgtgtcgagggaggggcctagggggaggtgattggatcatgggggcagttatcctcatgctgttcttgtgatattcagtaagtcctcatgagatcttatagggttttgttttgttttttgggatggagtcttgctctgttgtccaggcaggagtgccatggcatgatcttggctcactgcagtctctgcctcttgagttccattgattctcctgcctcagcctcctgagtagctgggattacaggcatgcaccaccacacccagctaatttttgtatttttagtagagacaggatttcactacattagctaggctggtctcaaactcctgacctcagttgatccacctgccttggcctcccaaagtactagggttacaagtgtgagccaccgtgcccagctgagatctgatggttttatacatgtttgacagttgctccttcacatgttcccactctctgtgcggccaccatgtaagtcggacctgcccttctgccatgattgtaagtttcctgaaggacttccccctctgccatgattgttaagtttcctgaggcctcccc

SEQ ID NO: 115203 - DNA, 454 bp, Homo sapiens
gtcacccgacggggtgggtgaaggtagtaatgatggtacttttcaggaagaaggcataccttgagcaaaggtacagaggtgagaaacagcctggtttttgcagaacaaacaaaacacaacagtctgctgtggctagaagataaagcttggggcagagagtgtgggatgtgctagtgtgttatgtaacggatctcaacctaaagggcaggaaatcaaacgcccaaatacccaagagagtcagggaggtaatgaaaaggagcaagtgaggtgaagtacatgatccactgaaaacttcaactctaggcatctggggatgtgtatcagtggggctagattctctcatttttctttttcttttttctttctgagacagagtctcactctgtcacccaggctagagtgcagtggggtgatctcggctgactgcaacctctgcctcccgggttcaagcaat

SEQ ID NO: 115204 - DNA, 110 bp, Homo sapiens
atgtgatctcattggttccaggtccaacctgcttcaaagtctaggctgggtccctcgcaccaagctgcataccagggcaaaggctggtcttggctgcagcacaaggaccc

SEQ ID NO: 115205 - DNA, 136 bp, Homo sapiens
aaaatgaacatttttacacattatatttcatgagttaaaaggctgtacttattgggggacacttgggataaggaggacatatcaggaagctctatgttgtgatgtctgaaactggccttaagagctgatttttgag

SEQ ID NO: 115206 - DNA, 336 bp, Homo sapiens
aaaagtcctggaatgtctttcaaactctgggtgggaattactgtttacaagttgtcagccagtgtcactaggtgataattcccctctgtgtgagtgtcatggttacagtatgcttttttgcctctaaaagaacaattatattcaagaaatttcctagtgcatttaaaaacagctgggtgaaagtcattttaaatccccaaatccaacacattcgttcttttgtgcatttaattaagcagaagttaaaataaattagaacaggagacattcagtgctgattgttgaatcaacaaagcaagaaacagcctagcattaccctaccacagatgtctgtca

SEQ ID NO: 115207 - DNA, 315 bp, Homo sapiens
cgtgtaccaccacatccagctaatttttgtaattttttttgtagagacgggctttcaccatgttggccaggctggtcttgaacttctagcctcaagtgatctgcccacctcgccctcccaaagtgctgggattacaggcatgagccactgtgctcacggcctgaaccttttatttagagtggtaaatataaagtgttactgtgaactgtaaagcataaattctcttgaaacagaggtttaaatctctttctatatgttgcattctttctgtgcctattaattttacttttgctatttttcttttttaaaatcaga

SEQ ID NO: 115208 - DNA, 314 bp, Homo sapiens
ggacagaggcagccccatgacttgagtctagtcattcgaggggccaggccctggggatgggaatccgttcctcctctctctccccttcctccttgggtgaatcaaccaccacccaggcatgagtcagccaggagtggctcaggcatgcctaggccacctgctggtccccctccctggatgtcccaaccagggtgtcccagccaggtttaagatctaaggaagccaggcgtggtggctcacacctgtaatcccagctacttaggaggctgaggcaggaggatcatttgagcccaggaaacatagtgagacccctt

SEQ ID NO: 115209 - DNA, 243 bp, Homo sapiens
caaatatccatctgattcataaacttgccttgtaattctcctgccattggtccttcagcttctgtttgtgcacaccagcagctggaaactcaccagttgaatgatatgcagcctggggacaactgagactttccttgcactcaacttctacatcctggatttagataatgtttgtgtatctgagtctaaagatacattatcttctcatcccaagtgaacagattgggaaaaatggtcaaagag

SEQ ID NO: 115210 - DNA, 371 bp, Homo sapiens
aaatcagggagtcttgggtgcttaaagccttctagttatcttgaaaaatatagaatcttcttatattgccttcatttggcaaataaaaggattatgtatgcagtagacttaatgttttgtgtgaaatgcagtatcacttactttgaaaagcaaaaactgggccgggcgcagtgactcatgcctgtaatcccagcactttgggaggccgaggcaggcagatcacctgaggttgggagttcgaagactagcctgaccaacatggagaaaccccatctctattaaaaatacaaaaaattagctgggcgtggtggcgcatgcctgtaatcccagctcctcaggaaggctgaggagaatctcttgaacccaggagg

SEQ ID NO: 115211 - DNA, 713 bp, Homo sapiens
ggaaacgaaaactgcccatactcttaccactggcaagcacttagaatatacccttctgctcctttttctttgcatagataatataagtgaatgtttttcgtttattaacaagtttgcaaactaacaatctttaaatctagcctgcataacaaataaaagtgtgtttgtttaggagttttgaggcaatttgatattatctacaggtgcattttgtgtgttttttccctccaagtctaagaagccatattactggtatctacaactctgaaacacttgtaaagtatttgacagtagcattttgttctttaaatcctattaaaggattttggcatttcagaagctttcaaacaggaaacgtgtctcccagggaggattattcagcactatttgaaaaatgaaaagtgaaagtgaaagtgagataggaagatttaggccttttctgaagctgcagactgaatgtggagttttcttccttaggcaataactgtaacctgaatatttatttatctgtctaatctgaatgactctggttcagctagataagattagagtattaggatttttgtgaggtattttaaatagcttactgtcaaaatattcactagaatttttgctttggcaatcattttaattttctctttttctttggaagtggaatttgtttactttttaaagtgattaatattctcagttgattttctattctttcttga

SEQ ID NO: 115212 - DNA, 272 bp, Homo sapiens
cctttttctgtcacccttccgtcccagacctaaactttccaagtaagaattcaacttctgtgcaacaccagagtcctcatggttactgcatcctgtaacacctctaagaatcatacataaaggggggactgcttgctccctttctccacccctcctctctgtctctctctctctctctctcacacacacacacacacacacacacacacacacacacacacacacacaacatgaggacactgggtctttgcaaacaggttctactgtccagt

SEQ ID NO: 115213 - DNA, 234 bp, Homo sapiens
ggtcttgctctgttgcccaggctagagtacagcggtgccattagggctcactgcaactgctgcctcctgggctgaagcgatctccccagcagcgcacaccacgacgcttggctaattttttttttttttttttttgagatggagtttcactcttcctgcccaggctggagtgcaatggggcgatcttggcttactgcaacctccacctcccaggttcaagcgattctcctgcct

SEQ ID NO: 115214 - DNA, 301 bp, Homo sapiens
ggaaccctcgaaaaaaacttccgggtgtcctacctgccccacaatagccagatcattagctcctctggtagtgcccctcaagaaattcccaacttcactgttgcccctgcaggaaatgcccaatggtgctactagggctcaagtttcctgctcattgcaggaccttaaacaaataaagggggacctgggcaggttctctaataaccctaataaatatatagaggctttccaaaatttaatccaagtgtttaatctaacttaaaagatgctatgctacttctaagccaaaccctattgcaaa

SEQ ID NO: 115215 - DNA, 600 bp, Homo sapiens
tcaggcacactatgtgtgctatatatgtgttcacatccaagggtcttttggattccagtagttattacaactgctggggaaaaaaaagacccgcccctgccttcttctaaaagaaatgtattaatagaaattttatccaagttcaccaactatacaaaaggatgatgaatgcacatttttttggggtcctaacagttttctgctggctgctttagcttcatgagaatgacagggataggaaaggacagagatagcttcatctggaagcaaaggagctgagaactagaaattgtctcaagttctcaggaaagcaaaactatgtttggaaattattgataaataatgtgtccatgtcatataataaaaaatgaacattttctattttaaaacatggataaaatatagtagttgtcccacaagacaacttcaaaaaataatcaggaataacagcatgcccactgaataagatgaagagcctggtatggtggtatgcacctgtatttccaactattcaggaggccgaggtggaggattgcatgagcctaagagtttgaggctgcagtgagctatgaaaatatccactgcactccaacctgggca

SEQ ID NO: 115216 - DNA, 256 bp, Homo sapiens
ggccaggctggcctagatctcctgacctcaagtaatccaccccccttggcctcccaaagtgctgggattacaggcatgagccaccgcgcctggcctctaattctttagttataaaattgctctcactagggaagagggcagaagaggatatgccgtcttgtgctttcaaaacatcaattatttcaggaagtacagaatataatgagagtaaacattttggcgagataggacagctgtctgcatgtttaaagaaagg

SEQ ID NO: 115217 - DNA, 297 bp, Homo sapiens
ttgaccatttccacaaggattttgattttcttttacttattagtcatataaggcagcagctaaagtaaggtgctgttttaatatgttggggatgaaaatttttgcaatggaaaattactgactgagcattaaaataaatgtaagcattccacatgacattttaaaacactgaaacatgggtatatttgatttatgagtttctaaaggagagtaactatggtacagtggttatagtaaaggcattaccaaaagtcaagtgccattgaagcttctagaatacagtttggttggttgagt

SEQ ID NO: 115218 - DNA, 503 bp, Homo sapiens
aaagccaagacttgttaaaaaggtttgaagaggaaggaccataacaattgaaagggggaaattataagatacagtaaattcctcttcaaagatttagcctgttgacttccttattctttgttctcaaactcgacttccttgttgtccatgcctccttgtccctagttactgtgaacaaccttcccaccagttctaatcaataactcacatctgctcccttggttacccactctgcacccattcttcccactgaaactgcacttcccaccactgtaactcacatcccccttcccttccttatttggaaaagtattcacaaatagccaatcgggtcaacttagaatgagcggtccaaccccagcccctgggggagtgacacagaggtagggactgtgttagggataaaaaccttttccttcctttgttcagtgtgctcctgtgatcatgattgatgcaggcagcacccttctgcagaagtaaattgccttgctgagaaaaaaaat

SEQ ID NO: 115219 - DNA, 849 bp, Homo sapiens
cttaactcaggcctcacaggtctttttgaaagccagaagctaaagtggcttaagagaaagctagaagtattggggtagtggtgttcccacttcagggtgaagttgtcaggatgtacctgttttatgattctagttcctttgattggcagtccttgaactaaattaaaaacagagaaaagttcatatgatttaaactcatgatgcttctttgtgaaaagggaaaatgagacatgttgttagccccagcatctcttttgagatgggggttttactatgttgcccaggctggcctcaaactcctggattcaaactatcctcccccgtaggtggaattacaggtgcatgctaccgtgcttggctatgggcttgtttttaattgttggacggtctgggtgcccctttcactttattctttttttccgctctcacttttttttcctctcacttattaagtctttgtcctctttaagtcctcttctaaaagactggaattgcaggttacatttatacctaaatcttcctatctaggtaaagagaaaatatactaaattccatagaaagcaggtaatttgtccacaggacacagagctgatcactgtggaagatccctccaatcacatcttcgattctctctccctctttctttaccttgcctttgctctcttcatgtgacgtgcctgctcccccttcaacttccaccatgattgtaagattcctgaggactccctagaagctgagcagatgccagcaccatgattcctgtaagactgaagaaccgtgggtcaattctacctctttcctttataaattacccggcctcaggtatttctttatagcaacgcaagaaca

SEQ ID NO: 115220 - DNA, 739 bp, Homo sapiens
cactacttcctagttttgtaaccttggaaaaattattcaactcctttgtgctttagttgcctcggtgaaaaatggggataatcatagtgctgccttatagggttgttgtaataattaaatgattatcctgcacatagtaaacagtcaatgaatttatgctattattattagtctgctatttgtgggctttcatattttgtctcaaatccaaccttctctttactcactatttctaaacacattgtgcatttttcaatatatatgcatttcaatatctatcttttgcttcctctgcctgtaatacccttttctacgccctatctctcctgtgtctttagaaattctatcagttcttcaaatgaacctcaaatagacttcctccacgatccttcacctatcataccaggattgtttatgtttctgaaatttcacagcctatcttatacttttcctgtttacttgattcatgttggcttagtttaattacacacgaagaaatcttgtgttgcctgatggactgtaaactccttgaaaacagggtttgtgtttattttttttgtattctaaagtaacaaggaaagttctccaaacataaatgtaataggtatttgttgaatgaatatagaaggaagggtgtaggttttggataagaaatcatcattatcaaactagtcaaaaatgacaagagtattgttttggatgcataagtatagaattagtacctctcactcatccccca

SEQ ID NO: 115221 - DNA, 311 bp, Homo sapiens
ctccgtttttcctgtacctggaggtatcaccaccgaagtctgcgaaatagcaaagatggcagcctgccccttcctctggaagctccatcccggggggtacggacctgttgccaggccaaatgcagttgtaagaggtacctgaagactttgtttgggaggtctcacccagtcagaagaaaagtgatctagtacctgcttaaagaagcagtctggctgctttttgatagagcagcatgcgtgttggggatctcttcagcctctgatcagattgagcaccccaaagcccacaagctggactggctaagatgctt

SEQ ID NO: 115222 - DNA, 375 bp, Homo sapiens
cacaatgcctggctcttaatatgttttcaattgctattcactgagtagtagttgtggaaaaaaattctatccctgtttgaaaccaaaagagagaaagaaaaaataaactaaagcaaaaccgtaagctagaatgacagggactgtgactatcttgttaactgtgatatccctgatgtctcctacaatgcacagtacataatgagtattgaaaaaatatttgttgaatgaaagaattaatgaaaatatctcagtttgaggactcagcctcagctcagtctttacgaacctgactggtatattcacacagtgacatattaggctgcagtcaaaacaaatgaactgtagtgacacaaaataatatggatggggccaggt

SEQ ID NO: 115223 - DNA, 232 bp, Homo sapiens
ggaaatgagcgcttctgtgagaggcaaagagaactcaatgcacactcatgagtgcattcacaggatttgagaatatgtgatttatcaagaccaccttgtagttagtggtgtaaattcagataaacaccataaattggaggtaatgagtggtgcctttctccaggcctggatgggtgatgggacatctacaggagattactcctgtgtggggattgcaagtgtcatttgcaaa

SEQ ID NO: 115224 - DNA, 584 bp, Homo sapiens
aacactaaaagggaaaagttatacctattaatttgctttattaaaacaaattggccaggtgtggtggctcatgcctataaccccagcattttcagaggccaaggcggaaacatcacctgagcctaggaatttgagaccagcctgggaaacatggcaaaccccatctctacaaaaaataacaaaaaatgctgggcatggtggcacacacctgtagtcccagctactgtggaggctgaggagggaggatatttgagcccgagaggttgaggttgcagtgagcagtgatcatgccactgcactctagcctggatgacagagtgagactgtctcaaaataaacaaataaacggaataaactaaactaaaataaaacaagtttcttaatttcaaattctttagtggctttttggtcatagagattataaatcaaatgtaaatggtatttgatttaggaaattatggttttatatatgtaatgtgctctgagaattaagaaactattaggaagagtaaatctcatcagtatgtagggagaaatattgaacctcagatggctagtagaaaaacaaaactatcaagagccat

SEQ ID NO: 115225 - DNA, 468 bp, Homo sapiens
accaagtaaaatgatgagataaggaaaaccacaacatcatactcagtatcttgtgaaactgaaatggttgcagagtaaacactttgccttacagtgattttattttgactattatgctggatttaacaatataatggttaatatccatgctataaagttttattttttcatcaacaaaactaattgcattggcactttcaaaatgttgtttgcacataaatgatttatacttaagtatgagtgtaacaatcttgccatcaggacctggtctgttgggagatatcagtgaatggagcctggctcttccaatgggcaaccgttgtttgttggtgaagctgccacccttgagacctgcctggtctccttcccacctgtagctggctaagtagtgtctccccacaattcacgtccacctggaacctcagaatatgaccttatttagaagtaggatctttgcagatgtaatta

SEQ ID NO: 115226 - DNA, 261 bp, Homo sapiens
gaggcgcggcctgaggtgggcaggtgcagggggcgtgacttcatttaggggcagggcctggggctaggctgaagccggcagtgaggaccccgctctcgggtggaattggaggggacccgcggttgggcgcggcagggctcacagggacacccccgttctcctccccagggagaaagtgctcgtcgtgcacggcttcccgcccgccgtggcaacccttcgggtaaggaaggagaccaggcggcggcaggcgggcaagggctt

SEQ ID NO: 115227 - DNA, 321 bp, Homo sapiens
gggcgtggtggtgcatgcctgtaatcccagctactcgggaggctgaggcaggagaatcgcttgaacctgggaggtggaggttgcggtgagccgagatcgcgccattgcactccagtctgggcaaccagagtgaaactccgtctcaaaaaaaaaaaaagaaaatttaaattgacacctgggctcccattatgttcctatggggcagcacttatctggaaggacacgggctttgtaacgctaacctccagcagggcctggggctggggagaaggcgacagctcttgactttctctgcttctgtgttgaatttttttcatagca

SEQ ID NO: 115228 - DNA, 401 bp, Homo sapiens
tatacttctcaatattcttcaaattctctacggagatatgtattgcttttatatttttatactatgtcaccaccatacccgagaccttaccagtcacacactcacccccattcatattctatcacggtataatcttgagcccaggagttcaagaccagcctgggcaacacaatgggaccccatccctataaaaaattaaaaaatttggcatggtggtacacgcctgtggtcccagctactcagtagaatcacttgagtctctactcaggagaatcacttgagcctgtgaggtcgaggctgcagggggctttatcacagccccacactccagccatgggtgacagaggcaagactccatcttaaaaaaaaaaggttcgaagacttggaaagagatccccaag

SEQ ID NO: 115229 - DNA, 1062 bp, Homo sapiens
  misc_feature (927)..(927): n is a, c, g, or t
  misc_feature (956)..(956): n is a, c, g, or t
  misc_feature (958)..(958): n is a, c, g, or t
caacttaggctaggtacgaggcctgggtgtgaccaagtccccacagagcaccttctgtagctccagcttgtctccctggcttctctttgaaggagaaaaatgtaaaatatgcactgagaaagccagccccgcctgcttagtcagccccggcagcagggcagccatgggaactcaggaaaagcaggaaccctttccaaaagcccagagatgccctgggctcagatctgtaattctcccaggagctgtgatagagcaggccacacaaagtccctacgcctccctgctgcctcccccagatgcatgtgatggcatcaccattccccaaattgaatatcagcatgcggcctgaccagggactctttagatgcatgaatttatttatatgaaggctctcacagagacacacacagcacttcagtagcatttgcattcctggttaaagaatcaccaatatttaaaataaaaactttcctgaaattgggactgtcatgttatccagaagggctggtacatccgcccaccatgtccccctgctgggtcaggagccaacacaggaccctgcgtgtgagcgtgcctgacatctcacgcacggccactccagagccggtccctgtccttggaaagctgtgaagccttgcgttgagttccttctaccagcgcaggggcgtggaggaactgaggtttggaaggaatgccaggtctcgcacagcttggcctcgagaaggtgagaggaaggcaaaggccagggaggggacccagagaggcctggcacacaaggcccaagcaccaccgtcaacacagcccagtccatacagaaatgggtttcatgcctgaaaagctttttacagaaagatgccgcctgtagccagtgacagccgcaaccctacaggcctcagttccttgcagaggtgaggggtagagagtacnccctccttccaagagccagtcccactccngnggggggccccggagccgtggggtctaacccggcccccggccgggcccccctctttcccgggcacgggcgaaccccgggggtctggcccggcgggaaaaacacca

SEQ ID NO: 115230 - DNA, 355 bp, Homo sapiens
ataaggggtaaaaagtcagcctccctccattacaggagcgggtgaggttcacgaaaaataaagaaaaaaaaagagctcaccaagggagcactggtgggtgctctgaaaacccacaggatcccacctccaggcccacctgggtcccatctcactctcttcttctttcaccaattgctaacatagaccttgttgggatcacgatggcttcacaagccagctgttgggtttgctatgtcactgtggctcagtcacatccctgcgtgtatactgtctgcggggcacatatgtatccatttagagctaaaggaatcagtgtacactacagctaatcctaataaatccgatgttttcggaa

SEQ ID NO: 115231 - DNA, 519 bp, Homo sapiens
tatcggaccattagatgctgtccagttctgctgtgagcagtagctctgaggagcctgctagatgcggcctggaaggtactggaaacccacaggggcacccataggccctcatctttgtgtcccatggagccggagagcacagtggccgctatgaagagctggctcggatgctgatggggctggacctgctggtgttcgcccacgaccataggccctcatctttgtgtcccatggagccggagagcacagtggccgctatgaagagctggctcggatgctgatggggctggacctgctggtgttcgcccacgaccatggtgagtgtcccagggtgccgtcagagctggctgggccctgacaatttggagatctccctctctagtccatctcactgccagcatccttctcaattcttctattccccacggatgtttcaaagtaaaaaaatgtagttatgcaaacaaacaaaaaaaatgtctgacgagcagattctgtagtctgagactgaatgcaggctga

SEQ ID NO: 115232 - DNA, 4611 bp, Homo sapiens
ctccatctttctagtccccaccttccccggtgcagacacccggcgaagcccacccggttttcccagcggcatttccgatgacagcttcggggctacgtgtcctgtgctgtcggagacgcacaggaagcaaagtttgtgagaagccttgggggcgactttgccttgggcacccgcatttgtgcgtctgcgaggtgcctcggtgtgcgcggagctagtttcccagtttcccgggcccctcccttctccgagcccctctagcgatttgtttaggaaaagtgatgacatgaactagtagtggagaatcgcagcgccgctccccgccctggggagggaggggagccccggagagcctgccggtgggagctggaagcaggctcccggctgagcgccccagcccgaaaggcagggtctgggtgcgggaagagggctcggagctgccttcctgctgccttggggccgcccagatgagggaacagcccgatttgcctggttctgattctccaggctgtcgtggttgtggaatgcaaacgccagcacataatggaaacaggacctgaagacccttccagcatgccagaggaaagttcccccaggcggaccccgcagagcattccctaccaggacctccctcacctggtcaatgcagacggacagtacctcttctgcaggtactggaaacccacaggcacacccaaggccctcatctttgtgtcccatggagccggagagcacagtggccgctatgaagagctggctcggatgctgatggggctggacctgctggtgttcgcccacgaccatgttggccacggacagagcgaaggggagaggatggtagtgtctgacttccacgttttcgtcagggatgtgttgcagcatgtggattccatgcagaaagactaccctgggcttcctgtcttccttctgggccactccatgggaggcgccatcgccatcctcacggccgcagagaggccgggccacttcgccggcatggtactcatttcgcctctggttcttgccaatcctgaatctgcaacaactttcaaggtccttgctgcgaaagtgctcaaccttgtgctgccaaacttgtccctcgggcccatcgactccagcgtgctctctcggaataagacagaggtcgacatttataactcagaccccctgatctgccgggcagggctgaaggtgtgcttcggcatccaactgctgaatgccgtctcacgggtggagcgcgccctccccaagctgactgtgcccttcctgctgctccagggctctgccgatcgcctatgtgacagcaaaggggcctacctgctcatggagttagccaagagccaggacaagactctcaagatttatgaaggtgcctaccatgttctccacaaggagcttcctgaagtcaccaactccgtcttccatgaaataaacatgtgggtctctcaaaggacagccacggcaggaactgcgtccccaccctgaatgcattggccggtgcccggctcatggtctgggggatgcaggcaggggaagggcagagatggcttctcagatatggcttgccaaaaaaaaaaaaaaaaaatcagaaattggagaaatccttaacacaattttctaaaaaataacagacatttttgttatacattagactatcagacactggacctaccttaatggttagacactttatgcaaaaaaagagaaaggtcccaggtgattttccacaaagaatgtgctaaaatgtccactgaaaacaaagccaagcctctgccctgcctctcccagctcccacaagggttccaggaattcctggtgttcccaggacaccagactgcaataactggaggcgcctccttcctgcccacccttcgctcacgccccagcgccctctctgaccagcctccgcttggtggccttcctctggccgtgtgatgaggtggttgctgtctccataggggccagctccccagggcagactcacgtgcccctctgaggctcagaaaatgcccagcccttcctcaaaatgagcagccacccatgactttgtgggctccttgttagcctgagaccaggctttgcagaggggcggggggtgaggcttagcccagaaggagaactgagcaggaaaccaaggctcttctctgtcccctgcccttcccctcctgccagggggaggctcaggttggtccccgagtgccgcctgtactcacaaaggctgcctttcctctagagtcactaattttacctgatgctatgagagaatcatattgaagatgaaatgtctaatatataatgtatattttaaagcagagactattttggtggataggtgggagggagcaaggggagtttgagggaatcagagcttgatgctactgtacagaactggacaggttgggccggcagtggtggggccagagggctctgtgctctaggagctaagccagcagcccccgagaggggacttggctgggcctttcctatgggcaaggcccagtgctcttcctgcccaccagggaccatggagcagtggcaccctatggggctatgatccctaggcctgggcctgggcctgcctgtggcccagagctaccctgggagtgtcagtgctagcagcacagctacctctggtggcaggagaagagaggcccagcacagcagcaggccaggccttcctgtccaggtctgcatggagcactcggtgacccagagcagggactggaggcacccccagccctgccccaggccacagcaggacaggccgggacaggcctcacccaaggccaaggctggcatcagccaatcattcagagctgaggccctgggcctagcctgcccttctcaggtgccaataccaccccagccctgcccttggcctcactttttcccagcaataagtggggttcaccacccgcctcgggaatactttccccttctaaatgggacttgctgttacctcaggaggctccttagtgcaaatatgaccctggtcagggctttgccaccgttgaagccctgcagaaggtgcaatgtaggggttctggggccacagaggagaggccacttcccaccaggacccccaacatgaagtctaggcctcaggggctcccgcccttcttcctccagcagcgggaactgccactgctctcccaggccctgttctggaggctaaccttggttcctggagagtgtgcccctccaccctccctccagcagccctgatcacaccatgagagccaggaacgggtcaccctgctgaagatcactctgtgccctgggggaggagccaagccctcaccccacaaggggcaggtgggggcttggttgctgacccggcccaagtccccacagagcaccttctgtagctccagcttgtctccctggcttctctttgaaggagaaaaatgtaaaatatgcactgagaaagccagccccgcctgcttagtcagccccggcagcagggcagccatgggaactcaggaaaagcaggaaccctttccaaaagcccagagatgccctgggctcagatctgtaattctcccaggagctgtgatagagcaggccacacaaagtccctacgcctccctgctgcctcccccagatgcatgtgatggcatcaccattccccaaattgaatatcagcatgcggcctgaccagggactctttagatgcatgaatttatttatatgaaggctctcacagagacacacacagcacttcagtagcatttgcattcctggttaaagaatcaccaatatttaaaataaaaactttcctgaaattgggactgtcatgttatccagaagggctggtacatccgcccaccatgtccccctgctgggtcaggagccaacacaggaccctgcgtgtgagcgtgcctgacatctcacgcacggccactccagagccggtccctgtccttggaaagctgtgaagccttgcgttgagttccttctcgatactgacggctccgtgctgacattctgagctctggagtcacaccagcgcaggggcgtggaggaactgaggtttggaaggaatgccaggtctcgcacagcttggcctcgagaaggtgagaggaaggcaaaggccagggaggggacccagagaggcctggcacacaaggcccaagcaccaccgtcaacacagcccagtccatacagaaatgggtttcatgcctgaaaagctttttacagaaagatgccgcctgtagccagtgacagccgcaaccctacaggcctcagttccttgcagaggtgaggggtagagagtcagcctctctcccttccagcagcgacccagcttccctccacttccaggtggtgctgggctcaccaagggagcactggtgggtgctctgaaaacccacaggatcccacctccaggcccacctgggtcccatctcactctcttcttctttcaccaattgctaacatagaccttgttgggatcacgatggcttcacaagccagctgttgggtttgctatgtcactgtggctcagtcacatccctgcgtgtatactgtctgcggggcacatatgtatccatttagagctaaaggaatcagtgtacactacagctaatcctaataaatccgatgttttcggaa

SEQ ID NO: 115233 - DNA, 4219 bp, Homo sapiens
cgcccccgccgcgagcccggcccagggataaagtggcggcgcagacgccgcaccctgtcgccgcgaagccggtcgcgcgcagctcgtcccggccctggcccgccgcaaacgaggatccgctgcgctcggggaacgcgacagcggcgctcgtggccccggacctgaagacccttccagcatgccagaggaaagttcccccaggcggaccccgcagagcattccctaccaggacctccctcacctggtcaatgcagacggacagtacctcttctgcaggtactggaaacccacaggcacacccaaggccctcatctttgtgtcccatggagccggagagcacagtggccgctatgaagagctggctcggatgctgatggggctggacctgctggtgttcgcccacgaccatgttggccacggacagagcgaaggggagaggatggtagtgtctgacttccacgttttcgtcagggatgtgttgcagcatgtggattccatgcagaaagactaccctgggcttcctgtcttccttctgggccactccatgggaggcgccatcgccatcctcacggccgcagagaggccgggccacttcgccggcatggtactcatttcgcctctggttcttgccaatcctgaatctgcaacaactttcaaggtccttgctgcgaaagtgctcaaccttgtgctgccaaacttgtccctcgggcccatcgactccagcgtgctctctcggaataagacagaggtcgacatttataactcagaccccctgatctgccgggcagggctgaaggtgtgcttcggcatccaactgctgaatgccgtctcacgggtggagcgcgccctccccaagctgactgtgcccttcctgctgctccagggctctgccgatcgcctatgtgacagcaaaggggcctacctgctcatggagttagccaagagccaggacaagactctcaagatttatgaaggtgcctaccatgttctccacaaggagcttcctgaagtcaccaactccgtcttccatgaaataaacatgtgggtctctcaaaggacagccacggcaggaactgcgtccccaccctgaatgcattggccggtgcccggctcatggtctgggggatgcaggcaggggaagggcagagatggcttctcagatatggcttgccaaaaaaaaaaaaaaaaaatcagaaattggagaaatccttaacacaattttctaaaaaataacagacatttttgttatacattagactatcagacactggacctaccttaatggttagacactttatgcaaaaaaagagaaaggtcccaggtgattttccacaaagaatgtgctaaaatgtccactgaaaacaaagccaagcctctgccctgcctctcccagctcccacaagggttccaggaattcctggtgttcccaggacaccagactgcaataactggaggcgcctccttcctgcccacccttcgctcacgccccagcgccctctctgaccagcctccgcttggtggccttcctctggccgtgtgatgaggtggttgctgtctccataggggccagctccccagggcagactcacgtgcccctctgaggctcagaaaatgcccagcccttcctcaaaatgagcagccacccatgactttgtgggctccttgttagcctgagaccaggctttgcagaggggcggggggtgaggcttagcccagaaggagaactgagcaggaaaccaaggctcttctctgtcccctgcccttcccctcctgccagggggaggctcaggttggtccccgagtgccgcctgtactcacaaaggctgcctttcctctagagtcactaattttacctgatgctatgagagaatcatattgaagatgaaatgtctaatatataatgtatattttaaagcagagactattttggtggataggtgggagggagcaaggggagtttgagggaatcagagcttgatgctactgtacagaactggacaggttgggccggcagtggtggggccagagggctctgtgctctaggagctaagccagcagcccccgagaggggacttggctgggcctttcctatgggcaaggcccagtgctcttcctgcccaccagggaccatggagcagtggcaccctatggggctatgatccctaggcctgggcctgggcctgcctgtggcccagagctaccctgggagtgtcagtgctagcagcacagctacctctggtggcaggagaagagaggcccagcacagcagcaggccaggccttcctgtccaggtctgcatggagcactcggtgacccagagcagggactggaggcacccccagccctgccccaggccacagcaggacaggccgggacaggcctcacccaaggccaaggctggcatcagccaatcattcagagctgaggccctgggcctagcctgcccttctcaggtgccaataccaccccagccctgcccttggcctcactttttcccagcaataagtggggttcaccacccgcctcgggaatactttccccttctaaatgggacttgctgttacctcaggaggctccttagtgcaaatatgaccctggtcagggctttgccaccgttgaagccctgcagaaggtgcaatgtaggggttctggggccacagaggagaggccacttcccaccaggacccccaacatgaagtctaggcctcaggggctcccgcccttcttcctccagcagcgggaactgccactgctctcccaggccctgttctggaggctaaccttggttcctggagagtgtgcccctccaccctccctccagcagccctgatcacaccatgagagccaggaacgggtcaccctgctgaagatcactctgtgccctgggggaggagccaagccctcaccccacaaggggcaggtgggggcttggttgctgacccggcccaagtccccacagagcaccttctgtagctccagcttgtctccctggcttctctttgaaggagaaaaatgtaaaatatgcactgagaaagccagccccgcctgcttagtcagccccggcagcagggcagccatgggaactcaggaaaagcaggaaccctttccaaaagcccagagatgccctgggctcagatctgtaattctcccaggagctgtgatagagcaggccacacaaagtccctacgcctccctgctgcctcccccagatgcatgtgatggcatcaccattccccaaattgaatatcagcatgcggcctgaccagggactctttagatgcatgaatttatttatatgaaggctctcacagagacacacacagcacttcagtagcatttgcattcctggttaaagaatcaccaatatttaaaataaaaactttcctgaaattgggactgtcatgttatccagaagggctggtacatccgcccaccatgtccccctgctgggtcaggagccaacacaggaccctgcgtgtgagcgtgcctgacatctcacgcacggccactccagagccggtccctgtccttggaaagctgtgaagccttgcgttgagttccttctcgatactgacggctccgtgctgacattctgagctctggagtcacaccagcgcaggggcgtggaggaactgaggtttggaaggaatgccaggtctcgcacagcttggcctcgagaaggtgagaggaaggcaaaggccagggaggggacccagagaggcctggcacacaaggcccaagcaccaccgtcaacacagcccagtccatacagaaatgggtttcatgcctgaaaagctttttacagaaagatgccgcctgtagccagtgacagccgcaaccctacaggcctcagttccttgcagaggtgaggggtagagagtcagcctctctcccttccagcagcgacccagcttccctccacttccaggtggtgctgggctcaccaagggagcactggtgggtgctctgaaaacccacaggatcccacctccaggcccacctgggtcccatctcactctcttcttctttcaccaattgctaacatagaccttgttgggatcacgatggcttcacaagccagctgttgggtttgctatgtcactgtggctcagtcacatccctgcgtgtatactgtctgcggggcacatatgtatccatttagagctaaaggaatcagtgtacactacagctaatcctaataaatccgatgttttcggaa

SEQ ID NO: 115234 - DNA, 4554 bp, Homo sapiens
ctccatctttctagtccccaccttccccggtgcagacacccggcgaagcccacccggttttcccagcggcatttccgatgacagcttcggggctacgtgtcctgtgctgtcggagacgcacaggaagcaaagtttgtgagaagccttgggggcgactttgccttgggcacccgcatttgtgcgtctgcgaggtgcctcggtgtgcgcggagctagtttcccagtttcccgggcccctcccttctccgagcccctctagcgatttgtttaggaaaagtgatgacatgaactagtagtggagaatcgcagcgccgctccccgccctggggagggaggggagccccggagagcctgccggtgggagctggaagcaggctcccggctgagcgccccagcccgaaaggcagggtctgggtgcgggaagagggctcggagctgccttcctgctgccttggggccgcccagatgagggaacagcccgatttgcctggttctgattctccaggctgtcgtggttgtggaatgcaaacgccagcacataatggaaacaggacctgaagacccttccagcatgccagaggaaagttcccccaggcggaccccgcagagcattccctaccaggacctccctcacctggtcaatgcagacggacagtacctcttctgcaggtactggaaacccacaggcacacccaaggccctcatctttgtgtcccatggagccggagagcacagtggccgctatgaagagctggctcggatgctgatggggctggacctgctggtgttcgcccacgaccatgttggccacggacagagcgaaggggagaggatggtagtgtctgacttccacgttttcgtcagggatgtgttgcagcatgtggattccatgcagaaagactaccctgggcttcctgtcttccttctgggccactccatgggaggcgccatcgccatcctcacggccgcagagaggccgggccacttcgccggcatggtactcatttcgcctctggttcttgccaatcctgaatctgcaacaactttcaaggtccttgctgcgaaagtgctcaaccttgtgctgccaaacttgtccctcgggcccatcgactccagcgtgctctctcggaataagacagaggtcgacatttataactcagaccccctgatctgccgggcagggctgaaggtgtgcttcggcatccaactgctgaatgccgtctcacgggtggagcgcgccctccccaagctgactgtgcccttcctgctgctccagggctctgccgatcgcctatgtgacagcaaaggggcctacctgctcatggagttagccaagagccaggacaagactctcaagatttatgaaggtgcctaccatgttctccacaaggagcttcctgaagtcaccaactccgtcttccatgaaataaacatgtgggtctctcaaaggacagccacggcaggaactgcgtccccaccctgaatgcattggccggtgcccggctcatggtctgggggatgcaggcaggggaagggcagagatggcttctcagatatggcttgccaaaaaaaaaaaaaaaaaatcagaaattggagaaatccttaacacaattttctaaaaaataacagacatttttgttatacattagactatcagacactggacctaccttaatggttagacactttatgcaaaaaaagagaaaggtcccaggtgattttccacaaagaatgtgctaaaatgtccactgaaaacaaagccaagcctctgccctgcctctcccagctcccacaagggttccaggaattcctggtgttcccaggacaccagactgcaataactggaggcgcctccttcctgcccacccttcgctcacgccccagcgccctctctgaccagcctccgcttggtggccttcctctggccgtgtgatgaggtggttgctgtctccataggggccagctccccagggcagactcacgtgcccctctgaggctcagaaaatgcccagcccttcctcaaaatgagcagccacccatgactttgtgggctccttgttagcctgagaccaggctttgcagaggggcggggggtgaggcttagcccagaaggagaactgagcaggaaaccaaggctcttctctgtcccctgcccttcccctcctgccagggggaggctcaggttggtccccgagtgccgcctgtactcacaaaggctgcctttcctctagagtcactaattttacctgatgctatgagagaatcatattgaagatgaaatgtctaatatataatgtatattttaaagcagagactattttggtggataggtgggagggagcaaggggagtttgagggaatcagagcttgatgctactgtacagaactggacaggttgggccggcagtggtggggccagagggctctgtgctctaggagctaagccagcagcccccgagaggggacttggctgggcctttcctatgggcaaggcccagtgctcttcctgcccaccagggaccatggagcagtggcaccctatggggctatgatccctaggcctgggcctgggcctgcctgtggcccagagctaccctgggagtgtcagtgctagcagcacagctacctctggtggcaggagaagagaggcccagcacagcagcaggccaggccttcctgtccaggtctgcatggagcactcggtgacccagagcagggactggaggcacccccagccctgccccaggccacagcaggacaggccgggacaggcctcacccaaggccaaggctggcatcagccaatcattcagagctgaggccctgggcctagcctgcccttctcaggtgccaataccaccccagccctgcccttggcctcactttttcccagcaataagtggggttcaccacccgcctcgggaatactttccccttctaaatgggacttgctgttacctcaggaggctccttagtgcaaatatgaccctggtcagggctttgccaccgttgaagccctgcagaaggtgcaatgtaggggttctggggccacagaggagaggccacttcccaccaggacccccaacatgaagtctaggcctcaggggctcccgcccttcttcctccagcagcgggaactgccactgctctcccaggccctgttctggaggctaaccttggttcctggagagtgtgcccctccaccctccctccagcagccctgatcacaccatgagagccaggaacgggtcaccctgctgaagatcactctgtgccctgggggaggagccaagccctcaccccacaaggggcaggtgggggcttggttgctgacccggcccaagtccccacagagcaccttctgtagctccagcttgtctccctggcttctctttgaaggagaaaaatgtaaaatatgcactgagaaagccagccccgcctgcttagtcagccccggcagcagggcagccatgggaactcaggaaaagcaggaaccctttccaaaagcccagagatgccctgggctcagatctgtaattctcccaggagctgtgatagagcaggccacacaaagtccctacgcctccctgctgcctcccccagatgcatgtgatggcatcaccattccccaaattgaatatcagcatgcggcctgaccagggactctttagatgcatgaatttatttatatgaaggctctcacagagacacacacagcacttcagtagcatttgcattcctggttaaagaatcaccaatatttaaaataaaaactttcctgaaattgggactgtcatgttatccagaagggctggtacatccgcccaccatgtccccctgctgggtcaggagccaacacaggaccctgcgtgtgagcgtgcctgacatctcacgcacggccactccagagccggtccctgtccttggaaagctgtgaagccttgcgttgagttccttctcgatactgacggctccgtgctgacattctgagctctggagtcacaccagcgcaggggcgtggaggaactgaggtttggaaggaatgccaggtctcgcacagcttggcctcgagaaggtgagaggaaggcaaaggccagggaggggacccagagaggcctggcacacaaggcccaagcaccaccgtcaacacagcccagtccatacagaaatgggtttcatgcctgaaaagctttttacagaaagatgccgcctgtagccagtgacagccgcaaccctacaggcctcagttccttgcagaggtgaggggtagagagtcagcctctctcccttccagcagcgacccagcttccctccacttccaggtggtgctgggctcaccaagggagcactggtgggtgctctgaaaacccacaggatcccacctccaggcccacctgggtcccatctcactctcttcttctttcaccaattgctaacatagaccttgttgggatcacgatggcttcacaagccagctgttgggtttgctatgtcactgtggctcagtcacatccctgcgtgtatactgtctgcaagcaccacgcggtcgcgaggtg

SEQ ID NO: 115235 - DNA, 4694 bp, Homo sapiens
  misc_feature (4365)..(4365): n is a, c, g, or t
ctccatctttctagtccccaccttccccggtgcagacacccggcgaagcccacccggttttcccagcggcatttccgatgacagcttcggggctacgtgtcctgtgctgtcggagacgcacaggaagcaaagtttgtgagaagccttgggggcgactttgccttgggcacccgcatttgtgcgtctgcgaggtgcctcggtgtgcgcggagctagtttcccagtttcccgggcccctcccttctccgagcccctctagcgatttgtttaggaaaagtgatgacatgaactagtagtggagaatcgcagcgccgctccccgccctggggagggaggggagccccggagagcctgccggtgggagctggaagcaggctcccggctgagcgccccagcccgaaaggcagggtctgggtgcgggaagagggctcggagctgccttcctgctgccttggggccgcccagatgagggaacagcccgatttgcctggttctgattctccaggctgtcgtggttgtggaatgcaaacgccagcacataatggaaacaggacctgaagacccttccagcatgccagaggaaagttcccccaggcggaccccgcagagcattccctaccaggacctccctcacctggtcaatgcagacggacagtacctcttctgcaggtactggaaacccacaggcacacccaaggccctcatctttgtgtcccatggagccggagagcacagtggccgctatgaagagctggctcggatgctgatggggctggacctgctggtgttcgcccacgaccatgttggccacggacagagcgaaggggagaggatggtagtgtctgacttccacgttttcgtcagggatgtgttgcagcatgtggattccatgcagaaagactaccctgggcttcctgtcttccttctgggccactccatgggaggcgccatcgccatcctcacggccgcagagaggccgggccacttcgccggcatggtactcatttcgcctctggttcttgccaatcctgaatctgcaacaactttcaaggtccttgctgcgaaagtgctcaaccttgtgctgccaaacttgtccctcgggcccatcgactccagcgtgctctctcggaataagacagaggtcgacatttataactcagaccccctgatctgccgggcagggctgaaggtgtgcttcggcatccaactgctgaatgccgtctcacgggtggagcgcgccctccccaagctgactgtgcccttcctgctgctccagggctctgccgatcgcctatgtgacagcaaaggggcctacctgctcatggagttagccaagagccaggacaagactctcaagatttatgaaggtgcctaccatgttctccacaaggagcttcctgaagtcaccaactccgtcttccatgaaataaacatgtgggtctctcaaaggacagccacggcaggaactgcgtccccaccctgaatgcattggccggtgcccggctcatggtctgggggatgcaggcaggggaagggcagagatggcttctcagatatggcttgccaaaaaaaaaaaaaaaaaatcagaaattggagaaatccttaacacaattttctaaaaaataacagacatttttgttatacattagactatcagacactggacctaccttaatggttagacactttatgcaaaaaaagagaaaggtcccaggtgattttccacaaagaatgtgctaaaatgtccactgaaaacaaagccaagcctctgccctgcctctcccagctcccacaagggttccaggaattcctggtgttcccaggacaccagactgcaataactggaggcgcctccttcctgcccacccttcgctcacgccccagcgccctctctgaccagcctccgcttggtggccttcctctggccgtgtgatgaggtggttgctgtctccataggggccagctccccagggcagactcacgtgcccctctgaggctcagaaaatgcccagcccttcctcaaaatgagcagccacccatgactttgtgggctccttgttagcctgagaccaggctttgcagaggggcggggggtgaggcttagcccagaaggagaactgagcaggaaaccaaggctcttctctgtcccctgcccttcccctcctgccagggggaggctcaggttggtccccgagtgccgcctgtactcacaaaggctgcctttcctctagagtcactaattttacctgatgctatgagagaatcatattgaagatgaaatgtctaatatataatgtatattttaaagcagagactattttggtggataggtgggagggagcaaggggagtttgagggaatcagagcttgatgctactgtacagaactggacaggttgggccggcagtggtggggccagagggctctgtgctctaggagctaagccagcagcccccgagaggggacttggctgggcctttcctatgggcaaggcccagtgctcttcctgcccaccagggaccatggagcagtggcaccctatggggctatgatccctaggcctgggcctgggcctgcctgtggcccagagctaccctgggagtgtcagtgctagcagcacagctacctctggtggcaggagaagagaggcccagcacagcagcaggccaggccttcctgtccaggtctgcatggagcactcggtgacccagagcagggactggaggcacccccagccctgccccaggccacagcaggacaggccgggacaggcctcacccaaggccaaggctggcatcagccaatcattcagagctgaggccctgggcctagcctgcccttctcaggtgccaataccaccccagccctgcccttggcctcactttttcccagcaataagtggggttcaccacccgcctcgggaatactttccccttctaaatgggacttgctgttacctcaggaggctccttagtgcaaatatgaccctggtcagggctttgccaccgttgaagccctgcagaaggtgcaatgtaggggttctggggccacagaggagaggccacttcccaccaggacccccaacatgaagtctaggcctcaggggctcccgcccttcttcctccagcagcgggaactgccactgctctcccaggccctgttctggaggctaaccttggttcctggagagtgtgcccctccaccctccctccagcagccctgatcacaccatgagagccaggaacgggtcaccctgctgaagatcactctgtgccctgggggaggagccaagccctcaccccacaaggggcaggtgggggcttggttgctgacccggcccaagtccccacagagcaccttctgtagctccagcttgtctccctggagcgccccagcccgaaaggcagggtctgggtgcgggaagagggctcggagctgccttcctgctgccttggggccgcccagatgagggaacagcccgatttgcctggttctgattctccaggctgtcgtggttgtggaatgcaaacgccagcacataatggaaacaggacctgaagacccttccagcatgccagaggaaagttcccccaggcggaccccgcagagcattccctaccaggacctccctcacctggtcaatgcagacggacagtacctcttctgcaggtactggaaacccacaggcacacccaaggccctcatctttgtgtcccatggagccggagagcacagtggccgctatgaagagctggctcggatgctgatggggctggacctgctggtgttcgcccacgaccatggtcgacatttataactcagaccccctgatctgccgggcagggctgaaggtgtgcttcggcatccaactgctgaatgccgtctcacgggtggagcgcgccctccccaagctgactgtgcccttcctgctgctccagggctctgccgatcgcctatgtgacagcaaaggggcctacctgctcatggagttagccaagagccaggacaagactctcaagatttatgaaggtgcctaccatgttctccacaaggagcttcctgaagtcaccaactccgtcttccatgaaataaacatgtgggtctctcaaaggacagccacggcaggaactgcgtccccaccctgaatgcattggccggtgcccggctcatggtctgggggatgcaggcaggggaagggcagagatggcttctcagatatggcttgcaaaaaaaaaaaaaaaaatcagaaattggagaaatccttaacacaattttctaaaaaataacagacatttttgttatacattagactatcagacactggacctaccttaatggttagacactttatgcaaaaaaagagaanggtcccaggtgattttccacaaagaatggtgctaaagggtccatctgggaaaacaaagccaagcctctgccctgcctctcccagctcccacagggttccaggaattcctggggtccccaggacaccagagtggaaataagggaggcgcctctttctggccaccttcgtcaggcccaggccttctctgacagctccggttggggctcctctgaccggtgagagggggtggcgctccctaggggcagccccaagggatcaagggcctcgaggtagaaaggccgctctaaatgagagcccagattggggcctggaccggaccgtgcaggcgg

SEQ ID NO: 115236 - DNA, 4327 bp, Homo sapiens
ctccatctttctagtccccaccttccccggtgcagacacccggcgaagcccacccggttttcccagcggcatttccgatgacagcttcggggctacgtgtcctgtgctgtcggagacgcacaggaagcaaagtttgtgagaagccttgggggcgactttgccttgggcacccgcatttgtgcgtctgcgaggtgcctcggtgtgcgcggagctagtttcccagtttcccgggcccctcccttctccgagcccctctagcgatttgtttaggaaaagtgatgacatgaactagtagtggagaatcgcagcgccgctccccgccctggggagggaggggagccccggagagcctgccggtgggagctggaagcaggctcccggctgagcgccccagcccgaaaggcagggtctgggtgcgggaagagggctcggagctgccttcctgctgccttggggccgcccagatgagggaacagcccgatttgcctggttctgattctccaggctgtcgtggttgtggaatgcaaacgccagcacataatggaaacaggacctgaagacccttccagcatgccagaggaaagttcccccaggcggaccccgcagagcattccctaccaggacctccctcacctggtcaatgcagacggacagtacctcttctgcaggtactggaaacccacaggcacacccaaggccctcatctttgtgtcccatggagccggagagcacagtggccgctatgaagagctggctcggatgctgatggggctggacctgctggtgttcgcccacgaccatgttggccacggacagagcgaaggggagaggatggtagtgtctgacttccacgttttcgtcagggatgtgttgcagcatgtggattccatgcagaaagactaccctgggcttcctgtcttccttctgggccactccatgggaggcgccatcgccatcctcacggccgcagagaggccgggccacttcgccggcatggtactcatttcgcctctggttcttgccaatcctgaatctgcaacaactttcaaggtccttgctgcgaaagtgctcaaccttgtgctgccaaacttgtccctcgggcccatcgactccagcgtgctctctcggaataagacagaggtcgacatttataactcagaccccctgatctgccgggcagggctgaaggtgtgcttcggcatccaactgctgaatgccgtctcacgggtggagcgcgccctccccaagctgactgtgcccttcctgctgctccagggctctgccgatcgcctatgtgacagcaaaggggcctacctgctcatggagttagccaagagccaggacaagactctcaagatttatgaaggtgcctaccatgttctccacaaggagcttcctgaagtcaccaactccgtcttccatgaaataaacatgtgggtctctcaaaggacagccacggcaggaactgcgtccccaccctgaatgcattggccggtgcccggctcatggtctgggggatgcaggcaggggaagggcagagatggcttctcagatatggcttgccaaaaaaaaaaaaaaaaaatcagaaattggagaaatccttaacacaattttctaaaaaataacagacatttttgttatacattagactatcagacactggacctaccttaatggttagacactttatgcaaaaaaagagaaaggtcccaggtgattttccacaaagaatgtgctaaaatgtccactgaaaacaaagccaagcctctgccctgcctctcccagctcccacaagggttccaggaattcctggtgttcccaggacaccagactgcaataactggaggcgcctccttcctgcccacccttcgctcacgccccagcgccctctctgaccagcctccgcttggtggccttcctctggccgtgtgatgaggtggttgctgtctccataggggccagctccccagggcagactcacgtgcccctctgaggctcagaaaatgcccagcccttcctcaaaatgagcagccacccatgactttgtgggctccttgttagcctgagaccaggctttgcagaggggcggggggtgaggcttagcccagaaggagaactgagcaggaaaccaaggctcttctctgtcccctgcccttcccctcctgccagggggaggctcaggttggtccccgagtgccgcctgtactcacaaaggctgcctttcctctagagtcactaattttacctgatgctatgagagaatcatattgaagatgaaatgtctaatatataatgtatattttaaagcagagactattttggtggataggtgggagggagcaaggggagtttgagggaatcagagcttgatgctactgtacagaactggacaggttgggccggcagtggtggggccagagggctctgtgctctaggagctaagccagcagcccccgagaggggacttggctgggcctttcctatgggcaaggcccagtgctcttcctgcccaccagggaccatggagcagtggcaccctatggggctatgatccctaggcctgggcctgggcctgcctgtggcccagagctaccctgggagtgtcagtgctagcagcacagctacctctggtggcaggagaagagaggcccagcacagcagcaggccaggccttcctgtccaggtctgcatggagcactcggtgacccagagcagggactggaggcacccccagccctgccccaggccacagcaggacaggccgggacaggcctcacccaaggccaaggctggcatcagccaatcattcagagctgaggccctgggcctagcctgcccttctcaggtgccaataccaccccagccctgcccttggcctcactttttcccagcaataagtggggttcaccacccgcctcgggaatactttccccttctaaatgggacttgctgttacctcaggaggctccttagtgcaaatatgaccctggtcagggctttgccaccgttgaagccctgcagaaggtgcaatgtaggggttctggggccacagaggagaggccacttcccaccaggacccccaacatgaagtctaggcctcaggggctcccgcccttcttcctccagcagcgggaactgccactgctctcccaggccctgttctggaggctaaccttggttcctggagagtgtgcccctccaccctccctccagcagccctgatcacaccatgagagccaggaacgggtcaccctgctgaagatcactctgtgccctgggggaggagccaagccctcaccccacaaggggcaggtgggggcttggttgctgacccggcccaagtccccacagagcaccttctgtagctccagcttgtctccctggcttctctttgaaggagaaaaatgtaaaatatgcactgagaaagccagccccgcctgcttagtcagccccggcagcagggcagccatgggaactcaggaaaagcaggaaccctttccaaaagcccagagatgccctgggctcagatctgtaattctcccaggagctgtgatagagcaggccacacaaagtccctacgcctccctgctgcctcccccagatgcatgtgatggcatcaccattccccaaattgaatatcagcatgcggcctgaccagggactctttagatgcatgaatttatttatatgaaggctctcacagagacacacacagcacttcagtagcatttgcattcctggttaaagaatcaccaatatttaaaataaaaactttcctgaaattgggactgtcatgttatccagaagggctggtacatccgcccaccatgtccccctgctgggtcaggagccaacacaggaccctgcgtgtgagcgtgcctgacatctcacgcacggccactccagagccggtccctgtccttggaaagctgtgaagccttgcgttgagttccttctcgatactgacggctccgtgctgacattctgagctctggagtcacaccagcgcaggggcgtggaggaactgaggtttggaaggaatgccaggtctcgcacagcttggcctcgagaaggtgagaggaaggcaaaggccagggaggggacccagagaggcctggcacacaaggcccaagcaccaccgtcaacacagcccagtccatacagaaatgggtttcatgcctgaaaagctttttacagaaagatgccgccttgtggctcagtcacatccctgcgtgtatactgtctgcggggcacatatgtatccatttagagctaaaggaatcagtgtacactacagctaatcctaataaatccgatgttttcggaa

SEQ ID NO: 115237 - DNA, 4257 bp, Homo sapiens
ctccatctttctagtccccaccttccccggtgcagacacccggcgaagcccacccggttttcccagcggcatttccgatgacagcttcggggctacgtgtcctgtgctgtcggagacgcacaggaagcaaagtttgtgagaagccttgggggcgactttgccttgggcacccgcatttgtgcgtctgcgaggtgcctcggtgtgcgcggagctagtttcccagtttcccgggcccctcccttctccgagcccctctagcgatttgtttaggaaaagtgatgacatgaactagtagtggagaatcgcagcgccgctccccgccctggggagggaggggagccccggagagcctgccggtgggagctggaagcaggctcccggctgagcgccccagcccgaaaggcagggtctgggtgcgggaagagggctcggagctgccttcctgctgccttggggccgcccagatgagggaacagcccgatttgcctggttctgattctccaggctgtcgtggttgtggaatgcaaacgccagcacataatggaaacaggacctgaagacccttccagcatgccagaggaaagttcccccaggcggaccccgcagagcattccctaccaggacctccctcacctggtcaatgcagacggacagtacctcttctgcaggtactggaaacccacaggcacacccaaggccctcatctttgtgtcccatggagccggagagcacagtggccgctatgaagagctggctcggatgctgatggggctggacctgctggtgttcgcccacgaccatgttggccacggacagagcgaaggggagaggatggtagtgtctgacttccacgttttcgtcagggatgtgttgcagcatgtggattccatgcagaaagactaccctgggcttcctgtcttccttctgggccactccatgggaggcgccatcgccatcctcacggccgcagagaggccgggccacttcgccggcatggtactcatttcgcctctggttcttgccaatcctgaatctgcaacaactttcaaggtccttgctgcgaaagtgctcaaccttgtgctgccaaacttgtccctcgggcccatcgactccagcgtgctctctcggaataagacagaggtcgacatttataactcagaccccctgatctgccgggcagggctgaaggtgtgcttcggcatccaactgctgaatgccgtctcacgggtggagcgcgccctccccaagctgactgtgcccttcctgctgctccagggctctgccgatcgcctatgtgacagcaaaggggcctacctgctcatggagttagccaagagccaggacaagactctcaagatttatgaaggtgcctaccatgttctccacaaggagcttcctgaagtcaccaactccgtcttccatgaaataaacatgtgggtctctcaaaggacagccacggcaggaactgcgtccccaccctgaatgcattggccggtgcccggctcatggtctgggggatgcaggcaggggaagggcagagatggcttctcagatatggcttgccaaaaaaaaaaaaaaaaaatcagaaattggagaaatccttaacacaattttctaaaaaataacagacatttttgttatacattagactatcagacactggacctaccttaatggttagacactttatgcaaaaaaagagaaaggtcccaggtgattttccacaaagaatgtgctaaaatgtccactgaaaacaaagccaagcctctgccctgcctctcccagctcccacaagggttccaggaattcctggtgttcccaggacaccagactgcaataactggaggcgcctccttcctgcccacccttcgctcacgccccagcgccctctctgaccagcctccgcttggtggccttcctctggccgtgtgatgaggtggttgctgtctccataggggccagctccccagggcagactcacgtgcccctctgaggctcagaaaatgcccagcccttcctcaaaatgagcagccacccatgactttgtgggctccttgttagcctgagaccaggctttgcagaggggcggggggtgaggcttagcccagaaggagaactgagcaggaaaccaaggctcttctctgtcccctgcccttcccctcctgccagggggaggctcaggttggtccccgagtgccgcctgtactcacaaaggctgcctttcctctagagtcactaattttacctgatgctatgagagaatcatattgaagatgaaatgtctaatatataatgtatattttaaagcagagactattttggtggataggtgggagggagcaaggggagtttgagggaatcagagcttgatgctactgtacagaactggacaggttgggccggcagtggtggggccagagggctctgtgctctaggagctaagccagcagcccccgagaggggacttggctgggcctttcctatgggcaaggcccagtgctcttcctgcccaccagggaccatggagcagtggcaccctatggggctatgatccctaggcctgggcctgggcctgcctgtggcccagagctaccctgggagtgtcagtgctagcagcacagctacctctggtggcaggagaagagaggcccagcacagcagcaggccaggccttcctgtccaggtctgcatggagcactcggtgacccagagcagggactggaggcacccccagccctgccccaggccacagcaggacaggccgggacaggcctcacccaaggccaaggctggcatcagccaatcattcagagctgaggccctgggcctagcctgcccttctcaggtgccaataccaccccagccctgcccttggcctcactttttcccagcaataagtggggttcaccacccgcctcgggaatactttccccttctaaatgggacttgctgttacctcaggaggctccttagtgcaaatatgaccctggtcagggctttgccaccgttgaagccctgcagaaggtgcaatgtaggggttctggggccacagaggagaggccacttcccaccaggacccccaacatgaagtctaggcctcaggggctcccgcccttcttcctccagcagcgggaactgccactgctctcccaggccctgttctggaggctaaccttggttcctggagagtgtgcccctccaccctccctccagcagccctgatcacaccatgagagccaggaacgggtcaccctgctgaagatcactctgtgccctgggggaggagccaagccctcaccccacaaggggcaggtgggggcttggttgctgacccggcccaagtccccacagagcaccttctgtagctccagcttgtctccctggcttctctttgaaggagaaaaatgtaaaatatgcactgagaaagccagccccgcctgcttagtcagccccggcagcagggcagccatgggaactcaggaaaagcaggaaccctttccaaaagcccagagatgccctgggctcagatctgtaattctcccaggagctgtgatagagcaggccacacaaagtccctacgcctccctgctgcctcccccagatgcatgtgatggcatcaccattccccaaattgaatatcagcatgcggcctgaccagggactctttagatgcatgaatttatttatatgaaggctctcacagagacacacacagcacttcagtagcatttgcattcctggttaaagaatcaccaatatttaaaataaaaactttcctgaaattgggactgtcatgttatccagaagggctggtacatccgcccaccatgtccccctgctgggtcaggagccaacacaggaccctgcgtgtgagcgtgcctgacatctcacgcacggccactccagagccggtccctgtccttggaaagctgtgaagccttgcgttgagttccttctcgatactgacggctccgtgctgacattctgagctctggagtcacaccagcgcaggggcgtggaggaactgaggtttggaaggaatgccagatctcactctcttcttctttcaccaattgctaacatagaccttgttgggatcacgatggcttcacaagccagctgttgggtttgctatgtcactgtggctcagtcacatccctgcgtgtatactgtctgcggggcacatatgtatccatttagagctaaaggaatcagtgtacactacagctaatcctaataaatccgatgttttcggaa

SEQ ID NO: 115238 - DNA, 4800 bp, Homo sapiens
ctccatctttctagtccccaccttccccggtgcagacacccggcgaagcccacccggttttcccagcggcatttccgatgacagcttcggggctacgtgtcctgtgctgtcggagacgcacaggaagcaaagtttgtgagaagccttgggggcgactttgccttgggcacccgcatttgtgcgtctgcgaggtgcctcggtgtgcgcggagctagtttcccagtttcccgggcccctcccttctccgagcccctctagcgatttgtttaggaaaagtgatgacatgaactagtagtggagaatcgcagcgccgctccccgccctggggagggaggggagccccggagagcctgccggtgggagctggaagcaggctcccggctgagcgccccagcccgaaaggcagggtctgggtgcgggaagagggctcggagctgccttcctgctgccttggggccgcccagatgagggaacagcccgatttgcctggttctgattctccaggctgtcgtggttgtggaatgcaaacgccagcacataatggaaacaggacctgaagacccttccagcatgccagaggaaagttcccccaggcggaccccgcagagcattccctaccaggacctccctcacctggtcaatgcagacggacagtacctcttctgcaggtactggaaacccacaggcacacccaaggccctcatctttgtgtcccatggagccggagagcacagtggccgctatgaagagctggctcggatgctgatggggctggacctgctggtgttcgcccacgaccatgagctgaacaggagaaaatccttgtaagtgggagagatgcagactagattcagaaggatcttcccctggaaggatgcgagcaccaagagaatgccagaatttatacatttttctcctctgaaaccatacaaagggagggaatgggagaaggcggggagcgagcacgtgctggaaacccaccttttgccagttggccacggacagagcgaaggggagaggatggtagtgtctgacttccacgttttcgtcagggatgtgttgcagcatgtggattccatgcagaaagactaccctgggcttcctgtcttccttctgggccactccatgggaggcgccatcgccatcctcacggccgcagagaggccgggccacttcgccggcatggtactcatttcgcctctggttcttgccaatcctgaatctgcaacaactttcaaggtccttgctgcgaaagtgctcaaccttgtgctgccaaacttgtccctcgggcccatcgactccagcgtgctctctcggaataagacagaggtcgacatttataactcagaccccctgatctgccgggcagggctgaaggtgtgcttcggcatccaactgctgaatgccgtctcacgggtggagcgcgccctccccaagctgactgtgcccttcctgctgctccagggctctgccgatcgcctatgtgacagcaaaggggcctacctgctcatggagttagccaagagccaggacaagactctcaagatttatgaaggtgcctaccatgttctccacaaggagcttcctgaagtcaccaactccgtcttccatgaaataaacatgtgggtctctcaaaggacagccacggcaggaactgcgtccccaccctgaatgcattggccggtgcccggctcatggtctgggggatgcaggcaggggaagggcagagatggcttctcagatatggcttgccaaaaaaaaaaaaaaaaaatcagaaattggagaaatccttaacacaattttctaaaaaataacagacatttttgttatacattagactatcagacactggacctaccttaatggttagacactttatgcaaaaaaagagaaaggtcccaggtgattttccacaaagaatgtgctaaaatgtccactgaaaacaaagccaagcctctgccctgcctctcccagctcccacaagggttccaggaattcctggtgttcccaggacaccagactgcaataactggaggcgcctccttcctgcccacccttcgctcacgccccagcgccctctctgaccagcctccgcttggtggccttcctctggccgtgtgatgaggtggttgctgtctccataggggccagctccccagggcagactcacgtgcccctctgaggctcagaaaatgcccagcccttcctcaaaatgagcagccacccatgactttgtgggctccttgttagcctgagaccaggctttgcagaggggcggggggtgaggcttagcccagaaggagaactgagcaggaaaccaaggctcttctctgtcccctgcccttcccctcctgccagggggaggctcaggttggtccccgagtgccgcctgtactcacaaaggctgcctttcctctagagtcactaattttacctgatgctatgagagaatcatattgaagatgaaatgtctaatatataatgtatattttaaagcagagactattttggtggataggtgggagggagcaaggggagtttgagggaatcagagcttgatgctactgtacagaactggacaggttgggccggcagtggtggggccagagggctctgtgctctaggagctaagccagcagcccccgagaggggacttggctgggcctttcctatgggcaaggcccagtgctcttcctgcccaccagggaccatggagcagtggcaccctatggggctatgatccctaggcctgggcctgggcctgcctgtggcccagagctaccctgggagtgtcagtgctagcagcacagctacctctggtggcaggagaagagaggcccagcacagcagcaggccaggccttcctgtccaggtctgcatggagcactcggtgacccagagcagggactggaggcacccccagccctgccccaggccacagcaggacaggccgggacaggcctcacccaaggccaaggctggcatcagccaatcattcagagctgaggccctgggcctagcctgcccttctcaggtgccaataccaccccagccctgcccttggcctcactttttcccagcaataagtggggttcaccacccgcctcgggaatactttccccttctaaatgggacttgctgttacctcaggaggctccttagtgcaaatatgaccctggtcagggctttgccaccgttgaagccctgcagaaggtgcaatgtaggggttctggggccacagaggagaggccacttcccaccaggacccccaacatgaagtctaggcctcaggggctcccgcccttcttcctccagcagcgggaactgccactgctctcccaggccctgttctggaggctaaccttggttcctggagagtgtgcccctccaccctccctccagcagccctgatcacaccatgagagccaggaacgggtcaccctgctgaagatcactctgtgccctgggggaggagccaagccctcaccccacaaggggcaggtgggggcttggttgctgacccggcccaagtccccacagagcaccttctgtagctccagcttgtctccctggcttctctttgaaggagaaaaatgtaaaatatgcactgagaaagccagccccgcctgcttagtcagccccggcagcagggcagccatgggaactcaggaaaagcaggaaccctttccaaaagcccagagatgccctgggctcagatctgtaattctcccaggagctgtgatagagcaggccacacaaagtccctacgcctccctgctgcctcccccagatgcatgtgatggcatcaccattccccaaattgaatatcagcatgcggcctgaccagggactctttagatgcatgaatttatttatatgaaggctctcacagagacacacacagcacttcagtagcatttgcattcctggttaaagaatcaccaatatttaaaataaaaactttcctgaaattgggactgtcatgttatccagaagggctggtacatccgcccaccatgtccccctgctgggtcaggagccaacacaggaccctgcgtgtgagcgtgcctgacatctcacgcacggccactccagagccggtccctgtccttggaaagctgtgaagccttgcgttgagttccttctcgatactgacggctccgtgctgacattctgagctctggagtcacaccagcgcaggggcgtggaggaactgaggtttggaaggaatgccaggtctcgcacagcttggcctcgagaaggtgagaggaaggcaaaggccagggaggggacccagagaggcctggcacacaaggcccaagcaccaccgtcaacacagcccagtccatacagaaatgggtttcatgcctgaaaagctttttacagaaagatgccgcctgtagccagtgacagccgcaaccctacaggcctcagttccttgcagaggtgaggggtagagagtcagcctctctcccttccagcagcgacccagcttccctccacttccaggtggtgctgggctcaccaagggagcactggtgggtgctctgaaaacccacaggatcccacctccaggcccacctgggtcccatctcactctcttcttctttcaccaattgctaacatagaccttgttgggatcacgatggcttcacaagccagctgttgggtttgctatgtcactgtggctcagtcacatccctgcgtgtatactgtctgcggggcacatatgtatccatttagagctaaaggaatcagtgtacactacagctaatcctaataaatccgatgttttcggaa

SEQ ID NO: 115239 - DNA, 4368 bp, Homo sapiens
gtaatgaacgtccatttttttaaagcaatttgcttttcctcatgcaatcttctttgttttttaaagtgatacttacaataatttcagcagaagtgaaacttgggttgccaggtgtctgtacttttattaggtttgactgaccctgagctccaaacaatggaactagcactgtttgggaacttctgtaatctcacagaggacaacagatctaactgaatgttttcaagggaaaataaaaaggtctgttccatgttaaacctgggagcttttagcgtgaaggaactgagccgaaagatggtttaacgcttgcactctaagagagccaggattctaactgaaggtgcagaccagctgccccatctctttgcagagctgaacaggagaaaatccttgtaagtgggagagatgcagactagattcagaaggatcttcccctggaaggatgcgagcaccaagagaatgccagaatttatacatttttctcctctgaaaccatacaaagggagggaatgggagaaggcggggagcgagcacgtgctggaaacccaccttttgccagttggccacggacagagcgaaggggagaggatggtagtgtctgacttccacgttttcgtcagggatgtgttgcagcatgtggattccatgcagaaagactaccctgggcttcctgtcttccttctgggccactccatgggaggcgccatcgccatcctcacggccgcagagaggccgggccacttcgccggcatggtactcatttcgcctctggttcttgccaatcctgaatctgcaacaactttcaaggtccttgctgcgaaagtgctcaaccttgtgctgccaaacttgtccctcgggcccatcgactccagcgtgctctctcggaataagacagaggtcgacatttataactcagaccccctgatctgccgggcagggctgaaggtgtgcttcggcatccaactgctgaatgccgtctcacgggtggagcgcgccctccccaagctgactgtgcccttcctgctgctccagggctctgccgatcgcctatgtgacagcaaaggggcctacctgctcatggagttagccaagagccaggacaagactctcaagatttatgaaggtgcctaccatgttctccacaaggagcttcctgaagtcaccaactccgtcttccatgaaataaacatgtgggtctctcaaaggacagccacggcaggaactgcgtccccaccctgaatgcattggccggtgcccggctcatggtctgggggatgcaggcaggggaagggcagagatggcttctcagatatggcttgccaaaaaaaaaaaaaaaaaatcagaaattggagaaatccttaacacaattttctaaaaaataacagacatttttgttatacattagactatcagacactggacctaccttaatggttagacactttatgcaaaaaaagagaaaggtcccaggtgattttccacaaagaatgtgctaaaatgtccactgaaaacaaagccaagcctctgccctgcctctcccagctcccacaagggttccaggaattcctggtgttcccaggacaccagactgcaataactggaggcgcctccttcctgcccacccttcgctcacgccccagcgccctctctgaccagcctccgcttggtggccttcctctggccgtgtgatgaggtggttgctgtctccataggggccagctccccagggcagactcacgtgcccctctgaggctcagaaaatgcccagcccttcctcaaaatgagcagccacccatgactttgtgggctccttgttagcctgagaccaggctttgcagaggggcggggggtgaggcttagcccagaaggagaactgagcaggaaaccaaggctcttctctgtcccctgcccttcccctcctgccagggggaggctcaggttggtccccgagtgccgcctgtactcacaaaggctgcctttcctctagagtcactaattttacctgatgctatgagagaatcatattgaagatgaaatgtctaatatataatgtatattttaaagcagagactattttggtggataggtgggagggagcaaggggagtttgagggaatcagagcttgatgctactgtacagaactggacaggttgggccggcagtggtggggccagagggctctgtgctctaggagctaagccagcagcccccgagaggggacttggctgggcctttcctatgggcaaggcccagtgctcttcctgcccaccagggaccatggagcagtggcaccctatggggctatgatccctaggcctgggcctgggcctgcctgtggcccagagctaccctgggagtgtcagtgctagcagcacagctacctctggtggcaggagaagagaggcccagcacagcagcaggccaggccttcctgtccaggtctgcatggagcactcggtgacccagagcagggactggaggcacccccagccctgccccaggccacagcaggacaggccgggacaggcctcacccaaggccaaggctggcatcagccaatcattcagagctgaggccctgggcctagcctgcccttctcaggtgccaataccaccccagccctgcccttggcctcactttttcccagcaataagtggggttcaccacccgcctcgggaatactttccccttctaaatgggacttgctgttacctcaggaggctccttagtgcaaatatgaccctggtcagggctttgccaccgttgaagccctgcagaaggtgcaatgtaggggttctggggccacagaggagaggccacttcccaccaggacccccaacatgaagtctaggcctcaggggctcccgcccttcttcctccagcagcgggaactgccactgctctcccaggccctgttctggaggctaaccttggttcctggagagtgtgcccctccaccctccctccagcagccctgatcacaccatgagagccaggaacgggtcaccctgctgaagatcactctgtgccctgggggaggagccaagccctcaccccacaaggggcaggtgggggcttggttgctgacccggcccaagtccccacagagcaccttctgtagctccagcttgtctccctggcttctctttgaaggagaaaaatgtaaaatatgcactgagaaagccagccccgcctgcttagtcagccccggcagcagggcagccatgggaactcaggaaaagcaggaaccctttccaaaagcccagagatgccctgggctcagatctgtaattctcccaggagctgtgatagagcaggccacacaaagtccctacgcctccctgctgcctcccccagatgcatgtgatggcatcaccattccccaaattgaatatcagcatgcggcctgaccagggactctttagatgcatgaatttatttatatgaaggctctcacagagacacacacagcacttcagtagcatttgcattcctggttaaagaatcaccaatatttaaaataaaaactttcctgaaattgggactgtcatgttatccagaagggctggtacatccgcccaccatgtccccctgctgggtcaggagccaacacaggaccctgcgtgtgagcgtgcctgacatctcacgcacggccactccagagccggtccctgtccttggaaagctgtgaagccttgcgttgagttccttctcgatactgacggctccgtgctgacattctgagctctggagtcacaccagcgcaggggcgtggaggaactgaggtttggaaggaatgccaggtctcgcacagcttggcctcgagaaggtgagaggaaggcaaaggccagggaggggacccagagaggcctggcacacaaggcccaagcaccaccgtcaacacagcccagtccatacagaaatgggtttcatgcctgaaaagctttttacagaaagatgccgcctgtagccagtgacagccgcaaccctacaggcctcagttccttgcagaggtgaggggtagagagtcagcctctctcccttccagcagcgacccagcttccctccacttccaggtggtgctgggctcaccaagggagcactggtgggtgctctgaaaacccacaggatcccacctccaggcccacctgggtcccatctcactctcttcttctttcaccaattgctaacatagaccttgttgggatcacgatggcttcacaagccagctgttgggtttgctatgtcactgtggctcagtcacatccctgcgtgtatactgtctgcggggcacatatgtatccatttagagctaaaggaatcagtgtacactacagctaatcctaataaatccgatgttttcggaa

SEQ ID NO: 115240 - DNA, 3978 bp, Homo sapiens
agctttcaggctcctttaggactctgatctttcaatgatctgaagaaagctcatactgaaagggccctcatctttgtgtcccatggagccggagagcacagtggccgctatgaagagctggctcggatgctgatggggctggacctgctggtgttcgcccacgaccatgttggccacggacagagcgaaggggagaggatggtagtgtctgacttccacgttttcgtcagggatgtgttgcagcatgtggattccatgcagaaagactaccctgggcttcctgtcttccttctgggccactccatgggaggcgccatcgccatcctcacggccgcagagaggccgggccacttcgccggcatggtactcatttcgcctctggttcttgccaatcctgaatctgcaacaactttcaaggtccttgctgcgaaagtgctcaaccttgtgctgccaaacttgtccctcgggcccatcgactccagcgtgctctctcggaataagacagaggtcgacatttataactcagaccccctgatctgccgggcagggctgaaggtgtgcttcggcatccaactgctgaatgccgtctcacgggtggagcgcgccctccccaagctgactgtgcccttcctgctgctccagggctctgccgatcgcctatgtgacagcaaaggggcctacctgctcatggagttagccaagagccaggacaagactctcaagatttatgaaggtgcctaccatgttctccacaaggagcttcctgaagtcaccaactccgtcttccatgaaataaacatgtgggtctctcaaaggacagccacggcaggaactgcgtccccaccctgaatgcattggccggtgcccggctcatggtctgggggatgcaggcaggggaagggcagagatggcttctcagatatggcttgccaaaaaaaaaaaaaaaaaatcagaaattggagaaatccttaacacaattttctaaaaaataacagacatttttgttatacattagactatcagacactggacctaccttaatggttagacactttatgcaaaaaaagagaaaggtcccaggtgattttccacaaagaatgtgctaaaatgtccactgaaaacaaagccaagcctctgccctgcctctcccagctcccacaagggttccaggaattcctggtgttcccaggacaccagactgcaataactggaggcgcctccttcctgcccacccttcgctcacgccccagcgccctctctgaccagcctccgcttggtggccttcctctggccgtgtgatgaggtggttgctgtctccataggggccagctccccagggcagactcacgtgcccctctgaggctcagaaaatgcccagcccttcctcaaaatgagcagccacccatgactttgtgggctccttgttagcctgagaccaggctttgcagaggggcggggggtgaggcttagcccagaaggagaactgagcaggaaaccaaggctcttctctgtcccctgcccttcccctcctgccagggggaggctcaggttggtccccgagtgccgcctgtactcacaaaggctgcctttcctctagagtcactaattttacctgatgctatgagagaatcatattgaagatgaaatgtctaatatataatgtatattttaaagcagagactattttggtggataggtgggagggagcaaggggagtttgagggaatcagagcttgatgctactgtacagaactggacaggttgggccggcagtggtggggccagagggctctgtgctctaggagctaagccagcagcccccgagaggggacttggctgggcctttcctatgggcaaggcccagtgctcttcctgcccaccagggaccatggagcagtggcaccctatggggctatgatccctaggcctgggcctgggcctgcctgtggcccagagctaccctgggagtgtcagtgctagcagcacagctacctctggtggcaggagaagagaggcccagcacagcagcaggccaggccttcctgtccaggtctgcatggagcactcggtgacccagagcagggactggaggcacccccagccctgccccaggccacagcaggacaggccgggacaggcctcacccaaggccaaggctggcatcagccaatcattcagagctgaggccctgggcctagcctgcccttctcaggtgccaataccaccccagccctgcccttggcctcactttttcccagcaataagtggggttcaccacccgcctcgggaatactttccccttctaaatgggacttgctgttacctcaggaggctccttagtgcaaatatgaccctggtcagggctttgccaccgttgaagccctgcagaaggtgcaatgtaggggttctggggccacagaggagaggccacttcccaccaggacccccaacatgaagtctaggcctcaggggctcccgcccttcttcctccagcagcgggaactgccactgctctcccaggccctgttctggaggctaaccttggttcctggagagtgtgcccctccaccctccctccagcagccctgatcacaccatgagagccaggaacgggtcaccctgctgaagatcactctgtgccctgggggaggagccaagccctcaccccacaaggggcaggtgggggcttggttgctgacccggcccaagtccccacagagcaccttctgtagctccagcttgtctccctggcttctctttgaaggagaaaaatgtaaaatatgcactgagaaagccagccccgcctgcttagtcagccccggcagcagggcagccatgggaactcaggaaaagcaggaaccctttccaaaagcccagagatgccctgggctcagatctgtaattctcccaggagctgtgatagagcaggccacacaaagtccctacgcctccctgctgcctcccccagatgcatgtgatggcatcaccattccccaaattgaatatcagcatgcggcctgaccagggactctttagatgcatgaatttatttatatgaaggctctcacagagacacacacagcacttcagtagcatttgcattcctggttaaagaatcaccaatatttaaaataaaaactttcctgaaattgggactgtcatgttatccagaagggctggtacatccgcccaccatgtccccctgctgggtcaggagccaacacaggaccctgcgtgtgagcgtgcctgacatctcacgcacggccactccagagccggtccctgtccttggaaagctgtgaagccttgcgttgagttccttctcgatactgacggctccgtgctgacattctgagctctggagtcacaccagcgcaggggcgtggaggaactgaggtttggaaggaatgccaggtctcgcacagcttggcctcgagaaggtgagaggaaggcaaaggccagggaggggacccagagaggcctggcacacaaggcccaagcaccaccgtcaacacagcccagtccatacagaaatgggtttcatgcctgaaaagctttttacagaaagatgccgcctgtagccagtgacagccgcaaccctacaggcctcagttccttgcagaggtgaggggtagagagtcagcctctctcccttccagcagcgacccagcttccctccacttccaggtggtgctgggctcaccaagggagcactggtgggtgctctgaaaacccacaggatcccacctccaggcccacctgggtcccatctcactctcttcttctttcaccaattgctaacatagaccttgttgggatcacgatggcttcacaagccagctgttgggtttgctatgtcactgtggctcagtcacatccctgcgtgtatactgtctgcggggcacatatgtatccatttagagctaaaggaatcagtgtacactacagctaatcctaataaatccgatgttttcggaa

SEQ ID NO: 115241 - DNA, 4689 bp, Homo sapiens
ctccatctttctagtccccaccttccccggtgcagacacccggcgaagcccacccggttttcccagcggcatttccgatgacagcttcggggctacgtgtcctgtgctgtcggagacgcacaggaagcaaagtttgtgagaagccttgggggcgactttgccttgggcacccgcatttgtgcgtctgcgaggtgcctcggtgtgcgcggagctagtttcccagtttcccgggcccctcccttctccgagcccctctagcgatttgtttaggaaaagtgatgacatgaactagtagtggagaatcgcagcgccgctccccgccctggggagggaggggagccccggagagcctgccggtgggagctggaagcaggctcccggctgagcgccccagcccgaaaggcagggtctgggtgcgggaagagggctcggagctgccttcctgctgccttggggccgcccagatgagggaacagcccgatttgcctggttctgattctccaggctgtcgtggttgtggaatgcaaacgccagcacataatggaaacaggacctgaagacccttccagcatgccagaggaaagttcccccaggcggaccccgcagagcattccctaccaggacctccctcacctggtcaatgcagacggacagtacctcttctgcaggtactggaaacccacaggcacacccaaggccctcatctttgtgtcccatggagccggagagcacagtggccgctatgaagagctggctcggatgctgatggggctggacctgctggtgttcgcccacgaccatgttggccacggacagagcgaaggggagaggatggtagtgtctgacttccacgttttcgtcagggatgtgttgcagcatgtggattccatgcagaaagactaccctgggcttcctgtcttccttctgggccactccatgggaggcgccatcgccatcctcacggccgcagagaggccgggccacttcgccggcatggtactcatttcgcctctggttcttgccaatcctgaatctgcaacaactttcaaggactattcgaggattttgaaacacttgatggaaaaggcatcaagaatgttaaagttttggattccacgtcctttttgggtccttgctgcgaaagtgctcaaccttgtgctgccaaacttgtccctcgggcccatcgactccagcgtgctctctcggaataagacagaggtcgacatttataactcagaccccctgatctgccgggcagggctgaaggtgtgcttcggcatccaactgctgaatgccgtctcacgggtggagcgcgccctccccaagctgactgtgcccttcctgctgctccagggctctgccgatcgcctatgtgacagcaaaggggcctacctgctcatggagttagccaagagccaggacaagactctcaagatttatgaaggtgcctaccatgttctccacaaggagcttcctgaagtcaccaactccgtcttccatgaaataaacatgtgggtctctcaaaggacagccacggcaggaactgcgtccccaccctgaatgcattggccggtgcccggctcatggtctgggggatgcaggcaggggaagggcagagatggcttctcagatatggcttgccaaaaaaaaaaaaaaaaaatcagaaattggagaaatccttaacacaattttctaaaaaataacagacatttttgttatacattagactatcagacactggacctaccttaatggttagacactttatgcaaaaaaagagaaaggtcccaggtgattttccacaaagaatgtgctaaaatgtccactgaaaacaaagccaagcctctgccctgcctctcccagctcccacaagggttccaggaattcctggtgttcccaggacaccagactgcaataactggaggcgcctccttcctgcccacccttcgctcacgccccagcgccctctctgaccagcctccgcttggtggccttcctctggccgtgtgatgaggtggttgctgtctccataggggccagctccccagggcagactcacgtgcccctctgaggctcagaaaatgcccagcccttcctcaaaatgagcagccacccatgactttgtgggctccttgttagcctgagaccaggctttgcagaggggcggggggtgaggcttagcccagaaggagaactgagcaggaaaccaaggctcttctctgtcccctgcccttcccctcctgccagggggaggctcaggttggtccccgagtgccgcctgtactcacaaaggctgcctttcctctagagtcactaattttacctgatgctatgagagaatcatattgaagatgaaatgtctaatatataatgtatattttaaagcagagactattttggtggataggtgggagggagcaaggggagtttgagggaatcagagcttgatgctactgtacagaactggacaggttgggccggcagtggtggggccagagggctctgtgctctaggagctaagccagcagcccccgagaggggacttggctgggcctttcctatgggcaaggcccagtgctcttcctgcccaccagggaccatggagcagtggcaccctatggggctatgatccctaggcctgggcctgggcctgcctgtggcccagagctaccctgggagtgtcagtgctagcagcacagctacctctggtggcaggagaagagaggcccagcacagcagcaggccaggccttcctgtccaggtctgcatggagcactcggtgacccagagcagggactggaggcacccccagccctgccccaggccacagcaggacaggccgggacaggcctcacccaaggccaaggctggcatcagccaatcattcagagctgaggccctgggcctagcctgcccttctcaggtgccaataccaccccagccctgcccttggcctcactttttcccagcaataagtggggttcaccacccgcctcgggaatactttccccttctaaatgggacttgctgttacctcaggaggctccttagtgcaaatatgaccctggtcagggctttgccaccgttgaagccctgcagaaggtgcaatgtaggggttctggggccacagaggagaggccacttcccaccaggacccccaacatgaagtctaggcctcaggggctcccgcccttcttcctccagcagcgggaactgccactgctctcccaggccctgttctggaggctaaccttggttcctggagagtgtgcccctccaccctccctccagcagccctgatcacaccatgagagccaggaacgggtcaccctgctgaagatcactctgtgccctgggggaggagccaagccctcaccccacaaggggcaggtgggggcttggttgctgacccggcccaagtccccacagagcaccttctgtagctccagcttgtctccctggcttctctttgaaggagaaaaatgtaaaatatgcactgagaaagccagccccgcctgcttagtcagccccggcagcagggcagccatgggaactcaggaaaagcaggaaccctttccaaaagcccagagatgccctgggctcagatctgtaattctcccaggagctgtgatagagcaggccacacaaagtccctacgcctccctgctgcctcccccagatgcatgtgatggcatcaccattccccaaattgaatatcagcatgcggcctgaccagggactctttagatgcatgaatttatttatatgaaggctctcacagagacacacacagcacttcagtagcatttgcattcctggttaaagaatcaccaatatttaaaataaaaactttcctgaaattgggactgtcatgttatccagaagggctggtacatccgcccaccatgtccccctgctgggtcaggagccaacacaggaccctgcgtgtgagcgtgcctgacatctcacgcacggccactccagagccggtccctgtccttggaaagctgtgaagccttgcgttgagttccttctcgatactgacggctccgtgctgacattctgagctctggagtcacaccagcgcaggggcgtggaggaactgaggtttggaaggaatgccaggtctcgcacagcttggcctcgagaaggtgagaggaaggcaaaggccagggaggggacccagagaggcctggcacacaaggcccaagcaccaccgtcaacacagcccagtccatacagaaatgggtttcatgcctgaaaagctttttacagaaagatgccgcctgtagccagtgacagccgcaaccctacaggcctcagttccttgcagaggtgaggggtagagagtcagcctctctcccttccagcagcgacccagcttccctccacttccaggtggtgctgggctcaccaagggagcactggtgggtgctctgaaaacccacaggatcccacctccaggcccacctgggtcccatctcactctcttcttctttcaccaattgctaacatagaccttgttgggatcacgatggcttcacaagccagctgttgggtttgctatgtcactgtggctcagtcacatccctgcgtgtatactgtctgcggggcacatatgtatccatttagagctaaaggaatcagtgtacactacagctaatcctaataaatccgatgttttcggaa

SEQ ID NO: 115242 - DNA, 4297 bp, Homo sapiens
cgcccccgccgcgagcccggcccagggataaagtggcggcgcagacgccgcaccctgtcgccgcgaagccggtcgcgcgcagctcgtcccggccctggcccgccgcaaacgaggatccgctgcgctcggggaacgcgacagcggcgctcgtggccccggacctgaagacccttccagcatgccagaggaaagttcccccaggcggaccccgcagagcattccctaccaggacctccctcacctggtcaatgcagacggacagtacctcttctgcaggtactggaaacccacaggcacacccaaggccctcatctttgtgtcccatggagccggagagcacagtggccgctatgaagagctggctcggatgctgatggggctggacctgctggtgttcgcccacgaccatgttggccacggacagagcgaaggggagaggatggtagtgtctgacttccacgttttcgtcagggatgtgttgcagcatgtggattccatgcagaaagactaccctgggcttcctgtcttccttctgggccactccatgggaggcgccatcgccatcctcacggccgcagagaggccgggccacttcgccggcatggtactcatttcgcctctggttcttgccaatcctgaatctgcaacaactttcaaggactattcgaggattttgaaacacttgatggaaaaggcatcaagaatgttaaagttttggattccacgtcctttttgggtccttgctgcgaaagtgctcaaccttgtgctgccaaacttgtccctcgggcccatcgactccagcgtgctctctcggaataagacagaggtcgacatttataactcagaccccctgatctgccgggcagggctgaaggtgtgcttcggcatccaactgctgaatgccgtctcacgggtggagcgcgccctccccaagctgactgtgcccttcctgctgctccagggctctgccgatcgcctatgtgacagcaaaggggcctacctgctcatggagttagccaagagccaggacaagactctcaagatttatgaaggtgcctaccatgttctccacaaggagcttcctgaagtcaccaactccgtcttccatgaaataaacatgtgggtctctcaaaggacagccacggcaggaactgcgtccccaccctgaatgcattggccggtgcccggctcatggtctgggggatgcaggcaggggaagggcagagatggcttctcagatatggcttgccaaaaaaaaaaaaaaaaaatcagaaattggagaaatccttaacacaattttctaaaaaataacagacatttttgttatacattagactatcagacactggacctaccttaatggttagacactttatgcaaaaaaagagaaaggtcccaggtgattttccacaaagaatgtgctaaaatgtccactgaaaacaaagccaagcctctgccctgcctctcccagctcccacaagggttccaggaattcctggtgttcccaggacaccagactgcaataactggaggcgcctccttcctgcccacccttcgctcacgccccagcgccctctctgaccagcctccgcttggtggccttcctctggccgtgtgatgaggtggttgctgtctccataggggccagctccccagggcagactcacgtgcccctctgaggctcagaaaatgcccagcccttcctcaaaatgagcagccacccatgactttgtgggctccttgttagcctgagaccaggctttgcagaggggcggggggtgaggcttagcccagaaggagaactgagcaggaaaccaaggctcttctctgtcccctgcccttcccctcctgccagggggaggctcaggttggtccccgagtgccgcctgtactcacaaaggctgcctttcctctagagtcactaattttacctgatgctatgagagaatcatattgaagatgaaatgtctaatatataatgtatattttaaagcagagactattttggtggataggtgggagggagcaaggggagtttgagggaatcagagcttgatgctactgtacagaactggacaggttgggccggcagtggtggggccagagggctctgtgctctaggagctaagccagcagcccccgagaggggacttggctgggcctttcctatgggcaaggcccagtgctcttcctgcccaccagggaccatggagcagtggcaccctatggggctatgatccctaggcctgggcctgggcctgcctgtggcccagagctaccctgggagtgtcagtgctagcagcacagctacctctggtggcaggagaagagaggcccagcacagcagcaggccaggccttcctgtccaggtctgcatggagcactcggtgacccagagcagggactggaggcacccccagccctgccccaggccacagcaggacaggccgggacaggcctcacccaaggccaaggctggcatcagccaatcattcagagctgaggccctgggcctagcctgcccttctcaggtgccaataccaccccagccctgcccttggcctcactttttcccagcaataagtggggttcaccacccgcctcgggaatactttccccttctaaatgggacttgctgttacctcaggaggctccttagtgcaaatatgaccctggtcagggctttgccaccgttgaagccctgcagaaggtgcaatgtaggggttctggggccacagaggagaggccacttcccaccaggacccccaacatgaagtctaggcctcaggggctcccgcccttcttcctccagcagcgggaactgccactgctctcccaggccctgttctggaggctaaccttggttcctggagagtgtgcccctccaccctccctccagcagccctgatcacaccatgagagccaggaacgggtcaccctgctgaagatcactctgtgccctgggggaggagccaagccctcaccccacaaggggcaggtgggggcttggttgctgacccggcccaagtccccacagagcaccttctgtagctccagcttgtctccctggcttctctttgaaggagaaaaatgtaaaatatgcactgagaaagccagccccgcctgcttagtcagccccggcagcagggcagccatgggaactcaggaaaagcaggaaccctttccaaaagcccagagatgccctgggctcagatctgtaattctcccaggagctgtgatagagcaggccacacaaagtccctacgcctccctgctgcctcccccagatgcatgtgatggcatcaccattccccaaattgaatatcagcatgcggcctgaccagggactctttagatgcatgaatttatttatatgaaggctctcacagagacacacacagcacttcagtagcatttgcattcctggttaaagaatcaccaatatttaaaataaaaactttcctgaaattgggactgtcatgttatccagaagggctggtacatccgcccaccatgtccccctgctgggtcaggagccaacacaggaccctgcgtgtgagcgtgcctgacatctcacgcacggccactccagagccggtccctgtccttggaaagctgtgaagccttgcgttgagttccttctcgatactgacggctccgtgctgacattctgagctctggagtcacaccagcgcaggggcgtggaggaactgaggtttggaaggaatgccaggtctcgcacagcttggcctcgagaaggtgagaggaaggcaaaggccagggaggggacccagagaggcctggcacacaaggcccaagcaccaccgtcaacacagcccagtccatacagaaatgggtttcatgcctgaaaagctttttacagaaagatgccgcctgtagccagtgacagccgcaaccctacaggcctcagttccttgcagaggtgaggggtagagagtcagcctctctcccttccagcagcgacccagcttccctccacttccaggtggtgctgggctcaccaagggagcactggtgggtgctctgaaaacccacaggatcccacctccaggcccacctgggtcccatctcactctcttcttctttcaccaattgctaacatagaccttgttgggatcacgatggcttcacaagccagctgttgggtttgctatgtcactgtggctcagtcacatccctgcgtgtatactgtctgcggggcacatatgtatccatttagagctaaaggaatcagtgtacactacagctaatcctaataaatccgatgttttcggaa

SEQ ID NO: 115243 - DNA, 4521 bp, Homo sapiens
ctccatctttctagtccccaccttccccggtgcagacacccggcgaagcccacccggttttcccagcggcatttccgatgacagcttcggggctacgtgtcctgtgctgtcggagacgcacaggaagcaaagtttgtgagaagccttgggggcgactttgccttgggcacccgcatttgtgcgtctgcgaggtgcctcggtgtgcgcggagctagtttcccagtttcccgggcccctcccttctccgagcccctctagcgatttgtttaggaaaagtgatgacatgaactagtagtggagaatcgcagcgccgctccccgccctggggagggaggggagccccggagagcctgccggtgggagctggaagcaggctcccggctgagcgccccagcccgaaaggcagggtctgggtgcgggaagagggctcggagctgccttcctgctgccttggggccgcccagatgagggaacagcccgatttgcctggttctgattctccaggctgtcgtggttgtggaatgcaaacgccagcacataatggaaacaggacctgaagacccttccagcatgccagaggaaagttcccccaggcggaccccgcagagcattccctaccaggacctccctcacctggtcaatgcagacggacagtacctcttctgcaggtactggaaacccacaggcacacccaaggccctcatctttgtgtcccatggagccggagagcacagtggccgctatgaagagctggctcggatgctgatggggctggacctgctggtgttcgcccacgaccatgttggccacggacagagcgaaggggagaggatggtagtgtctgacttccacgttttcgtcagggatgtgttgcagcatgtggattccatgcagaaagactaccctgggcttcctgtcttccttctgggccactccatgggaggcgccatcgccatcctcacggccgcagagaggccgggccacttcgccggcatggtactcatttcgcctctggttcttgccaatcctgaatctgcaacaactttcaaggtcgacatttataactcagaccccctgatctgccgggcagggctgaaggtgtgcttcggcatccaactgctgaatgccgtctcacgggtggagcgcgccctccccaagctgactgtgcccttcctgctgctccagggctctgccgatcgcctatgtgacagcaaaggggcctacctgctcatggagttagccaagagccaggacaagactctcaagatttatgaaggtgcctaccatgttctccacaaggagcttcctgaagtcaccaactccgtcttccatgaaataaacatgtgggtctctcaaaggacagccacggcaggaactgcgtccccaccctgaatgcattggccggtgcccggctcatggtctgggggatgcaggcaggggaagggcagagatggcttctcagatatggcttgccaaaaaaaaaaaaaaaaaatcagaaattggagaaatccttaacacaattttctaaaaaataacagacatttttgttatacattagactatcagacactggacctaccttaatggttagacactttatgcaaaaaaagagaaaggtcccaggtgattttccacaaagaatgtgctaaaatgtccactgaaaacaaagccaagcctctgccctgcctctcccagctcccacaagggttccaggaattcctggtgttcccaggacaccagactgcaataactggaggcgcctccttcctgcccacccttcgctcacgccccagcgccctctctgaccagcctccgcttggtggccttcctctggccgtgtgatgaggtggttgctgtctccataggggccagctccccagggcagactcacgtgcccctctgaggctcagaaaatgcccagcccttcctcaaaatgagcagccacccatgactttgtgggctccttgttagcctgagaccaggctttgcagaggggcggggggtgaggcttagcccagaaggagaactgagcaggaaaccaaggctcttctctgtcccctgcccttcccctcctgccagggggaggctcaggttggtccccgagtgccgcctgtactcacaaaggctgcctttcctctagagtcactaattttacctgatgctatgagagaatcatattgaagatgaaatgtctaatatataatgtatattttaaagcagagactattttggtggataggtgggagggagcaaggggagtttgagggaatcagagcttgatgctactgtacagaactggacaggttgggccggcagtggtggggccagagggctctgtgctctaggagctaagccagcagcccccgagaggggacttggctgggcctttcctatgggcaaggcccagtgctcttcctgcccaccagggaccatggagcagtggcaccctatggggctatgatccctaggcctgggcctgggcctgcctgtggcccagagctaccctgggagtgtcagtgctagcagcacagctacctctggtggcaggagaagagaggcccagcacagcagcaggccaggccttcctgtccaggtctgcatggagcactcggtgacccagagcagggactggaggcacccccagccctgccccaggccacagcaggacaggccgggacaggcctcacccaaggccaaggctggcatcagccaatcattcagagctgaggccctgggcctagcctgcccttctcaggtgccaataccaccccagccctgcccttggcctcactttttcccagcaataagtggggttcaccacccgcctcgggaatactttccccttctaaatgggacttgctgttacctcaggaggctccttagtgcaaatatgaccctggtcagggctttgccaccgttgaagccctgcagaaggtgcaatgtaggggttctggggccacagaggagaggccacttcccaccaggacccccaacatgaagtctaggcctcaggggctcccgcccttcttcctccagcagcgggaactgccactgctctcccaggccctgttctggaggctaaccttggttcctggagagtgtgcccctccaccctccctccagcagccctgatcacaccatgagagccaggaacgggtcaccctgctgaagatcactctgtgccctgggggaggagccaagccctcaccccacaaggggcaggtgggggcttggttgctgacccggcccaagtccccacagagcaccttctgtagctccagcttgtctccctggcttctctttgaaggagaaaaatgtaaaatatgcactgagaaagccagccccgcctgcttagtcagccccggcagcagggcagccatgggaactcaggaaaagcaggaaccctttccaaaagcccagagatgccctgggctcagatctgtaattctcccaggagctgtgatagagcaggccacacaaagtccctacgcctccctgctgcctcccccagatgcatgtgatggcatcaccattccccaaattgaatatcagcatgcggcctgaccagggactctttagatgcatgaatttatttatatgaaggctctcacagagacacacacagcacttcagtagcatttgcattcctggttaaagaatcaccaatatttaaaataaaaactttcctgaaattgggactgtcatgttatccagaagggctggtacatccgcccaccatgtccccctgctgggtcaggagccaacacaggaccctgcgtgtgagcgtgcctgacatctcacgcacggccactccagagccggtccctgtccttggaaagctgtgaagccttgcgttgagttccttctcgatactgacggctccgtgctgacattctgagctctggagtcacaccagcgcaggggcgtggaggaactgaggtttggaaggaatgccaggtctcgcacagcttggcctcgagaaggtgagaggaaggcaaaggccagggaggggacccagagaggcctggcacacaaggcccaagcaccaccgtcaacacagcccagtccatacagaaatgggtttcatgcctgaaaagctttttacagaaagatgccgcctgtagccagtgacagccgcaaccctacaggcctcagttccttgcagaggtgaggggtagagagtcagcctctctcccttccagcagcgacccagcttccctccacttccaggtggtgctgggctcaccaagggagcactggtgggtgctctgaaaacccacaggatcccacctccaggcccacctgggtcccatctcactctcttcttctttcaccaattgctaacatagaccttgttgggatcacgatggcttcacaagccagctgttgggtttgctatgtcactgtggctcagtcacatccctgcgtgtatactgtctgcggggcacatatgtatccatttagagctaaaggaatcagtgtacactacagctaatcctaataaatccgatgttttcggaa

SEQ ID NO: 115244 - DNA, 3806 bp, Homo sapiens
cagaatagggcttgctgtaattctctcctggaggcaggctctctctctggctctctgttcccccttccccaacctctgtgaaaccacttcaaggatggctcaagctgcgctgatccttgaggcgccaacagcctaagctgtcagcatcttctccagagcctggaagtagaggccttgtcactttttggtataaaagttttgggttaagaggtgccagcagcagaaacatatgttcaaggatgaaggtccttgctgcgaaagtgctcaaccttgtgctgccaaacttgtccctcgggcccatcgactccagcgtgctctctcggaataagacagaggtcgacatttataactcagaccccctgatctgccgggcagggctgaaggtgtgcttcggcatccaactgctgaatgccgtctcacgggtggagcgcgccctccccaagctgactgtgcccttcctgctgctccagggctctgccgatcgcctatgtgacagcaaaggggcctacctgctcatggagttagccaagagccaggacaagactctcaagatttatgaaggtgcctaccatgttctccacaaggagcttcctgaagtcaccaactccgtcttccatgaaataaacatgtgggtctctcaaaggacagccacggcaggaactgcgtccccaccctgaatgcattggccggtgcccggctcatggtctgggggatgcaggcaggggaagggcagagatggcttctcagatatggcttgccaaaaaaaaaaaaaaaaaatcagaaattggagaaatccttaacacaattttctaaaaaataacagacatttttgttatacattagactatcagacactggacctaccttaatggttagacactttatgcaaaaaaagagaaaggtcccaggtgattttccacaaagaatgtgctaaaatgtccactgaaaacaaagccaagcctctgccctgcctctcccagctcccacaagggttccaggaattcctggtgttcccaggacaccagactgcaataactggaggcgcctccttcctgcccacccttcgctcacgccccagcgccctctctgaccagcctccgcttggtggccttcctctggccgtgtgatgaggtggttgctgtctccataggggccagctccccagggcagactcacgtgcccctctgaggctcagaaaatgcccagcccttcctcaaaatgagcagccacccatgactttgtgggctccttgttagcctgagaccaggctttgcagaggggcggggggtgaggcttagcccagaaggagaactgagcaggaaaccaaggctcttctctgtcccctgcccttcccctcctgccagggggaggctcaggttggtccccgagtgccgcctgtactcacaaaggctgcctttcctctagagtcactaattttacctgatgctatgagagaatcatattgaagatgaaatgtctaatatataatgtatattttaaagcagagactattttggtggataggtgggagggagcaaggggagtttgagggaatcagagcttgatgctactgtacagaactggacaggttgggccggcagtggtggggccagagggctctgtgctctaggagctaagccagcagcccccgagaggggacttggctgggcctttcctatgggcaaggcccagtgctcttcctgcccaccagggaccatggagcagtggcaccctatggggctatgatccctaggcctgggcctgggcctgcctgtggcccagagctaccctgggagtgtcagtgctagcagcacagctacctctggtggcaggagaagagaggcccagcacagcagcaggccaggccttcctgtccaggtctgcatggagcactcggtgacccagagcagggactggaggcacccccagccctgccccaggccacagcaggacaggccgggacaggcctcacccaaggccaaggctggcatcagccaatcattcagagctgaggccctgggcctagcctgcccttctcaggtgccaataccaccccagccctgcccttggcctcactttttcccagcaataagtggggttcaccacccgcctcgggaatactttccccttctaaatgggacttgctgttacctcaggaggctccttagtgcaaatatgaccctggtcagggctttgccaccgttgaagccctgcagaaggtgcaatgtaggggttctggggccacagaggagaggccacttcccaccaggacccccaacatgaagtctaggcctcaggggctcccgcccttcttcctccagcagcgggaactgccactgctctcccaggccctgttctggaggctaaccttggttcctggagagtgtgcccctccaccctccctccagcagccctgatcacaccatgagagccaggaacgggtcaccctgctgaagatcactctgtgccctgggggaggagccaagccctcaccccacaaggggcaggtgggggcttggttgctgacccggcccaagtccccacagagcaccttctgtagctccagcttgtctccctggcttctctttgaaggagaaaaatgtaaaatatgcactgagaaagccagccccgcctgcttagtcagccccggcagcagggcagccatgggaactcaggaaaagcaggaaccctttccaaaagcccagagatgccctgggctcagatctgtaattctcccaggagctgtgatagagcaggccacacaaagtccctacgcctccctgctgcctcccccagatgcatgtgatggcatcaccattccccaaattgaatatcagcatgcggcctgaccagggactctttagatgcatgaatttatttatatgaaggctctcacagagacacacacagcacttcagtagcatttgcattcctggttaaagaatcaccaatatttaaaataaaaactttcctgaaattgggactgtcatgttatccagaagggctggtacatccgcccaccatgtccccctgctgggtcaggagccaacacaggaccctgcgtgtgagcgtgcctgacatctcacgcacggccactccagagccggtccctgtccttggaaagctgtgaagccttgcgttgagttccttctcgatactgacggctccgtgctgacattctgagctctggagtcacaccagcgcaggggcgtggaggaactgaggtttggaaggaatgccaggtctcgcacagcttggcctcgagaaggtgagaggaaggcaaaggccagggaggggacccagagaggcctggcacacaaggcccaagcaccaccgtcaacacagcccagtccatacagaaatgggtttcatgcctgaaaagctttttacagaaagatgccgcctgtagccagtgacagccgcaaccctacaggcctcagttccttgcagaggtgaggggtagagagtcagcctctctcccttccagcagcgacccagcttccctccacttccaggtggtgctgggctcaccaagggagcactggtgggtgctctgaaaacccacaggatcccacctccaggcccacctgggtcccatctcactctcttcttctttcaccaattgctaacatagaccttgttgggatcacgatggcttcacaagccagctgttgggtttgctatgtcactgtggctcagtcacatccctgcgtgtatactgtctgcggggcacatatgtatccatttagagctaaaggaatcagtgtacactacagctaatcctaataaatccgatgttttcggaa

SEQ ID NO: 115245 - DNA, 2804 bp, Homo sapiens
  misc_feature (2475)..(2475): n is a, c, g, or t
ctccatctttctagtccccaccttccccggtgcagacacccggcgaagcccacccggttttcccagcggcatttccgatgacagcttcggggctacgtgtcctgtgctgtcggagacgcacaggaagcaaagtttgtgagaagccttgggggcgactttgccttgggcacccgcatttgtgcgtctgcgaggtgcctcggtgtgcgcggagctagtttcccagtttcccgggcccctcccttctccgagcccctctagcgatttgtttaggaaaagtgatgacatgaactagtagtggagaatcgcagcgccgctccccgccctggggagggaggggagccccggagagcctgccggtgggagctggaagcaggctcccggctgagcgccccagcccgaaaggcagggtctgggtgcgggaagagggctcggagctgccttcctgctgccttggggccgcccagatgagggaacagcccgatttgcctggttctgattctccaggctgtcgtggttgtggaatgcaaacgccagcacataatggaaacaggacctgaagacccttccagcatgccagaggaaagttcccccaggcggaccccgcagagcattccctaccaggacctccctcacctggtcaatgcagacggacagtacctcttctgcaggtactggaaacccacaggcacacccaaggccctcatctttgtgtcccatggagccggagagcacagtggccgctatgaagagctggctcggatgctgatggggctggacctgctggtgttcgcccacgaccatgttggccacggacagagcgaaggggagaggatggtagtgtctgacttccacgttttcgtcagggatgtgttgcagcatgtggattccatgcagaaagactaccctgggcttcctgtcttccttctgggccactccatgggaggcgccatcgccatcctcacggccgcagagaggccgggccacttcgccggcatggtactcatttcgcctctggttcttgccaatcctgaatctgcaacaactttcaaggtccttgctgcgaaagtgctcaaccttgtgctgccaaacttgtccctcgggcccatcgactccagcgtgctctctcggaataagacagaggtcgacatttataactcagaccccctgatctgccgggcagggctgaaggtgtgcttcggcatccaactgctgaatgccgtctcacgggtggagcgcgccctccccaagctgactgtgcccttcctgctgctccagggctctgccgatcgcctatgtgacagcaaaggggcctacctgctcatggagttagccaagagccaggacaagactctcaagatttatgaaggtgcctaccatgttctccacaaggagcttcctgaagtcaccaactccgtcttccatgaaataaacatgtgggtctctcaaaggacagccacggcaggaactgcgtccccaccctgaatgcattggccggtgcccggctcatggtctgggggatgcaggcaggggaagggcagagatggcttctcagatatggcttgccaaaaaaaaaaaaaaaaaatcagaaattggagaaatccttaacacaattttctaaaaaataacagacatttttgttatacattagactatcagacactggacctaccttaatggttagacactttatgcaaaaaaagagaaaggtcccaggtgattttccacaaagaatgtgctaaaatgtccactgaaaacaaagccaagcctctgccctgcctctcccagctcccacaagggttccaggaattcctggtgttcccaggacaccagactgcaataactggaggcgcctccttcctgcccacccttcgctcacgccccagcgccctctctgaccagcctccgcttggtggccttcctctggccgtgtgatgaggtggttgctgtctccataggggccagctccccagggcagactcacgtgcccctctgaggctcagaaaatgcccagcccttcctcaaaatgagcagccacccatgactttgtgggctccttgttagcctgagaccaggctttgcagaggggcggggggtgaggcttagcccagaaggagaactgagcaggaaaccaaggctcttctctgtcccctgcccttcccctcctgccagggggaggctcaggttggtccccgagtgccgcctgtactcacaaaggctgcctttcctctagagtcactaattttacctgatgctatgagagaatcatattgaagatgaaatgtctaatatataatgtatattttaaagcagagatggcttctcagatatggcttgcaaaaaaaaaaaaaaaaatcagaaattggagaaatccttaacacaattttctaaaaaataacagacatttttgttatacattagactatcagacactggacctaccttaatggttagacactttatgcaaaaaaagagaanggtcccaggtgattttccacaaagaatggtgctaaagggtccatctgggaaaacaaagccaagcctctgccctgcctctcccagctcccacagggttccaggaattcctggggtccccaggacaccagagtggaaataagggaggcgcctctttctggccaccttcgtcaggcccaggccttctctgacagctccggttggggctcctctgaccggtgagagggggtggcgctccctaggggcagccccaagggatcaagggcctcgaggtagaaaggccgctctaaatgagagcccagattggggcctggaccggaccgtgcaggcgg

SEQ ID NO: 115246 - DNA, 3855 bp, Homo sapiens
tcaccccgggtcaatctcgggcgaattgggccagagcttggattaaaaagttctccggggtggttgaaagaaaatcaaaagttaaagccatggaaccacaagaggaaagtgtttctagaaggtgacagtgagcagcttatgaatgaccagcacagtgtcccctgccacagcaatggaggtccctggagacctcgccaggctagccaccgtgggttggcgggagtggaagtcggcttgggatgagctgaggaccccgtggaggtcaggatgtgaggccgggagtggaaccccctcttttgagaaggttgcctgactcagagacacagaaacaggtccagggatggggagagatgtggagtgagggaaggtttgcatttgagaaaggaagttcgagaacacactgggacattgtaacacatttgaaccatcttctgatagaaaggtgttggcctcctaataatgggaggtcagggccaggtcctcgggcatagggagagggtccggagaatgctgcagacccctgcccactgcccacggtctccgctccctgcacctgcctctgatggtgcagctctgattccgtgtctctcctcattgcagatttatgaaggtgcctaccatgttctccacaaggagcttcctgaagtcaccaactccgtcttccatgaaataaacatgtgggtctctcaaaggacagccacggcaggaactgcgtccccaccctgaatgcattggccggtgcccggctcatggtctgggggatgcaggcaggggaagggcagagatggcttctcagatatggcttgccaaaaaaaaaaaaaaaaaatcagaaattggagaaatccttaacacaattttctaaaaaataacagacatttttgttatacattagactatcagacactggacctaccttaatggttagacactttatgcaaaaaaagagaaaggtcccaggtgattttccacaaagaatgtgctaaaatgtccactgaaaacaaagccaagcctctgccctgcctctcccagctcccacaagggttccaggaattcctggtgttcccaggacaccagactgcaataactggaggcgcctccttcctgcccacccttcgctcacgccccagcgccctctctgaccagcctccgcttggtggccttcctctggccgtgtgatgaggtggttgctgtctccataggggccagctccccagggcagactcacgtgcccctctgaggctcagaaaatgcccagcccttcctcaaaatgagcagccacccatgactttgtgggctccttgttagcctgagaccaggctttgcagaggggcggggggtgaggcttagcccagaaggagaactgagcaggaaaccaaggctcttctctgtcccctgcccttcccctcctgccagggggaggctcaggttggtccccgagtgccgcctgtactcacaaaggctgcctttcctctagagtcactaattttacctgatgctatgagagaatcatattgaagatgaaatgtctaatatataatgtatattttaaagcagagactattttggtggataggtgggagggagcaaggggagtttgagggaatcagagcttgatgctactgtacagaactggacaggttgggccggcagtggtggggccagagggctctgtgctctaggagctaagccagcagcccccgagaggggacttggctgggcctttcctatgggcaaggcccagtgctcttcctgcccaccagggaccatggagcagtggcaccctatggggctatgatccctaggcctgggcctgggcctgcctgtggcccagagctaccctgggagtgtcagtgctagcagcacagctacctctggtggcaggagaagagaggcccagcacagcagcaggccaggccttcctgtccaggtctgcatggagcactcggtgacccagagcagggactggaggcacccccagccctgccccaggccacagcaggacaggccgggacaggcctcacccaaggccaaggctggcatcagccaatcattcagagctgaggccctgggcctagcctgcccttctcaggtgccaataccaccccagccctgcccttggcctcactttttcccagcaataagtggggttcaccacccgcctcgggaatactttccccttctaaatgggacttgctgttacctcaggaggctccttagtgcaaatatgaccctggtcagggctttgccaccgttgaagccctgcagaaggtgcaatgtaggggttctggggccacagaggagaggccacttcccaccaggacccccaacatgaagtctaggcctcaggggctcccgcccttcttcctccagcagcgggaactgccactgctctcccaggccctgttctggaggctaaccttggttcctggagagtgtgcccctccaccctccctccagcagccctgatcacaccatgagagccaggaacgggtcaccctgctgaagatcactctgtgccctgggggaggagccaagccctcaccccacaaggggcaggtgggggcttggttgctgacccggcccaagtccccacagagcaccttctgtagctccagcttgtctccctggcttctctttgaaggagaaaaatgtaaaatatgcactgagaaagccagccccgcctgcttagtcagccccggcagcagggcagccatgggaactcaggaaaagcaggaaccctttccaaaagcccagagatgccctgggctcagatctgtaattctcccaggagctgtgatagagcaggccacacaaagtccctacgcctccctgctgcctcccccagatgcatgtgatggcatcaccattccccaaattgaatatcagcatgcggcctgaccagggactctttagatgcatgaatttatttatatgaaggctctcacagagacacacacagcacttcagtagcatttgcattcctggttaaagaatcaccaatatttaaaataaaaactttcctgaaattgggactgtcatgttatccagaagggctggtacatccgcccaccatgtccccctgctgggtcaggagccaacacaggaccctgcgtgtgagcgtgcctgacatctcacgcacggccactccagagccggtccctgtccttggaaagctgtgaagccttgcgttgagttccttctcgatactgacggctccgtgctgacattctgagctctggagtcacaccagcgcaggggcgtggaggaactgaggtttggaaggaatgccaggtctcgcacagcttggcctcgagaaggtgagaggaaggcaaaggccagggaggggacccagagaggcctggcacacaaggcccaagcaccaccgtcaacacagcccagtccatacagaaatgggtttcatgcctgaaaagctttttacagaaagatgccgcctgtagccagtgacagccgcaaccctacaggcctcagttccttgcagaggtgaggggtagagagtcagcctctctcccttccagcagcgacccagcttccctccacttccaggtggtgctgggctcaccaagggagcactggtgggtgctctgaaaacccacaggatcccacctccaggcccacctgggtcccatctcactctcttcttctttcaccaattgctaacatagaccttgttgggatcacgatggcttcacaagccagctgttgggtttgctatgtcactgtggctcagtcacatccctgcgtgtatactgtctgcggggcacatatgtatccatttagagctaaaggaatcagtgtacactacagctaatcctaataaatccgatgttttcggaa

SEQ ID NO: 115247 - DNA, 3526 bp, Homo sapiens
cactacgaaagatcgagaataaagatagagagcgagcggcgggggggggatttgagtcgacatttataactcagaccccctgatctgccgggcagggctgaaggtgtgcttcggcatccaactgctgaatgccgtctcacgggtggagcgcgccctccccaagctgactgtgcccttcctgctgctccagggctctgccgatcgcctatgtgacagcaaaggggcctacctgctcatggagttagccaagagccaggacaagactctcaagatttatgaaggtgcctaccatgttctccacaaggagcttcctgaagtcaccaactccgtcttccatgaaataaacatgtgggtctctcaaaggacagccacggcaggaactgcgtccccaccctgaatgcattggccggtgcccggctcatggtctgggggatgcaggcaggggaagggcagagatggcttctcagatatggcttgccaaaaaaaaaaaaaaaaaatcagaaattggagaaatccttaacacaattttctaaaaaataacagacatttttgttatacattagactatcagacactggacctaccttaatggttagacactttatgcaaaaaaagagaaaggtcccaggtgattttccacaaagaatgtgctaaaatgtccactgaaaacaaagccaagcctctgccctgcctctcccagctcccacaagggttccaggaattcctggtgttcccaggacaccagactgcaataactggaggcgcctccttcctgcccacccttcgctcacgccccagcgccctctctgaccagcctccgcttggtggccttcctctggccgtgtgatgaggtggttgctgtctccataggggccagctccccagggcagactcacgtgcccctctgaggctcagaaaatgcccagcccttcctcaaaatgagcagccacccatgactttgtgggctccttgttagcctgagaccaggctttgcagaggggcggggggtgaggcttagcccagaaggagaactgagcaggaaaccaaggctcttctctgtcccctgcccttcccctcctgccagggggaggctcaggttggtccccgagtgccgcctgtactcacaaaggctgcctttcctctagagtcactaattttacctgatgctatgagagaatcatattgaagatgaaatgtctaatatataatgtatattttaaagcagagactattttggtggataggtgggagggagcaaggggagtttgagggaatcagagcttgatgctactgtacagaactggacaggttgggccggcagtggtggggccagagggctctgtgctctaggagctaagccagcagcccccgagaggggacttggctgggcctttcctatgggcaaggcccagtgctcttcctgcccaccagggaccatggagcagtggcaccctatggggctatgatccctaggcctgggcctgggcctgcctgtggcccagagctaccctgggagtgtcagtgctagcagcacagctacctctggtggcaggagaagagaggcccagcacagcagcaggccaggccttcctgtccaggtctgcatggagcactcggtgacccagagcagggactggaggcacccccagccctgccccaggccacagcaggacaggccgggacaggcctcacccaaggccaaggctggcatcagccaatcattcagagctgaggccctgggcctagcctgcccttctcaggtgccaataccaccccagccctgcccttggcctcactttttcccagcaataagtggggttcaccacccgcctcgggaatactttccccttctaaatgggacttgctgttacctcaggaggctccttagtgcaaatatgaccctggtcagggctttgccaccgttgaagccctgcagaaggtgcaatgtaggggttctggggccacagaggagaggccacttcccaccaggacccccaacatgaagtctaggcctcaggggctcccgcccttcttcctccagcagcgggaactgccactgctctcccaggccctgttctggaggctaaccttggttcctggagagtgtgcccctccaccctccctccagcagccctgatcacaccatgagagccaggaacgggtcaccctgctgaagatcactctgtgccctgggggaggagccaagccctcaccccacaaggggcaggtgggggcttggttgctgacccggcccaagtccccacagagcaccttctgtagctccagcttgtctccctggcttctctttgaaggagaaaaatgtaaaatatgcactgagaaagccagccccgcctgcttagtcagccccggcagcagggcagccatgggaactcaggaaaagcaggaaccctttccaaaagcccagagatgccctgggctcagatctgtaattctcccaggagctgtgatagagcaggccacacaaagtccctacgcctccctgctgcctcccccagatgcatgtgatggcatcaccattccccaaattgaatatcagcatgcggcctgaccagggactctttagatgcatgaatttatttatatgaaggctctcacagagacacacacagcacttcagtagcatttgcattcctggttaaagaatcaccaatatttaaaataaaaactttcctgaaattgggactgtcatgttatccagaagggctggtacatccgcccaccatgtccccctgctgggtcaggagccaacacaggaccctgcgtgtgagcgtgcctgacatctcacgcacggccactccagagccggtccctgtccttggaaagctgtgaagccttgcgttgagttccttctcgatactgacggctccgtgctgacattctgagctctggagtcacaccagcgcaggggcgtggaggaactgaggtttggaaggaatgccaggtctcgcacagcttggcctcgagaaggtgagaggaaggcaaaggccagggaggggacccagagaggcctggcacacaaggcccaagcaccaccgtcaacacagcccagtccatacagaaatgggtttcatgcctgaaaagctttttacagaaagatgccgcctgtagccagtgacagccgcaaccctacaggcctcagttccttgcagaggtgaggggtagagagtcagcctctctcccttccagcagcgacccagcttccctccacttccaggtggtgctgggctcaccaagggagcactggtgggtgctctgaaaacccacaggatcccacctccaggcccacctgggtcccatctcactctcttcttctttcaccaattgctaacatagaccttgttgggatcacgatggcttcacaagccagctgttgggtttgctatgtcactgtggctcagtcacatccctgcgtgtatactgtctgcggggcacatatgtatccatttagagctaaaggaatcagtgtacactacagctaatcctaataaatccgatgttttcggaa

SEQ ID NO: 115248 - DNA, 3077 bp, Homo sapiens
atcgagctccgtgacccctccgcacaattagtccaaaaaaaaaaaaaatcagaaattggagaaatccttaacacaattttctaaaaaataacagacatttttgttatacattagactatcagacactggacctaccttaatggttagacactttatgcaaaaaaagagaaaggtcccaggtgattttccacaaagaatgtgctaaaatgtccactgaaaacaaagccaagcctctgccctgcctctcccagctcccacaagggttccaggaattcctggtgttcccaggacaccagactgcaataactggaggcgcctccttcctgcccacccttcgctcacgccccagcgccctctctgaccagcctccgcttggtggccttcctctggccgtgtgatgaggtggttgctgtctccataggggccagctccccagggcagactcacgtgcccctctgaggctcagaaaatgcccagcccttcctcaaaatgagcagccacccatgactttgtgggctccttgttagcctgagaccaggctttgcagaggggcggggggtgaggcttagcccagaaggagaactgagcaggaaaccaaggctcttctctgtcccctgcccttcccctcctgccagggggaggctcaggttggtccccgagtgccgcctgtactcacaaaggctgcctttcctctagagtcactaattttacctgatgctatgagagaatcatattgaagatgaaatgtctaatatataatgtatattttaaagcagagactattttggtggataggtgggagggagcaaggggagtttgagggaatcagagcttgatgctactgtacagaactggacaggttgggccggcagtggtggggccagagggctctgtgctctaggagctaagccagcagcccccgagaggggacttggctgggcctttcctatgggcaaggcccagtgctcttcctgcccaccagggaccatggagcagtggcaccctatggggctatgatccctaggcctgggcctgggcctgcctgtggcccagagctaccctgggagtgtcagtgctagcagcacagctacctctggtggcaggagaagagaggcccagcacagcagcaggccaggccttcctgtccaggtctgcatggagcactcggtgacccagagcagggactggaggcacccccagccctgccccaggccacagcaggacaggccgggacaggcctcacccaaggccaaggctggcatcagccaatcattcagagctgaggccctgggcctagcctgcccttctcaggtgccaataccaccccagccctgcccttggcctcactttttcccagcaataagtggggttcaccacccgcctcgggaatactttccccttctaaatgggacttgctgttacctcaggaggctccttagtgcaaatatgaccctggtcagggctttgccaccgttgaagccctgcagaaggtgcaatgtaggggttctggggccacagaggagaggccacttcccaccaggacccccaacatgaagtctaggcctcaggggctcccgcccttcttcctccagcagcgggaactgccactgctctcccaggccctgttctggaggctaaccttggttcctggagagtgtgcccctccaccctccctccagcagccctgatcacaccatgagagccaggaacgggtcaccctgctgaagatcactctgtgccctgggggaggagccaagccctcaccccacaaggggcaggtgggggcttggttgctgacccggcccaagtccccacagagcaccttctgtagctccagcttgtctccctggcttctctttgaaggagaaaaatgtaaaatatgcactgagaaagccagccccgcctgcttagtcagccccggcagcagggcagccatgggaactcaggaaaagcaggaaccctttccaaaagcccagagatgccctgggctcagatctgtaattctcccaggagctgtgatagagcaggccacacaaagtccctacgcctccctgctgcctcccccagatgcatgtgatggcatcaccattccccaaattgaatatcagcatgcggcctgaccagggactctttagatgcatgaatttatttatatgaaggctctcacagagacacacacagcacttcagtagcatttgcattcctggttaaagaatcaccaatatttaaaataaaaactttcctgaaattgggactgtcatgttatccagaagggctggtacatccgcccaccatgtccccctgctgggtcaggagccaacacaggaccctgcgtgtgagcgtgcctgacatctcacgcacggccactccagagccggtccctgtccttggaaagctgtgaagccttgcgttgagttccttctcgatactgacggctccgtgctgacattctgagctctggagtcacaccagcgcaggggcgtggaggaactgaggtttggaaggaatgccaggtctcgcacagcttggcctcgagaaggtgagaggaaggcaaaggccagggaggggacccagagaggcctggcacacaaggcccaagcaccaccgtcaacacagcccagtccatacagaaatgggtttcatgcctgaaaagctttttacagaaagatgccgcctgtagccagtgacagccgcaaccctacaggcctcagttccttgcagaggtgaggggtagagagtcagcctctctcccttccagcagcgacccagcttccctccacttccaggtggtgctgggctcaccaagggagcactggtgggtgctctgaaaacccacaggatcccacctccaggcccacctgggtcccatctcactctcttcttctttcaccaattgctaacatagaccttgttgggatcacgatggcttcacaagccagctgttgggtttgctatgtcactgtggctcagtcacatccctgcgtgtatactgtctgcggggcacatatgtatccatttagagctaaaggaatcagtgtacactacagctaatcctaataaatccgatgttttcggaa

SEQ ID NO: 115249 - DNA, 3047 bp, Homo sapiens
ggctaggtagcgaggctgggttgaaatcggccgaggcttagcacaattttctaaaaaataacagacatttttgttatacattagactatcagacactggacctaccttaatggttagacactttatgcaaaaaaagagaaaggtcccaggtgattttccacaaagaatgtgctaaaatgtccactgaaaacaaagccaagcctctgccctgcctctcccagctcccacaagggttccaggaattcctggtgttcccaggacaccagactgcaataactggaggcgcctccttcctgcccacccttcgctcacgccccagcgccctctctgaccagcctccgcttggtggccttcctctggccgtgtgatgaggtggttgctgtctccataggggccagctccccagggcagactcacgtgcccctctgaggctcagaaaatgcccagcccttcctcaaaatgagcagccacccatgactttgtgggctccttgttagcctgagaccaggctttgcagaggggcggggggtgaggcttagcccagaaggagaactgagcaggaaaccaaggctcttctctgtcccctgcccttcccctcctgccagggggaggctcaggttggtccccgagtgccgcctgtactcacaaaggctgcctttcctctagagtcactaattttacctgatgctatgagagaatcatattgaagatgaaatgtctaatatataatgtatattttaaagcagagactattttggtggataggtgggagggagcaaggggagtttgagggaatcagagcttgatgctactgtacagaactggacaggttgggccggcagtggtggggccagagggctctgtgctctaggagctaagccagcagcccccgagaggggacttggctgggcctttcctatgggcaaggcccagtgctcttcctgcccaccagggaccatggagcagtggcaccctatggggctatgatccctaggcctgggcctgggcctgcctgtggcccagagctaccctgggagtgtcagtgctagcagcacagctacctctggtggcaggagaagagaggcccagcacagcagcaggccaggccttcctgtccaggtctgcatggagcactcggtgacccagagcagggactggaggcacccccagccctgccccaggccacagcaggacaggccgggacaggcctcacccaaggccaaggctggcatcagccaatcattcagagctgaggccctgggcctagcctgcccttctcaggtgccaataccaccccagccctgcccttggcctcactttttcccagcaataagtggggttcaccacccgcctcgggaatactttccccttctaaatgggacttgctgttacctcaggaggctccttagtgcaaatatgaccctggtcagggctttgccaccgttgaagccctgcagaaggtgcaatgtaggggttctggggccacagaggagaggccacttcccaccaggacccccaacatgaagtctaggcctcaggggctcccgcccttcttcctccagcagcgggaactgccactgctctcccaggccctgttctggaggctaaccttggttcctggagagtgtgcccctccaccctccctccagcagccctgatcacaccatgagagccaggaacgggtcaccctgctgaagatcactctgtgccctgggggaggagccaagccctcaccccacaaggggcaggtgggggcttggttgctgacccggcccaagtccccacagagcaccttctgtagctccagcttgtctccctggcttctctttgaaggagaaaaatgtaaaatatgcactgagaaagccagccccgcctgcttagtcagccccggcagcagggcagccatgggaactcaggaaaagcaggaaccctttccaaaagcccagagatgccctgggctcagatctgtaattctcccaggagctgtgatagagcaggccacacaaagtccctacgcctccctgctgcctcccccagatgcatgtgatggcatcaccattccccaaattgaatatcagcatgcggcctgaccagggactctttagatgcatgaatttatttatatgaaggctctcacagagacacacacagcacttcagtagcatttgcattcctggttaaagaatcaccaatatttaaaataaaaactttcctgaaattgggactgtcatgttatccagaagggctggtacatccgcccaccatgtccccctgctgggtcaggagccaacacaggaccctgcgtgtgagcgtgcctgacatctcacgcacggccactccagagccggtccctgtccttggaaagctgtgaagccttgcgttgagttccttctcgatactgacggctccgtgctgacattctgagctctggagtcacaccagcgcaggggcgtggaggaactgaggtttggaaggaatgccaggtctcgcacagcttggcctcgagaaggtgagaggaaggcaaaggccagggaggggacccagagaggcctggcacacaaggcccaagcaccaccgtcaacacagcccagtccatacagaaatgggtttcatgcctgaaaagctttttacagaaagatgccgcctgtagccagtgacagccgcaaccctacaggcctcagttccttgcagaggtgaggggtagagagtcagcctctctcccttccagcagcgacccagcttccctccacttccaggtggtgctgggctcaccaagggagcactggtgggtgctctgaaaacccacaggatcccacctccaggcccacctgggtcccatctcactctcttcttctttcaccaattgctaacatagaccttgttgggatcacgatggcttcacaagccagctgttgggtttgctatgtcactgtggctcagtcacatccctgcgtgtatactgtctgcggggcacatatgtatccatttagagctaaaggaatcagtgtacactacagctaatcctaataaatccgatgttttcggaa

SEQ ID NO: 115250 - DNA, 964 bp, Homo sapiens
tcaagcttctaacgatgtacggggacatgaatttatttatatgaaggctctcacagagacacacacagcacttcagtagcatttgcattcctggttaaagaatcaccaatatttaaaataaaaactttcctgaaattgggactgtcatgttatccagaagggctggtacatccgcccaccatgtccccctgctgggtcaggagccaacacaggaccctgcgtgtgagcgtgcctgacatctcacgcacggccactccagagccggtccctgtccttggaaagctgtgaagccttgcgttgagttccttctcgatactgacggctccgtgctgacattctgagctctggagtcacaccagcgcaggggcgtggaggaactgaggtttggaaggaatgccaggtctcgcacagcttggcctcgagaaggtgagaggaaggcaaaggccagggaggggacccagagaggcctggcacacaaggcccaagcaccaccgtcaacacagcccagtccatacagaaatgggtttcatgcctgaaaagctttttacagaaagatgccgcctgtagccagtgacagccgcaaccctacaggcctcagttccttgcagaggtgaggggtagagagtcagcctctctcccttccagcagcgacccagcttccctccacttccaggtggtgctgggctcaccaagggagcactggtgggtgctctgaaaacccacaggatcccacctccaggcccacctgggtcccatctcactctcttcttctttcaccaattgctaacatagaccttgttgggatcacgatggcttcacaagccagctgttgggtttgctatgtcactgtggctcagtcacatccctgcgtgtatactgtctgcggggcacatatgtatccatttagagctaaaggaatcagtgtacactacagctaatcctaataaatccgatgttttcggaa

SEQ ID NO: 115251 - DNA, 1421 bp, Homo sapiens
ctccatctttctagtccccaccttccccggtgcagacacccggcgaagcccacccggttttcccagcggcatttccgatgacagcttcggggctacgtgtcctgtgctgtcggagacgcacaggaagcaaagtttgtgagaagccttgggggcgactttgccttgggcacccgcatttgtgcgtctgcgaggtgcctcggtgtgcgcggagctagtttcccagtttcccgggcccctcccttctccgagcccctctagcgatttgtttaggaaaagtgatgacatgaactagtagtggagaatcgcagcgccgctccccgccctggggagggaggggagccccggagagcctgccggtgggagctggaagcaggctcccggctgagcgccccagcccgaaaggcagggtctgggtgcgggaagagggctcggagctgccttcctgctgccttggggccgcccagatgagggaacagcccgatttgcctggttctgattctccaggctgtcgtggttgtggaatgcaaacgccagcacataatggaaacaggacctgaagacccttccagcatgccagaggaaagttcccccaggcggaccccgcagagcattccctaccaggacctccctcacctggtcaatgcagacggacagtacctcttctgcaggtactggaaacccacaggcacacccaaggccctcatctttgtgtcccatggagccggagagcacagtggccgctatgaagagctggctcggatgctgatggggctggacctgctggtgttcgcccacgaccatgttggccacggacagagcgaaggggagaggatggtagtgtctgacttccacgttttcgtcagggatgtgttgcagcatgtggattccatgcagaaagactaccctgggcttcctgtcttccttctgggccactccatgggaggcgccatcgccatcctcacggccgcagagaggccgggccacttcgccggcatggtactcatttcgcctctggttcttgccaatcctgaatctgcaacaactttcaaggactattcgaggattttgaaacacttgatggaaaaggcatcaagaatgttaaagttttggattccacgtcctttttgggtgagcaactcccctctgaggcttccctggtgtgctcacagctcaggatggaggttgtgggagagcaggagcagcagtcatctggtcgacctcgacaatgtgatccatctgggtgcgggacctgccatgactccttccttccccactgcttcctcgtcatgccgcctcaatggcccctgctcaaccgttctgctttccttcatgcacaatcaacccacttcctctgcttagctctttctcctcccatcctaccctttcctccttcaggagagattaggctcatgaaatcaaca

SEQ ID NO: 115252 - DNA, 1004 bp, Homo sapiens
ctccatctttctagtccccaccttccccggtgcagacacccggcgaagcccacccggttttcccagcggcatttccgatgacagcttcggggctacgtgtcctgtgctgtcggagacgcacaggaagcaaagtttgtgagaagccttgggggcgactttgccttgggcacccgcatttgtgcgtctgcgaggtgcctcggtgtgcgcggagctagtttcccagtttcccgggcccctcccttctccgagcccctctagcgatttgtttaggaaaagtgatgacatgaactagtagtggagaatcgcagcgccgctccccgccctggggagggaggggagccccggagagcctgccggtgggagctggaagcaggctcccggctgagcgccccagcccgaaaggcagggtctgggtgcgggaagagggctcggagctgccttcctgctgccttggggccgcccagatgagggaacagcccgatttgcctggttctgattctccaggctgtcgtggttgtggaatgcaaacgccagcacataatggaaacaggacctgaagacccttccagcatgccagaggaaagttcccccaggcggaccccgcagagcattccctaccaggacctccctcacctggtcaatgcagacggacagtacctcttctgcaggtactggaaacccacaggcacacccaaggccctcatctttgtgtcccatggagccggagagcacagtggccgctatgaagagctggctcggatgctgatggggctggacctgctggtgttcgcccacgaccatggtgagtgtcccagggtgccgtcagagctggctgggccctgacaatttggagatctccctctctagtccatctcactgccagcatccttctcaattcttctattccccacggatgtttcaaagtaaaaaaatgtagttatgcaaacaaacaaaaaaaatgtctgacgagcagattctgtagtctgagactgaatgcaggctga

SEQ ID NO: 115253 - DNA, 1117 bp, Homo sapiens
cgcccccgccgcgagcccggcccagggataaagtggcggcgcagacgccgcaccctgtcgccgcgaagccggtcgcgcgcagctcgtcccggccctggcccgccgcaaacgaggatccgctgcgctcggggaacgcgacagcggcgctcgtggccccggacctgaagacccttccagcatgccagaggaaagttcccccaggcggaccccgcagagcattccctaccaggacctccctcacctggtcaatgcagacggacagtacctcttctgcaggtactggaaacccacaggcacacccaaggccctcatctttgtgtcccatggagccggagagcacagtggccgctatgaagagctggctcggatgctgatggggctggacctgctggtgttcgcccacgaccatgttggccacggacagagcgaaggggagaggatggtagtgtctgacttccacgttttcgtcagggatgtgttgcagcatgtggattccatgcagaaagactaccctgggcttcctgtcttccttctgggccactccatgggaggcgccatcgccatcctcacggccgcagagaggccgggccacttcgccggcatggtactcatttcgcctctggttcttgccaatcctgaatctgcaacaactttcaaggtccttgctgcgaaagtgctcaaccttgtgctgccaaacttgtccctcgggcccatcgactccagcgtgctctctcggaataagacagaggtcgacatttataactcagaccccctgatctgccgggcagggctgaaggtgtgcttcggcatccaactgctgaatgccgtctcacgggtggagcgcgccctccccaagctgactgtgcccttcctgctgctccagggctctgccgatcgcctattgcttaccggccacgggggcctatactgcctctgtgaggttagcccaagaagcctgcaacagactctcagcgatactgtaagagtgcctacccggtactccaacaggagggtccggataatcaccacccgctaacgcaacaaacagtgggtctctaagcaagccgagaacagtgttccccatatagttgacgcccctatgtcggtgaaactcggc

SEQ ID NO: 115254 - DNA, 4867 bp, Homo sapiens
ctccatctttctagtccccaccttccccggtgcagacacccggcgaagcccacccggttttcccagcggcatttccgatgacagcttcggggctacgtgtcctgtgctgtcggagacgcacaggaagcaaagtttgtgagaagccttgggggcgactttgccttgggcacccgcatttgtgcgtctgcgaggtgcctcggtgtgcgcggagctagtttcccagtttcccgggcccctcccttctccgagcccctctagcgatttgtttaggaaaagtgatgacatgaactagtagtggagaatcgcagcgccgctccccgccctggggagggaggggagccccggagagcctgccggtgggagctggaagcaggctcccggctgagcgccccagcccgaaaggcagggtctgggtgcgggaagagggctcggagctgccttcctgctgccttggggccgcccagatgagggaacagcccgatttgcctggttctgattctccaggctgtcgtggttgtggaatgcaaacgccagcacataatggaaacaggacctgaagacccttccagcatgccagaggaaagttcccccaggcggaccccgcagagcattccctaccaggacctccctcacctggtcaatgcagacggacagtacctcttctgcaggtactggaaacccacaggcacacccaaggccctcatctttgtgtcccatggagccggagagcacagtggccgctatgaagagctggctcggatgctgatggggctggacctgctggtgttcgcccacgaccatgttggccacggacagagcgaaggggagaggatggtagtgtctgacttccacgttttcgtcagggatgtgttgcagcatgtggattccatgcagaaagactaccctgggcttcctgtcttccttctgggccactccatgggaggcgccatcgccatcctcacggccgcagagaggccgggccacttcgccggcatggtactcatttcgcctctggttcttgccaatcctgaatctgcaacaactttcaaggtccttgctgcgaaagtgctcaaccttgtgctgccaaacttgtccctcgggcccatcgactccagcgtgctctctcggaataagacagaggtcgacatttataactcagaccccctgatctgccgggcagggctgaaggtgtgcttcggcatccaactgctgaatgccgtctcacgggtggagcgcgccctccccaagctgactgtgcccttcctgctgctccagggctctgccgatcgcctatgtgacagcaaaggggcctacctgctcatggagttagccaagagccaggacaagactctcaagatttatgaaggtgcctaccatgttctccacaaggagcttcctgaagtcaccaactccgtcttccatgaaataaacatgtgggtctctcaaaggacagccacggcaggaactgcgtccccaccctgaatgcattggccggtgcccggctcatggtctgggggatgcaggcaggggaagggcagagatggcttctcagatatggcttgccaaaaaaaaaaaaaaaaaatcagaaattggagaaatccttaacacaattttctaaaaaataacagacatttttgttatacattagactatcagacactggacctaccttaatggttagacactttatgcaaaaaaagagaaaggtcccaggtgattttccacaaagaatgtgctaaaatgtccactgaaaacaaagccaagcctctgccctgcctctcccagctcccacaagggttccaggaattcctggtgttcccaggacaccagactgcaataactggaggcgcctccttcctgcccacccttcgctcacgccccagcgccctctctgaccagcctccgcttggtggccttcctctggccgtgtgatgaggtggttgctgtctccataggggccagctccccagggcagactcacgtgcccctctgaggctcagaaaatgcccagcccttcctcaaaatgagcagccacccatgactttgtgggctccttgttagcctgagaccaggctttgcagaggggcggggggtgaggcttagcccagaaggagaactgagcaggaaaccaaggctcttctctgtcccctgcccttcccctcctgccagggggaggctcaggttggtccccgagtgccgcctgtactcacaaaggctgcctttcctctagagtcactaattttacctgatgctatgagagaatcatattgaagatgaaatgtctaatatataatgtatattttaaagcagagactattttggtggataggtgggagggagcaaggggagtttgagggaatcagagcttgatgctactgtacagaactggacaggttgggccggcagtggtggggccagagggctctgtgctctaggagctaagccagcagcccccgagaggggacttggctgggcctttcctatgggcaaggcccagtgctcttcctgcccaccagggaccatggagcagtggcaccctatggggctatgatccctaggcctgggcctgggcctgcctgtggcccagagctaccctgggagtgtcagtgctagcagcacagctacctctggtggcaggagaagagaggcccagcacagcagcaggccaggccttcctgtccaggtctgcatggagcactcggtgacccagagcagggactggaggcacccccagccctgccccaggccacagcaggacaggccgggacaggcctcacccaaggccaaggctggcatcagccaatcattcagagctgaggccctgggcctagcctgcccttctcaggtgccaataccaccccagccctgcccttggcctcactttttcccagcaataagtggggttcaccacccgcctcgggaatactttccccttctaaatgggacttgctgttacctcaggaggctccttagtgcaaatatgaccctggtcagggctttgccaccgttgaagccctgcagaaggtgcaatgtaggggttctggggccacagaggagaggccacttcccaccaggacccccaacatgaagtctaggcctcaggggctcccgcccttcttcctccagcagcgggaactgccactgctctcccaggccctgttctggaggctaaccttggttcctggagagtgtgcccctccaccctccctccagcagccctgatcacaccatgagagccaggaacgggtcaccctgctgaagatcactctgtgccctgggggaggagccaagccctcaccccacaaggggcaggtgggggcttggttgctgacccggcccaagtccccacagagcaccttctgtagctccagcttgtctccctggcttctctttgaaggagaaaaatgtaaaatatgcactgagaaagccagccccgcctgcttagtcagccccggcagcagggcagccatgggaactcaggaaaagcaggaaccctttccaaaagcccagagatgccctgggctcagatctgtaattctcccaggagctgtgatagagcaggccacacaaagtccctacgcctccctgctgcctcccccagatgcatgtgatggcatcaccattccccaaattgaatatcagcatgcggcctgaccagggactctttagatgcatgaatttatttatatgaaggctctcacagagacacacacagcacttcagtagcatttgcattcctggttaaagaatcaccaatatttaaaataaaaactttcctgaaattgggactgtcatgttatccagaagggctggtacatccgcccaccatgtccccctgctgggtcaggagccaacacaggaccctgcgtgtgagcgtgcctgacatctcacgcacggccactccagagccggtccctgtccttggaaagctgtgaagccttgcgttgagttccttctcgatactgacggctccgtgctgacattctgagctctggagtcacaccagcgcaggggcgtggaggaactgaggtttggaaggaatgccaggtctcgcacagcttggcctcgagaaggtgagaggaaggcaaaggccagggaggggacccagagaggcctggcacacaaggcccaagcaccaccgtcaacacagcccagtccatacagaaatgggtttcatgcctgaaaagctttttacagaaagatgccgcctgtagccagtgacagccgcaaccctacaggcctcagttccttgcagaggtgaggggtagagagtcagcctctctcccttccagcagcgacccagcttccctccacttccaggtggtgctgggctcaccaagggagcactggtgggtgctctgaaaacccacaggatcccacctccaggcccacctgggtcccatctcactctcttcttctttcaccaattgctaacatagaccttgttgggatcacgatggcttcacaagccagctgttgggtttgctatgtcactgtggctcagtcacatccctgcgtgtatactgtctgcggggcacatatgtatccatttagagctaaaggaatcagtgtacactacagctaatcctaataaatccgatgttttcggaaaaaaaaaaaaaaaaaaaaaaaaaaaaaaaaaaaaaaaaaaaaaacaaaaaaaacaaaaagggaacctacataaaacagaaaaaaaacaaagcagaaaaaaaaacaatgcaaatgagcgagaacaaaaaaccgataagaaaaagccttggggggggccccgtgccccaattcgcccttaagggggcgcttttaaaattaccgggccggatttttaaaaagcgcgtgggggcctgggctgttccccttgggttttggg

SEQ ID NO: 115255 - DNA, 4315 bp, Homo sapiens
ctccatctttctagtccccaccttccccggtgcagacacccggcgaagcccacccggttttcccagcggcatttccgatgacagcttcggggctacgtgtcctgtgctgtcggagacgcacaggaagcaaagtttgtgagaagccttgggggcgactttgccttgggcacccgcatttgtgcgtctgcgaggtgcctcggtgtgcgcggagctagtttcccagtttcccgggcccctcccttctccgagcccctctagcgatttgtttaggaaaagtgatgacatgaactagtagtggagaatcgcagcgccgctccccgccctggggagggaggggagccccggagagcctgccggtgggagctggaagcaggctcccggctgagcgccccagcccgaaaggcagggtctgggtgcgggaagagggctcggagctgccttcctgctgccttggggccgcccagatgagggaacagcccgatttgcctggttctgattctccaggctgtcgtggttgtggaatgcaaacgccagcacataatggaaacaggacctgaagacccttccagcatgccagaggaaagttcccccaggcggaccccgcagagcattccctaccaggacctccctcacctggtcaatgcagacggacagtacctcttctgcaggtactggaaacccacaggcacacccaaggccctcatctttgtgtcccatggagccggagagcacagtggccgctatgaagagctggctcggatgctgatggggctggacctgctggtgttcgcccacgaccatgttggccacggacagagcgaaggggagaggatggtagtgtctgacttccacgttttcgtcagggatgtgttgcagcatgtggattccatgcagaaagactaccctgggcttcctgtcttccttctgggccactccatgggaggcgccatcgccatcctcacggccgcagagaggccgggccacttcgccggcatggtactcatttcgcctctggttcttgccaatcctgaatctgcaacaactttcaaggtccttgctgcgaaagtgctcaaccttgtgctgccaaacttgtccctcgggcccatcgactccagcgtgctctctcggaataagacagaggtcgacatttataactcagaccccctgatctgccgggcagggctgaaggtgtgcttcggcatccaactgctgaatgccgtctcacgggtggagcgcgccctccccaagctgactgtgcccttcctgctgctccagggctctgccgatcgcctatgtgacagcaaaggggcctacctgctcatggagttagccaagagccaggacaagactctcaagatttatgaaggtgcctaccatgttctccacaaggagcttcctgaagtcaccaactccgtcttccatgaaataaacatgtgggtctctcaaaggacagccacggcaggaactgcgtccccaccctgaatgcattggccggtgcccggctcatggtctgggggatgcaggcaggggaagggcagagatggcttctcagatatggcttgccaaaaaaaaaaaaaaaaaatcagaaattggagaaatccttaacacaattttctaaaaaataacagacatttttgttatacattagactatcagacactggacctaccttaatggttagacactttatgcaaaaaaagagaaaggtcccaggtgattttccacaaagaatgtgctaaaatgtccactgaaaacaaagccaagcctctgccctgcctctcccagctcccacaagggttccaggaattcctggtgttcccaggacaccagactgcaataactggaggcgcctccttcctgcccacccttcgctcacgccccagcgccctctctgaccagcctccgcttggtggccttcctctggccgtgtgatgaggtggttgctgtctccataggggccagctccccagggcagactcacgtgcccctctgaggctcagaaaatgcccagcccttcctcaaaatgagcagccacccatgactttgtgggctccttgttagcctgagaccaggctttgcagaggggcggggggtgaggcttagcccagaaggagaactgagcaggaaaccaaggctcttctctgtcccctgcccttcccctcctgccagggggaggctcaggttggtccccgagtgccgcctgtactcacaaaggctgcctttcctctagagtcactaattttacctgatgctatgagagaatcatattgaagatgaaatgtctaatatataatgtatattttaaagcagagactattttggtggataggtgggagggagcaaggggagtttgagggaatcagagcttgatgctactgtacagaactggacaggttgggccggcagtggtggggccagagggctctgtgctctaggagctaagccagcagcccccgagaggggacttggctgggcctttcctatgggcaaggcccagtgctcttcctgcccaccagggaccatggagcagtggcaccctatggggctatgatccctaggcctgggcctgggcctgcctgtggcccagagctaccctgggagtgtcagtgctagcagcacagctacctctggtggcaggagaagagaggcccagcacagcagcaggccaggccttcctgtccaggtctgcatggagcactcggtgacccagagcagggactggaggcacccccagccctgccccaggccacagcaggacaggccgggacaggcctcacccaaggccaaggctggcatcagccaatcattcagagctgaggccctgggcctagcctgcccttctcaggtgccaataccaccccagccctgcccttggcctcactttttcccagcaataagtggggttcaccacccgcctcgggaatactttccccttctaaatgggacttgctgttacctcaggaggctccttagtgcaaatatgaccctggtcagggctttgccaccgttgaagccctgcagaaggtgcaatgtaggggttctggggccacagaggagaggccacttcccaccaggacccccaacatgaagtctaggcctcaggggctcccgcccttcttcctccagcagcgggaactgccactgctctcccaggccctgttctggaggctaaccttggttcctggagagtgtgcccctccaccctccctccagcagccctgatcacaccatgagagccaggaacgggtcaccctgctgaagatcactctgtgccctgggggaggagccaagccctcaccccacaaggggcaggtgggggcttggttgctgacccggcccaagtccccacagagcaccttctgtagctccagcttgtctccctggcttctctttgaaggagaaaaatgtaaaatatgcactgagaaagccagccccgcctgcttagtcagccccggcagcagggcagccatgggaactcaggaaaagcaggaaccctttccaaaagcccagagatgccctgggctcagatctgtaattctcccaggagctgtgatagagcaggccacacaaagtccctacgcctccctgctgcctcccccagatgcatgtgatggcatcaccattccccaaattgaatatcagcatgcggcctgaccagggactctttagatgcatgaatttatttatatgaaggctctcacagagacacacacagcacttcagtagcatttgcattcctggttaaagaatcaccaatatttaaaataaaaactttcctgaaattgggactgtcatgttatccagaagggctggtacatccgcccaccatgtccccctgctgggtcaggagccaacacaggaccctgcgtgtgagcgtgcctgacatctcacgcacggccactccagagccggtccctgtccttggaaagctgtgaagccttgcgttgagttccttctcgatactgacggctccgtgctgacattctgagctctggagtcacaccagcgcaggggcgtggaggaactgaggtttggaaggaatgccaggtctcgcacagcttggcctcgagaaggtgagaggaaggcaaaggccagggaggggacccagagaggcctggcacacaaggcccaagcaccaccgtcaacacagcccagtccatacagaaatgggtttcatgcctgaaaagctttttacagaaagatgccgcctgtagccagtgacagccgcaaccctacaggcctcagttccttgcagaggtgaggggtagagagtttgtgattcgtccccgacagcagcaggaggattgcccgggat

SEQ ID NO: 115256 - DNA, 4398 bp, Homo sapiens
ctccatctttctagtccccaccttccccggtgcagacacccggcgaagcccacccggttttcccagcggcatttccgatgacagcttcggggctacgtgtcctgtgctgtcggagacgcacaggaagcaaagtttgtgagaagccttgggggcgactttgccttgggcacccgcatttgtgcgtctgcgaggtgcctcggtgtgcgcggagctagtttcccagtttcccgggcccctcccttctccgagcccctctagcgatttgtttaggaaaagtgatgacatgaactagtagtggagaatcgcagcgccgctccccgccctggggagggaggggagccccggagagcctgccggtgggagctggaagcaggctcccggctgagcgccccagcccgaaaggcagggtctgggtgcgggaagagggctcggagctgccttcctgctgccttggggccgcccagatgagggaacagcccgatttgcctggttctgattctccaggctgtcgtggttgtggaatgcaaacgccagcacataatggaaacaggacctgaagacccttccagcatgccagaggaaagttcccccaggcggaccccgcagagcattccctaccaggacctccctcacctggtcaatgcagacggacagtacctcttctgcaggtactggaaacccacaggcacacccaaggccctcatctttgtgtcccatggagccggagagcacagtggccgctatgaagagctggctcggatgctgatggggctggacctgctggtgttcgcccacgaccatgttggccacggacagagcgaaggggagaggatggtagtgtctgacttccacgttttcgtcagggatgtgttgcagcatgtggattccatgcagaaagactaccctgggcttcctgtcttccttctgggccactccatgggaggcgccatcgccatcctcacggccgcagagaggccgggccacttcgccggcatggtactcatttcgcctctggttcttgccaatcctgaatctgcaacaactttcaaggtccttgctgcgaaagtgctcaaccttgtgctgccaaacttgtccctcgggcccatcgactccagcgtgctctctcggaataagacagaggtcgacatttataactcagaccccctgatctgccgggcagggctgaaggtgtgcttcggcatccaactgctgaatgccgtctcacgggtggagcgcgccctccccaagctgactgtgcccttcctgctgctccagggctctgccgatcgcctatgtgacagcaaaggggcctacctgctcatggagttagccaagagccaggacaagactctcaagatttatgaaggtgcctaccatgttctccacaaggagcttcctgaagtcaccaactccgtcttccatgaaataaacatgtgggtctctcaaaggacagccacggcaggaactgcgtccccaccctgaatgcattggccggtgcccggctcatggtctgggggatgcaggcaggggaagggcagagatggcttctcagatatggcttgccaaaaaaaaaaaaaaaaaatcagaaattggagaaatccttaacacaattttctaaaaaataacagacatttttgttatacattagactatcagacactggacctaccttaatggttagacactttatgcaaaaaaagagaaaggtcccaggtgattttccacaaagaatgtgctaaaatgtccactgaaaacaaagccaagcctctgccctgcctctcccagctcccacaagggttccaggaattcctggtgttcccaggacaccagactgcaataactggaggcgcctccttcctgcccacccttcgctcacgccccagcgccctctctgaccagcctccgcttggtggccttcctctggccgtgtgatgaggtggttgctgtctccataggggccagctccccagggcagactcacgtgcccctctgaggctcagaaaatgcccagcccttcctcaaaatgagcagccacccatgactttgtgggctccttgttagcctgagaccaggctttgcagaggggcggggggtgaggcttagcccagaaggagaactgagcaggaaaccaaggctcttctctgtcccctgcccttcccctcctgccagggggaggctcaggttggtccccgagtgccgcctgtactcacaaaggctgcctttcctctagagtcactaattttacctgatgctatgagagaatcatattgaagatgaaatgtctaatatataatgtatattttaaagcagagactattttggtggataggtgggagggagcaaggggagtttgagggaatcagagcttgatgctactgtacagaactggacaggttgggccggcagtggtggggccagagggctctgtgctctaggagctaagccagcagcccccgagaggggacttggctgggcctttcctatgggcaaggcccagtgctcttcctgcccaccagggaccatggagcagtggcaccctatggggctatgatccctaggcctgggcctgggcctgcctgtggcccagagctaccctgggagtgtcagtgctagcagcacagctacctctggtggcaggagaagagaggcccagcacagcagcaggccaggccttcctgtccaggtctgcatggagcactcggtgacccagagcagggactggaggcacccccagccctgccccaggccacagcaggacaggccgggacaggcctcacccaaggccaaggctggcatcagccaatcattcagagctgaggccctgggcctagcctgcccttctcaggtgccaataccaccccagccctgcccttggcctcactttttcccagcaataagtggggttcaccacccgcctcgggaatactttccccttctaaatgggacttgctgttacctcaggaggctccttagtgcaaatatgaccctggtcagggctttgccaccgttgaagccctgcagaaggtgcaatgtaggggttctggggccacagaggagaggccacttcccaccaggacccccaacatgaagtctaggcctcaggggctcccgcccttcttcctccagcagcgggaactgccactgctctcccaggccctgttctggaggctaaccttggttcctggagagtgtgcccctccaccctccctccagcagccctgatcacaccatgagagccaggaacgggtcaccctgctgaagatcactctgtgccctgggggaggagccaagccctcaccccacaaggggcaggtgggggcttggttgctgacccggcccaagtccccacagagcaccttctgtagctccagcttgtctccctggcttctctttgaaggagaaaaatgtaaaatatgcactgagaaagccagccccgcctgcttagtcagccccggcagcagggcagccatgggaactcaggaaaagcaggaaccctttccaaaagcccagagatgccctgggctcagatctgtaattctcccaggagctgtgatagagcaggccacacaaagtccctacgcctccctgctgcctcccccagatgcatgtgatggcatcaccattccccaaattgaatatcagcatgcggcctgaccagggactctttagatgcatgaatttatttatatgaaggctctcacagagacacacacagcacttcagtagcatttgcattcctggttaaagaatcaccaatatttaaaataaaaactttcctgaaattgggactgtcatgttatccagaagggctggtacatccgcccaccatgtccccctgctgggtcaggagccaacacaggaccctgcgtgtgagcgtgcctgacatctcacgcacggccactccagagccggtccctgtccttggaaagctgtgaagccttgcgttgagttccttctcgatactgacggctccgtgctgacattctgagctctggagtcacaccagcgcaggggcgtggaggaactgaggtttggaaggaatgccaggtctcgcacagcttggcctcgagaaggtgagaggaaggcaaaggccagggaggggacccagagaggcctggctcaccaagggagcactggtgggtgctctgaaaacccacaggatcccacctccaggcccacctgggtcccatctcactctcttcttctttcaccaattgctaacatagaccttgttgggatcacgatggcttcacaagccagctgttgggtttgctatgtcactgtggctcagtcacatccctgcgtgtatactgtctgcggggcacatatgtatccatttagagctaaaggaatcagtgtacactacagctaatcctaataaatccgatgttttcggaa

SEQ ID NO: 115257 - DNA, 4367 bp, Homo sapiens
  misc_feature (4232)..(4232): n is a, c, g, or t
  misc_feature (4261)..(4261): n is a, c, g, or t
  misc_feature (4263)..(4263): n is a, c, g, or t
ctccatctttctagtccccaccttccccggtgcagacacccggcgaagcccacccggttttcccagcggcatttccgatgacagcttcggggctacgtgtcctgtgctgtcggagacgcacaggaagcaaagtttgtgagaagccttgggggcgactttgccttgggcacccgcatttgtgcgtctgcgaggtgcctcggtgtgcgcggagctagtttcccagtttcccgggcccctcccttctccgagcccctctagcgatttgtttaggaaaagtgatgacatgaactagtagtggagaatcgcagcgccgctccccgccctggggagggaggggagccccggagagcctgccggtgggagctggaagcaggctcccggctgagcgccccagcccgaaaggcagggtctgggtgcgggaagagggctcggagctgccttcctgctgccttggggccgcccagatgagggaacagcccgatttgcctggttctgattctccaggctgtcgtggttgtggaatgcaaacgccagcacataatggaaacaggacctgaagacccttccagcatgccagaggaaagttcccccaggcggaccccgcagagcattccctaccaggacctccctcacctggtcaatgcagacggacagtacctcttctgcaggtactggaaacccacaggcacacccaaggccctcatctttgtgtcccatggagccggagagcacagtggccgctatgaagagctggctcggatgctgatggggctggacctgctggtgttcgcccacgaccatgttggccacggacagagcgaaggggagaggatggtagtgtctgacttccacgttttcgtcagggatgtgttgcagcatgtggattccatgcagaaagactaccctgggcttcctgtcttccttctgggccactccatgggaggcgccatcgccatcctcacggccgcagagaggccgggccacttcgccggcatggtactcatttcgcctctggttcttgccaatcctgaatctgcaacaactttcaaggtccttgctgcgaaagtgctcaaccttgtgctgccaaacttgtccctcgggcccatcgactccagcgtgctctctcggaataagacagaggtcgacatttataactcagaccccctgatctgccgggcagggctgaaggtgtgcttcggcatccaactgctgaatgccgtctcacgggtggagcgcgccctccccaagctgactgtgcccttcctgctgctccagggctctgccgatcgcctatgtgacagcaaaggggcctacctgctcatggagttagccaagagccaggacaagactctcaagatttatgaaggtgcctaccatgttctccacaaggagcttcctgaagtcaccaactccgtcttccatgaaataaacatgtgggtctctcaaaggacagccacggcaggaactgcgtccccaccctgaatgcattggccggtgcccggctcatggtctgggggatgcaggcaggggaagggcagagatggcttctcagatatggcttgccaaaaaaaaaaaaaaaaaatcagaaattggagaaatccttaacacaattttctaaaaaataacagacatttttgttatacattagactatcagacactggacctaccttaatggttagacactttatgcaaaaaaagagaaaggtcccaggtgattttccacaaagaatgtgctaaaatgtccactgaaaacaaagccaagcctctgccctgcctctcccagctcccacaagggttccaggaattcctggtgttcccaggacaccagactgcaataactggaggcgcctccttcctgcccacccttcgctcacgccccagcgccctctctgaccagcctccgcttggtggccttcctctggccgtgtgatgaggtggttgctgtctccataggggccagctccccagggcagactcacgtgcccctctgaggctcagaaaatgcccagcccttcctcaaaatgagcagccacccatgactttgtgggctccttgttagcctgagaccaggctttgcagaggggcggggggtgaggcttagcccagaaggagaactgagcaggaaaccaaggctcttctctgtcccctgcccttcccctcctgccagggggaggctcaggttggtccccgagtgccgcctgtactcacaaaggctgcctttcctctagagtcactaattttacctgatgctatgagagaatcatattgaagatgaaatgtctaatatataatgtatattttaaagcagagactattttggtggataggtgggagggagcaaggggagtttgagggaatcagagcttgatgctactgtacagaactggacaggttgggccggcagtggtggggccagagggctctgtgctctaggagctaagccagcagcccccgagaggggacttggctgggcctttcctatgggcaaggcccagtgctcttcctgcccaccagggaccatggagcagtggcaccctatggggctatgatccctaggcctgggcctgggcctgcctgtggcccagagctaccctgggagtgtcagtgctagcagcacagctacctctggtggcaggagaagagaggcccagcacagcagcaggccaggccttcctgtccaggtctgcatggagcactcggtgacccagagcagggactggaggcacccccagccctgccccaggccacagcaggacaggccgggacaggcctcacccaaggccaaggctggcatcagccaatcattcagagctgaggccctgggcctagcctgcccttctcaggtgccaataccaccccagccctgcccttggcctcactttttcccagcaataagtggggttcaccacccgcctcgggaatactttccccttctaaatgggacttgctgttacctcaggaggctccttagtgcaaatatgaccctggtcagggctttgccaccgttgaagccctgcagaaggtgcaatgtaggggttctggggccacagaggagaggccacttcccaccaggacccccaacatgaagtctaggcctcaggggctcccgcccttcttcctccagcagcgggaactgccactgctctcccaggccctgttctggaggctaaccttggttcctggagagtgtgcccctccaccctccctccagcagccctgatcacaccatgagagccaggaacgggtcaccctgctgaagatcactctgtgccctgggggaggagccaagccctcaccccacaaggggcaggtgggggcttggttgctgacccggcccaagtccccacagagcaccttctgtagctccagcttgtctccctggcttctctttgaaggagaaaaatgtaaaatatgcactgagaaagccagccccgcctgcttagtcagccccggcagcagggcagccatgggaactcaggaaaagcaggaaccctttccaaaagcccagagatgccctgggctcagatctgtaattctcccaggagctgtgatagagcaggccacacaaagtccctacgcctccctgctgcctcccccagatgcatgtgatggcatcaccattccccaaattgaatatcagcatgcggcctgaccagggactctttagatgcatgaatttatttatatgaaggctctcacagagacacacacagcacttcagtagcatttgcattcctggttaaagaatcaccaatatttaaaataaaaactttcctgaaattgggactgtcatgttatccagaagggctggtacatccgcccaccatgtccccctgctgggtcaggagccaacacaggaccctgcgtgtgagcgtgcctgacatctcacgcacggccactccagagccggtccctgtccttggaaagctgtgaagccttgcgttgagttccttctaccagcgcaggggcgtggaggaactgaggtttggaaggaatgccaggtctcgcacagcttggcctcgagaaggtgagaggaaggcaaaggccagggaggggacccagagaggcctggcacacaaggcccaagcaccaccgtcaacacagcccagtccatacagaaatgggtttcatgcctgaaaagctttttacagaaagatgccgcctgtagccagtgacagccgcaaccctacaggcctcagttccttgcagaggtgaggggtagagagtacnccctccttccaagagccagtcccactccngnggggggccccggagccgtggggtctaacccggcccccggccgggcccccctctttcccgggcacgggcgaaccccgggggtctggcccggcgggaaaaacacca

SEQ ID NO: 115258 - DNA, 4408 bp, Homo sapiens
cgcccccgccgcgagcccggcccagggataaagtggcggcgcagacgccgcaccctgtcgccgcgaagccggtcgcgcgcagctcgtcccggccctggcccgccgcaaacgaggatccgctgcgctcggggaacgcgacagcggcgctcgtggccccggacctgaagacccttccagcatgccagaggaaagttcccccaggcggaccccgcagagcattccctaccaggacctccctcacctggtcaatgcagacggacagtacctcttctgcaggtactggaaacccacaggcacacccaaggccctcatctttgtgtcccatggagccggagagcacagtggccgctatgaagagctggctcggatgctgatggggctggacctgctggtgttcgcccacgaccatgagctgaacaggagaaaatccttgtaagtgggagagatgcagactagattcagaaggatcttcccctggaaggatgcgagcaccaagagaatgccagaatttatacatttttctcctctgaaaccatacaaagggagggaatgggagaaggcggggagcgagcacgtgctggaaacccaccttttgccagttggccacggacagagcgaaggggagaggatggtagtgtctgacttccacgttttcgtcagggatgtgttgcagcatgtggattccatgcagaaagactaccctgggcttcctgtcttccttctgggccactccatgggaggcgccatcgccatcctcacggccgcagagaggccgggccacttcgccggcatggtactcatttcgcctctggttcttgccaatcctgaatctgcaacaactttcaaggtccttgctgcgaaagtgctcaaccttgtgctgccaaacttgtccctcgggcccatcgactccagcgtgctctctcggaataagacagaggtcgacatttataactcagaccccctgatctgccgggcagggctgaaggtgtgcttcggcatccaactgctgaatgccgtctcacgggtggagcgcgccctccccaagctgactgtgcccttcctgctgctccagggctctgccgatcgcctatgtgacagcaaaggggcctacctgctcatggagttagccaagagccaggacaagactctcaagatttatgaaggtgcctaccatgttctccacaaggagcttcctgaagtcaccaactccgtcttccatgaaataaacatgtgggtctctcaaaggacagccacggcaggaactgcgtccccaccctgaatgcattggccggtgcccggctcatggtctgggggatgcaggcaggggaagggcagagatggcttctcagatatggcttgccaaaaaaaaaaaaaaaaaatcagaaattggagaaatccttaacacaattttctaaaaaataacagacatttttgttatacattagactatcagacactggacctaccttaatggttagacactttatgcaaaaaaagagaaaggtcccaggtgattttccacaaagaatgtgctaaaatgtccactgaaaacaaagccaagcctctgccctgcctctcccagctcccacaagggttccaggaattcctggtgttcccaggacaccagactgcaataactggaggcgcctccttcctgcccacccttcgctcacgccccagcgccctctctgaccagcctccgcttggtggccttcctctggccgtgtgatgaggtggttgctgtctccataggggccagctccccagggcagactcacgtgcccctctgaggctcagaaaatgcccagcccttcctcaaaatgagcagccacccatgactttgtgggctccttgttagcctgagaccaggctttgcagaggggcggggggtgaggcttagcccagaaggagaactgagcaggaaaccaaggctcttctctgtcccctgcccttcccctcctgccagggggaggctcaggttggtccccgagtgccgcctgtactcacaaaggctgcctttcctctagagtcactaattttacctgatgctatgagagaatcatattgaagatgaaatgtctaatatataatgtatattttaaagcagagactattttggtggataggtgggagggagcaaggggagtttgagggaatcagagcttgatgctactgtacagaactggacaggttgggccggcagtggtggggccagagggctctgtgctctaggagctaagccagcagcccccgagaggggacttggctgggcctttcctatgggcaaggcccagtgctcttcctgcccaccagggaccatggagcagtggcaccctatggggctatgatccctaggcctgggcctgggcctgcctgtggcccagagctaccctgggagtgtcagtgctagcagcacagctacctctggtggcaggagaagagaggcccagcacagcagcaggccaggccttcctgtccaggtctgcatggagcactcggtgacccagagcagggactggaggcacccccagccctgccccaggccacagcaggacaggccgggacaggcctcacccaaggccaaggctggcatcagccaatcattcagagctgaggccctgggcctagcctgcccttctcaggtgccaataccaccccagccctgcccttggcctcactttttcccagcaataagtggggttcaccacccgcctcgggaatactttccccttctaaatgggacttgctgttacctcaggaggctccttagtgcaaatatgaccctggtcagggctttgccaccgttgaagccctgcagaaggtgcaatgtaggggttctggggccacagaggagaggccacttcccaccaggacccccaacatgaagtctaggcctcaggggctcccgcccttcttcctccagcagcgggaactgccactgctctcccaggccctgttctggaggctaaccttggttcctggagagtgtgcccctccaccctccctccagcagccctgatcacaccatgagagccaggaacgggtcaccctgctgaagatcactctgtgccctgggggaggagccaagccctcaccccacaaggggcaggtgggggcttggttgctgacccggcccaagtccccacagagcaccttctgtagctccagcttgtctccctggcttctctttgaaggagaaaaatgtaaaatatgcactgagaaagccagccccgcctgcttagtcagccccggcagcagggcagccatgggaactcaggaaaagcaggaaccctttccaaaagcccagagatgccctgggctcagatctgtaattctcccaggagctgtgatagagcaggccacacaaagtccctacgcctccctgctgcctcccccagatgcatgtgatggcatcaccattccccaaattgaatatcagcatgcggcctgaccagggactctttagatgcatgaatttatttatatgaaggctctcacagagacacacacagcacttcagtagcatttgcattcctggttaaagaatcaccaatatttaaaataaaaactttcctgaaattgggactgtcatgttatccagaagggctggtacatccgcccaccatgtccccctgctgggtcaggagccaacacaggaccctgcgtgtgagcgtgcctgacatctcacgcacggccactccagagccggtccctgtccttggaaagctgtgaagccttgcgttgagttccttctcgatactgacggctccgtgctgacattctgagctctggagtcacaccagcgcaggggcgtggaggaactgaggtttggaaggaatgccaggtctcgcacagcttggcctcgagaaggtgagaggaaggcaaaggccagggaggggacccagagaggcctggcacacaaggcccaagcaccaccgtcaacacagcccagtccatacagaaatgggtttcatgcctgaaaagctttttacagaaagatgccgcctgtagccagtgacagccgcaaccctacaggcctcagttccttgcagaggtgaggggtagagagtcagcctctctcccttccagcagcgacccagcttccctccacttccaggtggtgctgggctcaccaagggagcactggtgggtgctctgaaaacccacaggatcccacctccaggcccacctgggtcccatctcactctcttcttctttcaccaattgctaacatagaccttgttgggatcacgatggcttcacaagccagctgttgggtttgctatgtcactgtggctcagtcacatccctgcgtgtatactgtctgcggggcacatatgtatccatttagagctaaaggaatcagtgtacactacagctaatcctaataaatccgatgttttcggaa

SEQ ID NO: 115259 - DNA, 4155 bp, Homo sapiens
ggctggagagttgcatgatccagctcaacgacctgtctgtctgcattaacagtagcctgaattatgacagtagtggctgtgctcccaaagggggttaaagtacttgagctatcccttctggaagcacagccccttttgaagacagaagatgctgactaattagcagttccagccgtgctcctcagtagccaagggaaatgcaggaaagaaatcccatcagccaatcccagaaatatcagggccctcatctttgtgtcccatggagccggagagcacagtggccgctatgaagagctggctcggatgctgatggggctggacctgctggtgttcgcccacgaccatgttggccacggacagagcgaaggggagaggatggtagtgtctgacttccacgttttcgtcagggatgtgttgcagcatgtggattccatgcagaaagactaccctgggcttcctgtcttccttctgggccactccatgggaggcgccatcgccatcctcacggccgcagagaggccgggccacttcgccggcatggtactcatttcgcctctggttcttgccaatcctgaatctgcaacaactttcaaggtccttgctgcgaaagtgctcaaccttgtgctgccaaacttgtccctcgggcccatcgactccagcgtgctctctcggaataagacagaggtcgacatttataactcagaccccctgatctgccgggcagggctgaaggtgtgcttcggcatccaactgctgaatgccgtctcacgggtggagcgcgccctccccaagctgactgtgcccttcctgctgctccagggctctgccgatcgcctatgtgacagcaaaggggcctacctgctcatggagttagccaagagccaggacaagactctcaagatttatgaaggtgcctaccatgttctccacaaggagcttcctgaagtcaccaactccgtcttccatgaaataaacatgtgggtctctcaaaggacagccacggcaggaactgcgtccccaccctgaatgcattggccggtgcccggctcatggtctgggggatgcaggcaggggaagggcagagatggcttctcagatatggcttgccaaaaaaaaaaaaaaaaaatcagaaattggagaaatccttaacacaattttctaaaaaataacagacatttttgttatacattagactatcagacactggacctaccttaatggttagacactttatgcaaaaaaagagaaaggtcccaggtgattttccacaaagaatgtgctaaaatgtccactgaaaacaaagccaagcctctgccctgcctctcccagctcccacaagggttccaggaattcctggtgttcccaggacaccagactgcaataactggaggcgcctccttcctgcccacccttcgctcacgccccagcgccctctctgaccagcctccgcttggtggccttcctctggccgtgtgatgaggtggttgctgtctccataggggccagctccccagggcagactcacgtgcccctctgaggctcagaaaatgcccagcccttcctcaaaatgagcagccacccatgactttgtgggctccttgttagcctgagaccaggctttgcagaggggcggggggtgaggcttagcccagaaggagaactgagcaggaaaccaaggctcttctctgtcccctgcccttcccctcctgccagggggaggctcaggttggtccccgagtgccgcctgtactcacaaaggctgcctttcctctagagtcactaattttacctgatgctatgagagaatcatattgaagatgaaatgtctaatatataatgtatattttaaagcagagactattttggtggataggtgggagggagcaaggggagtttgagggaatcagagcttgatgctactgtacagaactggacaggttgggccggcagtggtggggccagagggctctgtgctctaggagctaagccagcagcccccgagaggggacttggctgggcctttcctatgggcaaggcccagtgctcttcctgcccaccagggaccatggagcagtggcaccctatggggctatgatccctaggcctgggcctgggcctgcctgtggcccagagctaccctgggagtgtcagtgctagcagcacagctacctctggtggcaggagaagagaggcccagcacagcagcaggccaggccttcctgtccaggtctgcatggagcactcggtgacccagagcagggactggaggcacccccagccctgccccaggccacagcaggacaggccgggacaggcctcacccaaggccaaggctggcatcagccaatcattcagagctgaggccctgggcctagcctgcccttctcaggtgccaataccaccccagccctgcccttggcctcactttttcccagcaataagtggggttcaccacccgcctcgggaatactttccccttctaaatgggacttgctgttacctcaggaggctccttagtgcaaatatgaccctggtcagggctttgccaccgttgaagccctgcagaaggtgcaatgtaggggttctggggccacagaggagaggccacttcccaccaggacccccaacatgaagtctaggcctcaggggctcccgcccttcttcctccagcagcgggaactgccactgctctcccaggccctgttctggaggctaaccttggttcctggagagtgtgcccctccaccctccctccagcagccctgatcacaccatgagagccaggaacgggtcaccctgctgaagatcactctgtgccctgggggaggagccaagccctcaccccacaaggggcaggtgggggcttggttgctgacccggcccaagtccccacagagcaccttctgtagctccagcttgtctccctggcttctctttgaaggagaaaaatgtaaaatatgcactgagaaagccagccccgcctgcttagtcagccccggcagcagggcagccatgggaactcaggaaaagcaggaaccctttccaaaagcccagagatgccctgggctcagatctgtaattctcccaggagctgtgatagagcaggccacacaaagtccctacgcctccctgctgcctcccccagatgcatgtgatggcatcaccattccccaaattgaatatcagcatgcggcctgaccagggactctttagatgcatgaatttatttatatgaaggctctcacagagacacacacagcacttcagtagcatttgcattcctggttaaagaatcaccaatatttaaaataaaaactttcctgaaattgggactgtcatgttatccagaagggctggtacatccgcccaccatgtccccctgctgggtcaggagccaacacaggaccctgcgtgtgagcgtgcctgacatctcacgcacggccactccagagccggtccctgtccttggaaagctgtgaagccttgcgttgagttccttctcgatactgacggctccgtgctgacattctgagctctggagtcacaccagcgcaggggcgtggaggaactgaggtttggaaggaatgccaggtctcgcacagcttggcctcgagaaggtgagaggaaggcaaaggccagggaggggacccagagaggcctggcacacaaggcccaagcaccaccgtcaacacagcccagtccatacagaaatgggtttcatgcctgaaaagctttttacagaaagatgccgcctgtagccagtgacagccgcaaccctacaggcctcagttccttgcagaggtgaggggtagagagtcagcctctctcccttccagcagcgacccagcttccctccacttccaggtggtgctgggctcaccaagggagcactggtgggtgctctgaaaacccacaggatcccacctccaggcccacctgggtcccatctcactctcttcttctttcaccaattgctaacatagaccttgttgggatcacgatggcttcacaagccagctgttgggtttgctatgtcactgtggctcagtcacatccctgcgtgtatactgtctgcggggcacatatgtatccatttagagctaaaggaatcagtgtacactacagctaatcctaataaatccgatgttttcggaa

SEQ ID NO: 115260 - DNA, 3232 bp, Homo sapiens
ctccatctttctagtccccaccttccccggtgcagacacccggcgaagcccacccggttttcccagcggcatttccgatgacagcttcggggctacgtgtcctgtgctgtcggagacgcacaggaagcaaagtttgtgagaagccttgggggcgactttgccttgggcacccgcatttgtgcgtctgcgaggtgcctcggtgtgcgcggagctagtttcccagtttcccgggcccctcccttctccgagcccctctagcgatttgtttaggaaaagtgatgacatgaactagtagtggagaatcgcagcgccgctccccgccctggggagggaggggagccccggagagcctgccggtgggagctggaagcaggctcccggctgagcgccccagcccgaaaggcagggtctgggtgcgggaagagggctcggagctgccttcctgctgccttggggccgcccagatgagggaacagcccgatttgcctggttctgattctccaggctgtcgtggttgtggaatgcaaacgccagcacataatggaaacaggacctgaagacccttccagcatgccagaggaaagttcccccaggcggaccccgcagagcattccctaccaggacctccctcacctggtcaatgcagacggacagtacctcttctgcaggtactggaaacccacaggcacacccaaggccctcatctttgtgtcccatggagccggagagcacagtggccgctatgaagagctggctcggatgctgatggggctggacctgctggtgttcgcccacgaccatgttggccacggacagagcgaaggggagaggatggtagtgtctgacttccacgttttcgtcagggatgtgttgcagcatgtggattccatgcagaaagactaccctgggcttcctgtcttccttctgggccactccatgggaggcgccatcgccatcctcacggccgcagagaggccgggccacttcgccggcatggtactcatttcgcctctggttcttgccaatcctgaatctgcaacaactttcaaggtccttgctgcgaaagtgctcaaccttgtgctgccaaacttgtccctcgggcccatcgactccagcgtgctctctcggaataagacagaggtcgacatttataactcagaccccctgatctgccgggcagggctgaaggtgtgcttcggcatccaactgctgaatgccgtctcacgggtggagcgcgccctccccaagctgactgtgcccttcctgctgctccagggctctgccgatcgcctatgtgacagcaaaggggcctacctgctcatggagttagccaagagccaggacaagactctcaagatttatgaaggtgcctaccatgttctccacaaggagcttcctgaagtcaccaactccgtcttccatgaaataaacatgtgggtctctcaaaggacagccacggcaggaactgcgtccccaccctgaatgcattggccggtgcccggctcatggtctgggggatgcaggcaggggaagggcagagatggcttctcagatatggcttgccaaaaaaaaaaaaaaaaaatcagaaattggagaaatccttaacacaattttctaaaaaataacagacatttttgttatacattagactatcagacactggacctaccttaatggttagacactttatgcaaaaaaagagaaaggtcccaggtgattttccacaaagaatgtgctaaaatgtccactgaaaacaaagccaagcctctgccctgcctctcccagctcccacaagggttccaggaattcctggtgttcccaggacaccagactgcaataactggaggcgcctccttcctgcccacccttcgctcacgccccagcgccctctctgaccagcctccgcttggtggccttcctctggccgtgtgatgaggtggttgctgtctccataggggccagctccccagggcagactcacgtgcccctctgaggctcagaaaatgcccagcccttcctcaaaatgagcagccacccatgactttgtgggctccttgttagcctgagaccaggctttgcagaggggcggggggtgaggcttagcccagaaggagaactgagcaggaaaccaaggctcttctctgtcccctgcccttcccctcctgccagggggaggctcaggttggtccccgagtgccgcctgtactcacaaaggctgcctttcctctagagtcactaattttacctgatgctatgagagaatcatattgaagatgaaatgtctaatatataatgtatattttaaagcagagactattttggtggataggtgggagggagcaaggggagtttgagggaatcagagcttgatgctactgtacagaactggacaggttgggccggcagtggtggggccagagggctctgtgctctaggagctaagccagcagcccccgagaggggacttggctgggcctttcctatgggcaaggcccagtgctcttcctgcccaccagggaccatggagcagtggcaccctatggggctatgatccctaggcctgggcctgggcctgcctgtggcccagagctaccctgggagtgtcagtgctagcagcacagctacctctggtggcaggagaagagaggcccagcacagcagcaggccaggccttcctgtccaggtctgcatggagcactcggtgacccagagcagggactggaggcacccccagccctgccccaggccacagcaggacaggccgggacaggcctcacccaaggccaaggctggcatcagccaatcattcagagctgaggccctgggcctagcctgcccttctcaggtgccaataccaccccagccctgcccttggcctcactttttcccagcaataagtggggttcaccacccgcctcgggaatactttccccttctaaatgggacttgctgttacctcaggaggctccttagtgcaaatatgaccctggtcagggctttgccaccgttgaagccctgcagaaggtgcaatgtaggggttctggggccacagaggagaggccacttcccaccaggacccccaacatgaagtctaggcctcaggggctcccgcccttcttcctccagcagcgggaactgccactgctctccaggaaccaacgctagcctccagaacagggcctgggagagtcgagcggccgcgaatttagtagtagtagtagtagtagtaggc

SEQ ID NO: 115261 - DNA, 3452 bp, Homo sapiens
ctccatctttctagtccccaccttccccggtgcagacacccggcgaagcccacccggttttcccagcggcatttccgatgacagcttcggggctacgtgtcctgtgctgtcggagacgcacaggaagcaaagtttgtgagaagccttgggggcgactttgccttgggcacccgcatttgtgcgtctgcgaggtgcctcggtgtgcgcggagctagtttcccagtttcccgggcccctcccttctccgagcccctctagcgatttgtttaggaaaagtgatgacatgaactagtagtggagaatcgcagcgccgctccccgccctggggagggaggggagccccggagagcctgccggtgggagctggaagcaggctcccggctgagcgccccagcccgaaaggcagggtctgggtgcgggaagagggctcggagctgccttcctgctgccttggggccgcccagatgagggaacagcccgatttgcctggttctgattctccaggctgtcgtggttgtggaatgcaaacgccagcacataatggaaacaggacctgaagacccttccagcatgccagaggaaagttcccccaggcggaccccgcagagcattccctaccaggacctccctcacctggtcaatgcagacggacagtacctcttctgcaggtactggaaacccacaggcacacccaaggccctcatctttgtgtcccatggagccggagagcacagtggccgctatgaagagctggctcggatgctgatggggctggacctgctggtgttcgcccacgaccatgttggccacggacagagcgaaggggagaggatggtagtgtctgacttccacgttttcgtcagggatgtgttgcagcatgtggattccatgcagaaagactaccctgggcttcctgtcttccttctgggccactccatgggaggcgccatcgccatcctcacggccgcagagaggccgggccacttcgccggcatggtactcatttcgcctctggttcttgccaatcctgaatctgcaacaactttcaaggtccttgctgcgaaagtgctcaaccttgtgctgccaaacttgtccctcgggcccatcgactccagcgtgctctctcggaataagacagaggtcgacatttataactcagaccccctgatctgccgggcagggctgaaggtgtgcttcggcatccaactgctgaatgccgtctcacgggtggagcgcgccctccccaagctgactgtgcccttcctgctgctccagggctctgccgatcgcctatgtgacagcaaaggggcctacctgctcatggagttagccaagagccaggacaagactctcaagatttatgaaggtgcctaccatgttctccacaaggagcttcctgaagtcaccaactccgtcttccatgaaataaacatgtgggtctctcaaaggacagccacggcaggaactgcgtccccaccctgaatgcattggccggtgcccggctcatggtctgggggatgcaggcaggggaagggcagagatggcttctcagatatggcttgccaaaaaaaaaaaaaaaaaatcagaaattggagaaatccttaacacaattttctaaaaaataacagacatttttgttatacattagactatcagacactggacctaccttaatggttagacactttatgcaaaaaaagagaaaggtcccaggtgattttccacaaagaatgtgctaaaatgtccactgaaaacaaagccaagcctctgccctgcctctcccagctcccacaagggttccaggaattcctggtgttcccaggacaccagactgcaataactggaggcgcctccttcctgcccacccttcgctcacgccccagcgccctctctgaccagcctccgcttggtggccttcctctggccgtgtgatgaggtggttgctgtctccataggggccagctccccagggcagactcacgtgcccctctgaggctcagaaaatgcccagcccttcctcaaaatgagcagccacccatgactttgtgggctccttgttagcctgagaccaggctttgcagaggggcggggggtgaggcttagcccagaaggagaactgagcaggaaaccaaggctcttctctgtcccctgcccttcccctcctgccagggggaggctcaggttggtccccgagtgccgcctgtactcacaaaggctgcctttcctctagagtcactaattttacctgatgctatgagagaatcatattgaagatgaaatgtctaatatataatgtatattttaaagcagagactattttggtggataggtgggagggagcaaggggagtttgagggaatcagagcttgatgctactgtacagaactggacaggttgggccggcagtggtggggccagagggctctgtgctctaggagctaagccagcagcccccgagaggggacttggctgggcctttcctatgggcaaggcccagtgctcttcctgcccaccagggaccatggagcagtggcaccctatggggctatgatccctaggcctgggcctgggcctgcctgtggcccagagctaccctgggagtgtcagtgctagcagcacagctacctctggtggcaggagaagagaggcccagcacagcagcaggccaggccttcctgtccaggtctgcatggagcactcggtgacccagagcagggactggaggcacccccagccctgccccaggccacagcaggacaggccgggacaggcctcacccaaggccaaggctggcatcagccaatcattcagagctgaggccctgggcctagcctgcccttctcaggtgccaataccaccccagccctgcccttggcctcactttttcccagcaataagtggggttcaccacccgcctcgggaatactttccccttctaaatgggacttgctgttacctcaggaggctccttagtgcaaatatgaccctggtcagggctttgccaccgttgaagccctgcagaaggtgcaatgtaggggttctggggccacagaggagaggccacttcccaccaggacccccaacatgaagtctaggccttgccatatgcaattgcatatggcaaggccaagctggagttctccatttacccagcaccccagctttccacagctgtagttgagccctaccactccatcctcaccacccacaccaccctggagcactctgattgtgccttcatggtagacaatgaggccatctatgacatctgtcgtagaaacctcgatattgagcgtccaacctatactaacctgaataggttaataggtcaaattgtgtcctccatcactgcttcctgagatttgatggaggccggaatgttgacctgacagaattccagaccaacctggtgccctatccccgcatccacttccccttcgtcctgccatatg

SEQ ID NO: 115262 - DNA, 4395 bp, Homo sapiens
ctccatctttctagtccccaccttccccggtgcagacacccggcgaagcccacccggttttcccagcggcatttccgatgacagcttcggggctacgtgtcctgtgctgtcggagacgcacaggaagcaaagtttgtgagaagccttgggggcgactttgccttgggcacccgcatttgtgcgtctgcgaggtgcctcggtgtgcgcggagctagtttcccagtttcccgggcccctcccttctccgagcccctctagcgatttgtttaggaaaagtgatgacatgaactagtagtggagaatcgcagcgccgctccccgccctggggagggaggggagccccggagagcctgccggtgggagctggaagcaggctcccggctgagcgccccagcccgaaaggcagggtctgggtgcgggaagagggctcggagctgccttcctgctgccttggggccgcccagatgagggaacagcccgatttgcctggttctgattctccaggctgtcgtggttgtggaatgcaaacgccagcacataatggaaacaggacctgaagacccttccagcatgccagaggaaagttcccccaggcggaccccgcagagcattccctaccaggacctccctcacctggtcaatgcagacggacagtacctcttctgcaggtactggaaacccacaggcacacccaaggccctcatctttgtgtcccatggagccggagagcacagtggccgctatgaagagctggctcggatgctgatggggctggacctgctggtgttcgcccacgaccatgttggccacggacagagcgaaggggagaggatggtagtgtctgacttccacgttttcgtcagggatgtgttgcagcatgtggattccatgcagaaagactaccctgggcttcctgtcttccttctgggccactccatgggaggcgccatcgccatcctcacggccgcagagaggccgggccacttcgccggcatggtactcatttcgcctctggttcttgccaatcctgaatctgcaacaactttcaaggtccttgctgcgaaagtgctcaaccttgtgctgccaaacttgtccctcgggcccatcgactccagcgtgctctctcggaataagacagagatttatgaaggtgcctaccatgttctccacaaggagcttcctgaagtcaccaactccgtcttccatgaaataaacatgtgggtctctcaaaggacagccacggcaggaactgcgtccccaccctgaatgcattggccggtgcccggctcatggtctgggggatgcaggcaggggaagggcagagatggcttctcagatatggcttgccaaaaaaaaaaaaaaaaaatcagaaattggagaaatccttaacacaattttctaaaaaataacagacatttttgttatacattagactatcagacactggacctaccttaatggttagacactttatgcaaaaaaagagaaaggtcccaggtgattttccacaaagaatgtgctaaaatgtccactgaaaacaaagccaagcctctgccctgcctctcccagctcccacaagggttccaggaattcctggtgttcccaggacaccagactgcaataactggaggcgcctccttcctgcccacccttcgctcacgccccagcgccctctctgaccagcctccgcttggtggccttcctctggccgtgtgatgaggtggttgctgtctccataggggccagctccccagggcagactcacgtgcccctctgaggctcagaaaatgcccagcccttcctcaaaatgagcagccacccatgactttgtgggctccttgttagcctgagaccaggctttgcagaggggcggggggtgaggcttagcccagaaggagaactgagcaggaaaccaaggctcttctctgtcccctgcccttcccctcctgccagggggaggctcaggttggtccccgagtgccgcctgtactcacaaaggctgcctttcctctagagtcactaattttacctgatgctatgagagaatcatattgaagatgaaatgtctaatatataatgtatattttaaagcagagactattttggtggataggtgggagggagcaaggggagtttgagggaatcagagcttgatgctactgtacagaactggacaggttgggccggcagtggtggggccagagggctctgtgctctaggagctaagccagcagcccccgagaggggacttggctgggcctttcctatgggcaaggcccagtgctcttcctgcccaccagggaccatggagcagtggcaccctatggggctatgatccctaggcctgggcctgggcctgcctgtggcccagagctaccctgggagtgtcagtgctagcagcacagctacctctggtggcaggagaagagaggcccagcacagcagcaggccaggccttcctgtccaggtctgcatggagcactcggtgacccagagcagggactggaggcacccccagccctgccccaggccacagcaggacaggccgggacaggcctcacccaaggccaaggctggcatcagccaatcattcagagctgaggccctgggcctagcctgcccttctcaggtgccaataccaccccagccctgcccttggcctcactttttcccagcaataagtggggttcaccacccgcctcgggaatactttccccttctaaatgggacttgctgttacctcaggaggctccttagtgcaaatatgaccctggtcagggctttgccaccgttgaagccctgcagaaggtgcaatgtaggggttctggggccacagaggagaggccacttcccaccaggacccccaacatgaagtctaggcctcaggggctcccgcccttcttcctccagcagcgggaactgccactgctctcccaggccctgttctggaggctaaccttggttcctggagagtgtgcccctccaccctccctccagcagccctgatcacaccatgagagccaggaacgggtcaccctgctgaagatcactctgtgccctgggggaggagccaagccctcaccccacaaggggcaggtgggggcttggttgctgacccggcccaagtccccacagagcaccttctgtagctccagcttgtctccctggcttctctttgaaggagaaaaatgtaaaatatgcactgagaaagccagccccgcctgcttagtcagccccggcagcagggcagccatgggaactcaggaaaagcaggaaccctttccaaaagcccagagatgccctgggctcagatctgtaattctcccaggagctgtgatagagcaggccacacaaagtccctacgcctccctgctgcctcccccagatgcatgtgatggcatcaccattccccaaattgaatatcagcatgcggcctgaccagggactctttagatgcatgaatttatttatatgaaggctctcacagagacacacacagcacttcagtagcatttgcattcctggttaaagaatcaccaatatttaaaataaaaactttcctgaaattgggactgtcatgttatccagaagggctggtacatccgcccaccatgtccccctgctgggtcaggagccaacacaggaccctgcgtgtgagcgtgcctgacatctcacgcacggccactccagagccggtccctgtccttggaaagctgtgaagccttgcgttgagttccttctcgatactgacggctccgtgctgacattctgagctctggagtcacaccagcgcaggggcgtggaggaactgaggtttggaaggaatgccaggtctcgcacagcttggcctcgagaaggtgagaggaaggcaaaggccagggaggggacccagagaggcctggcacacaaggcccaagcaccaccgtcaacacagcccagtccatacagaaatgggtttcatgcctgaaaagctttttacagaaagatgccgcctgtagccagtgacagccgcaaccctacaggcctcagttccttgcagaggtgaggggtagagagtcagcctctctcccttccagcagcgacccagcttccctccacttccaggtggtgctgggctcaccaagggagcactggtgggtgctctgaaaacccacaggatcccacctccaggcccacctgggtcccatctcactctcttcttctttcaccaattgctaacatagaccttgttgggatcacgatggcttcacaagccagctgttgggtttgctatgtcactgtggctcagtcacatccctgcgtgtatactgtctgcggggcacatatgtatccatttagagctaaaggaatcagtgtacactacagctaatcctaataaatccgatgttttcggaa

SEQ ID NO: 115263 - DNA, 3999 bp, Homo sapiens
  misc_feature (85)..(85): n is a, c, g, or t
  misc_feature (113)..(113): n is a, c, g, or t
gggactggaggcacccccagccctgccccaggccacagcaggacaggccgggacaggcctcacccaaggccaaggctggcatcanccaatcattcagagctgaggccctgggnctagcctgcccttctcaggtgccaataccaccccagccctgcccttggcctcactttttcccagcaataagtggggttcaccacccgcctcgggaatactttccccttctaaatgggacttgctgttacctcaggaggctccttagtgcaaatatgaccctggtcagggctttgccaccgttgaagccctgcagaaggtgcaatgtaggggttctggggccacagaggagaggccacttcccaccaggacccccaacatgaagtctaggcctcaggggctcccgcccttcttcctccagcagcgggaactgccactgctctcccaggccctgttctggaggctaaccttggttcctggagagtgtgcccctccaccctccctccagcagccctgatcacaccatgagagccaggaacgggtcaccctgctgaagatcactctgtgccctgggggaggagccaagccctcaccccacaaggggcaggtgggggcttggttgctgaccggccaagtccccacagagcacttctgtagctccagcttgtctccctggcttctctttgaaggagaaaaatgtaaaatatgcactgagaaagccagccccgcctgcctcccccagatgcatgtgatggcatcaccattccccaaattgaatatcagcatgcggcctgaccagggactctttagatgcatgaatttatttatatgtgggtctctcaaaggacagccacggcaggaactgcgtccccaccctgaatgcattggccggtgcccggctcatggtctgggggatgcaggcaggggaagggcagagatggcttctcagatatggcttgccaaaaaaaaaaaaaaaaaatcagaaattggagaaatccttaacacaattttctaaaaaataacagacatttttgttatacattagactatcagacactggacctaccttaatggttagacactttatgcaaaaaaagagaaaggtcccaggtgattttccacaaagaatgtgctaaaatgtccactgaaaacaaagccaagcctctgccctgcctctcccagctcccacaagggttccaggaattcctggtgttcccaggacaccagactgcaataactggaggcgcctccttcctgcccacccttcgctcacgccccagcgccctctctgaccagcctccgcttggtggccttcctctggccgtgtgatgaggtggttgctgtctccataggggccagctccccagggcagactcacgtgcccctctgaggctcagaaaatgcccagcccttcctcaaaatgagcagccacccatgactttgtgggctccttgttagcctgagaccaggctttgcagaggggcggggggtgaggcttagcccagaaggagaactgagcaggaaaccaaggctcttctctgtcccctgcccttcccctcctgccagggggaggctcaggttggtccccgagtgccgcctgtactcacaaaggctgcctttcctctagagtcactaattttacctgatgctatgagagaatcatattgaagatgaaatgtctaatatataatgtatattttaaagcagagactattttggtggataggtgggagggagcaaggggagtttgagggaatcagagcttgatgctactgtacagaactggacaggttgggccggcagtggtggggccagagggctctgtgctctaggagctaagccagcagcccccgagaggggacttggctgggcctttcctatgggcaaggcccagtgctcttcctgcccaccagggaccatggagcagtggcaccctatggggctatgatccctaggcctgggcctgggcctgcctgtggcccagagctaccctgggagtgtcagtgctagcagcacagctacctctggtggcaggagaagagaggcccagcacagcagcaggccaggccttcctgtccaggtctgcatggagcactcggtgacccagagcagggactggaggcacccccagccctgccccaggccacagcaggacaggccgggacaggcctcacccaaggccaaggctggcatcagccaatcattcagagctgaggccctgggcctagcctgcccttctcaggtgccaataccaccccagccctgcccttggcctcactttttcccagcaataagtggggttcaccacccgcctcgggaatactttccccttctaaatgggacttgctgttacctcaggaggctccttagtgcaaatatgaccctggtcagggctttgccaccgttgaagccctgcagaaggtgcaatgtaggggttctggggccacagaggagaggccacttcccaccaggacccccaacatgaagtctaggcctcaggggctcccgcccttcttcctccagcagcgggaactgccactgctctcccaggccctgttctggaggctaaccttggttcctggagagtgtgcccctccaccctccctccagcagccctgatcacaccatgagagccaggaacgggtcaccctgctgaagatcactctgtgccctgggggaggagccaagccctcaccccacaaggggcaggtgggggcttggttgctgacccggcccaagtccccacagagcaccttctgtagctccagcttgtctccctggcttctctttgaaggagaaaaatgtaaaatatgcactgagaaagccagccccgcctgcttagtcagccccggcagcagggcagccatgggaactcaggaaaagcaggaaccctttccaaaagcccagagatgccctgggctcagatctgtaattctcccaggagctgtgatagagcaggccacacaaagtccctacgcctccctgctgcctcccccagatgcatgtgatggcatcaccattccccaaattgaatatcagcatgcggcctgaccagggactctttagatgcatgaatttatttatatgaaggctctcacagagacacacacagcacttcagtagcatttgcattcctggttaaagaatcaccaatatttaaaataaaaactttcctgaaattgggactgtcatgttatccagaagggctggtacatccgcccaccatgtccccctgctgggtcaggagccaacacaggaccctgcgtgtgagcgtgcctgacatctcacgcacggccactccagagccggtccctgtccttggaaagctgtgaagccttgcgttgagttccttctcgatactgacggctccgtgctgacattctgagctctggagtcacaccagcgcaggggcgtggaggaactgaggtttggaaggaatgccaggtctcgcacagcttggcctcgagaaggtgagaggaaggcaaaggccagggaggggacccagagaggcctggcacacaaggcccaagcaccaccgtcaacacagcccagtccatacagaaatgggtttcatgcctgaaaagctttttacagaaagatgccgcctgtagccagtgacagccgcaaccctacaggcctcagttccttgcagaggtgaggggtagagagtcagcctctctcccttccagcagcgacccagcttccctccacttccaggtggtgctgggctcaccaagggagcactggtgggtgctctgaaaacccacaggatcccacctccaggcccacctgggtcccatctcactctcttcttctttcaccaattgctaacatagaccttgttgggatcacgatggcttcacaagccagctgttgggtttgctatgtcactgtggctcagtcacatccctgcgtgtatactgtctgcggggcacatatgtatccatttagagctaaaggaatcagtgtacactacagctaatcctaataaatccgatgttttcggaa

SEQ ID NO: 115264 - DNA, 1844 bp, Homo sapiens
caacttaggctaggtacgaggcctgggtgtgaccaatcattcagagctgaggccctgggcctagcctgcccttctcaggtgccaataccaccccagccctgcccttggcctcactttttcccagcaataagtggggttcaccacccgcctcgggaatactttccccttctaaatgggacttgctgttacctcaggaggctccttagtgcaaatatgaccctggtcagggctttgccaccgttgaagccctgcagaaggtgcaatgtaggggttctggggccacagaggagaggccacttcccaccaggacccccaacatgaagtctaggcctcaggggctcccgcccttcttcctccagcagcgggaactgccactgctctcccaggccctgttctggaggctaaccttggttcctggagagtgtgcccctccaccctccctccagcagccctgatcacaccatgagagccaggaacgggtcaccctgctgaagatcactctgtgccctgggggaggagccaagccctcaccccacaaggggcaggtgggggcttggttgctgacccggcccaagtccccacagagcaccttctgtagctccagcttgtctccctggcttctctttgaaggagaaaaatgtaaaatatgcactgagaaagccagccccgcctgcttagtcagccccggcagcagggcagccatgggaactcaggaaaagcaggaaccctttccaaaagcccagagatgccctgggctcagatctgtaattctcccaggagctgtgatagagcaggccacacaaagtccctacgcctccctgctgcctcccccagatgcatgtgatggcatcaccattccccaaattgaatatcagcatgcggcctgaccagggactctttagatgcatgaatttatttatatgaaggctctcacagagacacacacagcacttcagtagcatttgcattcctggttaaagaatcaccaatatttaaaataaaaactttcctgaaattgggactgtcatgttatccagaagggctggtacatccgcccaccatgtccccctgctgggtcaggagccaacacaggaccctgcgtgtgagcgtgcctgacatctcacgcacggccactccagagccggtccctgtccttggaaagctgtgaagccttgcgttgagttccttctcgatactgacggctccgtgctgacattctgagctctggagtcacaccagcgcaggggcgtggaggaactgaggtttggaaggaatgccaggtctcgcacagcttggcctcgagaaggtgagaggaaggcaaaggccagggaggggacccagagaggcctggcacacaaggcccaagcaccaccgtcaacacagcccagtccatacagaaatgggtttcatgcctgaaaagctttttacagaaagatgccgcctgtagccagtgacagccgcaaccctacaggcctcagttccttgcagaggtgaggggtagagagtcagcctctctcccttccagcagcgacccagcttccctccacttccaggtggtgctgggctcaccaagggagcactggtgggtgctctgaaaacccacaggatcccacctccaggcccacctgggtcccatctcactctcttcttctttcaccaattgctaacatagaccttgttgggatcacgatggcttcacaagccagctgttgggtttgctatgtcactgtggctcagtcacatccctgcgtgtatactgtctgcggggcacatatgtatccatttagagctaaaggaatcagtgtacactacagctaatcctaataaatccgatgttttcggaa

SEQ ID NO: 115265 - DNA, 783 bp, Homo sapiens
agcaattgcaataataaaataattggcatacacattagaaaaagatactcaactatccctatttggtgacagttatgattatttgcataacacgtagagtttaataagggaatttggtaaagtaataggttaatacaagtgtaatcagtagattttctctcctgcaaaacatatatgaaataaacttttaaaacccattcccaatagcaatgaaaataataaaatatataggaaatatataatcaagaaaggtataatatgtagaaacctatagaataaatggaaaggcttcttgaacagaaagacttaatataaaaatatcagttctccaaaaattaataaaattaataaatttaattaataaataaatttaagttcttattagaattccaagagaatcaggataaaaagaactgaataaatttgtcttaagtttacatgaaaaataaaggcacaaaaataccgaaggaagctatgaaagttaacagcgagggaaaacttaaaaatactgggtatcagaatatgctataaagacactgtaatatactatttagaaataggaatagacaaatagatcgatagaacagaataaagaataaaaaaaaacaaatctcatatactttgagatctatttatgagaatgtagtatggccaagattcaattcagctggaaatggagggggttatttaataagtggtacagaactggctactgatcttaaagaaaataaaaatgctcctccactcatactctatttaaacattaatttcaaaaaaatgaat

SEQ ID NO: 115266 - DNA, 337 bp, Homo sapiens
gtgtccacggtgggaagtgtgtggcgagaaggattctccagtatccacagcgggatgtgtgtgagtagaaggattctccagtgtccacggcgcgacgtgtgtgtgagtagaaggattctccagagtccacggcgggacgtgtgtggtgagaaggattctccagtgtccacggcaggatgtgtatggcgagaaggattctccggtgtccacggcaggacgtgtgtggcaagaaggattctccagtgtccacggcgggacgtgtgtggagatggattctccagtgtccacagcaggacatgtatggcgagaaggattctccggtgtccacggtgggacg

SEQ ID NO: 115267 - DNA, 373 bp, Homo sapiens
tgttaaatgtagattgaaagcagtctccaaggaggtatgttagcctgttcatattgctaaatggacagtaggattatgggggatttttcttaatacttttatatattgggcaagcaggcatatgggaatgatttatgggtgagacctgaagccgcacccagttcttgggtgccctgtacagcccgtatgtgaggcacagacccatggcagattgtcctggcccatttgtgattgaacctctagtagcaagagctgctttacaccggtacaacctaaaagcaggggtgtccaatcttctggcttccccgggccacattggaagaagaattgtcttgggccagacataaaatacactaacgatagctgatgagct

SEQ ID NO: 115268 - DNA, 284 bp, Homo sapiens
cgcggctctacttgtcgatgtagatctttttttttcattatactttaagttttagggtacatctgcacattctgcacacgtatcccagaacttaaagtataaaaagtataataaatttttttaaaaaaagtaattgtggtttttgccattacttttcatgaccaaaaccacagttacttttgcaccaacataatattccaaatggaatgtgccaaatgttgattctaaatattaatattccaaattgaaggaaaccctgagacagtatacttccattgtgccac

SEQ ID NO: 115269 - DNA, 364 bp, Homo sapiens
aagaaatatggtcatatttttttcagaaaaaagaaatgcacatttctgacatttattttcagtttgatattcattaagttgaattacacaatttgtaactgccagttttctcattcaccaagccaagaccaaattgaatgataaaattaaatagaaaattatgtttactttttcataattgcaccatttagtgttatcccttgcattctgtgatatataaaaatggataggaactttaaaaaatatacaatcatttctttttagagtccacaattttggcaagtattttggaaggtttatgaatatctacgtagctttctcacatttttccaatggatgtttgctatggactgaatgtttgtgt

SEQ ID NO: 115270 - DNA, 229 bp, Homo sapiens
tccccggccccaactttccatactgtattcattggaaggaagtcactatgctccccctccttagagttggagtatctacagaatttatttggaattcttccctccaggtctttccaataaatggttgttctcagcaagtgggtgagtactccaccagcattttatttatttatattttatttcatttttcattttattttgagacagagtcttgctctgtcgcccaggc

SEQ ID NO: 115271 - DNA, 469 bp, Homo sapiens
cacctcaaatttcatgccactcagctcagacttggtccctctctccttgttccagatccaaggcccaagctgctttccgagctcacgacatactctcttctccttctccctccacaaattccaactcttccatcaacaaacacaggcagtccaggggagaaaatgcccaactggccctgaggctgaccagtttgggaaggaaacaaatcagaagttatctatttcatgtttgggcagtgtttttttgtttttgttttttttgaaacagagtctcactctgtcgcccaggctggagtgcaatggcatgatcttggctcagagcaacctccgccttccaggttcaagcgatcctcctgcctcagcctcctaagtagctgggactacaagcatgcaccaccatgcccggctaatttttgtatttttagtagagacggggtttcaccatgttggccaggctggtctcgaactc

SEQ ID NO: 115272 - DNA, 320 bp, Homo sapiens
atagttttgggatctctatggcattttaatataggagatgacatttaggacagtaaatgactctattcaaacagatcctcagtgtgaaagtatacctatggatatgagcaatacatgagcatataatgttttcaattttccaaagatacctcctttttaaaggtaatattcatctttaaatcttttctagcattagaaagtgcactagatacacataaattttgagaaccaatgtaccagtcttgttatatcccccagaggtattgcatttctgatcctgaatcccatcctggcaccttgaaccatttcactctccaagg

SEQ ID NO: 115273 - DNA, 326 bp, Homo sapiens
ataggtgtctactcattaagaatgatgctagctgttaaattagccaggcacggtggttcatgtacccaaatatcactgggtcctattaatatgtacaattactacatgttaactaaaaataaaacaaaattataaaaataaaaaattataaatattaattaaccatattaataatactaaagagacaaatcatataataatgttaagtgctgaaaaataaaattcaagaaccattcctaattattaaaaaatcttacaataaaaatagatgatttcctaacatgataaaatatatctatctcttaatagctagcaagcatcattct

SEQ ID NO: 115274 - DNA, 279 bp, Homo sapiens
aacccaccggctctgacctgcagtttcttctgtaaagatggggacagttcatagatctcttgagaggatgaaaaatcatgcatctccagcgtccagcctggtgcctgacatgaaatggaggcttactggtcgggagctctgacattatctggaattctccattactcttctcacacctgtccaccatcgtctggaattctccattactctcctcgcacctgtcccaccatcgtctggaattctccattactctcctcacacctgtcccaccatcgtctg

SEQ ID NO: 115275 - DNA, 887 bp, Homo sapiens
gaggcactgataccaaaaccaaactacaggtaaggatatagtggcaaagattgaatgacacaggctgggcattgaattcaatgcttctgtttggaggtatgactttggtctgtgaagaggtaaagggtattcatctgtgttgtcccatagtcctgttgccatcacttctctcctggccagatttcttaggacttcatgacaagtgtttgtgtattttgagtctgtgtgtacacagacctgaggaggcgccaagtatatcaaggctttggacaaattacgaatagatggctattgagcatgcctttaaaacagtaactattttaaaaagtactatttcagacaaatgacaaaagtagattgtatcttaagatgcagcctggaaattcaagacttgtggtgttcaatttatctgtcttctttaattgccttaaggaagaatctgaatctataatcaccacattccttctgggtaaagctgctggtgatggccataatttttataagaatgcaaaaactggcccccttgatgattcaaactacttctggccaaatccttgaccagatagataaaattgtattgtataattttatatccttaatttatagacaaaatccttttatctaaattttgaatttaccaattcccagtttccctaaaactgtagtgaaccaagttcttgaaattgctcatattcattgccttttattgtcgtttaatactgtgaggcaaaaatctatcaatttaagtgcaatttgtctctgacacacaaccaataaaagttatccatgaagcttaagcataacatgaagcagagtgagatactgaaaaaaaaaaatgggatttttaccaatgtgaaatggcccaatctacgtggaacccaaaatgt

SEQ ID NO: 115276 - DNA, 210 bp, Homo sapiens
tatgcaggacatcacataacatgttgtgaaggagttcagagatgaagacattaccatgcacagagtggttagactattagaacggtagtgatgaaatgctgctggagttgacaggaagagaaggagctctttgtacctgaagaatcaagaactgaaagagatggaactggtgtgccaggctctttcctatatactttccttaaaccctca

SEQ ID NO: 115277 - DNA, 667 bp, Homo sapiens
attcccacataaatttatactctaaagtaattctgcacaaagttctaatggaactgttcttttgaactgtgtaatttatctttatgaatttatttttatttttaatttgtctgggtatatagtagacatagatatttatgaggtacatgagctattttgatataggcatacagtgtataataatcccatcaaggtaaatgggatatccatcacctcaagcatttatccattctttgtgttaacaatccagttacattattttggttattttattttttaagtatttattttttttgagatggagtcttgctctgtcacccaggctggagtacagtggcatgatctcagctcactgcaacctctgcctccttggttcaagcaattctgcctcagcctcctgagtagctgggattacaggcacccgccaccacgcctggctaatttttgtatttttagtagagaaagggtttcaccatgttggccaggctggtctcgaactcctgatctcaagtgatctgcctgcattggcctcccaaagtgctggattacagatgtgagccaccatgcctagctgtcttttggttattttaaaatgtacagtgaattattgactgtagaccctgttgtgctatcaaatactatatcttactgattatatctgactata

SEQ ID NO: 115278 - DNA, 317 bp, Homo sapiens
gatgtgatacctaccttctactgtatcctatgggtagggtctgagcaggagacaaaaacactcagaaaacttgagacgagaaaaactctagaaagtcaattatatgcattttttaatatggtgtcagattttttttctcccactcattttcccttgtctcaatctaaattttatccagatgtgaacatgaagaggcctgtctttgttcattctctgcttctttggttttcctttgtgcctcaaaaggttttggtgctatgcttcaagacacaggtcatgaaggggaaacagttaggatacagtggggagactgcagt

SEQ ID NO: 115279 - DNA, 176 bp, Homo sapiens
ctatctttattcaacatcagacttgtttatagaaagggatagtcaaatggagaagaggtactagttgtacaaaatgacagggtaacccaggggctcaatgagaggtagataatcttttactctaccttttaatggacagatccatggcacatcacatttaggccttaccttacttg

SEQ ID NO: 115280 - DNA, 303 bp, Homo sapiens
tgtactaagggcataatatgcattgtctcattgagtcctcaaacaatatgaagtatgttcaagtggtaatctgagtttatagagaggaaattgacgtcgcctatagccacacacttgtaggaatagatccaggacccaatctcaggtttgtatgcatccaaactcaggtgtcttaaccactgtgtccttcagatttatcatttgctatgtatgaagtgtcattaacaatgaggcgaaatcatttaaaaatgtattcaaatgctgctggctctacactcagcttttcttgcttgttatctatct

SEQ ID NO: 115281 - DNA, 287 bp, Homo sapiens
ctgccaacagccagcactaacttgccagccatgtgtgtgaactgacttggaagtggatcttccagtaccagtcaagccttcagatgagactgcagccccagtagtctcaacaatattgcaacatcttggttgcaatatcatgagagccaccaagccagagccacccagttaagctgttcctaactctctgacccaaagaaaccatgtgagacaataaatatttattattgttttaagatgctacattgtggggtagtttgttatgcagcaatagataatacatccaa

SEQ ID NO: 115282 - DNA, 743 bp, Homo sapiens
gtgtgagatggtaccttattgtagcatctgtctgatgattagtgataagcatttttatatgtgtattggccattgtatgtcttcttttgagaagtgtctgttcatgtctaaatgacccttttaatggggtcatttgttttttgcttgctgatttaaacttcttatagatttgggatattagtcctttgttcagatacatagtttgtagtatttttttcccattctgtagattgtctgtttactctgttgatagtcagaagctctttagtttaattaggtcccagttgtcaattttttttgttgcatttgcttttgagggcttagtcataaattctttgctcaagccagtgtccagaagagtttttcctgggttttcttctagaatttttatagtttcaggtcttacatttaagtctctaatccatcttgagttaatttttgtatgtggtgagtaggtaggagcctagcttaattcttctgtgtgtatatagttagccagtttctccacatcatttattgaatagttatatcctttccccattgtttatttttgtcgactttgtcgaagaatatcaggtggttgtaggagtgcagctttatttcagagttctctgttcttttccattggtctatgtgtcttatttttgcaccaatactatcctgtttttgttaccatagccttgtagtacagtttgaaatgtgatgtctcaggtcaggcgcggtggctcacgcctgtaatccca

SEQ ID NO: 115283 - DNA, 892 bp, Homo sapiens
gtggaggaaagcagccaactaggaggctttgaagacaaggttgccgtggaatagtggtttgccaggggtggaagaggatggatatttccagtatacagaatagcaacagctcagggcacaaagggacagtggggccaaccagggcaagtgcaggtagttctgtgtgtgtagagcttgggctgtgccttgaagagcagagatcctcaactgccacaccattctctcatttgtcaagtatttgttgatgtcctgctgtgtgtaagatgctgactcaagagccccgactctgccagagtgacacacttcccacagtccctgtgcactcctgcctggatctggaggggagtgcggatgtgaatccttcacaatatcctcccgggaggcatggatcccggacaaatgcagtcctgggagcggaggtgacttcctcagccaggcccctggccagccagatataccattgagaacatttcaatgctttgttgtagtggttggtttgaattagcttttcatgattcagaaaggaaaacttattgtcaagtttgcatttgcagtatttccccacccaggagcaaatgcttcaggatctggatcacgtatgcactggggtcatcacaggcctcctgggaaatgtaggaactcagagctctaagagtccttgagtccttgccccaccggcccttgacatttgcaccccagtgaccttgcccgagttgctgagttgcccagaattctccagttacattcaggatgtccattactcaccctccagatctggcgacccaaacaccgactggacgaagcccttccttccaactaatgattcccttttgaaatgggcttttctcaatctggcgttatatttcaataaaacaatcctgcttccaaatct

SEQ ID NO: 115284 - DNA, 680 bp, Homo sapiens
cgcagtggctcacgcctgtaatcctagcactttgggaggccaaggcgggtggatcacgaggtcagaagatcgagaccatccaggctaacacggtgaaaccccgtgtctactaaaaatacaaaaaattagctgggcgtggtggcgggtgcctgtagtcccagctactcgggaagctgaggcaggagaatggcgtgaacctgggaggcggagcttgcaatgagcgaaatcgcgccactgcactccagcctgggtgacagagcaagactccgtctcaaaaaaagaaaacctgaagaggtatttgcttcatcaaattcagacagcaatgcaaaactatattgtgctcattgtcaatgcttctattttaatgtagcactggaaatatgtggcagaagaattagtgaaataaataaaaaatccattgaaattgaagaaaaataagtaaaaagttgctgtttctagatcatacaatcttatattttaaaaatcataaacagagtaaaaactgtctcaaataataaatactcagtaaattagcaaaacataaaattaacatacaagtatatgtacagctttatatacttaaactctcataaaataaaaagaaaaaatcttatttactatagcattgaataaatttctgagaaaaaaaattaaccatggaggtaaaaactctttaccaa

SEQ ID NO: 115285 - DNA, 390 bp, Homo sapiens
ggaaattctaagcttcacctctgattcctccctttgtctcccctccccagaattcaagcattagaagaatattcctgatttggttcctgaagatttctcccatctctccctccccttcacttctattctcaccattttaattcgggccccatcagctgtctcctggactgttgcaattgtttcctaactgctttccataccttaagtttctcctcctgcctctcgctcagcctcaaatcatcgctcaggaagctgccagagacaaggctctaaacacagactcgatgatgtcaagtcccagtttgaaatctcctttggcttcccatcacctataggatggagtcccgaccccttagcttagcacataagggctctctcaagctgcctctt

SEQ ID NO: 115286 - DNA, 265 bp, Homo sapiens
gaagtctaaagtcactgcagggtaaaagtctggcctaaagtgggctggggaggtagtcaggtccttaacaacatgattcatgctttgaaaagatgactgtagctgggcacggtggctcacacctgtaatcccagcattttgggaggctgaggcgggcggatcacctgaggtcgggagttcgagaccagcctgaccaacatggagaaaccccgtctctactaaaaatacaaaattagccaggcgtggtggcatatgcctgtaatcc

SEQ ID NO: 115287 - DNA, 209 bp, Homo sapiens
gctgtaggaaaaatgagagccgcctctcctctgaagcattttcagagcctttctgtctcagctggaattaatgtttggattcttttgtgtgacatcaactcatcccgtgatttagtcatttgtatttcttgatagttgagtcttaggctccgtggctaatgtgtgcttttgggaggaccttatgtaaccatttgttctctgggagagat

SEQ ID NO: 115288 - DNA, 462 bp, Homo sapiens
cagcagctgcggccttgacaagctggcactgtgggcatttattcagcacggatttaatgacaatggctttgagtcaacacacttgtgggtaatcaacatggtcgccctccccggagtgagcagtcctgtgtgcggatgatgaaaggccaggttcggaggcctaagtaaactaacttatctagatcagtttttttacatccccttgttatctaacctaagctttcaggcaccagataagagagtctagctgccttcagccaaatcgttttccaaagcttttataaaacctcttggccttccaagaaggtttgcatcgttctgcaattgttcctaccaccctgatggatctcctacagccagaaggcttcctcatctacaacattatcttttctctatttcatatctcgtttttctggttctcagctccctctcacctcatctttgcttgtgaatctttgagga

SEQ ID NO: 115289 - DNA, 519 bp, Homo sapiens
gcccttggttcctgtcacagttcagaccttatggattctccttgctgcttgcctgaagctctgaaactttcttgccatacataggccctaggaaccaagatgagtttcccgctcaaacagagaaaatgttcaaaaccccattgcttctgcctgttcccacctcatttccaaaaattaggcaaaagttgcaaagcatctggcagcctgttttccctgtcattgtctctaattccttcccacaaacccctaagatgtatattgctccatcctgctatgtaggacttatcctggggcataaaaactttcttatccagagaaataagcatcatgccatagatgttcataagatatagaacagacattcatagccattatctacaggttgcaagagattaaatatttcctttattcatttaaaaacgtgtattttctaaatcttctataataaacaggtactattaatacatatattcataaaaagaaaaagtgtttacaaattgcacaaaataagatggaaaa

SEQ ID NO: 115290 - DNA, 444 bp, Homo sapiens
aaagtgcccttcaatgagggaatggttaaacaaactggcatatccataccatataatattattatgaagtagtatttctcagcaataaaaaggaaagaagtatgacacatgcaacaacttggatggatctcatgcttagtgaaaaaaggcagtctcaaaaaaagttatatgccaatgactccatttttgtagcattctcaaaatgatagagataaagagcagaggggttgccaggggttgggctaacacacaggacatgtgtgtggtgatggaacagttctatatcttgttgaggagattatatcaacttacatatgtgatgaaattgcatagaaacacacacacaaacacatgcgtgcatgtaaaactggtgaaacctgaataagatctttctgaattgtgccagtgtcagtttcttgattttgatattgtactgtagttatg

SEQ ID NO: 115291 - DNA, 589 bp, Homo sapiens
catcctgaaattaacaagaaaaattgaaattaatgttgaaagagcaccagagagtatacatccaaaaagaccaacattaatataaattttagtaaaattactgaaccatgaaaagtaaatgcctttagttatctaaacaaaaactaattacttaaaagggaaagaaaattagatcatcaccagacttttcaacagcattgccttatgctttaagaaagtgttgtaccacatttgatatcctgatggaaaaaaatgtgagccaaggattttacacccaacaaaacttaatggtgaatataaaggcataaaccaatatagaatgcaaaaacttgggaaatattgttttccaaagcctttcctaagtaatctacaaaagaacaagctttaaacaaccagaaagactagaaagtcatcaataaaaggattggagaacattaaacttgtagaactaaaacaaaatgagagttaaaaaagaaagagtataggtatatgctaaactatttcagtagttttggcagtggttgtattagtattgttattctgaagatgtgaaataatgcaaacgcataataaaaaatgtcatctggtc

SEQ ID NO: 115292 - DNA, 501 bp, Homo sapiens
taagatgttagacatcagaagccaggtgcttatccaggtttgctgggacctgaagtttatacaattttaagcgagacctctttaagagcatgaacacaaaattacgaatgcaaaattacattagatacagggtattacaaaaggtctttgcaagtgaaaagctctgaagcttaagggttgataattcatggtaaatttgtccttgaacaactttctgatgagcaactcaaatactttgagcttcagctagcgagtccagtgagatgagtttctagccttccacaaggcagaagtcacgcttttgggaagaatgtttagtaggtgggtaataatggattgccaaagggtttgttcagtgggagctaagatgggccaatccatgcagagaaagtgtttgagtgatatagcacagcctctagaatcggctcgagctgttctttctaaaatctgctctgtggacttgtgctggtcaatgacagatactaccagtgagaacattcc

SEQ ID NO: 115293 - DNA, 338 bp, Homo sapiens
aaaataccttacttattttgtgtttccttcttacttaaggtcatagaattaactcccttaaatttgagaacatgttttgggtaattcctcaggttaaagttttattagaaaaatttgaagttgaccgagtgtggtggctcacacttgtaatcccagtactttgggaggacaaggcaggcaaatcatctgaggtcaggagtttgaaaccagcctggtcaacatggtgaaaccccatctttactaaaaatacaaaaaaagtagccaggcatggtggcaggcgcttgtaattgcagctacttgggaggctgaggcaggagaattgcttgaacccgggaggt

SEQ ID NO: 115294 - DNA, 493 bp, Homo sapiens
gttcctcttcccccagttgacagagcgccatttcgtgggtgtggaggtaaaaagacgtcaccagccctgctgtccctctaggtcacagctcaggcctgacatcagcagagagaacagaagggtcacctccccagagaaggaaggagctttgcctttgaacgatgcatttaaaacatttataaaacatccttcaacttcttccaggaacaaaagttttaaatgaaggaaagagcctcagctatttcaaggtcttggattctttccctttctggcatttgtgagcagccgtgcagattttttcctccagaaatggaggaagactgatttagcaagtttgcaaagagcccacttgtgtgaaacaccttccctcctgctttaaggtgaaactcctctttctaggaggaaagcagatagaggtctaggtctggattgcgttggtcctagcatttgtcacagcgttctactgaattagtgactcagtgcagcagtcact

SEQ ID NO: 115295 - DNA, 331 bp, Homo sapiens
aaatatacattgaatttacttcctgatattcttgaaaaataccacaaaatccaggacagaaaaagctaaagcagcctccgttggcatttccatgaaatactagacacctgcagtgcaattcagaaattctcactatttcctatttcttgaagaccttagaagcaaatgaactgtggatcttgaaagttctatgctgagaccaagttttaaggttcaagcagtaactagcagttatactataatcaaaccattttttttctaagcacccagaaatctagaatttatcttggcaggtactcaggaatgattttcagtataaagcaggaaaagg

SEQ ID NO: 115296 - DNA, 773 bp, Homo sapiens
acctggatgacagagccagaccttgtctcaaaaaaaaaaaaaaaatggggattcattatatcattctctctactttcatatattttttaattttttcataataaaaagttcttatgatatatctcccaaagacctactacatgcgtagcacaatgtgaccttggttggcttctggagggttgtctactcttccctataattcaatttcagatttagtcatcctgtgtgaaataaaaattgaagttattttgttacatgcccaccaaagagtttatttcactttttggcactggggttttttaacactgatgatatctgaaagcactgttctggacacttatcattagaagccaagtttccctcaacaacagatcacgtgtcttgctttatatcatttacatttgctaattattatctagagaaaaagtgtcagtgaataatcttataataatcaatgggagcttctctacttaaatattccttgaaattaattgtcttgtaacaagaggtcatttgcaattacagtaatcatcctaatttatctgttgatagattccagcttttaaatactaggttgtgaaaatagaggttgacctgcattgtaatatgcttgtttcaaaggaccttaactacagtatttagaaatgggttattgcgccccaactgcgaacattcaattattgctttatgtactctgtgcgggaacatgatctgaacaattatcccatatccccaaagaggtgagggttctacttcctgagacaatccagata

SEQ ID NO: 115297 - DNA, 404 bp, Homo sapiens
aagtaagacaggaagctgaggtgaacaggttatcagggtggccggttgtgtcaagtgaccaaagtaaagaaactccgcccttgcacctcccaaccagtgtaggttgcaccctcccattctccaggtactgccagtaaaaacatctgtggcccaatctactgcctgagcacggtacctgctactgcagcggagtcagtcccaaggagcgacaccagtgagcaggaaagcagaaaaggtgtgggaggaaactcctgtgtggtcccctttagggggtgggtagtgggaaccagaagacccaggtgctgctattttgaagtcatcagggtcggttccatcactgcttactgacttgctgcacctgcccatttctactgagaaccaagagcagtagctttgttccttta

SEQ ID NO: 115298 - DNA, 293 bp, Homo sapiens
aatgttttcactcacatgaatgttgaaaatcatgtgggaagctagtcatttcttaattgtgcaggactcgaaggttcccacaactgtgggtcgtaggatgtttggcattcttatttttcccaccactgaatgtcagtgaattctcaatcattgtgacaaccccagagacattaccaccaccatcattcttttgagactcaattgttaaagacattttgctcttattatgacagttattatagttcataaatgtaagcatgcttgaatgtccccaagtgcgtgtgatttttttg

SEQ ID NO: 115299 - DNA, 200 bp, Homo sapiens
ggatgggggctggatgctattgacatctagggagtggagcacccaccacaaagcacggtgcagccccaaatgcccataggttatggggcctgtcctctgcgtgtgggatgttcagcagcatccctggcctctacctgctagcaagcctgctggaaccaatccccctgtcattcactcctgtgccaccaccttggtgcttt

SEQ ID NO: 115300 - DNA, 872 bp, Homo sapiens
agcgggttctccacctgcgcgggcctgaatggccttcaggagcacagtcggcctgaggagttgatggttactcaccgccgtgagcccaagtaactcgccctccttcggctagaaaccctccgcctgggcccgcgcgacaggagcgcggtctctgaggggagcggcgaccccgccagccccggtctctttccctggcggcggcggcttcttccgtgggacaatatgttcaagagaatggccgaatttgggcctgactccggcgggagagtaaagggtgttactatcgttaaaccaatagtttacggtaatgttgctcggtattttggaaagaaaagagaagaagatgggcacactcatcagtggacagtatatgtgaaaccatatagaaatgaggatatgtcagcatatgtgaagaaaatccagtttaaattacatgaaagctatggcaatcctttaagagttgttactaaacctccatatgaaattactgaaacaggatggggtgaattcgaaataatcatcaaaatatttttcattgaccctaatgaaagacctgtaaccctgtatcatttgctaaagctgtttcaatcagacaccaatgcaatgctggggaaaaagacagtggtttcagagttctatgatgaaatgatatttcaagacccaacagcaatgatgcaacaattattgacaacatctcgtcagctaacattaggagcctataagcatgaaacagaatagtttgaagtggaaaaccagagaaaaattagaagctggtaagaaaaaaacaaggttgggaattgagagttaagggagattaaagcaagtcgtgaaactattaaatggttacaatggattcggaaacttgggaagta

SEQ ID NO: 115301 - DNA, 479 bp, Homo sapiens
gggtggggtgcaggtttcaccgtgtggcccaagctggtctcaaactcctgacctcaagtgatccttccgcttcagcctccccaggtgctgggattacaggcatgagccaccgcacccagcggggacaggacaattttgccagctggagaaggggtggcccccaaatgtccccttcaccaccctcctgcctcttccttcagaacactttttccctgaagccctcctgggtagccccctacccacatgcctcagcattgggatgtggggagtgtgggggtcccccttgctcctcagccccatttggagtaatgtcctgtgcagctgagctcacaactcctcctccacctgtccctccacccggtgtcactggcaattgctcacttcctgggcctgcacccactcagctcccctatccctgggcaccagcctcagccagctcccatgtggactaatgacccttgtccctcccctcagctgcc

SEQ ID NO: 115302 - DNA, 448 bp, Homo sapiens
ccaagaggatgaagcttcactggcagttctctcaggaggacccatccagaaccgcaagtctaagcgctgtctggagctgcaggagaatagcgacctggagttcggcttccagctggtgttgcagaagtgctcgggccagcactggagcatcaccaacgtcctgaggagcctcgcgtcctgacccaccggggccacttccggctgcctctttgctactgtgtagcacctgctgcaacgttgcctgctgtccacgtggggttgtttggagtctggggaaccaggttagtgggcccccaagaagagctttttatttcctattcaattttcatggagtttatagaaagatgctgattggtaggtgatggtatgatatcaaactattttgcagttgtaaataggggacagatggaaaatatttataactgacaataaaatattattaagaaaa

SEQ ID NO: 115303 - DNA, 593 bp, Homo sapiens
ttaagttttagggtacatgtgcacaatgtgcaggttagttacatgtgtattcatgtgccatgctggtgtgctgcacccattcctacttctttactatttcccttttccttaaatttatttcaggaaattaaagtgtagaatacttgaggggagagtaaaggatgagtgaaataagaatttaaaaagacaagaaaaaacatcctaagaaatatgctaacagttatgtttccactacaagaaaaaaacctactaagagcatatatagtgtaactattaaaattccatctgcttcaagctctttcagttcatttcacaagtcctgaagatttgtcctgacttcttccggctgcctctttgctactgtgtagcacctgctgcaacgttgcctgctgtccacgtggggttgtttggagtctggggaaccaggttagtgggcccccaagaagagctttttatttcctattcaattttcatggagtttatagaaagatgctgattggtaggtgatggtatgatatcaaactattttgcagttgtaaataggggacagatggaaaatatttataactgacaataaaatattattaagaaaa

SEQ ID NO: 115304 - DNA, 366 bp, Homo sapiens
actggactgtggacccctcaaaggcagacagtccatctggctcagcatctgttttcagaacctggtatgtgatggacctcagagagctgtcactacctgctgcctcccattcctcccattctctgccccttttctctactcagtacttccccaaacctattcttgtcaaggagaccaatggcctttacattttaaaatctgagatgaaattctctgtcttcatcttaactactctatcagcagcaagtgatacagcaagccacctccttcttcttgggacactttctcatgtggcttttggcacaccagtccctcttggttctccgtgtgtctcatcagatgcttttagcctcctctgaggattct

SEQ ID NO: 115305 - DNA, 1155 bp, Homo sapiens
aagcttgcggccgctcatttatttatttatttgtttatttttgagatcgtgccactgcagtccagcctggtgacagcgagactctgtctcaaaaaaaaaaaaaaaaaaaattcaaaactataggaaagttgaaagaatactaaagtcatttaatatccacatacccttcatctagattgtatctgttgttaacattttgccacatttgatttatttatgagtatatattttatttttgtgctgaacaatttgaaagtttgctttattcctcatttataaactctcttgcatgtatctcctaagaacgaagacattttctggtataaccaccatacacttatgaggaatattaaaatacaaatacaatactatctccccagttgacctcaataatgtcctttataatttgtcctgtccccaccctgattccatagctagatgtcatagttcttcagtctccttcaatttggaatagtcccctagcctttctccctaccttctgtgacatttttcccccagtataggcctgtagttttgcagaatgtatctcaattaggacatctgtgatgatttcctcttgattagcttcaggttaaacatttttggcagggattctaatgagtgatgtgttttttacgtactacatcacagacgaaaggtaatgttaggtttgatcactccgttaagatgctgttcacaatatttctccattgtaactactttttttcccttttatataaatcagcatataattcttatgctaatacatgaagctgagtaaatatccattttcttcccatagcctgtcacccaatagttttagcattgattatttttgcttgaataaattattcctttggcagttggaaaatggtaattttctaacatttcttccacatttatttgcatttttatataaagaagagcattcgttctctgctcccactgcttcacttgactaaccctaaaaaaatatatatatgtgtgtatatatatatatagagagagagagagagagagagagagaaacaggcaggcatggtggctgatacctgtaaccctaacactttgggagtccaaggtgcgaagactttgagcccaggagtttgagaccagtttggacaacatagcaagacctcgttcctaaaaagaaaa

SEQ ID NO: 115306 - DNA, 257 bp, Homo sapiens
cgtggtggttaagagctgggtttgagtcctgactctgcaatcacatgatattggccatgtgatactgtgtggctttcattcaacactgggaatctcagtttcctcaattatgagaataacctgaggtcctatgggtttgtggtggaaatcaacaaagcttacaaacttaacatgcttactagtccctagtgcacagtaggcactcaataaatgttcgctgaatgtcatgatactaaatcatgatgaacatactaaat

SEQ ID NO: 115307 - DNA, 434 bp, Homo sapiens
aagccaaaatgttacagtaactactctggcctcttttcagctctgtttccctcttatcaatacatacaatgaaatgactaggaagaaattcttctcatgctaccttgtctgtgaacttgtacttgtctgaatttactatagtactagtgtgttcaacattatgcttggaagaaataaatagcttaaattttacatatcagtaagtctggttcctatcagggaaatttaagaaataagtgatattctcaagcaattaagttaaacagaattaagaacaagaaaaaaatacttaactatattactgctgtcctattttaagaaacctaagctgaataagctccttagtttcatacattgttctttacctgagttaagttgactttatttttaatttcaggtcactgtataactgtgaacacttccccacggttgtg

SEQ ID NO: 115308 - DNA, 379 bp, Homo sapiens
gtgcatgccaggcaacccaggctacttgcatttcagcagtcagttgacacctgttggtgccaggcactgtgctaggacctaggtgtagggaggtgatagaagataaaaaatgatgacaagtctggtcccggtggctcatgcctgtaatcccagcactttgggaggcttaggtgggtggatcacgaggtcaagagactgagaccatcctgaccaacacggtaaaaccccgtctgtactaaaaatacaaaaattagctgggcgtggtggcacgtgcctgtagttccagctacttgggaggctgaggcaggagaatcgcttgaacccgggagtcggaggttgcagtcagccgagattgtgccactgcactccagcctggtga

SEQ ID NO: 115309 - DNA, 341 bp, Homo sapiens
attataccacttgactgggtcacccatcgaggaaggggtggagtgaaggttcaaacccaagtttttgacactaaagcccacgctctttcccctgtatgtagtattttcttgcagaatttttctgccctgatatttaagaacttctttttgtctaaatatttattcatcctgctacaatgtaaacacagctatgcaaatatattaatggatatttgttttgctttgttgtttttactgagggcaccctagcacatacacaaacgatgacccagcaccagggaggttgcttgttttctggcttctgctttttttttttttttccttccccctgatcctgtctt

SEQ ID NO: 115310 - DNA, 611 bp, Homo sapiens
agtggattgaaataggaaaaatattttcaggattacaacacgatttagccaaatcattgctttaattttcacagttaatcccaggaattcccagtcttcggaaaagaccacaatatttcaaagcaatttagttcagtccaagcagaatctgcaatttctgcatttactctccgtcaactggaattgggtcttcagatgacctggagataagtttttgacacaaaacctactgaaatgcttccattgattaactcattttttcagcaaggattttctaagcgactactacataaagctacagtgcttggcaaggaaggaagtgggatgtcaagtacaggtggtgagatttctgtggcctgatgtgggcacctctggaaagacacgcattggagcgcgacggggtagcgatggcatccagcagcgtgggttcccacagcgccggcgcccggccaaaaagcgcgccagtaaaactttccgcaattccctctgtgccaagcgcgtcctgggcagccgcacttcggaggggcaaaactcaccctaacttttgagtgcagagtcaaacttaaggaataggttagagtgaagggaaaggggagcccgggctgaggagg

SEQ ID NO: 115311 - DNA, 694 bp, Homo sapiens
gcaaggcagcagctccattgatgtgccagccttccctttcctcccctgccacagctcctgggactgttaaagagatacaagaagagaggccaggcatggtggctcacgcctgtaataccagcacttagggaggtagagccgggtggatcacctgaggccaggcatttgagaccagcctggccaacatggtgaaacctcgtctctactaaaactacaaaatttagctgggcgcggtggcatgcacctgtagtttcagctacttgggtggctgaggcaggagaatcacttgaactggggaagcggtgtgagccaagatcgtgccactgcactccagcctgggtgacagaacgagactccgtctcaaaaaaaaaaaaaaaaaaaaaaaaaaaaatttggggggggccggggcccggaaaagtttttagaacccttggtgggggggccgcggcacccaatagaggagagggacacatgggcaatagggaggtaccaagagaaaactcgggcgcacagaaacataggcggctggattcccacaccaatataaaaaaaggcggggaggaaaccagaaggcggttcgggacccaaattgcaggaggaggattccagagggcaaataaggggggctctacaaccagggaagtgtccaggcagcagctcgaaatgtaagatttaggcggagcaaggatggagc

SEQ ID NO: 115312 - DNA, 273 bp, Homo sapiens
acctcacccacgccctggtcagctaatctctgcttcacccatcctggctgtccagtctccggggtggcgtttctgttttctttcggcagaaatgcctgggaaccgaaaggcccctttccctgtgacctgacctcccacgctaagaataacagccccaggacagcatgtctttcggtccctctggaaagagggcatggctgggaagtgggaagttaagggagctggatagagctgggaggaaagggaagaacacagattcttggctttgtgagt

SEQ ID NO: 115313 - DNA, 313 bp, Homo sapiens
ctcttcatgtgaaatggtggcgtctggggttcctctccagcactcccatgtcgcctgcctcttcatgtgaaatggtggcgtccggggttcctctccagcactcgcatgtcgcctgcctcttccatgtgacatggtggcgtccggggttcctctccagcactcgcatgtcgcctgcctcttcatgtgaaatggtggcatccggggttcctcctcagcactcgcatgtcgcctgcctcttccatgtgaaatagtggcgtccaggttcctcctcagcactcgcatgtcgcctgcctcttccatgtgaaatggtggc

SEQ ID NO: 115314 - DNA, 806 bp, Homo sapiens
gtggcgtgatcattgattcggacaggaggcagagaaattctaggcagaaaagagtggggtccctggtgagggccacaccctgaagtctggaaccacagccccgaatgagaactttccatccccattttccccgcttgaatgtcaccttttccaaaaccacccctggcccactccaccccacatcctgtacctatgaaaaccccaggctccactggcagagagcagagaaagggagaagaagcagctgaacgttagagaagtctcttgacttcagagggacagcttgacagcaggacttaggagaagagtctggccagagacagctggacatcccgggaagaataccttcctgctccatcccctttgtagttccctttcccactgagagccacttccatcagcaagaaaatcccctatatttactatccgtcaattcatccatgcgatctgatttttccttgactctggacaagagcttgggatacagaagcctataacagtgacccactacccttgtgaaaaggcagagggtccactgagctgttaaacacttaagccatctgcggatggaaaagctaaaagagcgctgcctgtaacattccttctggggtttcaagagtcatgggtactccctactagatgctgctgcggggcccacacaaagttttgctcctgtccacacccagaagtactcgccccagctcctgcacctgctcagctgtgctctccatcctgtgaagggtggaggatgaaagtaaagggatagcaaaaatgtaccaagcaaacacttactatcataagaatac

SEQ ID NO: 115315 - DNA, 213 bp, Homo sapiens
tgacctctgtcaaagctgggccttggttactcacaggccactcacagcccctccccatggctggtaacccagacctcaagggtgagcaagaggctaagaaggctaattgggaaggtggtggccccgtagcccatctgctggccctgggctggatgagcgagcaggaagcagcagccagctctgggcaggtcgaggagggccaggcaggctccc

SEQ ID NO: 115316 - DNA, 390 bp, Homo sapiens
agagcatgaagcaaggtttctgcttagatcacttcatcacgcagcaacgtggctcccaagggctagaagagaaacactaccatcaggtctaggcttttatacaatttcaccttaggccccaacctatcaagccacactagcacttaccattaaaaaaaaaaaaaaaaattaacccataaaggctatttaacttgccaaggctatactctttagttatttttaggaaatcttcaatctcaacaataagactcttgaatttgaaatgtctctaatctgaatgttacctttgacattgttggcagaaatcctacaaacatctgccatctaaaataggttaagaaagggcaatagaagctttgaaacatacccaagtataaagcagaatttagt

SEQ ID NO: 115317 - DNA, 548 bp, Homo sapiens
ttgaggtcagctcggcctctggaggtgcctgctgcactgccctgctctatccctgggcacagccacctgggcacccgcagcccatcctctggcctggcctcaacccaccctgcctggggccgtttcatcttctctgaccttcacagaggccaggatccttctatatttcaaaatttaacacattttgttttcctggaactgtttctcttccaggaagtgggagtgccccacaccagggcagtgagctgaaagctctccccaggccctagggagcaaaggctgggctggctgcgccggctgccccccactagccgcaccttggcatccaccctgctcctcctctacttgcagcgcgacccccgacccctcggtgtcttccatacaccgacctcagcgtcttcctagcccatctgctcacactacccctgcctgcaaccctccctcctggcctccaagcctggcgcaatcccacagcttccgcccaagtcctcagcctctcagcgctcacagggctgcgcccacccctgcagtctttccccagagagggg

SEQ ID NO: 115318 - DNA, 353 bp, Homo sapiens
tttcctgcactactgtgctatctgtgttgagctattaatatttacaagtaaacttctgacatcatttgtcgaatcctccttctagagtgagagacttaaattgatagtattgagagagaaagcattcatactttaagattttcactgctttcttaatctgattcatttcttccttaattttctgaccataagagatgagaagtcagttttttggtatctgctttaaattgctttttctttacatatacttgctttttgtttattctgacaatgataaaggattatgtccctcacagctttttaaagaaatattttatagaggcttaaaggagtatgttattaattaaagtgtc

SEQ ID NO: 115319 - DNA, 677 bp, Homo sapiens
agtattaataatgtgctgggctcatttatgaacacttattcttttaattgggctgtttgtctgcttattatggagttataagagtacaaggattatttatatattctggataccagttttggtcagatattttctccagtctgtggctcatgatttttattttctcagtggtgtggtttagggagcaaagttttaaattttgatgaagtcaaatttatcaatttttttcttttatggtttgtatactttggctcctcagaaatctttgtctaacctaaggtcacaaagatttttttttctcttcaagaagttttatgttttagttcttacattacatctatgggtccattttgaattaattttggtttatggtatgaaataagagtcaattttttttccccccatatggctatttattctagcaccactttttgaagactttccctgttcacctttgtaaaaaaaaaaaaattacttggtatatgtgtgggtttgtttctggacttcgacatttacttttgtctatttctccttgcagttgtattggtttttgctgcatgtattttgaaactctgttattaggcatataaacatttgagataattatgtcttcttcatgagtttacccctttatcattatgaaatgacctcttttcccttggtgatgttctttgctc

SEQ ID NO: 115320 - DNA, 431 bp, Homo sapiens
ctgtaccctgatgcctacctacctagcacacagcaggaccttaggtatttattgggagaaaaaaaggaaggaaagaaagaaaaatggcatgtaacatttttttctaagtattcaatgttttggcatacaaacccacaccaaaaataatacaaataaaaacaaaacacaccatttttgaagaaagaaaatccaaaagaagtcttcactgcatcccaaaaagtaggtaagaatgggaaggaaagagctaattaatagggtggttttcatgggctgtttgggaaataacatagaatgggacccacgttggccacaggatgacaaccatgacctggtgaatagaatacaatatgtggctccctttctagagcaaagattatggattctgtacagtccaatcaaaagttttccattttcactaccatcactaacct

SEQ ID NO: 115321 - DNA, 306 bp, Homo sapiens
ttcatagaagcattatttatactacccaaaaagtggaaacaacataagtgtccatcagctaggctgggcactgtggctcatgcttgtaatcgcagaactttgcgaggtcaaggcaggcagatcacctgagcccaggaatttgagaccagcctgggcaacatggtaaaaccctgtctttacaaaaaatatatatataaaagccgggcgcggtggctcacgcctgtaatcccagccctttgggaggcggaggcgggtggatcatgaggtcaggagatcgagaccagcctggccaatatggtgaaaccc

SEQ ID NO: 115322 - DNA, 604 bp, Homo sapiens
aagagctgttatccaacacttagaaataaggccaggagagtgtggtgtgacattcttgggcattgttcaaccagctccctagaggatttattttaatatctagggaaatgtacttttgtttgactttgctattgacaattaattaaaggcacagagtggtcatacatcaacttgaagatcttatccagtagagatgcaaataatttctgtctagtataaaagataacctcaaaggttgtgacttctttttatgcctcatagaacagtaacctgtttttcagctaatccagaaaccttagtctcttattcctgtttaaacgcccataaacacctgcttcctcaaaattctctttgaaccagctctaccatcttacttgcccccttatttatttatttatttttgagatggagtttcactcttgttgcccaggctggagtgcaatggtgtgatcttggctcactgcaacctccatctcctcggttcaagcaattctcctctgcctcccaaagtgctgggattacaggcgtgagccaccacgccaggccccaatgtgtagtcttttatccctcacccttctccccaagtccccatagttcattgtat

SEQ ID NO: 115323 - DNA, 691 bp, Homo sapiens
gatattctaagcttccggtttgtcccataagacagatggttaaattaagaacttgtgttttttatttacagcatgaatgaagcattcatataacagagaaggctaaaggcaaagcatttgaattctttgcttaagacaataaagtattttcacggaacttagtggatatgatttgaactgaccagttagagctgggaaatatttggtcatggtaatctactgattacatgattaatactgaaaattatatctagttctattattaaatggttttcacagccctatacctatacctaaaaggcttctaggctgccctactccagtgcctttaatttgaacagttttgcctatatggtttttttaaattctttgacaattttaaagacagaaagggtggagaaaacgaaaagatggacatattttagcaattatattaagtataattattgatgatcaccaagacaaaagtaggaaacactagcaaaacaagcaaaatataaaatgtatatttttttaaatttataaagtagttaattttttttttaatactttgacccccaaaaagtgagcctaagtatctaaaaaatttacttagggaccgggcgcggtggctcacacctgtaatcccagcactttgggacgccgaggcaggcagatcacgaggtcagaagttcaagaccagcctgaccaa

SEQ ID NO: 115324 - DNA, 399 bp, Homo sapiens
  misc_feature (243)..(243): n is a, c, g, or t
  misc_feature (258)..(258): n is a, c, g, or t
  misc_feature (262)..(262): n is a, c, g, or t
ctcgctgtcctccatcctccattccgtccaactcctagcccagtcccgggggcgcctacttcaggtctgagagtctgaactccgagatgctctgggtgtgtggatttccttcagctaccctgatgtccccacttccaagtcctgactcctttgagccatcccagggggtgtccggccactggaccatggtagctgatgcatttagatgcaggtgtgtgtgtgtgtgtgtgtgtgtgtgtgtgngtgtgtgtgtgtgtntaangtttaatgtattaatatagattataattggattattagtgtaggttaaatgagtatatgttgtgtgtggtatattttatatttgatgtttatagtagtattttttgtttaatgaataattttgtatatttttgtttt

SEQ ID NO: 115325 - DNA, 339 bp, Homo sapiens
  misc_feature (243)..(243): n is a, c, g, or t
  misc_feature (258)..(258): n is a, c, g, or t
  misc_feature (262)..(262): n is a, c, g, or t
  misc_feature (314)..(314): n is a, c, g, or t
ctcgctgtcctccatcctccattccgtccaactcctagcccagtcccgggggcgcctacttcaggtctgagagtctgaactccgagatgctctgggtgtgtggatttccttcagctaccctgatgtccccacttccaagtcctgactcctttgagccatcccagggggtgtccggccactggaccatggtagctgatgcatttagatgcaggtgtgtgtgtgtgtgtgtgtgtgtgtgtgtgngtgtgtgtgtgtgtntaangtttaatgtgtttcaatccatttaaattgcaccctcagtgatgctcaaatgnctccatgtttgggtgtggaagagcc

SEQ ID NO: 115326 - DNA, 420 bp, Homo sapiens
cctctcctgggcctcccaagagtaaacctctccacgcagaccaggctgcaaacctggattgaaaccagcgctgtcgcactccttgaacgtatcaggcgttttcagtagcgggaccggaaccagaacccaaaagaggctccttccttgtcttgaattcctcccacctgagttagcatcttggaggtcaacgtttcaaggaactcagtatctgagaagagaaagacaccaaaccgtagttccccatgaggacttgttgctgaaaaaaaacatctaactccatacaatatttgaagagagttattctgagccaaatgtgagaagcatgaccggtgacacagctccagggggtcctgaggacatgtgccgcagggggttgggccacagcccgagctcatacactacgaggtgggaggagaggaa

SEQ ID NO: 115327 - DNA, 160 bp, Homo sapiens
agcattacatagcattcaaagcataatacaatttttctctattatatttaaacttttattccacggtactctctcaagggccctgtgcactaggaagataataccatttccacaaaaattaattaaaaggtaccattcatggccaagagcgactgagagg

SEQ ID NO: 115328 - DNA, 342 bp, Homo sapiens
aaatggcttagggagactggcccatttttgttccagaatattttgtctgctaccttttcctttaacttcctcatactgtctgaaattccacttgcatacgtattaaggattaactttttaatgaaattccactattagagacccattttaaactatccaatccctgtacaaagcaatgactatgaaaggctgtgaggccatcatttactcacagattagtacgaattagttcaaaagcttgctttactattcccactcagctaagatcagcttcatgggaagaatggggccaggcacagtgataatcccagcactttaggaggccaaggcgggaggattgct

SEQ ID NO: 115329 - DNA, 166 bp, Homo sapiens
gtagtcttttgagtcctgttaactataaaaagccaatagcagttggtgccgtggttccacaccctggggtggaggtgagagatgagttcctgccatcttttttgggatggcccattagcctgttggcacccatccctcaaaagatgggtttaatgataaatttggt

SEQ ID NO: 115330 - DNA, 431 bp, Homo sapiens
aatcttgtatcaaattgtaatccccagttttggaggaggagcctggtgggaggtgattagatcatggggggcagatttcccccttgcagttcttgtgatagtgaattaattctcatgagatctggttgtttaaaagcatgcagcacctcccctttcactctctttctcctgctcctaccacttaagacatgcctgcctccccttcgcctttctccatgattggaagtttcttgaggcctccccagccatgcctcttgtacagcctctagaaccgtgagccaattaagtctcttttcttcataaattgcccagtctcaggcagttctttaaagcaatgcaagaacagactaatatatagggcctcactctgttgcccaggctggagtgcaatggtgggaccttggctcgccacagcctcaacttcccaggct

SEQ ID NO: 115331 - DNA, 431 bp, Homo sapiens
ttgacgtatagcatcactgtagcacagtgcattactcacatcacatatttgtggtggtctgtggggagctattccagaaaaaagccttgttatcataggagatgatagctccttgtgtgttattgcacctgaagaccttccagtaggacagaatgtggaggtggaagacagtgatagatatatatgtagtccactgttgaccgaaacattgctatgtggtgcatgaaaggaagtaactcagggccgggcgcagtggctcacgcctgtaatccccgcactttgggaagccgaggagggtggatcacgaggtcaggagatcgagaccatcctggctaacacagtgaaaccccgtctctactaaaaaatacaaaaaaattagccgggcgtggcggcatgcgcctatagtcccagctactcctgggaggctgagg

SEQ ID NO: 115332 - DNA, 527 bp, Homo sapiens
tacgtatctatccatcccgtctcagccatctgtttgtgacaccacatgacccagccacatctcagcaggtgcagaatgtctcttagtgttggcttacacctggcagtctgtgcacattcacaggatagtcttacttacagattgagaatctacagttttgagatcattatctttacatttctgtatcctccatccttcacagagtcttcagcacagagcatgagttcaaaatcagtgctgggagcattaggagaaaattaccccataatgtgtgcccatacgatgccttcacaaatgcaggcaatttaaactgaagttcaaggttggtggtggtgctctggagagcaagaaactggagaattaggcagaattaaggctgggagggctctggagccagcacaggagtttgcatggaagctgaaggtcacaggaagccattgcataaatttttgcattggtggagcacagccagctcctctggcctcatgtcaagtttctcatcttattataagcctgaaaggggtaga

SEQ ID NO: 115333 - DNA, 516 bp, Homo sapiens
agggatattacgtgcttgtaggcactatgaggaggaaaaacaaaactgaaaactaggtcttctgtccctgcactcactatgttctatctccttactgggccagaaattcttatgcaaattaatagggaggtaagactagccaggaactcaaagcccaaactttccaaggcctgtgatcctggaacagctcttccatgtgtccatgagagagactggtgctaggaaccagtaagtatagaggcaaattttttgtgctcctttctgagcagcacactttaaaaattccatacagtctgtatctgacataaattagggtattgtagccaagttgtcaatttcaccaatcctcaagccacatgtctattctgtgcaggtctatggaacctaatgcacagtctcctgagagcataaatgaagtatcgggcaattggctatggccaaaggagacttgtctttttcccctgagagattgctctcactgaggcagaagagactcttctagatgcaccgtttaga

SEQ ID NO: 115334 - DNA, 402 bp, Homo sapiens
tttctgggatgatggcactcctacacatataaaataatgatttcaaatgtttacagcatattttatctaaaaattaaactctgagaaacaaatataaacccttctggaataattttatttttcctttgggatggtggaaattttcttctgttttattttcacttacccttttgattggtttcataagacatttccacccatgtagaaaagcagttaccagcctggccaacatggtgaaaccccatatctactaaaaatacaaaaattaactaggcttggtagcaggtgcctgtaatctcgggaggttgaggcaggagtattgcttgaacctgggaggtggaggttgcagtgagccaagatcacgccactgcactctagcctgggcgacaagatcaaaactcc

SEQ ID NO: 115335 - DNA, 350 bp, Homo sapiens
ggggtcagtcagggtcacctccaaggagagtcagctgcttcagtgggtcagaggtggggcatcaggaaagacccgcccatcacatactcttcgcattactccttagtgaagaccttgaccccaggaggctccctaacaatgtgactgtaacctgggagggtggctagagagtggagcctctgagaggttaggcaaagagcttagagggaagatctcaagcagggtgagaggcttaacaggaccccgggtggagctccccaggggacagtgggggcctaaaggctctgagaccttgagtgacggtgtagggaaggaagaaagggtagagttgagagggaggcgagaacccc

SEQ ID NO: 115336 - DNA, 386 bp, Homo sapiens
tgaattccaggcctcaagtgatcctcctgcctcagcctcctaaagtgttgggattacagacgtgagccaccacacctggcctggcatgagcttgaaaagtctgagggaaggagaggggcccatcatcccggcaggagcgagggtagagcaggagatgagtctggaaaggaagtcatggagagtgtatcataagcaagaccttttaaagcaatttccgaggcgttcttgtcctcctgagctacccatcctcagtgagaaaggcccaggctacttagagaatgtggcaaagatcttcctgccaccctccaatggcccatttcaaaagtgagcgtgtcttttgaaggcgtcagcttctggcacatcttacccaggctcgtggtttgttt

SEQ ID NO: 115337 - DNA, 817 bp, Homo sapiens
agcggagtatctggagtcagctggagtgtgccagcagcaagatggcccttaccagatgctggcaccttgatatttgacttcccagcctccagaactgtgagaaacaaatttattttctttataaattactcagattgtggtgttctgttacagcaacacaaaatggactatgtgaagaaaaccatgttggaatcttgtgctgtcattgataagaaaggatctgagcattaggtcaatcaccaaaaaactgaaaaatcagtaacaatgatgacagactcttcaaataggatgatttaaattttaggaaattggaagaagactccaagaaacttaacaaggtcctccaatattttccccaaaatgatcttctctgatttgactatgcttgttcctccatatctccctgatccctagacttcttctgtcctctatccacattctctcccaaggtgggtcatctagtttcatgactttaaatcctcccttaaactgttggttctcaaatatgcacttgtcacttctctcctaaactccagactcatgtattcagctacctacttgacacttctgtgtggatgtctagtaggtaataatcttagaattattgtgccctgtcaaattcctgctcttccctctaaaatatcttaatactattcagtcttccccatttctgtttatctcagttccttttcaggtcaaaaacctgagttatctttgattcctctctttctctcacattctagtagtccagttcctttcataatcagatcaattagtaagccctatcagctccatttttaaaatgtaactaggatcc

SEQ ID NO: 115338 - DNA, 434 bp, Homo sapiens
caaatgttaatgtcctttccctttcccctggtgatccaggtctcctgctgaagttcttgcctagctgcggtcttccccacccccacccccacaaaaatgtgaagatagctattgagaagtaccttttaaggccttctccctcttgggatgagaacctgatcaccagagccctggagaggcctggagagtgagccacctgccaaacaaagctctgggaactagggacccattgcaggctgtgaggctgtggcagcagaaatacgcatggcccagagcatgcatgcagaaagtcaaggagtcttttccaccagagtaaggaggattttcccggctgtggcagtctggtcctctgctaagaggaccttaatgcttcataccacagtattgcactggcttttcagatggctcccacgtgagtctcacaacaacctcat

SEQ ID NO: 115339 - DNA, 233 bp, Homo sapiens
agacagtgtaagactgcccatacaccttctgtcaatgtcttgatgccgtttactgcatgtgaaacccgcagcttggagagcacacaggcagaggcggcaaagcaaacacgtggctgactcactgcccctcccatgcaggcagaggctggaaaacagggctggggacaggctcctcatgagggtttgcaagtttttttttttttttttgagacggagtctccttctgtcgccca

SEQ ID NO: 115340 - DNA, 745 bp, Homo sapiens
ggcaagggagcaatcacttattgaagcatggatacttccaaatagaataggacataactctagttctggaaatgactcaaaatcatccaattggttaaaagcagagaacgataaactacacccaaatatatccaaaaattatttcaacaatttatttctggttctcataggtatgtaatgcgaaggaagaaaattgaaccctcattttaaaactggttaggtacagttatttcatttcctttcctggaatcttactttttttcctgtttttgtttgtttgttttgcattagtcagaaaacacttaacccaaatatacatacagatttttaaactttaactactgaagatgagcaaaagtttaaaaatattgcctccactgtaactgataaggtctgacttcctgctgggacagatacaatttgtttggctactcttctgaattaattaaatgagttttactggcatctctatcctagaaattctccaattgggagggagtgaagcatgaagctgagataagtggcaagcatttttaaaaagaggtacttttaacttgtcccaagctttttttgaaccttaactgggttcctaatgtccagtagtctcccgttatctgtaggggatacgttctaaaatcccaatggatggctgaaactatgttttttcctatatattcatatcttatgataaagttcaatttataaattaggcacaataagattaacaggaataataatagaacaa

SEQ ID NO: 115341 - DNA, 304 bp, Homo sapiens
ccaccaggtcccacctttaacattccctactacaattccacatgagtattggtagagacacagaatcaaatcatattattctggctcttgctccccaaatcttgtatccttgtcaaactgcaaaatacactgatgacttctctactgtcccccaatgacttaactcattccagcacttactaaaatgtccaaggacttacagaccccatacaagtcaaaaacccagcaggccagtcattgaatcctacagctccaaatcatcttttctgaatggacgtctcacatccagagcacaggcgtgtca

SEQ ID NO: 115342 - DNA, 540 bp, Homo sapiens
  misc_feature (530)..(530): n is a, c, g, or t
caggcctctcagcctagtttgggtacttctttgtgctttcattacaccctgtgtttcctggccttggcatttactatgctattggtagtgcttatcttgtttacccactaaaccaacttggaggtcaacatgattctgtacctggaacacctgacaggtagtggacacttagtaaatactctatgaattcatgtaagtagttatggcatgcagcttttcagtcactcaaacctgacctcttacactagcgtgccatagagcctacatttcctacactcagccaaattctttaaagagatatccatatttttgagcactagtatgttccaggccttggggatagatatatagctatagtggatgagacagagtaagtcctgttctcataaagcatgtgttataagagccccttaaaaaaaattgtgaggctcggcatggtggctcacacctgggaagccaaggtgggaggatcacttgagcccaggagtttgagacaagcctgggcaacatggggagtccctgtctctacnaaaaaaaaaa

SEQ ID NO: 115343 - DNA, 123 bp, Homo sapiens
cattgccaataatttacatcttattatacgaaaatcctaagggagcccatctgcatatgcctttatattcttcaccgagtccatcctcagacaaatctttagtggcacaacagtctccacagt

SEQ ID NO: 115344 - DNA, 204 bp, Homo sapiens
ttattttcaccttttctaaacaactccaccacactttctctgtctcgagagaaaggggttgaaaaatgtacatatccaggattgccatttttttgttttttttgtgacagagtctcactctgttgcccaggctggagtgcagtggcatgatctcagctcactgcaacctccgcctcccaggttcaagcaattccccttcctcag

SEQ ID NO: 115345 - DNA, 785 bp, Homo sapiens
gttatttgatgcatggaagtttttaattgatgtagtccaattgatctatttgtttctttggttccctggttccctgtgcttttggtatcagatcgaagaaatcattgccaaatccgaggtcatgaagcttttcccttatgttttatcctaagagttttatggtttcaggtcttacattaagatctttggttttttgagttaatttttgtatatggtgtaagttaagggtccaacttcatgtctaacattaattttaatagccatataatattcagcagtgtggatatttcataatttagtagttttgctgttataaacaatgtcataatacatttttatattggtgcttttattcctgtaagatcgattcctaaaagtgggattgctaaggcatataagttgtttatccactcccttttagggtagccaggaaagccaggattcaagtatacacgtttgttaataaatgcagtgaatggtaaggttaaaactgccaagaacttaagcactttaaaagcattttcatctgaacaaacttgtgaggaagttatttgaaaactaggggaaatgaagagaaagactattttaaaactgctggtagcaatcttcctttcttacaagatttgccttatttaatctcttccaacaaaagtaggttgatgttttttcctggtaggcaaaagatgagagcgggtttggcctggctgtccagagcatgaagggcacatattggtctgttgtcaggctcagcagcatggctgactaaagacattgacatcatgaca

SEQ ID NO: 115346 - DNA, 182 bp, Homo sapiens
agcccagtctgctcttctcacagccttcatcatctcagttgagagctccctcatccttcaggtgctcaggccaaaaatctaggtgtcattctcaattcctctctctcataccacacatctcatctatcagctaataccatggctctatctttagaaccatttcagcatccagtctcttcccc

SEQ ID NO: 115347 - DNA, 637 bp, Homo sapiens
tcaaagtttgtgggaagttaaatgagttaaatatagggctattagaggttcatgtcactttaagtttaatatgtatgaaatttacgctctatacaatgtagtggggaatgaattcttttggtcagcttttctagtgaacaatttgattcataaaaattttatttttgtgcagttttctaagagtttagctgctgtataaggtaagatgtaccttattacttatagctttcagcagaattctttgtgtcagtgaaatgttgatatggtataattattatatggccaagtaaccgcttctcaccatagagtcataaatccagtttagccaagtgggttcagcagttattcctattagcagctgattctagtagtaagatgactttctttcaggtttcagggaaggggttccagatagcctgaagttgctttgtagatgctgtgtttattgaagtagtttatcttcccatttgcttatttatgggcttatttcctcataggtggatgtctctttgtgccctcatttggtatttggtgctgaaactaagcatggtgctaccattcaagaagagtttaaaaattggggtattttgactgcagtattcatgacatattcatgaatacgatttcatctctccgt

SEQ ID NO: 115348 - DNA, 510 bp, Homo sapiens
taggagaagagaatgctgaacctatatatatcctccctctgcaccactctgtgctttatatgtgggtccattaagcaaacatttggatggttgatgaaggatactgagtgacaatcagattttcttgttcactttattactgaagctatcctctgtgatggccttttatgagatttagtggaatagaattagattcacattctgtacttattaaaagagactcttccatatattcttcacctcctcctttgtgtccttcttgtctgtccttatctttctcctccttttagtcctcttcctgctcctcttactcatgcttgctcgtttccttctccttgttctccctgttttccttttcctccttctccacatgctccaccttgtcctcctcctaatcatccttctcttcatcctcttcctcatcctccttctcatcctccttatacttgtcttcctcctcctcctcctcatgctacttctccctttccttgtgctccctattcccccagg

SEQ ID NO: 115349 - DNA, 316 bp, Homo sapiens
caaaccacatcactccttcaatttttttctggtagatagtgaaggtcagcacctgtgggaaaggatgaaaaatgggtctgaagaagcaaatggaagaactcagcagagcaggagatgtgaatgctcacagagatacagctagagaccagcatgaatggtggaagtctcttggtagagtcttgcaagttgggaagagaaatcacacatgttccgcccctgagcagtgtccccttgattgcagcaccgtattagattgctgcaggagtgtgggtgtgtgtgaaagagcttgcagaacaccccctaacattcctggcca

SEQ ID NO: 115350 - DNA, 358 bp, Homo sapiens
actgagccaggccttgggaagacaaaggggaagagaatccttctttgtccctacaccatgctgtttggcagatgagaggagctaccaagggctgggactttctgcaggtgtcaaagtcagagtgcccagatctgcatccactcatcttgcttttctttttctggctcctagttggcccaagtacttcagcattgtagcactgataactctcacggaggtctccttccccagaccctttgaggaacagaactcccacactctgctgtcactgaacccgctgtcgccagcaagctctggcctgcccttgtctatggggcatttagagctggtgtctacggcggaacagaccagaaataaa

SEQ ID NO: 115351 - DNA, 360 bp, Homo sapiens
gcttaggcagagaagcaagtgtgattaccagtctgtatcacagacacaaagacgccagtctaaggaaactggactttgtcctctaggttcagggtaagcgctagagggactcagataaaggaatacctcaggaaggccagcctgttagtcacacagaagcaggcagagcagcaggcagagcaggagacagagcagaacaggagacaggctctcctgaccaccgcttcagtgcgggcggagtgagcacattacagcaacagtgagccactgtgtgcaagccctggtgagggtgaggcaggtggtggacaggagagaccagtgtactggcctctcgtgtcggggctagtggggggggacccc

SEQ ID NO: 115352 - DNA, 931 bp, Homo sapiens
agcgggcagcgagcgcagcgcagcgcagggagcgcaggcggtggcggcaccaggttcccggggctccagcgctcggcgcagcgaagtagcctccggcggtggcaactacggcggcggcgccggggcgatgctgtgggtctcgttgggcgccggtgtcctggcctcttcctcagaacgaagaacaaactaaattcatctcaaaatgattataaatcatcaagaaggagtagcctgccacctgaactactcataggaaatgacattagaggaagacttcaaagaaacattaagaacttggatcccattcacctgaggcacccgaagaagagaccatccatatttccaggacggaaacacaccctttccttaggcgtcctgcgtcccccgattcctgctccctggttgccgcgtccttggctggcgtcagaaaaatggctacaaactttctagtaggtgagaagatctggttccacaagttcaaatatggcgatgcagaaaggagattctacgaacagatgaacgggcctgtggccggcgcctccctccaggaggccagcatgatcctccatgatattgccagagccagagagaacatcccgaaatccctggccggaagcttaggcccaggggcgtctagcggccccagcggagaccacagcgagctcgtcgtccggatcgccagtctggaagtggacaaccagagagacctggctgaacgtgctggagaagagcttgcccggccactgggccacagccccgcagacccagcacatgtctcccatgcgccaagtggagcccccggcaagaagctagccacaccagcagaggatgacgaggacgatgacattgacctgtttggcagcgacaatgaggcaacacagctgcggcattaccaatgaggagcggctgcagcagtacgcggagaagaagg

SEQ ID NO: 115353 - DNA, 990 bp, Homo sapiens
agcgggcagcgagcgcagcgcagcgcagggagcgcaggcggtggcggcaccaggttcccggggctccagcgctcggcgcagcgaagtagcctccggcggtggcaactacggcggcggcgccggggcgatgctgtgggtctcgttgggcgccggtgtcctggcctcttcctcagatgaaaagattctgaagaatagagatcttgaacatagcatggtgccagacacataacagaacgaagaacaaactaaattcatctcaaaatgattataaatcatcaagaaggagtagcctgccacctgaactactcataggaaatgacattagaggaagacttcaaagaaacattaagaacttggatcccattcacctgaggcacccgaagaagagaccatccatatttccaggacggaaacacaccctttccttaggcgtcctgcgtcccccgattcctgctccctggttgccgcgtccttggctggcgtcagaaaaatggctacaaactttctagtaggtgagaagatctggttccacaagttcaaatatggcgatgcagaaaggagattctacgaacagatgaacgggcctgtggccggcgcctccctccaggaggccagcatgatcctccatgatattgccagagccagagagaacatcccgaaatccctggccggaagcttaggcccaggggcgtctagcggccccagcggagaccacagcgagctcgtcgtccggatcgccagtctggaagtggacaaccagagagacctggctgaacgtgctggagaagagcttgcccggccactgggccacagccccgcagacccagcacatgtctcccatgcgccaagtggagcccccggcaagaagctagccacaccagcagaggatgacgaggacgatgacattgacctgtttggcagcgacaatgaggcaacacagctgcggcattaccaatgaggagcggctgcagcagtacgcggagaagaagg

SEQ ID NO: 115354 - DNA, 545 bp, Homo sapiens
agaagttgttataggatctaccattgtggcttaattacaaaaatataaacttaattcaatattcaacaaacgtctattgagaacttgtagtaggaggatactatggtgaattagaacagccagtggagttgacatttgagtttcgtaaagatttgaatgtcttgtttccagtgttaaatcccagcaatttaaaatgtaaatatactgcaaggagtctaaaattttaaatagaaagatttccctttaatctgccataagagagtgtttcatgtaaatgcgtgagctgagcttgagaagcagcaggaggatcggcatcctgtgcacacacacggagcagaacagcgctgatgagcagcagtgccggactcatattcgcagaatcctagccatcttcccgtgagcatagagcatctgctctgagttcaacaatggtttacctaggaatcttttttttccctctttttgaagctggcattttatttctgtctttttaaaattataggcatagatcacaggctttttatctttcatagatgctgtgtttc

SEQ ID NO: 115355 - DNA, 531 bp, Homo sapiens
aaagagaacccctgctcaaccccaagacatgatcatgaggaagccacaccatctagacaaaattcttgccacaccatctagaactttggacgtccccatttccacccactccctcactccccaaagccagacaagcaccaagttccatcacctccaccccctgagggcactgacctccgttctccaagccaagttctggccccttccttctcacctggaccaccatatctggtaccctggcctccagttcccctcccacactggcctgaccctgacagatgcttctcacagctgtgttgaatgcaacttcagcaccatgcataacattctcccggccccctttaccctcaggaccaagtccgagtttctcagcctagaatttgaggccctttgtgaggtggcccagccacttcctcacctcacttctcattcctgtgctccaagcacacacgggatctcacagccccctggccagaccttgaatttacacagctccacacgcaaaggcttatgtgttttcctcgccctggg

SEQ ID NO: 115356 - DNA, 388 bp, Homo sapiens
gaggtcatgccactgcactccagcctgggagacagagctagactccatctcaaagaaaaaagaagaagaagaagaaagctaactcagtacactaagagtgatttacatgcctgcaaataatttgtgtctggggtcttgaccctccccaaatgccttgttatttatatctctgcttttagataacagatggtcatgtgtctatgggcttgtaccggcagaggcaacagcaggtccttaagactccccaggtgccatgatgaaaagaaccttagaaaatattgaaataatctcaaaacttaaaaaaaaaaataccagaaataaaagctagtaaaggtgagaggtgtggggcttttggaacatagagcataataaatcagaataaaaagta

SEQ ID NO: 115357 - DNA, 672 bp, Homo sapiens
aacccaatgtccattaatggatgaatggataaatgaaaagtgatatatctaaacagtgaagtattattcagccataaaaaggcacaaataactgatgcatcctacaacatggatgaattttgaaaatctataccaagtgaaagaagacaaaaaaggccacatgttatatgattccatttatatgaattgtccataatagacaaatctataaagacaaaaagtagactagtggtttccaggtactggggtgggggagatgacagaggggtagaggtttctttttaatgaaaatttttctgaagttaaacagcagtgatggttgtacaactctctgtatatattaaggaccactgaattgtatagtttaagagagtacatttattatttatcctattaaaatttaaatcctaagaatacatttttagcactgagagttattttttatttccctgaatccttgggattgcagagaagggtaagacagtagatttggagaaaggatgaaatgtggttagctaataaaacatttgggagaagaagtagcaatcatccatgcagtttctctcccttctatggaatccctttgtatgccgtcgaattatgaccacaacatgaaggcctatcagatgaggttttgagatcatttggaagatactgctgtactggctaagg

SEQ ID NO: 115358 - DNA, 245 bp, Homo sapiens
aagaaattaatgtcacaccttcttttgggatagatcattaatttatttaagaaatcaataaaaaacaagataaactaatttacagagattgttgaaatgtcttatagaaggcacagtaaaatacaacagtatccaatccctttctttctcagctctgaacacttatgaaagacatacaacatcaatttctacagaaaagaaaaccccacacaaatccattcttgcagaattctaaaagatagaga

SEQ ID NO: 115359 - DNA, 745 bp, Homo sapiens
cagcctgccctgatcatgttactctcattggttctttctgcccttttgtttgcatcgttcctctagaccatcacatcctttcttacgctgttacatgcttctttctttctttctcaactagatagtaaggcactgatgtgccttttattctgtctaccggccctggccgtaagaagcacttgataaatacaccgataaaatgaataaatgtaaggatgattttttttaaatcatgggctttgatactgactctgaactgctcaccattgggtcctcagagcctaactcatagcctgacacatagtcatgacctcaataaatatttgttaacttagaaattcatgttgacattggataaaagggacaggcatttgaaggaggcgtctgtcaagatttttttttcccatttttcttcagtagttctaatcagcttctccattcatcaactgtgagaattctgaggactcggcatttcccagagttgggataatgatggagtctggcagttgtgagttggaattaagaagcttgtagttattttaaggtggagtgatgggccccagtactgagcaaaaaaagcattgaggctttatgccagtattttatacgtcaaacaattaggctaaagttatcagttatataaaagttcagctaattggctctaaaatttcagactgtatttattgcagggctgctcaagtttttcatttaaaagcatccctgtaaattagaaaaaaatacatct

SEQ ID NO: 115360 - DNA, 130 bp, Homo sapiens
caaactgacagtttccaaaactgatataccaggaaataactgtaagcataaaattttcagatacaatgataacatcagaaaaggcagttatataggctggatgcagtggctcatgcctaaaattccagca

SEQ ID NO: 115361 - DNA, 362 bp, Homo sapiens
cgttactctaaggatccccccgtcactcgctcttgagcagtagcgagggctggcagagtagggtgggtggatgttgtaaatgggggcggcttgaataagtatgtttcagagttatggagagatggtcatgatgggcaacagaacactacctgtttggggaagtgtgctcagatgtttcaagcacttgggagcagcttatatggtagatagtcaaggttttcttcattccgcctcatggagaagataattggaagggccacaggaagttattggcttccttgaagcattttccaatagtttagatctcatgaatcagatcctccatgcagatgatgccatatttaccaagagcgacggacagg

SEQ ID NO: 115362 - DNA, 386 bp, Homo sapiens
gtgatttcctcagtgacttaggctgtagttgttagtggaggctgtggtgaggttttactgaggatggggatgccaggttatcagtccttatgccccagttgcgagccaagtgtgtctttccgtgggcctccagatgtatgtgaacaccagcattgggggtccaaacgtgccgattcttggaccgccaggagtcccttgctatagtgctggcagtgacagtggtaggctgggtgtgtggctgagtctatgaacccctggataatgtatgtggcataggcaatggcagtagcagtggtgacacaacacttggactctgaaacagcatatgttggtgttagcggtggctgcaacaggcttgggaggtggtgcatgtgggggtgggagag

SEQ ID NO: 115363 - DNA, 379 bp, Homo sapiens
acaacctccagggagggacacgtcacgcgccattctctggaagaggatccttccttcttgtaggaaacctgcttgtgaagtgttgagtttagacaacggaaagatcacatcagtatccccttagaaagggttccactaaatatcggtgctcgttcacaattctttcttcctcttttctacttatgaagctagcacgtgctcttgtggagaaacgtgacctcacagaaacacatgagctagagaggggagccctgcccggcccacttcccctttctccctggcagctgagagccatccatgcgtggcgtattcctctgggaagaccttgagtatgtagagtccccagaatccaacttcattcttcttgagtgccacaagg

SEQ ID NO: 115364 - DNA, 450 bp, Homo sapiens
cagggatgacttgtgctagatttcactcatctctgtatcctcccacaaagactggcctcctgattactaaatatttgagaaatttaattgaggggattgactgctgactctgtataggtcaatagctctctggagttttgttctcacccagagggagaaagatgagggagaggaggctgcaaggctgctggctgagggttccgtggccttggtggaaggggagtaggcagcaggaagagagacacattttcaatggggtgggtcaaccctgctgatgtaagatggcaatgtcatagctgtggtttcaacactgaagaaatactagttatggctgggcgtggtttctcatgcctgtaatcccagctgttgggaagctgagacgggaggattgcttgagatggctaggtctagactagcctgggaaacagcaggaccccatctctattaatt

SEQ ID NO: 115365 - DNA, 472 bp, Homo sapiens
acagagtacacacggagggttgagatagcagcctggtttatcttacttctgatatgacttttaaaatattgattttaaaagtgtgtctttgagtgtaccaaaatagtatgtccctgatgcttctcgctggatgcaatccctgcgcaaatgctttctatgcaattagattttggggctcagcttccattttttaaatctgtgaaagcattgatcatgccagcggccctggagagggccactctgttttagtgccatttacatgtatcaggacaggacagaaaagggacagcatattacaaacaaaataaaactataatcttgttcaatccttgtcatgctgaggatgtttgtaactataaaaaaaattgtatggattccacttacatgagataactggaggggttagattcatagagaaagaaattagagcagtggttactagtggctggaggcaaggggggggaatgaggag

SEQ ID NO: 115366 - DNA, 551 bp, Homo sapiens
tgctttcttagcttcagccttagcactttcattttcttgagatcaaggtgctcttcctgcttatgaagcaccatgaaggtagaatcacacctcctctcccgctggttttctactactcctacctctctgccccccgcccaccaaccccaccttcactctctacttaaatatcccctcctcagggaggctttccctaagcaatctctggacaatggagtcgtgcattcccttattattttttaaacatctaatatccctgctacactggaagcctgaaatcttcaggaaccatatctgcctgtctatgaatgcacacacagcacctagcctagtgtgggctttcaacagatattttggagactgagtccatgtgattcagtctgcattagtagtgcctaatcaacaatgaatgatcattatcttttcctccatggagccacttacatcaattaaagtgtgaggcagtctcccctccaccccaacccctatacttttcccacctgatcttccaactgaagttctctggctcccatacttgccccggaggaatg

SEQ ID NO: 115367 - DNA, 479 bp, Homo sapiens
gaataatcaaccggcaaaatagtaattttttattagctatatttgcattattaatacctgtataggatacattttatacatacgtatatgataaaatacattttatggaattttatatcttgcattttcatcacctaatacacaatcagtttcccttttccctaagtatttttcaaaagcagttagaaaaatagccgtataatagttttttgatgaacaatttctctgttgctggacatctaggttatttttaaaatttcaccatcttaagtaatgccatgctacacacatttctttgtaaatcttggcatatttgatttttttcttggtatatattctttgaaatggaattactgggctagataataggaacattttcaaagttctagatattaaacagttttaatttcagtgatcctttgagagccttaactttaaggactgagccacattattacctgggtgtataacctttttgt

SEQ ID NO: 115368 - DNA, 350 bp, Homo sapiens
caaggagccgggaatcatggctcatcccttgccacatttggtctgacccatccccttgtgagacctcacctccccttctcctcacctcctgcacatccctccactgagccttgtgggacttagggctcagcagacccgccaggtcctgagtgttccctgctcagactgagctccaggggactgcagccctctgagtgcttgtcatcctcttccctgcctccatctgagcccaggcccaccagggacagggtcctcgcctctcatgattgcgtctctgccagcctcactccctctgtagagaccctgcctttgggtctcaggcctcgtcttttttgctgcttctgcagacc

SEQ ID NO: 115369 - DNA, 334 bp, Homo sapiens
acagggtctcactctgtcagccaggctggagtgcagtggtgcaatctcagctcaccgtagcctcaaactcctgggctcaagcgatcctcccacctcagcctcccaagtagctaggactacgggtgcatgccaccacatttggctaatttttttttttttttttttgcttttggtatagatgaggtcttactatgttacccaggctggtctcaaactcccggcctcaagagatcctcctgccttggcctcccacattcttcctttgatttcttgctggagctcccccttagccaaacacaagcagaagtcagagggacagagagcagggtggagg

SEQ ID NO: 115370 - DNA, 492 bp, Homo sapiens
atattattttcacctgtgtttgttgttgttattgttgttgtttgttttgagatgagatctggctctgttgcccaaactggtttcaaactcctgggttcaagtgatcctcctgcctcaccctcccgaataactggtattataggcatgtgccaccacacccttcacctgttttttaaagctatgttttagtgtccagcctcccactgaattaatagagtaacatgaaagactgttgtattctctgcctctaagttttcctccctctattctatcttctacattgtcacaataattttctaaagcatgaaataattatatcattgccctgcataaaagcctttaattatctgttcttttcaggttaaagtgtaagttccttatctggtcccaacctattttttcttttatctcttgttaatctaatgctagagactctgaactctattcatacttaactgttccttgtgtaggcctttttttcatacctgcctt

SEQ ID NO: 115371 - DNA, 766 bp, Homo sapiens
tttggtagcttagggagttacaagtttggtagctcatggagttgccatagacatagaatatattgatttttaatcacagcacacaacaagatgtacatttatatccttgtgagtaagtgaatatggttgagagaagaggttaggttgacaaagcaactactaaaaaattgtctttttccctctgtcttatgggtaacttggatgaaaacatagaagatgagcttataatatatgatgattaataaagtagggagagagagtcagttggatagaagagtttctatttcaaaatcccaggttgccacagtggctcacacctgtaatctcagcattttaggaggccgaggcgggcagatcacttgaggggaaaaaatctaaataaaaattttaacaatcatataaatataaagccaagatcttaatctggaatgggaaggttaagaccattcattaattcaacaaatatttactgagcagccctgagactgttttccttggggtctgggaaggggagccatggtcaatggactcttgttatctgtaggaatattgatccctaccacaaggtacagggacagggaataaaggggagatagtcctcctatgagataaaggtaggggatgttctacagggcccagttttatatttttcttttctgccttgttatttcttctcatgattttctttcagtaaaatctctttcccacatctctttcagtaaaattttgttaaatgatagtcttgttctctgttttggggaattac

SEQ ID NO: 115372 - DNA, 591 bp, Homo sapiens
caatatctaaaatggtatcaatattctgaatgagaaataatctcacaataatataagcaatataagtgcctcctgatagatatggttttttcactattcaactttttttctttatttttcttctagccaatggtgaaaataaaagtaaaatattttatctgttatccttttggtaacaaattacttaaatttcctgtactttgtagattgatttttttggtaatatttcttcatttaatgtaacttaaaaatgaatcgatattaagagttaaagatttgctatggtgtgaatatttgtggcctcaccaccaagatttatatgttgaaatcctaactcctaaggtgatggttttaggaggtggggcctttgtgaggcgcttaggtgtgaaggtggaaatctcatgaatagcattagtgctccagcaagagatcctcaatgaagaccttttgcccttctgccatgtgaagacacagccagaaggtatcatctataaaccagaaagagggcccttaccagacattgaatctgttggcaccttggtcttggacttcccagtctccagaacagtgagaagtatatttctgttgctt

SEQ ID NO: 115373 - DNA, 404 bp, Homo sapiens
agttgtaaacagaaggacctaggagcaatgggactactctttcttggccaaaaccagaagtcatgtccttttttcaaatggggaggctaacccttttaatcaattatcagtgaaagcagcagcagcatatatgtaaataaatatatatatatgtgtgtatatatatgtgtatatatatgtatatatgtgtatatatgtgtatatatgtatatatatgtgtgtatatatgtatatatatgtgtatatatgtatatatatgtgtatatatgtgtatatatgtgtgtatatatatatgtatatatatgtgtgtatatatatatgtatatatatatgtgtgtatatatatatatgggtcttgctccactgcccaggctggagtgcagtggagcaatcatggcttactg

SEQ ID NO: 115374 - DNA, 452 bp, Homo sapiens
actagctgcgggaccttgaacaggttatgtaaattctaaaccatacgtttcctgagggttgttaggaggattaaatgcatatataaagtgtttagcagaatatgtggtgagcccttcctacaatcttagctgttgttttgtggtctttggtctctgttttgggagagtagccttagtcccaggactttttttttctttcttggagggtattgtctcctgtcctgccttacctcattggcaagtatatttgtttttgaccatgaaaacagactgtgtgtctcctccttgtcgctagagttttagttacagctgccctatatcaggttaaaagtgggtgaagtagacacaagggtagtgtatttgttcctacttggctctactttcatttgtggttggagaatcttgtctgaattttgtatttatttatttatattttattctattattttttt

SEQ ID NO: 115375 - DNA, 1237 bp, Homo sapiens
aacaagtcctctccctctaaaagccagcaggttgaagctttacgcatccagaggcagaaaactaaagatggaacagaaaatgtatccagggttttccagatgtggggagaggggttaagggagccctgaggagaggagagggtaagggtcttggcagaattgtgccaagggcacaccaaggctttggccaaccggtcgcccctgctaagtaacagtaatccatgtatacaggcgaaagtctctaagaggacagaagagtaaaaaggaagagtagagttaagatgatgatcccagttctccgtcttgtaccccagggaagacctgtgtatccttccaggtttctttaggcacatttacaagtacatacacttggacatataacctttttttcctacagcatcatgatcatattagccacactttcagagtatatacttaaaaggtcttgctatagtggcacagatatctttcattctttttagatgactttttttttttttaagcacagtctctccactacctctctttccctaactccctaatctttaacacattggagagaatttaagccagggacaagcactcacacaagtgacatccctaccctgacaggcctgcttgggtggcaggtctactcgtcagtcccaggctgggcatttcctgacagaggtccaggtccggcagacagcaaggcacaggaagtgtcctgctgtgctcactgactgcgtgggctggcgggggtggggggctgcaaatatccatgtcggacctgagcagtctcaggcttgccagctccaggcagggaggctgagaactggctttcagcctggggaggagtttggaggattcgggagggagaggtttgtggggttggtggtggcgagagaagaggacaggaggaaggagagtgtgaagggaggcaaggggctgtgggcagaggggaaaggaaggtggcctcgggtgaggggatactcagagactactcagctgcctgggccaggcccctctgcagataagtgtggctggggtggtggtatgcagggctgtgtggggctcccagctgactggctgcgtctgtagcagccccactattcctgccctgggcctcaaaccaggagcgtcccaggccttaggtcagctaaccaaggcccgacattgctggcaggggtctgcaggggtttctgtggatactttgacatttttcacaataaacatcctctgttttgaaaaaaaaaaa

SEQ ID NO: 115376 - DNA, 508 bp, Homo sapiens
atttaatacaggaaacttggtgctgctgaaatcatggggcgtgtgggtggtaggagtggcggtctgggtttgagactcttgagttcgagtttgcagcccccgaatgagctcctagctagagttcagcgggatgccactctggcttccggcagtgcctggactcatttggtcactcctgggaagctactgacttgatgctggtatgaggggtgtggccgcctcacacacaggtgatctactttcctggccagtggccagccaggagcttcaggcaggtgcctgaccccaattcccctgcagtgtctagctgcagggaagtctaggatatgtgacttctggctgtacagccacaaacccagctgcagctctggattagaaagggagattgggcagggtggctcacgcctataatcccagcaccttgggaggccgaggtgggcagatgacgaggtcaggaattccaaaccagcctgaccaacatggtgaaaccccgtctctattaaaaata

SEQ ID NO: 115377 - DNA, 176 bp, Homo sapiens
aggtaattggggagtgggagactatgatccaactctgttcagtttagatggcttgtttcatctaatgatgctgggaacccaagtcgcccaagctactgtcatcattgctaaacaaaaacccaggccttagaatagctatggttcccctaaattagtaaggactagacctgaggtgg

SEQ ID NO: 115378 - DNA, 273 bp, Homo sapiens
gtttgtgcatgtgtgtatgagtgtgtgtgcatgtgttgtgtgtgtgcatgcatgggtgtgcatacatgtgtgtgcacatgcttgagtgtgcacatggctgtgtgtgtgtgtgcatgtgtgaggtgccatgctcttgatggcctggggcttctgctgttatttggcagtgctttggctctggatctgcttccctgctccccattctgtccctcccatcttacccagcatctccgggtgtgggctccgagcccgggcacaggcaggtaccccctg

SEQ ID NO: 115379 - DNA, 339 bp, Homo sapiens
ttttcctgtgtcagtaaggtttcactatagccttccagttgccccaaatgaacatctttgagtcaaacttagtcttgttctttctcacacctgatgttgttgattagaaaactatgccaggtttggccggatgcggtggctcacgcctgtaatcccagcactttgagaggccgaggcgggcggatcacgaggtcaggagatcgagaccatcctggctaacacggtgaaaccccgtctctactaaaaatacaaaaaatttgccggccgtggtggcaggtgcctgtagtcccagctactcgggaggctgaggcaggagaatggcgtgaacccgggaggcgg

SEQ ID NO: 115380 - DNA, 301 bp, Homo sapiens
tgaactttaagtatgggaatttgtgtttatttttgtgtttcaaaacgataaccacctgctgccttgccagattcttgtttcttccagtcaaaataatatagctcttaaaagttcattttctcaactaagaagcacaatattagaagaaaatgttcttttctatttctttaatttctatttgttcctcaagttgatcaccaaatcctgagggtaaggaaatttacttcaatcatcatatatatagcatgaggcacatttaggaatcttgtagtccataatccaatcacatcctccttttctg

SEQ ID NO: 115381 - DNA, 400 bp, Homo sapiens
aactggctctctgtgcttagtaagtacaaaagaaaggaaggaaagaaggaagtctaccagtggcagatgaacagaactttgtgagaagacagaagacttaaaatgtcatacacaatacccatgacctacaactacctgataattacggtcttccttcagtatcctccaaggattgtttccaggggaatcactgataataaaacccttgggtgctgaagtatcttatataaaatcatgtagtctttgcatataatcaacacacatccttctctgtactttatgtcatctctaggttaattataaaacctaatacaatgtaaaaatgctatgtaaatagttgccatactgtattcgttttttatttgtattactttttgttgttttattgttttctttcttc

SEQ ID NO: 115382 - DNA, 272 bp, Homo sapiens
ggagctaatccataatgtgtgccagccaagccacgtaattatgagaaatattgcgtcattgttttaagccactaacttttggggtggtttgtaagtagaaaagttaacagaatctagagctggaaaattttagcatggaaaatgacgctatttcataaactgtattatctcatttaatccccacaaccttttgagacagctactattatcctgaaaagcagagttatgaggctcaaagacgttaagtaaccagtccaagataacacagctaa

SEQ ID NO: 115383 - DNA, 655 bp, Homo sapiens
acggggtttcaccacgttagccagagtggtctcgatctcctgatcttgtgatccgcccgccttggcctctcactgggattacaggcttgagccgctgcgcacagccgagagttttaaattttttttggagttcttccaaaatgcgagatgcaagaaaatgttcttaaatggaataagacaactttaagtccaattgtagtccaaaccatagaaactcagaattcaggacttttgaaaattagggcaggtattcagttaacaagggctattttaagacatgacatttagttcacgtaggttggagattttgtttgacaaagatcttaaaattacttctggcctttggagttatgacatgctgtctttgtcaccttctccttccttcttccccctcactcaccaaaaaaagatgaattttcttttcttttctttttttttattttgagacggagtttcgctcttgttgcccaggctggagtgcagtggcgtgatcttggctcaccgcaacctccgcctcccgggttcaagaaattctcctgcctcagcctcccaagtagctgggattacaggcatgcaccatcacgcccagctaattttgtattttcaatagagacagggtttctccatgttggtcaggctggtctcgaactcccga

SEQ ID NO: 115384 - DNA, 723 bp, Homo sapiens
agcctcagtaaatttaagggaattgaaattatataaagtactctatcagaccacagtggaataaaactggaaatccactccgaaaggaaccttcaaaaccatgaaaatacatggaaattaaataacctgctcctaaatgatcactgggtcaagtatgaaatcaagatgggaattaaagaattcttcaaactgaatgcaaatagtgacacaacctatcaaaacctctggaatacagcaaaggcagtgctaagaggaaagttcacagctctaaatgccaacatcaaaaaatctgaaagagcataaacggacaacctaagttcacacctcaaagaactggagaaacaagaacaaaccaaacccaaacccagcaagaaaaaggaaataaacaagatcagtgcagaactaaatgaaattgaaataacaacgaaaaacaatacaaaagataaatgaaacaaaaagcttgttcttgaaaccagcttaataaataaaatagataaataaaactgattgaacattagcaaaattaaccaagaagacagaaaatcccaataaactcaatcagaaatgaaatgggagatattacaactgacaccacagaaatacaaaagatcattcaaggctacgatgaacactttcatgcgcatgaactagaaaacctagaggaggtggataactccttggaatgatataaccctcctatcttacaacaggaagaattagata

SEQ ID NO: 115385 - DNA, 1828 bp, Homo sapiens
caggagcacaggatgctacttctgccaaccctacaaaaatactctgcacaaatcttcaaaaaacatccttgtcccactgcgtcacctgcggacagatttcatgtcctggtctccttctaaacctggaggtggggcatgaacagggtggagtcacaggggaaagaaaatgaggccccaggacacctgggttcacacccaggtccccagcgatgtctccaccaccgctgctgcaacccctgctgctgctgctgcctctgctgaatgtggagccttccggggccacactgatccgcatccctcttcatcgagtccaacctggacgcaggatcctgaacctactgaggggatggagagaaccagcagagctccccaagttgggggccccatcccctggggacaagcccatcttcgtacctctctcgaactacagggatgtgcagtattttggggaaattgggctgggaacgcctccacaaaacttcactgttgcctttgacactggctcctccaatctctgggtcccgtccaggagatgccacttcttcagtgtgccctgctggttacaccaccgatttgatcccaaagcctctagctccttccaggccaatgggaccaagtttgccattcaatatggaactgggcgggtagatggaatcctgagcgaggacaagctgactattggtggaatcaagggtgcatcagtgattttcggggaggctctctgggagcccagcctggtcttcgcttttgcccattttgatgggatattgggcctcggttttcccattctgtctgtggaaggagttcggcccccgatggatgtactggtggagcaggggctattggataagcctgtcttctccttttacctcaacagggaccctgaagagcctgatggaggagagctggtcctggggggctcggacccggcacactacatcccacccctcaccttcgtgccagtcacggtccctgcctactggcagatccacatggagcgtgtgaaggtgggcccagggctgactctctgtgccaagggctgtgctgccatcctggatacgggcacgtccctcatcacaggacccactgaggagatccgggccctgcatgcagccattgggggaatccccttgctggctggggagtacatcatcctgtgctcggaaatcccaaagctccccgcagtctccttccttcttgggggggtctggtttaacctcacggcccatgattacgtcatccagactactcgaaatggcgtccgcctctgcttgtccggtttccaggccctggatgtccctccgcctgcagggcccttctggatcctcggtgacgtcttcttggggacgtatgtggccgtcttcgaccgcggggacatgaagagcagcgcccgggtgggcctggcgcgcgctcgcactcgcggagcggacctcggatggggagagactgcgcaggcgcagttccccgggtgacgcccaagtgaagcgcatgcgcagcgggtggtcgcggaggtcctgctacccagtaaaaatccactatttccaaaaaaaaaaaaaacacaagaacaaaaaacaggggtggggggcggcctaggggcactggaaaaagtttttaaaacccattggttgggggcgcggggcccagtagggtagtgtggaacacgggcccactacggggtccaagaagaaacccggggcagaacacagggccggggtcctccccaattaaaaagcgcggggggggacaccgacggggttgtgcacacatcccagaggggcgcgaggcacacggggcctatccaacgggaccacgggagcgaggataaatc

SEQ ID NO: 115386 - DNA, 1774 bp, Homo sapiens
caggagcacaggatgctacttctgccaaccctacaaaaatactctgcacaaatcttcaaaaaacatccttgtcccactgcgtcacctgcggacagatttcatgtcctggtctccttctaaacctggaggtggggcatgaacagggtggagtcacaggggaaagaaaatgaggccccaggacacctgggttcacacccaggtccccagcgatgtctccaccaccgctgctgcaacccctgctgctgctgctgcctctgctgaatgtggagccttccggggccacactgatccgcatccctcttcatcgagtccaacctggacgcaggatcctgaacctactgaggggatggagagaaccagcagagctccccaagttgggggccccatcccctggggacaagcccatcttcgtacctctctcgaactacagggatgtgcagtattttggggaaattgggctgggaacgcctccacaaaacttcactgttgcctttgacactggctcctccaatctctgggtcccgtccaggagatgccacttcttcagtgtgccctgctggttacaccaccgatttgatcccaaagcctctagctccttccaggccaatgggaccaagtttgccattcaatatggaactgggcgggtagatggaatcctgagcgaggacaagctgactattggtggaatcaagggtgcatcagtgattttcggggaggctctctgggagcccagcctggtcttcgcttttgcccattttgatgggatattgggcctcggttttcccattctgtctgtggaaggagttcggcccccgatggatgtactggtggagcaggggctattggataagcctgtcttctccttttacctcaacagggaccctgaagagcctgatggaggagagctggtcctggggggctcggacccggcacactacatcccacccctcaccttcgtgccagtcacggtccctgcctactggcagatccacatggagcgtgtgaaggtgggcccagggctgactctctgtgccaagggctgtgctgccatcctggatacgggcacgtccctcatcacaggacccactgaggagatccgggccctgcatgcagccattgggggaatccccttgctggctggggagtacatcatcctgtgctcggaaatcccaaagctccccgcagtctccttccttcttgggggggtctggtttaacctcacggcccatgattacgtcatccaggtaggtggccatcaccatgacgccatagtgacgtcatatgacggtttgagagggtagagctgagagacgtcactaggaagggaaggggccacagaaacatttcttttccctgtgatggcagtttgttggcgaacatcaaagaacccgagggtgggggggatggacgggctcccaggcaaatggccgtccttgtggccgcgacacccagttgtcgtcttgttgccttgcagactactcgaaatggcgtccgcctctgcttgtccggtttccaggccctggatgtccctccgcctgcagggcccttctggatcctcggtgacgtcttcttggggacgtatgtggccgtcttcgaccgcggggacatgaagagcagcgcccgggtgggcctggcgcgcgctcgcactcgcggagcggacctcggatggggagagactgcgcaggcgcagttccccgggtgacgcccaagtgaagcgcatgcgcagcgggtggtcgcggaggtcctgctacccagtaaaaatccactatttcca

SEQ ID NO: 115387 - DNA, 1435 bp, Homo sapiens
caggagcacaggatgctacttctgccaaccctacaaaaatactctgcacaaatcttcaaaaaacatccttgtcccactgcgtcacctgcggacagatttcatgtcctggtctccttctaaacctggaggtggggcatgaacagggtggagtcacaggggaaagaaaatgaggccccaggacacctgggttcacacccaggtccccagcgatgtctccaccaccgctgctgcaacccctgctgctgctgctgcctctgctgaatgtggagccttccggggccacactgatccgcccatcttcgtacctctctcgaactacagggatgtgcagtattttggggaaattgggctgggaacgcctccacaaaacttcactgttgcctttgacactggctcctccaatctctgggtcccgtccaggagatgccacttcttcagtgtgccctgctggttacaccaccgatttgatcccaaagcctctagctccttccaggccaatgggaccaagtttgccattcaatatggaactgggcgggtagatggaatcctgagcgaggacaagctgactattggtggaatcaagggtgcatcagtgattttcggggaggctctctgggagcccagcctggtcttcgcttttgcccattttgatgggatattgggcctcggttttcccattctgtctgtggaaggagttcggcccccgatggatgtactggtggagcaggggctattggataagcctgtcttctccttttacctcaacagggaccctgaagagcctgatggaggagagctggtcctggggggctcggacccggcacactacatcccacccctcaccttcgtgccagtcacggtccctgcctactggcagatccacatggagcgtgtgaaggtgggcccagggctgactctctgtgccaagggctgtgctgccatcctggatacgggcacgtccctcatcacaggacccactgaggagatccgggccctgcatgcagccattgggggaatccccttgctggctggggagtacatcatcctgtgctcggaaatcccaaagctccccgcagtctccttccttcttgggggggtctggtttaacctcacggcccatgattacgtcatccagactactcgaaatggcgtccgcctctgcttgtccggtttccaggccctggatgtccctccgcctgcagggcccttctggatcctcggtgacgtcttcttggggacgtatgtggccgtcttcgaccgcggggacatgaagagcagcgcccgggtgggcctggcgcgcgctcgcactcgcggagcggacctcggatggggagagactgcgcaggcgcagttccccgggtgacgcccaagtgaagcgcatgcgcagcgggtggtcgcggaggtcctgctacccagtaaaaatccactatttcca

SEQ ID NO: 115388 - DNA, 1810 bp, Homo sapiens
caggagcacaggatgctacttctgccaaccctacaaaaatactctgcacaaatcttcaaaaaacatccttgtcccactgcgtcacctgcggacagatttcatgtcctggtctccttctaaacctggaggtggggcatgaacagggtggagtcacaggggaaagaaaatgaggccccaggacacctgggttcacacccaggtccccagcgatgtctccaccaccgctgctgcaacccctgctgctgctgctgcctctgctgaatgtggagccttccggggccacactgatccgcatccctcttcatcgagtccaacctggacgcaggatcctgaacctactgaggggatggagagaaccagcagagctccccaagttgggggccccatcccctggggacaagcccatcttcgtacctctctcgaactacagggatgtgagtcacagccccacacagccctcacccctgcgcccttgagccaaactcttcgtttactctcctcttttgctatcaggtgcagtattttggggaaattgggctgggaacgcctccacaaaacttcactgttgcctttgacactggctcctccaatctctgggtcccgtccaggagatgccacttcttcagtgtgccctgctgtgagcttctatgtgggagaataaggctgaatgggggtgaagggaggaggcggggctggacctcagcttctcagaggcttttgaggaactgttcttttatcatgccctcacaggtcagaaagtcaaaggggcagtaggcactggggagattccctcccccatgacacctttctgacctctaacctagggttacaccaccgatttgatcccaaagcctctagctccttccaggccaatgggaccaagtttgccattcaatatggaactgggcgggtagatggaatcctgagcgaggacaagctgactattggtggaatcaagggtgcatcagtgattttcggggaggctctctgggagcccagcctggtcttcgcttttgcccattttgatgggatattgggcctcggttttcccattctgtctgtggaaggagttcggcccccgatggatgtactggtggagcaggggctattggataagcctgtcttctccttttacctcaacagggaccctgaagagcctgatggaggagagctggtcctggggggctcggacccggcacactacatcccacccctcaccttcgtgccagtcacggtccctgcctactggcagatccacatggagcgtgtgaaggtgggcccagggctgactctctgtgccaagggctgtgctgccatcctggatacgggcacgtccctcatcacaggacccactgaggagatccgggccctgcatgcagccattgggggaatccccttgctggctggggagtacatcatcctgtgctcggaaatcccaaagctccccgcagtctccttccttcttgggggggtctggtttaacctcacggcccatgattacgtcatccagactactcgaaatggcgtccgcctctgcttgtccggtttccaggccctggatgtccctccgcctgcagggcccttctggatcctcggtgacgtcttcttggggacgtatgtggccgtcttcgaccgcggggacatgaagagcagcgcccgggtgggcctggcgcgcgctcgcactcgcggagcggacctcggatggggagagactgcgcaggcgcagttccccgggtgacgcccaagtgaagcgcatgcgcagcgggtggtcgcggaggtcctgctacccagtaaaaatccactatttcca

SEQ ID NO: 115389 - DNA, 1336 bp, Homo sapiens
caggagcacaggatgctacttctgccaaccctacaaaaatactctgcacaaatcttcaaaaaacatccttgtcccactgcgtcacctgcggacagatttcatgtcctggtctccttctaaacctggaggtggggcatgaacagggtggagtcacaggggaaagaaaatgaggccccaggacacctgggttcacacccaggtccccagcgatgtctccaccaccgctgctgcaacccctgctgctgctgctgcctctgctgaatgtggagccttccggggccacactgatccgaatccccttgctggctggggaggtgaggtcccagtctggtgggtacgggctgggaaggctgatggcagtttgacagtgaacatcaaagggcctgagggtgggaggcaagtatttaaggggctttccagggcagcaggcactggacttcgtgacagatagtctggagggtggtggaggaattgaggacactttccacgtgtctacactgcgactctgcggatggtggccgggtggagggagacgatcatgcaggtttgcttgggactgcgtaagtctaggcggcagggcctctgcacacaggacgctgagtacccaggtgctcaatagggaaattaccctatggcactggggagccacggaagggactgaacagagcaggaatctctcatcttcactagttcctcttctcccccagtacatcatcctgtgctcggaaatcccaaagctccccgcagtctccttccttcttgggggggtctggtttaacctcacggcccatgattacgtcatccaggtaggtggccatcaccatgacgccatagtgacgtcatatgacggtttgagagggtagagctgagagacgtcactaggaagggaaggggccacagaaacatttcttttccctgtgatggcagtttgttggcgaacatcaaagaacccgagggtgggggggatggacgggctcccaggcaaatggccgtccttgtggccgcgacacccagttgtcgtcttgttgccttgcagactactcgaaatggcgtccgcctctgcttgtccggtttccaggccctggatgtccctccgcctgcagggcccttctggatcctcggtgacgtcttcttggggacgtatgtggccgtcttcgaccgcggggacatgaagagcagcgcccgggtgggcctggcgcgcgctcgcactcgcggagcggacctcggatggggagagactgcgcaggcgcagttccccgggtgacgcccaagtgaagcgcatgcgcagcgggtggtcgcggaggtcctgctacccagtaaaaatccactatttcca

SEQ ID NO: 115390 - DNA, 1544 bp, Homo sapiens
caggagcacaggatgctacttctgccaaccctacaaaaatactctgcacaaatcttcaaaaaacatccttgtcccactgcgtcacctgcggacagatttcatgtcctggtctccttctaaacctggaggtggggcatgaacagggtggagtcacaggggaaagaaaatgaggccccaggacacctgggttcacacccaggtccccagcgatgtctccaccaccgctgctgcaacccctgctgctgctgctgcctctgctgaatgtggagccttccggggccacactgatccgcatccctcttcatcgagtccaacctggacgcaggatcctgaacctactgaggggatggagagaaccagcagagctccccaagttgggggccccatcccctggggacaagcccatcttcgtacctctctcgaactacagggatgtgcagtattttggggaaattgggctgggaacgcctccacaaaacttcactgttgcctttgacactggctcctccaatctctgggtcccgtccaggagatgccacttcttcagtgtgccctgctggttacaccaccgatttgatcccaaagcctctagctccttccaggccaatgggaccaagtttgccattcaatatggaactgggcgggtagatggaatcctgagcgaggacaagctgactattggtggaatcaagggtgcatcagtgattttcggggaggctctctgggagcccagcctggtcttcgcttttgcccattttgatgggatattgggcctcggttttcccattctgtctgtggaaggagttcggcccccgatggatgtactggtggagcaggggctattggataagcctgtcttctccttttacctcaacagggaccctgaagagcctgatggaggagagctggtcctggggggctcggacccggcacactacatcccacccctcaccttcgtgccagtcacggtccctgcctactggcagatccacatggagcgtgtgaaggtgggcccagggctgactctctgtgccaagggctgtgctgccatcctggatacgggcacgtccctcatcacaggacccactgaggagatccgggccctgcatgcagccattgggggaatccccttgctggctggggagtacatcatcctgtgctcggaaatcccaaagctccccgcagtctccttccttcttgggggggtctggtttaacctcacggcccatgattacgtcatccagactactcgaaatggcgtccgcctctgcttgtccggtttccaggccctggatgtccctccgcctgcagggcccttctggatcctcggtgacgtcttcttggggacgtatgtggccgtcttcgaccgcggggacatgaagagcagcgcccgggtgggcctggcgcgcgctcgcactcgcggagcggacctcggatggggagagactgcgcaggcgcagttccccgggtgacgcccaagtgaagcgcatgcgcagcgggtggtcgcggaggtcctgctacccagtaaaaatccactatttcca

SEQ ID NO: 115391 - DNA, 1445 bp, Homo sapiens
caggagcacaggatgctacttctgccaaccctacaaaaatactctgcacaaatcttcaaaaaacatccttgtcccactgcgtcacctgcggacagatttcatgtcctggtctccttctaaacctggaggtggggcatgaacagggtggagtcacaggggaaagaaaatgaggccccaggacacctgggttcacacccaggtccccagcgatgtctccaccaccgctgctgcaacccctgctgctgctgctgcctctgctgaatgtggagccttccggggccacactgatccgcatccctcttcatcgagtccaacctggacgcaggatcctgaacctactgaggggatggagagaaccagcagagctccccaagttgggggccccatcccctggggacaagcccatcttcgtacctctctcgaactacagggatgtgcagtattttggggaaattgggctgggaacgcctccacaaaacttcactgttgcctttgacactggctcctccaatctctgggtcccgtccaggagatgccacttcttcagtgtgccctgctggttacaccaccgatttgatcccaaagcctctagctccttccaggccaatgggaccaagtttgccattcaatatggaactgggcgggtagatggaatcctgagcgaggacaagctgactattggtggaatcaagggtgcatcagtgattttcggggaggctctctgggagcccagcctggtcttcgcttttgcccattttgatgggatattgggcctcggttttcccattctgtctgtggaaggagttcggcccccgatggatgtactggtggagcaggggctattggataagcctgtcttctccttttacctcaacagggaccctgaagagcctgatggaggagagctggtcctggggggctcggacccggcacactacatcccacccctcaccttcgtgccagtcacggtccctgcctactggcagatccacatggagcgtgtgaaggtgggcccagggctgactctctgtgccaagggctgtgctgccatcctggatacgggcacgtccctcatcacaggacccactgaggagatccgggccctgcatgcagccattgggggaatccccttgctggctggggagactactcgaaatggcgtccgcctctgcttgtccggtttccaggccctggatgtccctccgcctgcagggcccttctggatcctcggtgacgtcttcttggggacgtatgtggccgtcttcgaccgcggggacatgaagagcagcgcccgggtgggcctggcgcgcgctcgcactcgcggagcggacctcggatggggagagactgcgcaggcgcagttccccgggtgacgcccaagtgaagcgcatgcgcagcgggtggtcgcggaggtcctgctacccagtaaaaatccactatttcca

SEQ ID NO: 115392 - DNA, 1517 bp, Homo sapiens
caggagcacaggatgctacttctgccaaccctacaaaaatactctgcacaaatcttcaaaaaacatccttgtcccactgcgtcacctgcggacagatttcatgtcctggtctccttctaaacctggaggtggggcatgaacagggtggagtcacaggggaaagaaaatgaggccccaggacacctgggttcacacccaggtccccagcgatgtctccaccaccgctgctgcaacccctgctgctgctgctgcctctgctgaatgtggagccttccggggccacactgatccgcatccctcttcatcgagtccaacctggacgcaggatcctgaacctactgaggggatggagagaaccagcagagctccccaagttgggggccccatcccctggggacaagcccatcttcgtacctctctcgaactacagggatgtgcagtattttggggaaattgggctgggaacgcctccacaaaacttcactgttgcctttgacactggctcctccaatctctgggtcccgtccaggagatgccacttcttcagtgtgccctgctcctctagctccttccaggccaatgggaccaagtttgccattcaatatggaactgggcgggtagatggaatcctgagcgaggacaagctgactattggtggaatcaagggtgcatcagtgattttcggggaggctctctgggagcccagcctggtcttcgcttttgcccattttgatgggatattgggcctcggttttcccattctgtctgtggaaggagttcggcccccgatggatgtactggtggagcaggggctattggataagcctgtcttctccttttacctcaacagggaccctgaagagcctgatggaggagagctggtcctggggggctcggacccggcacactacatcccacccctcaccttcgtgccagtcacggtccctgcctactggcagatccacatggagcgtgtgaaggtgggcccagggctgactctctgtgccaagggctgtgctgccatcctggatacgggcacgtccctcatcacaggacccactgaggagatccgggccctgcatgcagccattgggggaatccccttgctggctggggagtacatcatcctgtgctcggaaatcccaaagctccccgcagtctccttccttcttgggggggtctggtttaacctcacggcccatgattacgtcatccagactactcgaaatggcgtccgcctctgcttgtccggtttccaggccctggatgtccctccgcctgcagggcccttctggatcctcggtgacgtcttcttggggacgtatgtggccgtcttcgaccgcggggacatgaagagcagcgcccgggtgggcctggcgcgcgctcgcactcgcggagcggacctcggatggggagagactgcgcaggcgcagttccccgggtgacgcccaagtgaagcgcatgcgcagcgggtggtcgcggaggtcctgctacccagtaaaaatccactatttcca

SEQ ID NO: 115393 - DNA, 1420 bp, Homo sapiens
caggagcacaggatgctacttctgccaaccctacaaaaatactctgcacaaatcttcaaaaaacatccttgtcccactgcgtcacctgcggacagatttcatgtcctggtctccttctaaacctggaggtggggcatgaacagggtggagtcacaggggaaagaaaatgaggccccaggacacctgggttcacacccaggtccccagcgatgtctccaccaccgctgctgcaacccctgctgctgctgctgcctctgctgaatgtggagccttccggggccacactgatccgcatccctcttcatcgagtccaacctggacgcaggatcctgaacctactgaggggatggagagaaccagcagagctccccaagttgggggccccatcccctggggacaagcccatcttcgtacctctctcgaactacagggatggttacaccaccgatttgatcccaaagcctctagctccttccaggccaatgggaccaagtttgccattcaatatggaactgggcgggtagatggaatcctgagcgaggacaagctgactattggtggaatcaagggtgcatcagtgattttcggggaggctctctgggagcccagcctggtcttcgcttttgcccattttgatgggatattgggcctcggttttcccattctgtctgtggaaggagttcggcccccgatggatgtactggtggagcaggggctattggataagcctgtcttctccttttacctcaacagggaccctgaagagcctgatggaggagagctggtcctggggggctcggacccggcacactacatcccacccctcaccttcgtgccagtcacggtccctgcctactggcagatccacatggagcgtgtgaaggtgggcccagggctgactctctgtgccaagggctgtgctgccatcctggatacgggcacgtccctcatcacaggacccactgaggagatccgggccctgcatgcagccattgggggaatccccttgctggctggggagtacatcatcctgtgctcggaaatcccaaagctccccgcagtctccttccttcttgggggggtctggtttaacctcacggcccatgattacgtcatccagactactcgaaatggcgtccgcctctgcttgtccggtttccaggccctggatgtccctccgcctgcagggcccttctggatcctcggtgacgtcttcttggggacgtatgtggccgtcttcgaccgcggggacatgaagagcagcgcccgggtgggcctggcgcgcgctcgcactcgcggagcggacctcggatggggagagactgcgcaggcgcagttccccgggtgacgcccaagtgaagcgcatgcgcagcgggtggtcgcggaggtcctgctacccagtaaaaatccactatttcca

SEQ ID NO: 115394 - DNA, 767 bp, Homo sapiens
aggcggaagctgggctcctccctgcgtctctttctgggccgtggagctgtccgctctgaaacctgaggaagtcgtagttcagggaggggtagctcttgcacctaggccgttaggaacgagttttaggttcgaatcccatcttatggaaggtggtattggtcccttgggtgtcccacccgtctcagccaaactgcgggccatttcccggggcgagcaaggggagttaccgcgccagtgggtggactcgccgcctctcggagtcgggaggaagtcgagctggggtgcagttacgagtctcagttaataatgaatagggtggccaatggtgggccaggcacagtggctcacgcctgtaatcccagcactttgggaggccgaggcgggcggatcacgaggttaggagataagagaccagcctggctaatatggtgaaacctcgtctttactaaaaataaaaaaattagctgggcatggtggcgggcgcctgtagtcccggctactcgggaggctgaggcaggagaatcgcttgaacctgggaggcggaggttgcagtgagctgagatcatgcccttgcactctagcctgtgcaacaagaatgaaactccatctcaaaaaaaaaagaaaaaaaaagatttcacctcatggtcaaattggttaggatttgatggaataatctataaggtttcgtgtaaacaaattggggttaacattaataaactaatgcaagggtaaaattttgctttgaacaagattttcatttcataata

SEQ ID NO: 115395 - DNA, 470 bp, Homo sapiens
ggctctgtttccttctggaggccctagggaagaatccatgtccttgcctttcctagcttctagaggctatctgaattccttggcttctgccctccttcctccatcttcagaaccagcaatgctacattgagttcttcagtcacatcatgctgaccctgcttccgtcatctcatttcttctttgactcctttcttctgtgagcctcttctgcttttcttttttctcatttctctcttctgctgttaaggacctttatgattacactgggcccgtcctaataatctaggatagtctatgttgttttgtttttgagacagggtctcgctgtgttgcccaggctgaaatggcacaagttttctacaagtttttaataaaacttgtggggcatgatcatggcttactgcagccttgacttcccaggcttaagtgatcctcccaggtcagcctcccaagtacctgggactataggc

SEQ ID NO: 115396 - DNA, 272 bp, Homo sapiens
cgttacctaataagtgtcagttaccaggacaagattgatttctctaatagtcaaaattccttccgttgtaatgatccaatgtaagtagagaaaatggaaaacaaattttttggctcacataatcaggaagtttggattcagggatttgaaaacaaggtcattaggccaggcgcggtggctcacgcctgtaatcccagcactttgggaggcctaggcgggcggatcacaaggtcaagagatcgagaccatcctggccaacatggtgaaacacc

SEQ ID NO: 115397 - DNA, 645 bp, Homo sapiens
taattttccacagggtaataaaagcaaaggtttccattgccaattgataaagaaagaaaactaagcctcagagaggtgagaagatatgcctatattaatgtcactaataacaggcagggaagggacttgactcctggtctcctgactcccactgcacaggctaccatgaaagatttcctaggatggtggttcttgaaggagggcctggcccagtagcatcacctgagagactgttagaaatgcaaattcttggactccatctcaaacctactcaatcggaaactctggggttggggccctgcaatttgtgcttcactaagccccccagccgatactgttgtgcacacaagttcgagaacactgacctgggacatgggaatggataatgagataaaacagataaaaggactttaatcccacaaagcctacatatcaacagagaatgcctgggagcagctggtggctgcttatttcatctgtagacagcgtgagccacgcagtgccctcaaaccgaagtcaagctatttacccactagaaccccacagtggatactggactctgtgcatggttattcagggtgtgcactgtacaactcaaaggcaacagtgcccctgaagatgggctgcatggccattagtgtggct

SEQ ID NO: 115398 - DNA, 728 bp, Homo sapiens
ggccctgagttccgcgtcctcggctgggacgctgggcgacctccggcaagcggcctgaccgcccagtgcctcgctttcctccgctacgaaatggggccgatgacgcagctcaacctcgtaggcgtcgcgtgaggctgaaacgcgcttagatcggcgcctgggtctttactgtgatgtcgctcttggaattatcgttatgcagtgaacaagtgttgggcgaccaaagtgtcccctttaatcctcccacgcgctttattctgtgctcccagtttactgaggagatgatggagacccagggaggggaagtgacttgcctagggtaacacaccatgaacaagaaagaagttgaatactgaccgagagctaggcatgaatgatcatgaggctatatttgtctagttttgttaattctgccagtgttgattgtgccaggtgcaaactgaagtgaaattggccagcaagaggaatcactccaccgccccttgccgtaaccgatagattgacagtagcacctcccaggtacaggtgcagtagctgaggctcgcacaggttgtagggacccccctcaggtcgcagcaggttcacccaggagcccattcggtttgaggccacagccctagcacagtccccagagggagtctgtgctcttgtctctttctggctgtgagactgccccgggggtgacctatgtaaaacctgtgcgtctttgttttgcagcgacgaaaaag

SEQ ID NO: 115399 - DNA, 673 bp, Homo sapiens
tgaagaaatttgtggttcaaaacatttctgcatcttttcaaatcttcattcactcagcagtatttactaaaagcctgtgtggtaccatgtgatgtgaaacagacagatgtggccccatccctcacacagcttattgtaagtgtggggtggtgaggagggtggtgcagagaggcaaatcttaatactgagttggcaattgaaaatatgtagtgagttgcggaagtagagggtactgtgggagcacctaggaaagacaccagcccagatttggcacatcagagaaggctttctgagaaaggagatgtataaactgaaattggaaggacaaatcgggagttagccagctaagaagggaagggggaatgtttgaggtggagagaataaaatgtgcaaaggattgaagataagagatggtgtgacattattgaatcttagagtggagaatggcaagaaataaagcgaaagaagtgggctaggcgtggtggctcgtgcctgtgatcccagcattttgggaggccaaggcgagaggattgctttagcccaggagtttaagatcagcctgggtaatacagtgagaccccatctctagaaaaaataagaaattagtcaaatgtggtgttagtcccagctacgtgggggactagtagtcccagctacttgggagggggagatg

SEQ ID NO: 115400 - DNA, 543 bp, Homo sapiens
gatctttccacctcagcctcctgagtagctgggactacaggtgcatgccaccaagcctggctaactttttgtagagatagggttttgccatgctgcccaggctggcttagaattcctgaattcaagtgatttgtctgcctcaggctcccaaagtgctgggattacaggcatgagccacactgcacccagtcgatgctaccctttttatatgaaacacctattaacacggtacaacaacacttcaaaacatattatttgaatttcggcctctgattttctagtcaacaatccattaaggcaaagacctgtttccaaactcagatgttctccaacttacactaatgtctggttttcttgaactatgtgagagaaaaaaataaacagaatttatttattatcataaagtcatcctgtttgccacttaatttggttatgttttatctaccacactgcaaatatgttaattcaccatgagaaacagatccctgtacacatgtgtatcagtaaatcattcaatgaatagttagtgcttaggatgtatag

SEQ ID NO: 115401 - DNA, 510 bp, Homo sapiens
agctggaccacaggtggcaccaccacaaccagctagtttaacttttttttatagagacagtgtctggccctgttgcccagactggtcctgaattcttgggcccaagcagtcctcccacttcactgggattacaggcatgagccacactgcacccagtcgatgctaccctttttatatgaaacacctattaacacggtacaacaacacttcaaaacatattatttgaatttcggcctctgattttctagtcaacaatccattaaggcaaagacctgtttccaaactcagatgttctccaacttacactaatgtctggttttcttgaactatgtgagagaaaaaaataaacagaatttatttattatcataaagtcatcctgtttgccacttaatttggttatgttttatctaccacactgcaaatatgttaattcaccatgagaaacagatccctgtacacatgtgtatcagtaaatcattcaatgaatagttagtgcttaggatgtatag

SEQ ID NO: 115402 - DNA, 553 bp, Homo sapiens
gacaccattggagaaactgggcattttaccaaggatttgactggaatggcatgcttcctttaaagatgaaagttgacttttagagccaattaaagccctttggggaatctggcctcataccttgtccacacagagttcctgtacaaggttcctgacctgtggtgtctgggattacaggcatgagccacactgcacccagtcgatgctaccctttttatatgaaacacctattaacacggtacaacaacacttcaaaacatattatttgaatttcggcctctgattttctagtcaacaatccattaaggcaaagacctgtttccaaactcagatgttctccaacttacactaatgtctggttttcttgaactatgtgagagaaaaaaataaacagaatttatttattatcataaagtcatcctgtttgccacttaatttggttatgttttatctaccacactgcaaatatgttaattcaccatgagaaacagatccctgtacacatgtgtatcagtaaatcattcaatgaatagttagtgcttaggatgtatag

SEQ ID NO: 115403 - DNA, 4815 bp, Homo sapiens
agcttaacaagaccatggcctctggacccgcgatcagctcgctgtgtggtcctgagcagccacccaacatctctgggccttggattcctacctggcctttcttctggatgcatcatttttgcctttaggtatctggaccattcccccccatggatgataaagtctttgcttcacaccctcaggattaccttaaaggcctgaaaagaacagaggaggagtctgaggaggtgaattccagccgtgctcttgcaggctggctgggcagtgtgctggggaggagagggagcctctggctgggcctcctccaccgggcctggtgtgctgggaacaccccgcattgtcccaaggcctcagatttgactttcaaagggaaaacagctctcctgataaaggacaccattggagaaactgggcattttaccaaggatttgactggaatggcatgcttcctttaaagatgaaagttgacttttagagccaattaaagccctttggggaatctggcctcataccttgtccacacagagttcctgtacaaggttcctgacctgtgggaagcggcacagcaccagctaggcagagacgccccaggccatgttagagctttgagtgaggcctggtaacagggaggcgctgtcacctactggccttgccaatccagctccaagatgctgagcctgaagctccccaggctgtttagcatagaccagataccccaggtgttccatgagcaaggcatcctgttcggctaccgccatccacagagttctgccactgcctgcatcctcagccttttccaaatgaccaatgagactctcaacatttggactcacttgctgcccttctggttctttgcatggaggtttgtgactgcactgtatatgacagacatcaagaatgacagctactcctggcccatgcttgtgtacatgtgcaccagctgcgtgtacccacttgtgtccagctgtgcgcacaccttcagctctatgtccaagaatgcccggcacatttgctacttcctggactatggtgccgtcaacctcttcagcctgggctcagccattgcctactctgcatacacgttcccggatgcgctcatgtgcaccactttccatgactactacgtggccctggctgtactgaacaccatcctcagcacaggcctctcctgctactccaggtttcttgaagtccagaagcccagactctgtaaggtgattcgtgtcctcgcctttgcttatccgtacacctgggactccctccccatcttctacaggctattcctgttcccaggggagagtgcacaaaatgaagccacctcgtaccaccagaagcacatgatcatgaccctcctggcctctttcttgtactctgcacatctgccagaacgcctagcccctggacgctttgactacatcggtcacagtcaccagctgtttcacgtgtgtgtgatcctggccacgcacatgcagatggaagccatacttctggacaagactctgaggaaggaatggctcctggccacctccaagcccttctctttctctcagatagctggagccatacttctgtgcatcatcttcagcctcagcaacataatttatttctcagctgctctgtatcggattcccaagccagaattacataaaaaagaaacatgactcagaccataagcttttcatgccagatgtcaacattaagctgcaacatcctaaccaccataagccggaggtggttacagcttatcacggcctaaaatattcataatggttggtgtcttttgaatgaattcatgtcaaaaatgttattcagctggggaaatttctctaaatgtacactgattctgtgtgtgtgattttaaaaggagaacatggttcaagcaagtccttgttaaggcaaactattgatatttcattaattttaaatttacttaaaatgtggttttaaattctatttaaacatttggattaagcatattactctggagctttgtattattctttaaaaatgaatcttgcttcatttgatgaatttcatgtcacaaagcttctctcaagagctctcgtagtggcctgtcaaccactttcggagaatgagccaggtcagtcactgggaggacctgtgaaagaaagttggtcactgagtgccttggggactggcaaaacattccagaatgaagagagctgtctggggagagcccttcttcccttctccacctagtgaagggagaacagaaggggagtcctctcttcccacaagtccattctgccttcaaagtgtaagttctcatgtcattatggatttggagtttgtcagtttttttcttaaaagtccacagcggggtgtcatgtgttctgttatgttctgttttctggttgccagtttgatctgcaaagtatttttcagtgcaggtaaaatgtgttaaaccataagagttgactgagttaatcccaattggttgtgctcatatgccaccttttaaaccaatggaaattgctatatttggggatgtcatacatttgatattgcttcagcatttcaaatatgttgcaaaatttagtatccatatgcataagaagttaatcaccttgccagtggggtggtcacatatagtgttctcaagctttactgtgaatcagaaacatccagtaagcttgtgacaaatgcagactcctagggaaaaccagggggttctgcttcactaggttaaatgtaggttttgtagaggagatctgcactggagcaagtctcccagatgattctaatacaggagggccagaggccaaacttgaagaactgctggtgttacatgttccaaaaggcattagacctatcagctttgtttcgcctgatctcaagttttagcaactcaccaactaaggcgtaacctcattttatgttccagcgttttctactctgaatagttctaaaacactgagcattttctcatttgttgcattactgattaaagttcagtatttcatggtgttttcagggatcacagaaatgcggatgcaaaacaacttttgacagaggcccatcaaacccagatctgcacttggtaatgacttaggggggcttcctcacaatgcaggatcctctttgctgactcaggaatactccatattttagactactgcctctaccattaactagcccagacatttgaatggccttgtaaacagctcactgtctaatactcgaaggacaagtaacaatttatattggatgagagtggtcaagaaatatgatttcattagttttattatctgtttacttcctctggggaaggcagactgataaaattatatgggctggtaaatttttggtacattaattgcaagctgcatgacaaaatttgtttttctggcaacaatctgacattattagtggaattccacaccaacagggcttgtgagcttccatttcatcttactgtaacttcaattttatggcaaaaaaaggtacaaagtttaaatacccctttctagtaatgccaaagacatacagtgttttacattctctcctttataggtaacaaaataatgtttagctcagtaagtactgaaataatgagtgaccaatttgaaggatttttagattatttaatctttgcttatgttgctttttcacatgcttaatgatggaaatgaaatgttaaatcaacaaaataagatccagtgtttcataacatttttataagtttggtaaactttagtcccattatatacttttggggacagtgttataaatcagaattttacgacagtttgcagaacactgatttgaaagcttcctatgcaaaatgagaaggggttcaaatatattaattatcattaagtattaaataataggcattagatgtctaatgtgagtataatttcatccaagccatctcagaaagtctaaaaggttggcagggggtcagctgaagacctcactggagtgggtcttaatttttaaaaagtgtctcactacacttaagacatgtgacacattcccattggtaacaattgctcaccatggcattgtctcaaaaaagactatggtggggagggtggcacattcctaatgggatgtacctctccccaatccccttgcttgagaagcactactcaaaaatttaccagaccttacaactgtgataaaacttgaatgtgtatgatgaataaggccattcagttaactttacctccctttacccattgaaggggttccttttccattgctcagtttttagaaaataattctcatcttttttctaaagaaatgaatttgtggctggtctgaaggtagtgagttagctcaattgattgttcgcagtcagttatagatcaagctccttgttctactcttcccctcttctcactactgcacttgactagtcttaaaacaaagaaagaacgaatgaatgaatgaatctgtggctgggattacaggcatgagccacactgcacccagtcgatgctaccctttttatatgaaacacctattaacacggtacaacaacacttcaaaacatattatttgaatttcggcctctgattttctagtcaacaatccattaaggcaaagacctgtttccaaactcagatgttctccaacttacactaatgtctggttttcttgaactatgtgagagaaaaaaataaacagaatttatttattatcataaagtcatcctgtttgccacttaatttggttatgttttatctaccacactgcaaatatgttaattcaccatgagaaacagatccctgtacacatgtgtatcagtaaatcattcaatgaatagttagtgcttaggatgtatag

SEQ ID NO: 115404 - DNA, 4527 bp, Homo sapiens
gcgagtccggggtcgccgcagcccgggaggagtgtctggtctccggcctgcctgtgctgtccccgcgccctgtccactggactcccgagacccttggaacccaggacaccattggagaaactgggcattttaccaaggatttgactggaatggcatgcttcctttaaagatgaaagttgacttttagagccaattaaagccctttggggaatctggcctcataccttgtccacacagagttcctgtacaaggttcctgacctgtgggaagcggcacagcaccagctaggcagagacgccccaggccatgttagagctttgagtgaggcctggtaacagggaggcgctgtcacctactggccttgccaatccagctccaagatgctgagcctgaagctccccaggctgtttagcatagaccagataccccaggtgttccatgagcaaggcatcctgttcggctaccgccatccacagagttctgccactgcctgcatcctcagccttttccaaatgaccaatgagactctcaacatttggactcacttgctgcccttctggttctttgcatggaggtttgtgactgcactgtatatgacagacatcaagaatgacagctactcctggcccatgcttgtgtacatgtgcaccagctgcgtgtacccacttgtgtccagctgtgcgcacaccttcagctctatgtccaagaatgcccggcacatttgctacttcctggactatggtgccgtcaacctcttcagcctgggctcagccattgcctactctgcatacacgttcccggatgcgctcatgtgcaccactttccatgactactacgtggccctggctgtactgaacaccatcctcagcacaggcctctcctgctactccaggtttcttgaagtccagaagcccagactctgtaaggtgattcgtgtcctcgcctttgcttatccgtacacctgggactccctccccatcttctacaggctattcctgttcccaggggagagtgcacaaaatgaagccacctcgtaccaccagaagcacatgatcatgaccctcctggcctctttcttgtactctgcacatctgccagaacgcctagcccctggacgctttgactacatcggtcacagtcaccagctgtttcacgtgtgtgtgatcctggccacgcacatgcagatggaagccatacttctggacaagactctgaggaaggaatggctcctggccacctccaagcccttctctttctctcagatagctggagccatacttctgtgcatcatcttcagcctcagcaacataatttatttctcagctgctctgtatcggattcccaagccagaattacataaaaaagaaacatgactcagaccataagcttttcatgccagatgtcaacattaagctgcaacatcctaaccaccataagccggaggtggttacagcttatcacggcctaaaatattcataatggttggtgtcttttgaatgaattcatgtcaaaaatgttattcagctggggaaatttctctaaatgtacactgattctgtgtgtgtgattttaaaaggagaacatggttcaagcaagtccttgttaaggcaaactattgatatttcattaattttaaatttacttaaaatgtggttttaaattctatttaaacatttggattaagcatattactctggagctttgtattattctttaaaaatgaatcttgcttcatttgatgaatttcatgtcacaaagcttctctcaagagctctcgtagtggcctgtcaaccactttcggagaatgagccaggtcagtcactgggaggacctgtgaaagaaagttggtcactgagtgccttggggactggcaaaacattccagaatgaagagagctgtctggggagagcccttcttcccttctccacctagtgaagggagaacagaaggggagtcctctcttcccacaagtccattctgccttcaaagtgtaagttctcatgtcattatggatttggagtttgtcagtttttttcttaaaagtccacagcggggtgtcatgtgttctgttatgttctgttttctggttgccagtttgatctgcaaagtatttttcagtgcaggtaaaatgtgttaaaccataagagttgactgagttaatcccaattggttgtgctcatatgccaccttttaaaccaatggaaattgctatatttggggatgtcatacatttgatattgcttcagcatttcaaatatgttgcaaaatttagtatccatatgcataagaagttaatcaccttgccagtggggtggtcacatatagtgttctcaagctttactgtgaatcagaaacatccagtaagcttgtgacaaatgcagactcctagggaaaaccagggggttctgcttcactaggttaaatgtaggttttgtagaggagatctgcactggagcaagtctcccagatgattctaatacaggagggccagaggccaaacttgaagaactgctggtgttacatgttccaaaaggcattagacctatcagctttgtttcgcctgatctcaagttttagcaactcaccaactaaggcgtaacctcattttatgttccagcgttttctactctgaatagttctaaaacactgagcattttctcatttgttgcattactgattaaagttcagtatttcatggtgttttcagggatcacagaaatgcggatgcaaaacaacttttgacagaggcccatcaaacccagatctgcacttggtaatgacttaggggggcttcctcacaatgcaggatcctctttgctgactcaggaatactccatattttagactactgcctctaccattaactagcccagacatttgaatggccttgtaaacagctcactgtctaatactcgaaggacaagtaacaatttatattggatgagagtggtcaagaaatatgatttcattagttttattatctgtttacttcctctggggaaggcagactgataaaattatatgggctggtaaatttttggtacattaattgcaagctgcatgacaaaatttgtttttctggcaacaatctgacattattagtggaattccacaccaacagggcttgtgagcttccatttcatcttactgtaacttcaattttatggcaaaaaaaggtacaaagtttaaatacccctttctagtaatgccaaagacatacagtgttttacattctctcctttataggtaacaaaataatgtttagctcagtaagtactgaaataatgagtgaccaatttgaaggatttttagattatttaatctttgcttatgttgctttttcacatgcttaatgatggaaatgaaatgttaaatcaacaaaataagatccagtgtttcataacatttttataagtttggtaaactttagtcccattatatacttttggggacagtgttataaatcagaattttacgacagtttgcagaacactgatttgaaagcttcctatgcaaaatgagaaggggttcaaatatattaattatcattaagtattaaataataggcattagatgtctaatgtgagtataatttcatccaagccatctcagaaagtctaaaaggttggcagggggtcagctgaagacctcactggagtgggtcttaatttttaaaaagtgtctcactacacttaagacatgtgacacattcccattggtaacaattgctcaccatggcattgtctcaaaaaagactatggtggggagggtggcacattcctaatgggatgtacctctccccaatccccttgcttgagaagcactactcaaaaatttaccagaccttacaactgtgataaaacttgaatgtgtatgatgaataaggccattcagttaactttacctccctttacccattgaaggggttccttttccattgctcagtttttagaaaataattctcatcttttttctaaagaaatgaatttgtggctggtctgaaggtagtgagttagctcaattgattgttcgcagtcagttatagatcaagctccttgttctactcttcccctcttctcactactgcacttgactagtcttaaaacaaagaaagaacgaatgaatgaatgaatctgtggctgggattacaggcatgagccacactgcacccagtcgatgctaccctttttatatgaaacacctattaacacggtacaacaacacttcaaaacatattatttgaatttcggcctctgattttctagtcaacaatccattaaggcaaagacctgtttccaaactcagatgttctccaacttacactaatgtctggttttcttgaactatgtgagagaaaaaaataaacagaatttatttattatcataaagtcatcctgtttgccacttaatttggttatgttttatctaccacactgcaaatatgttaattcaccatgagaaacagatccctgtacacatgtgtatcagtaaatcattcaatgaatagttagtgcttaggatgtatag

SEQ ID NO: 115405 - DNA, 4645 bp, Homo sapiens
gcgagtccggggtcgccgcagcccgggaggagtgtctggtctccggcctgcctgtgctgtccccgcgccctgtccactggactcccgagacccttggaacccaggacaccattggagaaactgggcattttaccaaggatttgactggaatggcatgcttcctttaaagatgaaagttgacttttagagccaattaaagccctttggggaatctggcctcataccttgtccacacagagttcctgtacaaggttcctgacctgtgggaagcggcacagcaccagctaggcagagacgccccaggccatgttagagctttgagtgaggcctggtaacagggaggcgctgtcacctactggccttgccaatccagctccaagatgctgagcctgaagctccccaggctgtttagcatagaccagataccccaggtgttccatgagcaaggcatcctgttcggctaccgccatccacagagttctgccactgcctgcatcctcagccttttccaaatgaccaatgagactctcaacatttggactcacttgctgcccttctgcttgttttctatgatcctggtggagggaactaaggccaatcaaatggagatagattccaggaggacagatttgagccaatgaaggagaactttccagcccttggagctgctttgggaggttctttgcatggaggtttgtgactgcactgtatatgacagacatcaagaatgacagctactcctggcccatgcttgtgtacatgtgcaccagctgcgtgtacccacttgtgtccagctgtgcgcacaccttcagctctatgtccaagaatgcccggcacatttgctacttcctggactatggtgccgtcaacctcttcagcctgggctcagccattgcctactctgcatacacgttcccggatgcgctcatgtgcaccactttccatgactactacgtggccctggctgtactgaacaccatcctcagcacaggcctctcctgctactccaggtttcttgaagtccagaagcccagactctgtaaggtgattcgtgtcctcgcctttgcttatccgtacacctgggactccctccccatcttctacaggctattcctgttcccaggggagagtgcacaaaatgaagccacctcgtaccaccagaagcacatgatcatgaccctcctggcctctttcttgtactctgcacatctgccagaacgcctagcccctggacgctttgactacatcggtcacagtcaccagctgtttcacgtgtgtgtgatcctggccacgcacatgcagatggaagccatacttctggacaagactctgaggaaggaatggctcctggccacctccaagcccttctctttctctcagatagctggagccatacttctgtgcatcatcttcagcctcagcaacataatttatttctcagctgctctgtatcggattcccaagccagaattacataaaaaagaaacatgactcagaccataagcttttcatgccagatgtcaacattaagctgcaacatcctaaccaccataagccggaggtggttacagcttatcacggcctaaaatattcataatggttggtgtcttttgaatgaattcatgtcaaaaatgttattcagctggggaaatttctctaaatgtacactgattctgtgtgtgtgattttaaaaggagaacatggttcaagcaagtccttgttaaggcaaactattgatatttcattaattttaaatttacttaaaatgtggttttaaattctatttaaacatttggattaagcatattactctggagctttgtattattctttaaaaatgaatcttgcttcatttgatgaatttcatgtcacaaagcttctctcaagagctctcgtagtggcctgtcaaccactttcggagaatgagccaggtcagtcactgggaggacctgtgaaagaaagttggtcactgagtgccttggggactggcaaaacattccagaatgaagagagctgtctggggagagcccttcttcccttctccacctagtgaagggagaacagaaggggagtcctctcttcccacaagtccattctgccttcaaagtgtaagttctcatgtcattatggatttggagtttgtcagtttttttcttaaaagtccacagcggggtgtcatgtgttctgttatgttctgttttctggttgccagtttgatctgcaaagtatttttcagtgcaggtaaaatgtgttaaaccataagagttgactgagttaatcccaattggttgtgctcatatgccaccttttaaaccaatggaaattgctatatttggggatgtcatacatttgatattgcttcagcatttcaaatatgttgcaaaatttagtatccatatgcataagaagttaatcaccttgccagtggggtggtcacatatagtgttctcaagctttactgtgaatcagaaacatccagtaagcttgtgacaaatgcagactcctagggaaaaccagggggttctgcttcactaggttaaatgtaggttttgtagaggagatctgcactggagcaagtctcccagatgattctaatacaggagggccagaggccaaacttgaagaactgctggtgttacatgttccaaaaggcattagacctatcagctttgtttcgcctgatctcaagttttagcaactcaccaactaaggcgtaacctcattttatgttccagcgttttctactctgaatagttctaaaacactgagcattttctcatttgttgcattactgattaaagttcagtatttcatggtgttttcagggatcacagaaatgcggatgcaaaacaacttttgacagaggcccatcaaacccagatctgcacttggtaatgacttaggggggcttcctcacaatgcaggatcctctttgctgactcaggaatactccatattttagactactgcctctaccattaactagcccagacatttgaatggccttgtaaacagctcactgtctaatactcgaaggacaagtaacaatttatattggatgagagtggtcaagaaatatgatttcattagttttattatctgtttacttcctctggggaaggcagactgataaaattatatgggctggtaaatttttggtacattaattgcaagctgcatgacaaaatttgtttttctggcaacaatctgacattattagtggaattccacaccaacagggcttgtgagcttccatttcatcttactgtaacttcaattttatggcaaaaaaaggtacaaagtttaaatacccctttctagtaatgccaaagacatacagtgttttacattctctcctttataggtaacaaaataatgtttagctcagtaagtactgaaataatgagtgaccaatttgaaggatttttagattatttaatctttgcttatgttgctttttcacatgcttaatgatggaaatgaaatgttaaatcaacaaaataagatccagtgtttcataacatttttataagtttggtaaactttagtcccattatatacttttggggacagtgttataaatcagaattttacgacagtttgcagaacactgatttgaaagcttcctatgcaaaatgagaaggggttcaaatatattaattatcattaagtattaaataataggcattagatgtctaatgtgagtataatttcatccaagccatctcagaaagtctaaaaggttggcagggggtcagctgaagacctcactggagtgggtcttaatttttaaaaagtgtctcactacacttaagacatgtgacacattcccattggtaacaattgctcaccatggcattgtctcaaaaaagactatggtggggagggtggcacattcctaatgggatgtacctctccccaatccccttgcttgagaagcactactcaaaaatttaccagaccttacaactgtgataaaacttgaatgtgtatgatgaataaggccattcagttaactttacctccctttacccattgaaggggttccttttccattgctcagtttttagaaaataattctcatcttttttctaaagaaatgaatttgtggctggtctgaaggtagtgagttagctcaattgattgttcgcagtcagttatagatcaagctccttgttctactcttcccctcttctcactactgcacttgactagtcttaaaacaaagaaagaacgaatgaatgaatgaatctgtggctgggattacaggcatgagccacactgcacccagtcgatgctaccctttttatatgaaacacctattaacacggtacaacaacacttcaaaacatattatttgaatttcggcctctgattttctagtcaacaatccattaaggcaaagacctgtttccaaactcagatgttctccaacttacactaatgtctggttttcttgaactatgtgagagaaaaaaataaacagaatttatttattatcataaagtcatcctgtttgccacttaatttggttatgttttatctaccacactgcaaatatgttaattcaccatgagaaacagatccctgtacacatgtgtatcagtaaatcattcaatgaatagttagtgcttaggatgtatag

SEQ ID NO: 115406 - DNA, 2272 bp, Homo sapiens
cgagtaagctttctagcagcctatgtcttgttgagcagcagtggggcaccagcttaagggtaaagtgacaacagtgggttcactagctgctatctccgtagtgagaatgctctggcttcatgtacgtaggtagcattcgtgattctgcgacgcaatatacatacaacgcactcgagtgcgtaaatacgaggcgttgctcgagacgagacactccagtattggaagatatctgggcatggtccgatataacctggtatcatatcagagcagtgagtccatagtcgaagcttcgattatcgaacattatcgccaccgttccttgcaactcaccaactaaggcgtaacctcattttatgttccagcgttttctactctgaatagttctaaaacactgagcattttctcatttgttgcattactgattaaagttcagtatttcatggtgttttcagggatcacagaaatgcggatgcaaaacaacttttgacagaggcccatcaaacccagatctgcacttggtaatgacttaggggggcttcctcacaatgcaggatcctctttgctgactcaggaatactccatattttagactactgcctctaccattaactagcccagacatttgaatggccttgtaaacagctcactgtctaatactcgaaggacaagtaacaatttatattggatgagagtggtcaagaaatatgatttcattagttttattatctgtttacttcctctggggaaggcagactgataaaattatatgggctggtaaatttttggtacattaattgcaagctgcatgacaaaatttgtttttctggcaacaatctgacattattagtggaattccacaccaacagggcttgtgagcttccatttcatcttactgtaacttcaattttatggcaaaaaaaggtacaaagtttaaatacccctttctagtaatgccaaagacatacagtgttttacattctctcctttataggtaacaaaataatgtttagctcagtaagtactgaaataatgagtgaccaatttgaaggatttttagattatttaatctttgcttatgttgctttttcacatgcttaatgatggaaatgaaatgttaaatcaacaaaataagatccagtgtttcataacatttttataagtttggtaaactttagtcccattatatacttttggggacagtgttataaatcagaattttacgacagtttgcagaacactgatttgaaagcttcctatgcaaaatgagaaggggttcaaatatattaattatcattaagtattaaataataggcattagatgtctaatgtgagtataatttcatccaagccatctcagaaagtctaaaaggttggcagggggtcagctgaagacctcactggagtgggtcttaatttttaaaaagtgtctcactacacttaagacatgtgacacattcccattggtaacaattgctcaccatggcattgtctcaaaaaagactatggtggggagggtggcacattcctaatgggatgtacctctccccaatccccttgcttgagaagcactactcaaaaatttaccagaccttacaactgtgataaaacttgaatgtgtatgatgaataaggccattcagttaactttacctccctttacccattgaaggggttccttttccattgctcagtttttagaaaataattctcatcttttttctaaagaaatgaatttgtggctggtctgaaggtagtgagttagctcaattgattgttcgcagtcagttatagatcaagctccttgttctactcttcccctcttctcactactgcacttgactagtcttaaaacaaagaaagaacgaatgaatgaatgaatctgtggctgggattacaggcatgagccacactgcacccagtcgatgctaccctttttatatgaaacacctattaacacggtacaacaacacttcaaaacatattatttgaatttcggcctctgattttctagtcaacaatccattaaggcaaagacctgtttccaaactcagatgttctccaacttacactaatgtctggttttcttgaactatgtgagagaaaaaaataaacagaatttatttattatcataaagtcatcctgtttgccacttaatttggttatgttttatctaccacactgcaaatatgttaattcaccatgagaaacagatccctgtacacatgtgtatcagtaaatcattcaatgaatagttagtgcttaggatgtatag

SEQ ID NO: 115407 - DNA, 776 bp, Homo sapiens
cacgcctggcccacaggattctttatatattctctatataagattttttcaataatgtgtcacaaatatcttcttttagcttggagtttatgtttttactctatggtaacttttaatgaccggacatctttctttttaatgtagctgaatttatcaatattttctttatagattcatgttgtgtcttgcttaagaaatactttctaccttaggtcataaggatgctttcttatattatcttttaaagactttatgtttttgcctttcatattgattgtcaatcaaccagtaactatttgtttctttttgatatatgcatggtgtgatgtaggaatcagataacagtttttgacaagggtaattaaaatgcctagtagctttggaatacctcatctttttcccagtgatctgaagtttcctatgtattatatgtcattacaaaccatttttgcatgcatttgtttctgggctttctattccattcatgggtctatttatctgtgcatatatatagactacagttcttagttatatagctttatagtaaatcttaaaatccatttgcttaacattcctctccaacttggtggctatttgggggcttttgttcttacaaataaattataaaatcaactttaatttcaaaaataataataacaatggcacatcctgttgggattcaatttgaattctctacagattaattttgggagaatatacatattcatgatagggtctactcaacaacaggggatatctgtctatttgcttaggaa

SEQ ID NO: 115408 - DNA, 253 bp, Homo sapiens
tgaatggaaaataatttctaatttgttgtaaaatttaccaatttggtattgctgctgtaaacaggattttatctagggtttagatgccttatcttcaaattccactatcaagctagtacataaaattgtttgaaaactgaatcagatgtttatgtaattcataaaaacatataatttccctctaatatttcatttttcctaattataaaaataatgcatgcttattatagaaatgtagacataaaaaactatg

SEQ ID NO: 115409 - DNA, 269 bp, Homo sapiens
gggcagtaagacagtgtgagagaaacagacatgggcatctcatcatcttagatctccttccttgattgtcctgtgcacaaaagtatccaggagtagaaggctggactctcagcattgaatggttttgaatagatggattcagccagcccatgagtcaactacagtccctgaaagggaatgacatcactcagaaatccttgctcatcatgcccatcaggcaagtgggtattagacctgctgttccagcaccaacaccttaaaggatattc

SEQ ID NO: 115410 - DNA, 224 bp, Homo sapiens
agccggcccggcatctggacttctggatgtggctctcagtttcctggtaccaacccataagtcaccactccgatcgtctttcttacatttattgtagagtaatcagaacagaatccagaaaagagatagaagagaatgggaaagaaaaacaatggtttggtaaatctgacactggaaggaaatggagatagcctagatatagataaggagaaggtccaggtatg

SEQ ID NO: 115411 - DNA, 287 bp, Homo sapiens
aaaacctagagcaaaaatcatgccggggaaaggaaaatcattaaaaaacaatgactaaaaacagaataattttcttacccaaattccagttctcatccttgttttgggttccctgttaaagcagataccagttatagccttcctgggttaggggagacagacagtctttcatcatgcccctggattttgagcaaaggagaaagcttgctccagaaatagaaaagaaaaggcaaaaagaaaccatctttcgagtttctgctcactaacagaggaagcaaccccaccct

SEQ ID NO: 115412 - DNA, 404 bp, Homo sapiens
cgttgcagagcatggcactctgatgcgtgcgcaggagagagaaacacatgttgtggaaatccagtctcaagtcacataagtcaggcaattatccaaatgattgtggaggatatgcatccttacaactatttctcaaccccagcctttcagaggttcatgcagattgtggcccctgattataggttgccatcagagacttactttttcactaaggctgtacctcagttatatgattgtgtcagagaaaaaattttcttaactttagagaatgttcaaagccaaaagatacacctgactgttgacatatggacccatgacccatccactgactattttattgtgactgtacactgggtttctttggaaactgcgtcttttctcaataatggcaggatccccgattt

SEQ ID NO: 115413 - DNA, 399 bp, Homo sapiens
gttaaacaaactctggtacatccacagcatggaattctactcaacaataaaaatgagcaaactattgatacacacaacagctaggatggatcacaagggcattatattgagtgaaaactccaatcttgaaaggtcacatctggtatgattccatttatatagtagtctctcagtgataaaattatcgagttggatccgaggttagtgattgcccagagtcaggagtaatgagggtttgggtacgtgattgtaaaaggaaagtgtgggagagatctttgtggtgatagaatattttttatcttaattatagtggtgattacacaaatctacacatttgctaatatgacacagaactacacacccacattataccaacgtcaaagtcgtgttttggtgtta

SEQ ID NO: 115414 - DNA, 801 bp, Homo sapiens
ctgaaaattcagtaaaaactgtcaagctaataaatgaatttggtaaaatcgtagattcaatattaaaattcaatttctgaaaagttacaatgagccacctgaaaaagaaattaagaaaacaatttcagttacagtagcatcgacgataacaaaatattaggaataatttgaaggagacaaaacatctgtacacctaaaattatgagattttgatgaaagaaattgaagaaggcacaaatgcaaaggtatctcatgctcatggattgaaagaattaatcttgttaaaatgtccatactatccaaagtaatctataaattcattgcaatccttatcagaattccaatggcatttttcagaataatagaaaaaaatctaaaatttatatggagccacaaaagtccaataatagccaaagcaatcctcagaaagaagaaaaatctggagacatcacatgtactaattccaaactatattacaaagctatggtaatcaaaacatgatggtactggcataaaaacaaactcatggacagatggtatagaatagtgagcctgtaagtaaacccacacatatatagtcaaaaaagctttgacaagagcaccaagaatacacgttaggaaagatgagtttcttcaataactaatcttgggaaaactggataaccacatgcaaaagagtgaaactggacccttgtcttacaacatatacaaatattaacacaaaatggattaaatacttaaatgaaagatctgaaactctaaaagtcctagaagaaaacatagggtaaactcttcttgata

SEQ ID NO: 115415 - DNA, 660 bp, Homo sapiens
acataagaacaataacatctcttttgcaggatcatgcaatgccctccggccaaaggctaccaggaacacacctttcggttgaacaaagttggctttttgagtcactgcactggaggggaatgcgcacccctggatgtctcggggaggggatgttagtaggactgatcatgggatttgggctcgcattaagtgattttgcaggctgtttctctaggctggatgctgtcaggaagcaagggtaattctgtgattgggtatgtcaatgattctcttctagacggcaggaggaactgagcaaagctacaactgcaattagttaagaaacatttgagccaggaaggggaacatttgggcagttttgtcatttggacgatgttcacgttttcgtctgcgttcaggcaggactacagaatggtctcgtctttgttttgatccttcatggttaccgagcggtcttgtctgatgtttctgggctgtagaactgttcatgtccaacagaacaccatggcctggctgtgaatgccaggccagcccaggctgtcagagggctttcccctttctcagttgttatgaggataacgtgcccacacttggcaaaccataggcaatatttcagctatgctggagcagtgatgatctggaggttgatacattatgtgg

SEQ ID NO: 115416 - DNA, 216 bp, Homo sapiens
aagacccagttaacaaatccgggggcaaggccaaaaagaagaagtggtccaaaggcaaagttcgggacaagctcaataacttagtcttgtttgacaaagctacctatgacaaactctgtaaggaagttcccaattataaacttataaccccagctgtggtctctgagagactgaagattcgaggctccctggccagggcagcccttcaggagctcc

SEQ ID NO: 115417 - DNA, 454 bp, Homo sapiens
cacaagcctgtgatcccagctactcgggaggctgaggcaggagaatcacttgaacccgggaggcggaggttgcagtgagttgagaatgcaccagtgaactccagcctgggtgacagagtgagactccatctcaaaaaaagaacggttggaattccaaaacatctcatacatgcagagtcttgagtctagtcacccgcttccaagccttaggtgcagtcacagtcttcccaccccctgctctgcacactcatcacacaaacacttccaatctactccatatgcaagcaggcacacctgcaagcatgaacacatacaggtgcacacacacccaggcacacacacctgggtctttcttttagacccagaaagcactgcaacaacgttgcatctttgttcctctgcgttttctggctggcatgcccttcccacacactcaccttcaagaccccactga

SEQ ID NO: 115418 - DNA, 410 bp, Homo sapiens
aattagcaggaaatacattgaactgagagccatgctgacattactcttgggcactgtggtggctcatgcctgtaatcccaaaactttagttttgtgcactgtgagtatgcacaaaagtaaagttatttcagacccgtggtaaactctacaggttcaacggcctatctctcagtagataaaatgtaaggaaaagaaaggcctggagggggacctgcagattgaaaaagacaacatacatatcaagttcttaagaacaggcaaaattttatgttgcctagagattatgataaaaagatggcagttactcttggagtggaggagagaggggttactaaggaagctggcaaagttctattttctgacctggatgtttattgtagaaggatttatcttataattcaccatcctat

SEQ ID NO: 115419 - DNA, 180 bp, Homo sapiens
ttcttttaaaattagggctggggaagatacaaagtcagagaagcagctgtgtagcatggtggctaaggtacaagctttgcagtcagccagacctggattcaagtctgggctctgtcatttactaactgtgtgactttttgtaaattatgaagctagctcatctgtaaaatgtggataatg

SEQ ID NO: 115420 - DNA, 631 bp, Homo sapiens
gagatcgcgccaccgcactccagccctgggcactgcactccagcctgggcgacagggcgagaccccctcctaaaaaacaaacaaacaaaatgtgaggggaactttattagatttaaagagatagaacagtcatatacaatgcatgaacctttattataatccagttggggtgggggaactataaaaggtatttgagttactgttaattttctaattgctgttggtgttataaaggagaatggctttattcttaggagatatatactgaaggatacagaaatgaactttgatgtgtaccggttactaagtggttcagttcaaaatacacacacacacaaatgtggcaaaatgttaacacttgttgaattgtttttaaattttatacttttaattttttttgtatttgaaatttttcataatacatagatgatataaaaatgagattggggatgagaaggaactaatatatgagtctatctaggaagaaagaatcattgagataggaggaaatccaatggaatgtggtatcttgggaatccagaggagaaaaaaatgttttgaggaggaaggagtgattatctgtgtcattattttttgatagattgagtaagaagctatatggactcctctg

SEQ ID NO: 115421 - DNA, 451 bp, Homo sapiens
ggaaactgacttactttctggctttgatattttaaatagtgcccttttaaaaaatattattgatagtttaccaagaatgaatgattttcctttgaatatgataataaaggtttcccgatttctaagtgtaattttaaagaattatgcctgtgactaagacatggtttctgtgaacacaagtttctaaatatgcacatagctgcagaatatttccagaagctgaccttttgagctcatgtacttacaaggactcacactatttccagtctcttcccagagggagggacctttgcttttcctcctaccaacatgcctaggatagtaggagtcaccattgaagagctattgagagctattttctccttgttccttttacttgtgcgttaggaggaagaatgagagccaccaaaaattcatttctgtatatccctaatgtgtattctgagccact

SEQ ID NO: 115422 - DNA, 246 bp, Homo sapiens
tagcgggggcgacaagagtgagactccatctcaaaaaaaacaaaaagtggccttgccaaaaaaactaaatccatcaatcaaacctgagtttggtcaaatgtctatgtccaagtactaatttgtaagaaatacagaacacagaataatatgtcaaagtacaccctggagatgtaatcagcaaaatctaaactgagcaattccctaagataagtgtcaataaataaattgcaaggaaaagtaggggag

SEQ ID NO: 115423 - DNA, 678 bp, Homo sapiens
cagcaggttttggggaggtccttggctaagtaatttgcatcatctccttttggggtcaagactgttaagagctcacttgacagataaagtcactgaggcaacagaggtgaattagattgcacagagtgaccaagctggtcagtggcagggccaggattctgacccaaggcctgagggcagttgcaggtgggctggagtgaagagggcttctctgtattcacagggagcatctcccttcagcctcccgcgtcttcccactgtttgatctcttgatcacactgtgtgcaggtcttcggtttaatccccagggctcatgagcactttgacactgaagaccccaaggcaaagggcctgtccctgtgtgggtgtgtgtccctgcatgcatgtgtacagactgtggtcttccaggagagcttcctgggtgactctgaaggggcagcccccaggaccctcaggttcccctcttgctctactcgggagggtcccccagaagagggggaccaggctggctggtcctgggtctttgttccttctccaggcgggggatgctcaggcatgctggcctgtttcccgggaggctcaggaatggccctgggagatatcaagctgctcgttgccagagctggggtctgattcttaacctggaaattgggcatttccaggacctgtctgcgttgc

SEQ ID NO: 115424 - DNA, 749 bp, Homo sapiens
cggctatgtgcgtttaaagatccgtatcagcaagacctgggataggtgagagtagaatctctcatgaaaatgggacaatattatgctcgaaaggtagcacctgctatggccttgggagaaatcaaaaggggacataaatcttgtaaaacaaggatgttggtctcacattggagatccccaagagtgtcactatgaagaatgtgtagtaactaccactcctccctcaattcagaatggaacataccgtttctgctgttgtagcacagatttatgtaatgtcaactttactgagaattttccacctcctgacacaacaccactcaagacggggtttcacgtgcttagccaggatggtctcgatccctgacctcatgatccgcccgcctcggctcccaaagtgctgggattacaggcgtaacgcgcgcctgctggaaaggtcacttattattcctatagttttgtattgtttgaatctttaatttaaaatgagaatatattcatgtattatttgtgtaccaataacctgcttgtttatttggaaaaagagaaaaatgacataagtagcaaggaaaaaaataatctccaatagtctctacacccatatacaaccattgttaatatttagaatgtttctttccagtcttttctcttttatttttgcgtagctgtatttgtaatatacatccattttagatcctgcctttttgtttaacataaatattttccaggttactatatatgtttcatag

SEQ ID NO: 115425 - DNA, 212 bp, Homo sapiens
tttaattggtttccctccccaccgacaccattcccatggaaaaacagtttgactccatttgcatattcatttcactattactgacaaataaatgttggtttgatccccatttcaactgtttataatgttttcctagctccctcactgaatgaggtaaataaaatctttagtgcatgttcatttgtacatctgcaggaggtatagcctgcccg

SEQ ID NO: 115426 - DNA, 378 bp, Homo sapiens
cttttatagcatagttaattacatgtttgcagagtactaaaaattgcttgaggtgagaaaagactggtgaggacatttgagccaaactgtagtttgcctggtcataagatattgatgttactattcagtctttcaatctttcaacctcattatgtttcaaaaaactgacctctcagacatgaagctgcatgcactgttattttctacatctgtgtctgttttcagaacatatgaggcccaatgaacatggtgtctgtacagagataagatcgacgtgtctccccactccagagggcacagggagctgatcttaaccctgaatgagcctttcaatataagtagagtctgtgaaacccatgaacttccaataaatataca

SEQ ID NO: 115427 - DNA, 103 bp, Homo sapiens
tgtcaggtaccatgcttggcagcagggattcaaagatgaataagaaacagttctgctgggcacggtggctcacgcctgtaatcccagcactttgggaggccga

SEQ ID NO: 115428 - DNA, 511 bp, Homo sapiens
ggaaaaggcaaacaataatggtggaaaacagctcagcggttgccaggggttgtcaggaggtgtagaggctgattgcaaaggagatcacgggggaatttttagtgtgatggaactgttttgcatggtgttggggtggtgggtatatgactgtgcattgttcactctcacagaactgtataccacaaagaataaactgtaatgtatgaaattttaaaatatcaacccgaatgtgggcaatataaggatggaaagcagattgtgacaaatgaatctagctatattagaaatatatgacataactttactgaaggacatagggtaaaacaatgacctaagtaatgttaaaaatggtgctttgagtagaaactaaggctaaagatgaaaagatgtgacatgaatactgtactctagttgtaaatttgtttcacacggggatatgcgttactaattcagaattacattatactatggatgaatgcatgaatgagggaataaataaataaatgtttta

SEQ ID NO: 115429 - DNA, 295 bp, Homo sapiens
aacctctgctttaaataaaggagagcaccatcccccaactcacagacatacatacaattgataattggttgtctttaccccttctcctcccaaattaagatacataaaaaaaaatccataggactttaggggcaattagctgtctaccttgaattaacatcatttagcccttttgggttattttaaagccaaacattaaaccggatatttatattactttatatgaataaggtaggcaacttaaaagcacaaatagttgttcctataactatctcttacgtatgccaaattatgt

SEQ ID NO: 115430 - DNA, 361 bp, Homo sapiens
aacttaaaaagttgaaaattacaaagtaactgaaggaattaataaatataaaaggaaaaaaattttttttaatcttaatagctaaattgaaattttttttaaatcaacaaaacagtaagctacttatagcagtttttaaaaaaagctaatcaaggcccagcacagtagctcacgcctgtaatcccagcactctgggagaccaacgcgggtggatcacttgaggtcaggagttcaagagcagcctggccaacatggagaaaccccgtctctactaaaaatacaaaaattagccaggcatggtggtgcatgcctgtaatcccagctactcaggaggctgaggcaggagaatcgcttgaacctg

SEQ ID NO: 115431 - DNA, 1668 bp, Homo sapiens
acctctctcctgacctgcaggttcatatgtctcactctctttttgacatctttacccagatgtcccataggtaactcaaattgatcccttttcttggtcatgattttccctaagaaatatgccctttgtttgctgattctccctaacctggttagtatcatcaccatctacctaccaggtttcctaaggctgaaacattatcatcctccattcctccttttccctcacccttatacccaggcattcacccagtcctagtgattcactctcatgaagatctcagcccagtttcacctctctattcctactgccttagttaatcttccttcagacctagactattactaggtcctctccttgccacaaaacacacccctacctaatctatcctttaccaccagaattatcacgctaaaaattacattcttgcttaatatctgtattcccagttgcctacgggataaaagcccaaactccttagcagagaatataaggccctagctcccacattatttcagcagtcatcacccactatgttcctcaagactgcagccattaactttttagagttccctaaacatgctgtttactttcatgcctctatcccgttgtctgtggaatgacttccctccttgcccttttcagtgctacaaacccctattctttaagacatagtacaaatggcatctcctggttggcatctttcctgcaggcctacaggcctagtaagtatcttcctcctctgtgctcctgcatacctccattcctttgttatgacatctataactttaataagtactaaaatctgtagtcctacaaaactcaggcatagaactcatttcctttatggctctataatggaactttacccaactctcacgttccccatgaccacagatgtggagaaatttgaatcttgacagttcaaggtgaactcagtcattttcagagttttcatagtcccttcaagattgaaactcagttcctgcaatgtttgccccttttctcctcttttgtctatgctgggagaggcattgtggggagggttgtctggcttatggctcccattgtcctctgcttgataaaccacctgagctttggtcattagcagtctcctgtgcctttcacactcaggtagtgtctgcacaggccactctatgtcttttccatgctgaagaaattcctttccaggccatgtctgtgttcctcctgccacacaggaaatttttgagcatgttcatcctccaagctgaatgcagggtcttgggtagtggtcctcacctgctccagagacttctccagccattgccactctccactcaggtgatgaagctggatgagggactgcacccaccagagtcaggccagggtcctgtctgctctgtgagtccctccaattgttcttattccgagatttccattgttctgccccctcttgactcccagggctctcaagggagtgggggtagtgaagggagccctttcccaagctcccccaagagctctagtcacatcacttctgatacttcttttcccaccagctggaagaaagaactttcatttgtcttgaaatgagaaaaatgttcttagaatattttgtattactctctgctctgtcatttatggtaaacaaaataaaataataaaaaaaaacaacccatgctctga

SEQ ID NO: 115432 - DNA, 174 bp, Homo sapiens
tgcctcgaatttgagttagtaactagttactaaattgttagtaactggttcactaactgttcctagaccatgtagtaacacataaatatttattgatttgattcggttaagaagcaggattaaatatctgctaagtctttctttttttttttttgagacggagtcttgctctgt

SEQ ID NO: 115433 - DNA, 428 bp, Homo sapiens
atggaatttgggactgcttttcccttgagcttcccagcacacaactactaagaaaagagaaagccagaaagggaaattgaaatgcagtctcagattgctttccatcctctaccattctcagctcccagaaacagaagggatgggcttagttctcctttaactttatactaagcccttgtatatacagcagcaagcctcatgacctagagagttcataggtggatggcatcctctctttataatgagaattctgattgagtcctctagcttagttttgaaatgttaagtaggtactgaaagaatgcacccaggcgcacctctggatgcggaaggcatagacaatggggttcatggccgagttgccgtgcgtgaggaagatggcaatgtaggtaaggatgctgggcttgtggcaggacgggcagaagagg

SEQ ID NO: 115434 - DNA, 352 bp, Homo sapiens
ggtagaaagtagggctaaggtatcatcagctactagtaattctagcgaaagattataattcctagcctaagttaataaaattagctctcaggccgggtgcggtggctcgcgcctataatcccagcactttgggaggccaaggcaggtggatcacctgaggtcagaagttccagaccagcctggccaacatggtgaaaccccatctctactaaaaatacaaaaaattagctgggcacggtggtgggcgcctgtagtcctagctactcaggaggctcaggcaggagaatcacttgaacccaggaggtggaggttgcagtgagtggagattgcgctattgcactccaggctgggc

SEQ ID NO: 115435 - DNA, 2097 bp, Homo sapiens
  misc_feature (1289)..(1289): n is a, c, g, or t
ctgttggttgattgaaaattctctttcattgtcaactgaacgctggactgccagacagtcccaaatggcctccctgaaatgcctgactgttggtgccacttgccatctgggagatcagctggagcttttgagcaggacttcatttgtccttcctcttggcttctcctcatcactacttggccttcctcacagactgatggctaccatccaacaaaggacgttccaatgggtgctgaaaagctgtgtaactcttaagacccagacctcaaagttacacagtgttacatttttccaataaaacaattaaataaaaaaattaattttatggatacataatagttgtgccttttatgcgatacatgtgataaattctatttagatattttacccatttttaatcagatctatttgctattgagttgtttgagttccttatatattttgattatgaatcttttgtcaggtgaagagtttgcaaatattttctcccattttatagattgtttcctcactttgttaattgtcactcttacaagattcaatttgttgagtttgtgagatgagattatagtcaaataggtaaatctacctcctgttaactactcaataatataatttatttattcaaaaaatgttaattgctgtgttgaagatatagatgtttccagagaagcagacattttctatgaaagggatttaatacaagaaaatactatacattaaagattagttttttatctattcaaacattcactaattagtttttgccttgtttcacaagaggttaatgtatttattgtggtttatgataaagcactctaaaacaataccataaaatgaagcaagccatcattctagaaagaaggaagagttatgtagagaaatgaaaacactgtattagtgtctcaagcctcaaactgtaccaatgctgtgagaaattcaggaacaaaaagtaatttagtatgaagttatcaacatgatatttctcagaattgtgtggtatgtagcacatgtattttaaagaatgttatgatattctgtgatcatgccaagtacatgagtgggtcattttcttttctcatgagtactttaccttcaatgttgctgaaaacaagctatattctgaaacctaacctactgatcaaactatacatttgcacattagaaaagggcttgcttcgattacatttttaaaaatgtaagcacagttttgtatgcctttgcctagatatttttccattgtcttgagatttgctgaaataagggaatatggcagtaggaagaaaagnacttttgatttgagttctaattttttatcatctttaatatatacagctactgtatatatttaatagtttcctctgtaaataggtagttaaatctgtctctttaccgacttaccattttgtagtccataaataatctcagcattttatacaactgaaaacctatttggtatgagaatgaaataagtaatgttaaagcagaattacatagtttacaataactaatttgttatcatgcttacccaattaccaaaaccttgttgcatgcttgtcgtgtgcgttgtcaaaaattaaaataaagtcttatttctcttaaaatatgaattttgtgaatgtgcctatgactgatggccacacatccttcgtaggacagctgctcatcaattagaccctttcctatcttagggcctttacactttctgaaacttctactgaaaagcctttctgcagacactttcagaactcagcttcttcattccttactcagttcttttctgaaatgttttcttctttgtgaccgttcctttagtccttcaatgtttcttatcctcttccttcgttttttttcctgcacaatatttatcaccatcagacagatcttgtattaatttatcagtctgctgcctgtctccctgtcccataggatgtaatctctgttaccacaggaaataatttttgtttaatattgttcacagccagccttggtggcttatgcctataatcccagcaatttgggaagctgaggtgggaggattgcttgatcccaggagtttgagaccagcctgggcaacatggtgagaccaccatctct

SEQ ID NO: 115436 - DNA, 403 bp, Homo sapiens
aactaagctctgaatgttagggtgtctagcaacttgcaaatatgtttctaagcctaaatgaccaagcctacagaaacacaaacaaaagtaatttaaataagaacatgtccataagaatggaaatgaataaaaccataaaatcagaaggagagaagtatagaagcacctgaagaagggtttggcagttccctggaaatgccacataccctttatgcttttctatgcattactctgcctgtaacatgttttctccagcttctccatccaccacgctaattcaattcttgaagaatttcaagagcctaccactaactctcccagggcagtttattaatcctcttctgtctcacagtatctgtgtgtacaatcccagttgtggcaagaggggcaggggtatcccgcc

SEQ ID NO: 115437 - DNA, 207 bp, Homo sapiens
ccatgcttggggctgtccctttctaggcagtgatctgttcactctccttttaacctccagttgtttggtgtctgattgtccccactgatactctgttgttactggctaacaaatttttgagccttttatcctggtattattttaaaactgttcagttattctcccatgaaaagtgtttctatgataaaacattttatgccaaccgta

SEQ ID NO: 115438 - DNA, 369 bp, Homo sapiens
tgtgggtgcctgtaatcccagctactcaggaagctgaggcaggagaatcgcttgaacctgggaggcagaggttgcagtgatcagagatcatgccattgcactccagcctaggcgacaagaatgagactccattgcaacaaacaaatgaataaacaaactgtggctaatctggcactcaaacaatgcaaagtccttcctgctcttccttcccctttctccagcaccaccactgttccacaggggattccacccgtcctctgctgatgttcacttaaagcccaggggttcttccatcagcttgtggtgaatgctgccaggcctgggactcactcttcagggcagtgggctcccctctggcccagggaaggt

SEQ ID NO: 115439 - DNA, 631 bp, Homo sapiens
agaattatgacatcatctactatttctttctcttgtctcataaatctaaaccatcaacctgcttatttttgtatactgtcacactgtgtattccctgcattgaatgcctttctattgacattgtctgtaaaaattgtgggaagttttctgcaccctaaattttctgttatggggattagatatccagtatccatgtttttccaagtcttacatcagaaagggtaaatacagccctcacagcagcctgttgtttgtcctgcagttgtgtttccatcacattacacaaagcctctttgtcttcgtggttgtaccctgctaataagttttttttaaattatgtaatatgtgtatatacaaatacctatatgtatgtgtgtacacatacagctgatatctactgagattatgtatgcatgaactatagaattaacttgtaattttaagaaaataaattattttgtaaagataaatctcatgtttaagaaggggaattacaattgaatcatttagggatgcctcagcctaagcataatatggaaaaagccataaccaaaagtcattttagagtactgctaggttactcaacctatcatcacatttaattaaaatgtcagtttgaaccatggccagt

SEQ ID NO: 115440 - DNA, 364 bp, Homo sapiens
gcaattctcatgcctcagtctcctgagtaactgggattacaggttcatgccaccacacccagctgatttttgtatttttagtagagacggtttcgtcatgtcagccaggctggtctcgaactcctggcctcaggtgatctgtccgcctcagcctcccagagtggtgggatttcagacatgagccaccgcgcctggccaacgcccggctaattattttatttttagtagattcagagtctccctttgttgtccaggctggtcttgagctccttagctcaagcgttccctcattctctgtccccagaacactgggattacaggcatgaaccattgcatcctgcccgaattttattgttaattgtag

SEQ ID NO: 115441 - DNA, 327 bp, Homo sapiens
gtcagagaaaagagcagggaggaattagttctatcagggcaatcaggaaagggcataacataaaagtgcataatggagctagagtttgaaggaagaatgaattggagttttctagaaaaagtcatacaaggtagtgaggcagcatgtgctaaagggttaaggtacaaaagtgcacaatgaattcccataaaatagggatactatttattcatttgcaaatgtcaaccctgcatatttaatttccccttataaatcctgtctgtatttagcctcttgcctctaaggcagagctgtgaagattactgaccagggactgaagataatggg

SEQ ID NO: 115442 - DNA, 894 bp, Homo sapiens
cagcaagtagatgtgaccctactcttagttatctcaggatggagtgctgcccaagaagtgatctatttcaaaatcctgattggaggaggaagcaaagcttttttgtccttgttattactcttgtcactagctttttattgcccccatctttctccctctctgagccaaaactttcctctttcttttttgctcttctgctcctactgactcagttccagaaatttgcaggcttccctgtttcatattctatttgccctgatgcaaacctccaagtctaactcaagctcaagccttaatgataaattgtggggactagaggcaaaggattggggaaattcaaggagctgtgtcttccaggtaagatggttaatgtgctaaagtgggagaatgaaaagaatttggaatatattctcttgaggctgcagaaaattctattttacttgtctaaagtggattattaccttatcttctctttttgcattctttcaggaaaaagtcttaatctcttcttcctccctgcaaagatgtttcaagtggtctagggtaaggtcatatactcagaaagacaaaagagaaaataaactagtagttttcaaaatatcaccccattacaatggatcctttctcttgctaataagctttgtcaaagtttttcattggctttcttgttctttaaataaccagctcttggatttatttctcaatttatatatattttcatgttctatttcctttgtggtacttttatcttttaaaatattctattttttcaacttaatatcttgaaatgaatacttgatttatttatgttatttttcctcttttttgtaacaaaaatatttaatactatgaattttccattgaatgcagctttggactcatttcttcagtttc

SEQ ID NO: 115443 - DNA, 438 bp, Homo sapiens
gatattttattgcccttgaagcatgtgatctctgtgacccataccctatttgtatactcctccccttttgaaatccataacaaaaacttgctggttttgcggctcagggggcatcacggaacctgccaacatgtgatgtctcccccggacatccagctttaaaatttatctcttttgtactctttccctttatttcttagactggctgacacttagggaaaatagaaaagaacctacattgaaatattgggggctggttcccccaataaaaacataaatcataatgtctgtttttaactaaatattttgtttctgataacttgtataaagctacttgtcttcagaaagtcaatgggatgcgttatgtcaatttttccatttacatagctatccttgatttgatatatatacacaaatgcatgcacatgcacgcacatg

SEQ ID NO: 115444 - DNA, 495 bp, Homo sapiens
ccaaatacttgcctcattggagtatggttctgactttcagagacaggtagaaaaattctaaataccaggatgtctcacaaagtatagtttgtttttattttaggttcattttatttagaggcaagtggacctatgcagtttaaaaataatctttcaaattaatgaaatttatgtgtgaaaacttttagatctacacactcataataggctagatgagtctctcttccaaatacagtgtgtcacttgggagttaattcattaaacctaatctattcatgtactggctagtttagtaatcctttgctccctgctgttattggggcccatgttgaatagtgaagtgtgagtttcacaaatgtgcaataattctatacctttcctgcagcatatcctgagcctataaggtataatagggtattactctagttaataaatggttgtcttttatttttctattttttttttttttaatttttttgagatggagtctcgctc

SEQ ID NO: 115445 - DNA, 198 bp, Homo sapiens
ggactgctgacgaaagttaaactccatttgggagcattcatatttagggcctttcggtcttgcattcatgcctattttaaggcttattaaatttttgagaataagacataatggtgatgttggggaaaaagtgttttattttcttttcctctttttttttttgagatggagtctcactttgttgcccaggctggagtg

SEQ ID NO: 115446 - DNA, 722 bp, Homo sapiens
gttatgtgaattcttacatatggaacataatttatatttctaattttgaaaattattgaatttcttctgttgctgtcttagccatcaggtaccattctatgcattgtaattatattggtcatattaagttcatgtccactgttgtcaaaagtggaaataccatggctggggtgtgtttatgtattgcctctagagctgtagccactgacgaacaggaaactgaaagctaaaagttcaggaaatgtattgtatttagactgtggaaaacatatatatgatactttactgaaaaccatgctcttttgaaaactgaaatatgtatgtatttaattagagatgaatattaaggattcatatcagatgcttaaatatgataatagatacagtatgtgcattgtaggccaggaatattgtgcaatgctagaaaaaaaggcaacagattattgtatgtattcagctatattctttcaagaaacaaaacagctggcacatcaattgaattcctcaaggatgtcttatttccagagaattccagagttttagttttagcttagttccaaggaagaggaggtccctgttttacaggatagcctatttcagtcttagggagttctaatggttaacttctgttttcatacactgaatttaactttgttttcctgtgatttattaatacagtctatagctttcttagagttgagaagaaaatgattaattgatca

SEQ ID NO: 115447 - DNA, 355 bp, Homo sapiens
cccattctaatatacagtttttcattatatataagaaatctgtgtaacccattagaagttatatagaagaatattcaatgcccatgaaaaatgttaatgacagcatattcataaagtaaaaaaattataaactatacagagtataatgtcattttttaaaaaaaaaaacttatcacacattctaatgaaggcctataatgagttagacattatggaaaataaacaggctttgaatccatggactgggttcaaataccagctctgccacttaacagatgtaatcagctttcctaaggtaaagtttgtctcccttctaggggacaataacgttctctttgcagggcaatataagagt

SEQ ID NO: 115448 - DNA, 272 bp, Homo sapiens
agtagagatggggtttcaccatgttggtcaggctggtcttgaacacctgacctcgtgatctgcccaccttggcttcccaaagtggtgggattacagacgtgagccactgcgcctggccgaaaaataattttttttaaagataaaaattttcataagaaataaagaaaaaggagacgttttccagcagattttttaaaaagttggttgtgtcaagtattttgcattactataaaaactataataaatagttgctgagaattgaatacttggtc

SEQ ID NO: 115449 - DNA, 283 bp, Homo sapiens
tgctgggattacaggcgtgagccaccacgcccagccagaaataaatttctaaccaatgcatgtatttggttctaagccccagtaggatatgatcatgttaagagtgataaaggtaatttagcagagaggaagttatagttgaatcatttattttacttccataagtattcaggataataggggctttacagattatagttcagtttttttcttttagatggataagtcccggaattgggatttaagtctcaggcccactgaccccagatcttttgttctatgt

SEQ ID NO: 115450 - DNA, 221 bp, Homo sapiens
gttatacctgcctaattttagaaagataaattatgaatgtcgaaatgaaaggtaagcagaagaatcagccaacattggcaacattatagaaattaatttaaatttgcattaagccaggaacatattgtttgtaaattatgaggcttctatgtacttttgtacagctttaatgaaaaagaatcatacttacttgattaagcattggctttgctaattgtgga

SEQ ID NO: 115451 - DNA, 319 bp, Homo sapiens
aagctttgtccaaaccaccatctcctctcacctcagatgtatcctgcttccacccttgaacccaacagtctcttctccactaacaagcaatgtgatgtttaaaatcctaagtcaggtcacagcacatgtctggccagaaccctttaacatcttcccatctccttccaagcagagctgccagagactctgcagaacgcagcctctcttatgtctctaacttcatcccttctcctcctcttcactcccaagcactgctacagaataatccctcctcaccccttcccctacacttgttcatttaaaacaggcaccaaatttc

SEQ ID NO: 115452 - DNA, 260 bp, Homo sapiens
tgtacccgtataaaattaggattgacttatagaggggaaatttatttggtttattaagatcctttcagatggattttatacctgcttctctatactagccaagtctgtctgagtgaagtggtaatgttatctttaatttacattttaaaacttttacatagttaaattttaataaaaaatctgttcttgccttgggaactaccatagatacgttttcttcagggtacattgagcgaattccccaaattgtattcgtattg

SEQ ID NO: 115453 - DNA, 348 bp, Homo sapiens
ccctgttttagaagattcaatagcattctttctaaacttacaaaccagacacatttgttgctgtgggtgtgtgcatgggtatatgtgtgtgtgtgttctctggagttatgcaaggaagactgttttctttacatatgtgatgatttgcctcattgacaaatttgctctctggttgataaccttcacatccttgtactttttgtatgctcacatttctgggtattatatagagaagcctagaaacactttacatgatgtggtgggatggcatggggttgagatgtgcttctcccctttctgtcctctctggcactctaataattgtgcttttgtttctccaaccacagc

SEQ ID NO: 115454 - DNA, 473 bp, Homo sapiens
acattctactgcccatgagtggtggtaccagagctgtgctgcagtgggctccttggttatctctctttagatgaggacactccagaagcatgaagttaagtgactgcccagttatcaaagcagagagctagaaagtgcagggtcctgcctgctaccccaacccctcccgcagtgtacacatactcagcttaaagccacacctggacctgggctttattagaaagtttcctcctgctttcctcccgtttggtgactgggagccagtccctctgcctgccatgtaccagctgtacaaggaggtgagaagatgtcctctgagaaaagcaaatgccacttctgcaaatgctacatgaggctcctgctgagaccctcactcttcaagttttagagccttctgaggggcttgcattccttctttctcctgctttctgcagagaagtacacaaacacagaaagaaagggccctggctttg

SEQ ID NO: 115455 - DNA, 678 bp, Homo sapiens
gaaagtaataatatgcctccctacggtagaatataataggacttacgggaataatatgagaaaaaacaatcaaccagtcattgttttagattttccacgtgatcagtaaattatctgaagtaaaaataaaagagctagagaaaatgtattaatgtatgaaagagtaaagctataaaactgaaataatatcatatcatctaaacccagcacattttcaactgttagttaaaatatgactccacgtggtcagaaccttccaaagtaatcatagtagcactgataaggaaaatacaaaaaaatgaatacatcagcctatttgtccaatatcagtcatatttcattacttaaaaaatatagaagcctggcgataaccacagatgcagtgaaatgaactcagctcctctagggatggtgcccaaaagtctgcatgtgttgatgtaactagtcctcaattagtatttgaaactactgctttaggctatttggatgattaaatgtacacaaaacaggccgggcgcggtggctcatgcctgtaatcccagctactcggggggctgaggtgggaggatcgctttagcccaggagttctggctgtagtgcgctatgccatcgggtgtccgactaattcggcatcatttgtgacccccggacacgggacaccagttgctaagagggaca

SEQ ID NO: 115456 - DNA, 270 bp, Homo sapiens
tcacctgtgtccattctgtctcataaaggacactgtaggctctgaacagctaaggcctttcttattcttttgtcccatggaaaataatccctccagatagcaataccaggaatagtgccttttctaacccactggtttccttttgagcttacagccaccaaatcttatatctgtttgtttctgttcccctctctgcattgactgctagagagatcagagtcaagcaggaggttacatctagctggggcactgtgctttatgctggtgttt

SEQ ID NO: 115457 - DNA, 375 bp, Homo sapiens
tccttttctagcctgaaatttcaagatgttgactgctttcatttactctcacaatcttggtatttctagaaaatacattacagagatagattatatgaacatgagtgataacctcgatttataattctttaatgaatttgaatcatattctaagttaattttaataatcattccagttgtcaaaaaagccaatgaaatttatataatatttatgatggtaataaatatttgtttcctagtaaatgacatatccacaaaggctgggtgtaacaggttttaggatttcagatgtacagaaaggaaaatgaccaaattaataataaagattaaagtcattggtccaaaaagacaatcagaaccattctacctttatta

SEQ ID NO: 115458 - DNA, 218 bp, Homo sapiens
attccagctcagggtcactggtggccagagcccatcctggcagcttggagcaaagtaggaaccagcctttgacatcattccattacaggacacactcgcacatacacccctgcactcatcagattgagaccatttagacaggccaacgaacctagtatgcccatctttgggatgtggaaggaaaccatattaataataacagaagaaagcccatgtag

SEQ ID NO: 115459 - DNA, 863 bp, Homo sapiens
aatatgggttaaattacctacctaaaagatagagacaggcttaatggatcaaaaatgacccaacaacgtctacaagaaactcacttcacttgtaaagacacacacagactgaaagtgaagggattgaaaaagatatgccacacaaacagaaatcaaaagtaaccaggagtagctaaacttacatcagataaaacagactttaagtcaaaaactgtaaaaaggacaaagaaggtcattatatggtaataaagggatcaattcagcaacaaagtgtaacaattctaaatatgcatgcaaccaacacaagcacatccagacacacatagcaaatattattaaatctacagggaaagatagagtccaatacaatgatagttgagaacttcaatatcctactctcagcactggacagttcatctagacataaaatcaacaaagaaacattagatttaagctgcactttagaccaaatggagctaacagatattttcagaatatttcatccagcagcagcagaatatacaatcatctcatcaacacatggaacattctccaggatagaccatatgttaggacacaaaacaaggatcaacaaaattttaaaaattaaaatcatatcaagtatcttctcagaccacaatggaataaaacttgaaatcaataagaagaagaaatttggaaactgtacaaatacatggacattaaacatgctattgaatgaccattggatcaatgaagaaattaagatggacattaaaaatttttttaaacagaaaacggaaacacatcatgcaaaacctatgggatacagcaaaagcagtactaggaggaaagtttatagcaataaatgcctacaccaaaaa

SEQ ID NO: 115460 - DNA, 686 bp, Homo sapiens
agaaataagaaaatgggagatgcttaacagctaccagttttggaaaatgagaatgcagacagacatttagtaaacttagcaaacctgaggaagctaaatcctaggctggcagtgggaattggagaagcaacctgattagtagctcagaatctccgtaaggcttggtaattgccaactgcaggaacctctggaagtggaggtgaagctaaacacagaagtggttgaaagtctgtttcagaagcagttagagctccttagctccctcagtgctagcccaagactggaggtttgttatttggcgaggatgaaacagagggcctctggactagggaaaacgcagaccttgctgagggtgagctgctgtcatgaaagcagaggagttgagtagtttaaattttggacagtccagcctttttcctcaactcacctcccagatcactagcagccaggtgcttgtcttcctgacaggagattggaagagcgttctgtgggggatgtgatcagcataagaaaataaacccaaaggtactgacttcagggaaccccagtccaactgcttggccacatgcctccacgagcaggatcacagtcaggaagcctcacccaggcatgcagcttttttgtgtcccacttttaaacaaaagcagaaaacgaagttttgctgttcatttgaagaagggagctaa

SEQ ID NO: 115461 - DNA, 342 bp, Homo sapiens
ctcttcagctggtctaaacatgtagctttacctgccacctgtttgttcatgacccccacatctacatggacacttagccttcttttctgagcctctgcctctatggtactgtcatacctactgtatcccacaaataaacttaaatgtgtccaaaattgaggcatcatctctttccctcccctttgccctccccctcccaaataaaacctgcttctcctaccctcaccttcatcctggtctcagttggtgacaccaccatccagaaatttacaggtcatctgggactcctcccaactcataaccctgcatccaattagccatctagtttggttggagagccat

SEQ ID NO: 115462 - DNA, 331 bp, Homo sapiens
aacaaatgctctgtgcatttttattacaaacaccatggtgggcaggtgcagtgcctcaatgcctctaatcccaacactttgggaggccaaagcgtgtagatcacctgaggtcaggagttcgagaccaccctagccaatatagtaaaacaacatttctactaaaaataaaaaaattagccgggagtggtggtggatgcctgtaatcccagctactcaggaggctgaggcaggagaattgattgaacccgggaggcggaggttgcagtgagccgagattgcaccactgcactccagactgggccacaaaagcgaaactccatctcagaaaaaa

SEQ ID NO: 115463 - DNA, 327 bp, Homo sapiens
aatgttagaagttacttcccaagaggaactcttaactcatatttggctattcgggttttccccagaggcattattggctgttgcgggggtgttcagttctggaaataccctaaaatatagtactccaggaatactagtactggtagatagtactccaagaattctctgagaaggtgttttttcttttttcaaacccatccatatgggatgtttttaaggacagaagaactccatatatttgataaattaagatactgtcctcaggactttctatgaatgggcaaactctgagatggctttctaatggtgaagatggatttattcttt

SEQ ID NO: 115464 - DNA, 286 bp, Homo sapiens
tacattactttttatcattctgttgttaaatattatttttgaaagccttaaaatattttaaaattactttcttttcatcaaaactttattttactttcttcttatccttatgattggcattaacagtactgcaaattctagaaaagaaaatctccaaacctgtatgtcttgttagcaaaattaagaataattttgagccaggtgtgttggctcacacctgtaatcccagcactttgggaggctgaggtgggaggattgcttgagcccaggacttcaccagcctggg

SEQ ID NO: 115465 - DNA, 832 bp, Homo sapiens
cacctactagctatgtgatttagggaaacttacttaggttgcctcagttccctcagtcatgaaagggtgtttgctacgggtaggacctacctcaaggttgcctcacaaacaatatttgtaaaacgttaataacagcacccagcacatggtgaacatggatgttaaagtagacccaaagttccctgaaggaaacagaactggcaggagaaacacatgccactgagagaaaatttcaagaagaggaatcatgctgtggcccaaactgagcagcaggtagaggtagaggctgtgtccagccattttcctgacctaggctactatcccttgttcctctggtttgagcattatcagaaaaaaccagttctgaaataaaggaaagagctcttaggaggttcatagcagttctgctatgaagaaaactcctctaagttgctggtaaacaatagtggaaggagttttccagttgtctaggaaagagaaagggcattggaggtgagtgacccaggtaggtaagcaatggtgagaacacgatgtgtccatcatctgggcacaggaggttggcaaaagcaaggcagtagcccaagggtagcgtgaagatttgcaaaggctggtctgcaccttctggacagagcagccatgctgaacagcaggaacagaagagtacatgagaaccggcagaaggatgctgagctgcagctgaaatctgggatatttctgtaaatgtacaatacttgcactcaccaatgggtgaggccagaggatctaaaggtgacattttatcttttaaagttcacttctcaactgggtgtggtgccttacacctgtaatacca

SEQ ID NO: 115466 - DNA, 705 bp, Homo sapiens
gggacttcagtctcactttggagacagacaataaaatgtgcttatcattttagcactttcactacctgacattttgaaagggcgactgattgactgtgtctgtgatagacataaggcctctgcaaggatgtcacatgtaggctcagagctgaggatgagatagaactagctatgtgaataatgggatgaattgcattatgagcagagctcgtagcatgtgcaaaggccctgaggcagaaagcattcggtgtgtttaagacatgatgacagcctggatgaagtgtagccattcaggggtaattgatgaagggtggggctggagaagtgggcaggacactctaggccacggatgggagtttgcattttttccaaaggggtgataaatcatttaaaggttctaagcagaggagtgaagacataatctagtgtacaaatcaaactagttgctctgctgtatggagaatgtgtagaagggatctagagtggaagctggaattccagttaggagggtgcttcaggggccgagtgagagacaccactggctgagatgttggtgttgacaatcaagatattcgagacatagtttggaagtagaatcagtaggtctggcttttggattaggtgtggggcggaacggaaaagcaagagcaaagatgaactcctaggtggctggcttggattagtgtggaggtcagcaaactgtgg

SEQ ID NO: 115467 - DNA, 520 bp, Homo sapiens
gtacaaagcatagtgcctgaacttcctgggataaaaggagagttttccctttcatcaggggactcaggcctccatccttagattgaactttttgccctttagggctgtatattaccttaaatagctaccagctgacacactttgctgcaggctgatgttaacttgaaagtcgaaatgtatggactggtctctccctaatggaacttcagtggtagaagacaatgaattgaaaactcagatcacgattagggtcttgaagctattttatttttgaattctaaatcccaagttagaagggttatgaaaaggagaattgtgtatatttctttcacaagaaataagttggatctttctttgagtcagaatgggcttacaacaaataaacttttctccccatgccagaaactcctcattttagtaatgaataagccatgatgtagcgatttatgtgtaatcacctattgaccttccatatgcttcactttagaggctcctaagaagcttttcttcttttcttttc

SEQ ID NO: 115468 - DNA, 643 bp, Homo sapiens
gcagaaaaccaaaccaaaaaaaaaatgaccaaacaggaaataaaacaaacaaacaaacaaacaaacaaacaaaacagaggaaacactatttagacagaaaaaactcaagaacatcaatatttttacagatagataagatagtgcctctataaaatcggaacagaatactaaaaaaataaaaagaatacttggaaaataaaagggcctcttggaaattaaacacaagattgcagaaacaaagaatgcaatataaaagttggaggtggggtgactaactcatcgcagtttgtcttagcactaaaattcccactcctgggaaacctctctatgctaggtcaccttagttggagaatgatacggtttggccctgtgtccccacccaaatctcttgttgaattgtaatctccagtgttgggggagggacttggtgtgaggtgattagatcatgggggcagatttccctcttgctgttgtcatgacagtgagacagttctcatgagatcaggttgtttaatatgtgtagcaattccccttcactctcctgctccgccatggtaagatgtgcttgcctcccttcggccataattataagcttcctgagacctcccacccatgcttcattgtacagcctgtggaactgtga

SEQ ID NO: 115469 - DNA, 375 bp, Homo sapiens
accccgctctttaggatccccgctgagctgacaggcggccatgaggattaaacaaatgaggtgacgcaggggaagcacttagcacaatgcctgggtcatagtaagtgctcagtcaatgtcagccattgatttatttctcatctacttctacttcaagtaaaagttggcaaactagtttcaagatcattatacatgtaatccagactcaggctgagctcacaaatttgttctttgaaaaagccacacaattcttttgtaagtcttgatctcctgggtttttttttgttgttgttgttgttttaaatcagctatatttagctcttaaatttcatatctcagtttgaaatcctaaagtcatccttccaaaaatacaag

SEQ ID NO: 115470 - DNA, 772 bp, Homo sapiens
gggaagcaagcagaactagaacttgtgatccctaatgtatcttttacgcacacacacacacacacagatgtgtaggtcacgtgataccgaaagaaagggcagtatcaatttttctgataagaggatttttcataaagtagagaaaatcagttctaatcagcactgtctctgactggactggctgttagtgttgggagcaggagagtgggaagcagtcacttgaactctcaggttttctggtctaggttttctcacctagaacaccagggatctgtggagcttccaaatcttgtaaactttatttctacattgcaaatattaaaacgtacattgctgtaagactgatggtacttatagtagataagatctattctagttttaacatccatcattttgtattatttttagcaaagctagtgtttcatctgctgtgaggtttagcaagactgtgaattgagctctagtgctgccagaaaaagagttatcaccactttctattttgagtcaatgataaaattatttgtttctgtaagttaagaataaatgagaactttgccaacagctccttggagtagtaaataataagggtgtgtgctctggtatcactacaaattgctaatagtagtgtttttataacctgtattttgtggtaatttttgacgggacatttatggcagtttggcggaaattaatagagaaattaatgaagttaagttctagaaaattagatatgaatattgtgaaagtgtgaataaattatttattttctgct

SEQ ID NO: 115471 - DNA, 641 bp, Homo sapiens
gcttttctcaagcacagtattttcctattttcacaatatttgtaaagatcaatacttttttttttttggagacaaagtctccctctgtcacccaggctagagtgcaatggtaccatcttgactcactgcaacctccgtctcccgggttcaagtgattctcccgcctcagcctcctgagtagttgggactacaggcacgcaccatcacacctggctaattttttgtatttttagtaaagatggggttttgccatgttggccaagctggtctcgaactcctggtctcaagtcatctgcccatctcagcctcataaagttctgggattacaggcatgaaccactatgcctggccagggtcaatactcttttaaatgcatgtgctggaaccgatcctattttttccctctactgtaagtaacctccaattttcagaactaaatcacaatgtcacaaatgtacttgtatacaaagttttttcagcatttgggattgttttcttagtataaataaatgaaactagaattattgggtgaatgggcatggatgattaagtctcttaacacatactggcagactgggctctacaaatctatacctctacttgaagaatatgagtgttcatttcaatgtacctcattagtg

SEQ ID NO: 115472 - DNA, 430 bp, Homo sapiens
tacagcttagccatgtgacccagaacatgtctgtctaccaagtttctgtatgtgggaggcctggacaatgacggccgcaatttccctctccttaaatagagcttcagggaaagaatccctcttttcagatgagtggcagttaccgtacctgctgggagcgttgcattgaacccagggaccagccaagaggaactaatggaccccgtggaagatcatttgagcctcagctacgggaagagctggatgcaggccggggaagcggattggtggactgcacattcatttaaggttgaaatgcttagcattgtaaaggtgactgtgaattttaagcttcattctttattgacctggcagatcggagagtgctgtgtcttggtgtaatgaagcattatgttggtacagtgaaaaggaaactgccttcctggctgga

SEQ ID NO: 115473 - DNA, 397 bp, Homo sapiens
aattccttctggtgatcaaagaacccacaaaacagaataggaggcagcgccccatgcccttgtcagtgaggcagagtgtaacttgggagtttcagatgagtggcagttaccgtacctgctgggagcgttgcattgaacccagggaccagccaagaggaactaatggaccccgtggaagatcatttgagcctcagctacgggaagagctggatgcaggccggggaagcggattggtggactgcacattcatttaaggttgaaatgcttagcattgtaaaggtgactgtgaattttaagcttcattctttattgacctggcagatcggagagtgctgtgtcttggtgtaatgaagcattatgttggtacagtgaaaaggaaactgccttcctggctgga

SEQ ID NO: 115474 - DNA, 134 bp, Homo sapiens
gtaagaacgtcgggcatgggagtagttctcttgtctctcatattcccagtgaccttggttctgcaagaagtccagtagttctgcccctgctaaagtctgcagagaagggactccatggtaaggtccccttaatg

SEQ ID NO: 115475 - DNA, 610 bp, Homo sapiens
gttataaaacagagtgaaattatgactggttcatgctcaattttaactccacagccttagcctcattgggttgtgtagtaaccaaattaatggattaaagttagaaaatgtgccaaaccataaaccagagataagtaagcagaaaactgcactgtcatgaatggacatcgttctagtcacttctgagtgtgatggcatgagtattctcacatgaaagactattgtaaactcttacatttgttaaaaccaaacacttacagtctttacatgaacattataaacacaatttataaaaataaaaaaaaaaaaacaaaaaaaaaaaaaacaaaaaaaaaaaaaaaaaaaaaaaaaaaaaaaaaaaaaaaaaaaaaaacaaaaaaaaaaaaaaaaaaacaaaaaaacaaaaaaaaaaaaaaaaaaaaaaaaaaagaggcggtcgggcggcgagcgcacccggacgcgaaagaagacatatacacaccaacaatgtgtggtgggggggcgcgcgccgcaacacaagaagaggacacagagcgaagagcagacgagtcctccagcaaataacagccgcgggactcatgcggaggtgggggctaccaccaacaaagag

SEQ ID NO: 115476 - DNA, 445 bp, Homo sapiens
tttcccccaatcacaattctattttacctttttaaaaactctaaagggcaagaattttgctaatcttttctagaaatataaaaacaagcaaatatgttttctaaaacaaaccaaggcttttctcctggggaatttgcaggcatagcacgaactccttcctcactgctatttcttgagaggggctgttaggctgtgctgtgctctgcttaaggacgagaggccaggtacacagcctgagaggccagtcattgtgccatgttgttgtcaggagttcccagtgtccatcttgataaggctttgctaaaacatactaatacaaacttccattacctcctgtgtttctaaataaacataccaagttattttaagactcatgttttcctttataatcatttgaaatttctgcctagtgtgaaacaaccatctagattctcacagaattcat

SEQ ID NO: 115477 - DNA, 408 bp, Homo sapiens
tctgaatcatcggagtcactgggagcttggtgaaaaacacccccaggtggccccgcccctggagattctgagtcagcgcagccgggtgaggccaggaacagacctccctagcaaggacccccaggtgattccaatgaggcgaatttgggaaacacccatctaggccgtgtgtgaggcatcttgtttattcagggcggcaggacattcatccattcatccattcctgaactgtattttgagttattctgttagtgctaagtggtgaggattacacagggtccttccttgaagtacttgacagtttcatgtggatggttagatatataactaaataataaggaatagaatgaccatttataacattgtttctggaagaaaatctgttctgaattccaaatcgccaattta

SEQ ID NO: 115478 - DNA, 460 bp, Homo sapiens
accatctgttaattggggatactaacacttatttcgtaagactgttgtaaggcttaagtgaacaattaaaacaaaacagacacctaaagcataatgactgtgcacattaattgctcaataaataggaatttctccccttttgtaagtgaggaagcaacagttcagaatgtgaaatgatttgcctgagatcagaaggcttgttcccagcaaaggtggggttcaaagcaatggtttctgtggatgtattttttccctagcatccagcctccttcctgttcatgtctacaccctataggctacttatgtcagtagaataaaacaggtgatggctctcccatcgacctgcttgttgaggattttgggacagttccattctaggctaatgctcattactaaagacaatgctcattaataaagacaacgctcttaaggaggtcaccccctcacacggagaaatctg

SEQ ID NO: 115479 - DNA, 712 bp, Homo sapiens
agagacggggttttgccatgttggccaggctggtctccaactcctgacctcaggtgatccacctgcctcagcctcccaaagtgttgggattaaaggcctgagccaccgcacttgccaaagtaagctgaatcttaaggaataagtgaaattcggacatgcatcagaaagaatagtttggccaaaaggagcaatgtgaggaaagacataaaagtcaaagaacccagagagtatgggggaaaagtgatactccactttggctgatgcgtaaaggtattgaggagattagctcagggttagtttatgcagtgccttaaaaaccagactaataaccttagactttactgtctgagtattggggagccattgaatgtgtgtgtgtgtgtgtgtgtgtgtgtgtgtgtgtgtgtgtgtgttttctttttttagtgaagggtgcagaggagtgacttgattagaactgccttaatcatggagaaaatattggatagagcagactgagccttgctactcttgagtatgggcagagagtatcaacatcacttggaagcttgttataaatacaaaactacagacatcatgcaccctagaacttcagaatcagaatctacgttttaacaagttcctcaggtgattcctgtgcacattaaagtttgatcagctctggattagaagactaggcagagaaaccaaaggcagaaaaacctggagacta

SEQ ID NO: 115480 - DNA, 757 bp, Homo sapiens
tgcttgatcagttctgctatagactttgcatgaccttaagcagcttccttagattactcgagctctattttgttatctgtaaaatggttacaataatacttactccccggtgttattctgagtactaaatgagttcttatacccaaagcatctagtacagggcctgcacgagtttgtgttctttcattgagtattgctgttgtcattaaaaatataattttattctcagaaattacattttattactgccataaccttatagaccaacaacaaactgagtaatctctaccttctcttccctgtgtggctggcacttttggagaaaaatctcttaaaaggaaattaaagcagtgcaaccatctgtgatttgtcagggtcatataaaagagctatacaccaccaccaccatcaacaacaaaatcagtatctaagaactagattaatccaggtttgaaaccaccaaaaggagcataaaagggtaaagcaaaaatcaatatatattctgaaaagtatggacagaaggtaaattacagtttgtgtgtgtgtgttttgtggtaataaggaagattaaagtaatatttaaagtggttaagaaatctggacatgggctcaaatgcaactccactgtattccatttgatcttcaaagaaataaagtgctgtttagtttttgatcttcagtcttctcatccaaaaatgggaataataacagacttatttcataagattgtcatgaggcttatatgggatactgcatg

SEQ ID NO: 115481 - DNA, 216 bp, Homo sapiens
gtgtccttattgagttgtaacagttctttatatattttagatacaagttctttgtcaaatgttttgtagcttctggggaaaagaatgaaaaagaaattttaaaagaagacaggcctgggacagtggctggctgggtgtggtggctcacgcctgtaatcccatcactttgggaggccaaggcaggtggaccacctgaggtcaggagtttgagaccag

SEQ ID NO: 115482 - DNA, 307 bp, Homo sapiens
gggaaatgaaagaaaaggagaggggaaatatgtattagcctgaaataataataaacctagggtgcttggagaaagcataaagtgcttggagagacctaagaggcttggcgtcaaaacccttggcttcaatttccacctgttggttgtgtctgtgagcacatctgtccacctccctgggtctgagatgactcttctgtaaaactgggaaagctgagccagatcatctggaaggctccttctagttctgacagtctaagacagctctgtccagtagaactttctgcagtgttggaaatagtccatgtct

SEQ ID NO: 115483 - DNA, 419 bp, Homo sapiens
ccaccgcgcctggcctgttctgctcttttgtttaattctccatggctttgcatttgattggaaactcaagtatgttgggaattcttgagaatttgtaacagtggattctcaacctttttacaactgaggacaacctcattaaagaatatttttcatccacagaccttattttgatagatgttgtctaccaagcaaactgtatgtattccatgaatacaaactgtaatacaaactctattacgtgaagtaactaggactcccgtgctgaattaatataattccagtaaaaaataaaggcatttattgcttagtctcagcagttttactaagagcaaatgtgcagtttttactagatgttttgaactatttaaaataatttaagaatcatgtgttaagactttttagcccccacccctagg

SEQ ID NO: 115484 - DNA, 650 bp, Homo sapiens
gggtagctgggcccacaggcacctgcaaccacgcttggctaattgttttattttttgtagagaccggatctcactatgttgctcagggaggtcttgaactcctggcctcaagcgaccgtccagcttcagcctcccaaagtcttggggattattggcataagctactgtgcctggccagtttcagtcttttaaaatttattggccagtacagtgactgatacctataatctcagcattttgggagaagaaggccagaggatcaattgagctcaagaactcaagacctgcctggactgtaacatactaagacctcatatctagaaaaaattttaaaacttagctgggcatggtggtacatgcctgtggttcctgttactgaggaagctgaggtgagaggatcccttgagcctgggaggttgaggctgcagtgagctatgatcacaccactgcacttcagcctggacaacagagtcaggccctttctcaaaaaaaaaaaaaaattattgagacttgttttatggccatgaatatgttctatcttggtgaatgttccctttgcacctaagaagaatatgtattctgctatttgttggtattttggtaaaaatgtaaaattaggttgagttgttcatagcatcttgcaggttttt

SEQ ID NO: 115485 - DNA, 333 bp, Homo sapiens
ctagggcaccgcaacatttttgcaatgcctgactcaagggaaggaagccaacatttgtgaggcatttaacgtgagccacgtgttgagctgggcccatccctgtggctcccatttgattttgacacaaattcttagagccaagcactgctacagatggttttgggaagtgtagtgagttccccataagaagtgtggctaaaaatcagtaagaaaaggatgatcagtgtgagaggaaaaggagagtaggaaaagagaattcttagatgaagccataaaaatggcgaagaaacctatgcaaagatactcctctgttgtggcagagatcacaagctg

SEQ ID NO: 115486 - DNA, 436 bp, Homo sapiens
gtgttgggattacaggcgtgagctactgagcctagccccttatgaatgatttctttgtgtttcttcctatcctgcctgccctgtgtccagagcccaccttggtgaccacagtagccctcaggcagctgagtgtggcctcatgcagtccgctttctcttctaggtcagcctcttgaagaggaggcagcatgtggtctcactcagaggctcctcaactgggccatgtattagagatgtgacccaggagtaggtgggctctttgaacattcagattcccaggtcttaccgtggaagattctgatttggcaggtgctgtttataaccgttccctgggctgctgctagtttatcctctatcagctcatatctgaggcctctgcagccctaccagtttggtggttttcttatttttctcatttggtgtaagaatagatgtga

SEQ ID NO: 115487 - DNA, 162 bp, Homo sapiens
tatgaggattaaataagactattggctaaaaggtgcttagaatagtgcctagcacagagtaagcacttaataagtgttagctattattgtgataatacatgcatagaagtatatgcatgcatgtacatttaccagtatgtacacatttgcacacacaaaatg

SEQ ID NO: 115488 - DNA, 436 bp, Homo sapiens
cctcattgcactaatgccactgtacaaacacccccaggcccctgcaatttcaaggaggagaaggagctagaggcctgggcagcattgaaagggatgatgggcagcattgagagggatgatgggcagcattgagagggatgataggcagcattgagagggatgatgggcagcagtcccagcaggcaagtggcagagggcagtagggggaggtcaagtgaattaaaagcctgaaatggaaaagtcgaagtgaaaggaaagcaggaagagaatagtagaaggggatggactacaaaagaaggtgaagactgggcatggtggctcacgccagtaaccccagcactttgggaggctgaggtgagaggatttcttgaggccaggagctcaagaccagtctgggcaacttggcaagaccttgtctctccgaaaagaaaaaaaa

SEQ ID NO: 115489 - DNA, 680 bp, Homo sapiens
atgggaagatttatagttctcagcctgtgtacctacctgccccacctgatggccctcccatctctcctcaagcaattgttcaatgacacccatgcagcctcccagttgccatggaaatggcaagaatgcctctaataggaagtaagaatggaagaagatgattgtacagattcctcaagcaattcctgagcaaattctccaattacccttcgcatccagagtcaaggatttctctgggttacaggaacagcactgaggctttcaacatcctcaccctggcaagctggttgcctccttttgcccagcagtgccacagcactactatgcacagcaactcggctcccttctttcagctggattccttttgtgagactgtaattctgaaacacccagtgaaactggaacaggaacaagaaaggggattcttctgtgattgccccaaaccatttgttgtctgcagaaaacttacattggtgcatccatgggcagggcatgaagagagagtccacagaggagcttgaccctctcatcttcccagagatctaaagagcaggtgtggtgaggaccatcactgaggtcaatcagaaatacctgcttgctcctgccttcatgagagatggctctatttagccacacagacacatcctttttctacctaggcctatcaacctaataggaaa

SEQ ID NO: 115490 - DNA, 266 bp, Homo sapiens
ccaagtcttgagcttcttcctcatgttgttaactgctcagctgagttatttcaatggcatgaaagaaacatagaattaaggtcatagagcatggtcctaattcatgcctgctcgccctgctttactgccatcatcatctatctccttgctttcactcaacaaatatttggtgagcgcgatttttttgttaggcactcacccatgctccctcccttcctttctcctctccttcagtttgtttgcctaccagtccatgcacccacccg

SEQ ID NO: 115491 - DNA, 500 bp, Homo sapiens
actgaagatgcctttcattgtccatctaaagtactggactttccaagcaggtgacaaatgatctttctactacagtttaacctcatcctggttggctcctttccacctctcacatctgctttacatgtctctcctgagccacatcttctctgagcagtccttcaacttgggttccctgtaattctctacctaagctccttactgttccctttgtaggaattctctccatccgtggtatcgtatagaggtctgcgtacttccccctgctgtttggttcagcattcaaagcacaatttctggcacacagttaggtgctggacaaaatctcaatgtgtgcaatcctcgtaaactctgcatggcctccttgtctccatgttagagatgagacatattgtcaaatggtaagacagcctgcaggtgggggcagtggtggcacaggacacaacgtcctgaacaggcagtcacctcacgtcacctgagtccaccctgaggccatgccc

SEQ ID NO: 115492 - DNA, 775 bp, Homo sapiens
gggacactggaagctatggagggccttgtcagccacagtaaggaatgtggacctggtcctcagggtggtgaggggatggccccccatccagaggtttctcacaggggagtgattcggcctgtctctgccgcagtcagaaggaaggatgcagtgagagagggaaagtggagaggcggatggcggtgcagtctactccaggtcatgcttcttaccatctccctcattattcatccacagaaaatgattgctgttatatgacacactggttaacaaaggagggggctgtttgcaaacagaaacaaccaacccagggcctccagccatccaaagattctgcacagccagccacccctaaggctaagaaatcccaggtacatgcacaccagtcacagcatacctggactcagacaatgacagtggagaatgaggaacaagagctgggttcaaggaataattagcaagcaacgttggcattacgtagtgcagggacaaaggaggagggagatagcccgtgggattctggactaaattgggcaaatggtatgaccatggttaggcttttgtgtccccgccccaatctcatcttgaattgtaatccccaagtgttgagggaaagacccggtgggagaggatcggatcatggggtggtttcccccacgctgttcttcggatagttagggagttctcatgagatctgatggttccataagcgtccgtcatttcctccactcacactctctcttgccaccttgtgaagaggtgcctgcttcccctt

SEQ ID NO: 115493 - DNA, 629 bp, Homo sapiens
ggccttgaaagatgtgtgtcccagaagctatataaccaggtataagccacatgagtccctcaatcctcctggagaagtgttccaccctggagagctgcttctcttccagaggactttgaacaagaaagaaactatctttcatgtgataggccactgagagctggaagtttattaccacagtacagcctttcctattctgattaatacagaaattggaaacagaagtgagaattactcacaacaaaaactaagaataattgccattggctgagcagtggggcaagaaggtgagaaaatgaatatcatatttgggaaatattaaaatatggagctgcttgtcatgcaatgctcaatgtattatacatttcaaaactgcttaaagagtggattttaagtgttctcaacacaaaagataagtgaagtgattgatatgttaatttgcttgatttaataatttctaaatgtacgcatatatcaaaatatcacatcataccttaaaatgtatacaattattgtcagttaaaaataaaataatacaaaagaagtaactttaaacatttcaaaacatatgtatagaaagcctgttacccatgttcatttgggagacggatgctacctattgaaatagg

SEQ ID NO: 115494 - DNA, 432 bp, Homo sapiens
ctttgggccttttgtaaaagggggtcctgtccccccgtttctcagagggggagacccagcagcgtggagagcgctggggggcgctgcagggtcagatcctgcgtattcaagcactggctgtgtgattttaggccagttatctaacctctctgtgccctagtttcctctgcgaaacgaaattaataaagtcccatcgcctagtttgaaattgcaaggaagaggcttcgaagaactccatttaaaaaaagaacacttgggccgggcgcggtggctcacgcctgtaatcccagcagtttgggaggccgaggcaggtggatcatctgaggtcaggagattgagaccatcctggctaacagagtgaaacccggtctccactaaaaatacagaaattagccgggcgcgatggcaggcgcctgtaatcccagctaccca

SEQ ID NO: 115495 - DNA, 530 bp, Homo sapiens
aaagtcaaggatagtataaggaagtcctggtgtaccctttaactagataccccggttgtttcaaattattattttttgctaatccatagtagtagagtaatgggccattcattcatatgttcattcaagaaaatttcatagcagaacctttgtgcaaaaaaagtggatgaggcaattctttccctgcttcatttctactattagcaattcatgactgatttagctctttggtttgtgaaatggatgactgaaaacctctcctaagttaggaaagtaagtgaagaaggcactttaaaactgaggtgccatcttttttgtcttctctgtgggatattcatttaaaatttttctcgtagtaaaggcaagcacagatggaaggtggtataaggttcagcctcatcccttaacttcagcctgatggtgcttgtgatagtgcttgatttgctggtgatactggcgtagttaagaatctcccagcttaggagagagaacttaacatggcaaaggtaaaaagaggagcaggtttcatc

SEQ ID NO: 115496 - DNA, 599 bp, Homo sapiens
caatcaataacaactagaactgactccaactcaaactaatttctcgttagaaaagtaaatgaattgagtaattaaaagaagaactaaggttaaaacaaaaaatcaaagaaactgttccaacatcaacgggaagctccgcagactaaaacatggttagggcaaatctggtagtcctgagggcaattaaacatgtctatttagatagaatgtatttttatttttggttttggttgctttgtctccctcttatacctaatagaagacactgaatttgtgtcttttcataggaatgcatgtctgtgtttcctatgagctattatttttgcctgcagtgctagcagagggattggctatgaagacagagtttgcctttcttcactgtggcctctctctgggtagctgaggaccagataattccatctccacagctactgcctctgtctttatgaatcacaaagatacagaataaccaaaccctccagtcctgtcacactttgctcttctactttagaaaagctgtttatgtgatttcagattcagaaggtacttttcgagcatactaggccttgacttttaggcagcacaaagctcttctcatt

SEQ ID NO: 115497 - DNA, 210 bp, Homo sapiens
ggggccgcgtcggggcgggcgggcgcgcgggccccgcgggggcggcgcgtggatggatccgcgcgtggcctggatccagcccgagcagaaggggccggccaatgccctgtggatgcagatctgggagacctcgcagggcgtgggccgcggcggctcgggcttcgcgtcctatttctgcctcaactcgccggcgctggacacggcggccgc

SEQ ID NO: 115498 - DNA, 465 bp, Homo sapiens
  misc_feature (358)..(358): n is a, c, g, or t
attttaggccaagtccttctcagcctaaattgtgtatttgaaacaaggtattttctgaacaaggtgtttgagaagtagctattgccatgtaataattacctagcgcttccttcatactctggaagaagaaaatagtgcgttttttttctctcgaggtcataatgtgaatgttgtatgcagtggccatgtcatcagaacaggtgtgccagccccctgcatggaacatgtacatgcttcaggttgtgcggaattaactttctttagataagggataactagcattcatttcagataacagatattcaacctataattgtttttatttaaaacctcttccaccttgaccagggctcctgtnaataaacaggattccctccagactagaaggatttgctgagtacctgttatttgaatttacttttattagttcatagaacctttcaacaacagtgtgagttaggttat

SEQ ID NO: 115499 - DNA, 431 bp, Homo sapiens
tcctggaaaacatgcatttgattgtgacagatgagaggacaggggattcagtccattgctggttcctggggactttctaaactcactaaagccaggggcctctctagtcaaaaaataagcacctggcatgtaagcaataaagcaatcgaggaaaggtgaacttatttgtgagaccttggaaagaacaacagtaagaagggaatacatcctctacctgctcaggatctgggaaattctaaaattgtatcacatacaggaatagtagaaaacacgggagctaagctggtgcctgtgagagacctgctttgaggactttaactcagagtattctggcttcagagccattgtcagcacttaacctccagggctctattagcacagggacattatcaatatttctcacttctgaggagcacccgtctccttgccca

SEQ ID NO: 115500 - DNA, 414 bp, Homo sapiens
gcccaagtaggagctggaattcagaaaacccataaaggtacctagataaaagctagaaagggagtttggaaaagaaaagaaagtaagggtccacgtcaaaaaatcattctacaaagagaaggttggtcaatttttaaggttccatatgacctcaaaggaaaatctcggttatctcccacttcctattaaagcatttcagtattaacggctcaacagtgaacttattgtaaattcagagggcgcagtggcacacgcccataatcccagcactttgggaggccaaggcgggcagatcacttgagctcaggagttcaagaccagcctggccaacatagtgagaccctatctctacaaaacacacacacacacacacacacacacacacacacacacataaaaattagccaggtgcgg

SEQ ID NO: 115501 - DNA, 654 bp, Homo sapiens
gtcattaaagaaagagttataaacaagaccctgatgtgcagtttcagagttttgcatttttgtatccggaagaatcatggtattcctaagagaactcgggcttagagagagtggagaggtaaattctgatggaaaagcaaaagaggggaaaggaaaagtgtgaccaagtggaagtagtctctcaggtgctgaagacacaagtctatgagcttagcagagatgagaggtaaagataatgctctggaggccaggcacgatggcccatgcctgtaatcccagcactttgggaggctaaggcgggtgggtcacttgaggtcaggagttcgataccagcctgggcaacatggtgaaaccctgtatctactaaaatacaaaaaaaaaatagcatggtggcgtgtgcgtgtaatcccagctacttgggaggctgaggcaggagaaccatttgaaccctggaggcaaaggttgcagtgagccaagattgtgccactgcactgcagccaggatgacagagtaagactctacctcaaaaaaaaaaaaaaaaagataatactctggggatcatctgtacagttggagctgtgagagtgaattagttttgtttgagaagggagagttagcaaggggagaaaagattgacaagaccagagtcttggg

SEQ ID NO: 115502 - DNA, 189 bp, Homo sapiens
ccaatattagtaacaatggtagtcctaatgatagacaacaaggacaaagtgttatttctcaagttgtgtggcacatgtgtgtgcaagtgtgtatgtttactggaagggaattaatacggatagttttaaaattaaataaaggcaccattatgtatgtcagaaaattactgataaatcatttttgtctgt

SEQ ID NO: 115503 - DNA, 350 bp, Homo sapiens
aggcagggttcatggaacttgagctcacagtgagggtgaaaattatattcgacagcagaaatgagcaaaaaataacaggaagaggaagttgtgattatagaaaagctctcaaatactactttctctttgaagccttttataatcatcttatgggaccttccccctattctggacctctttcaagatacttttcttatactctatcaagttacatccatgtgtgctcctctttcatctccctgatattgaccacattttgcaattggaaaactgagtcaaaaatgggggatcacctgtagtcccagctactcaggaggctgagggcaagagagtcacttgagcccaggggt

SEQ ID NO: 115504 - DNA, 410 bp, Homo sapiens
aaaattggggtcccttcctcactaactagataaccatgaacaagttactttctctctctgtgccttgacttcttctgttaacctctccacactttggttaccattcttcaaaatggtaaccatttatgggaatgttttagagacaaaatgaattagtatgtgtaaattgtagagaatagttcctgatacaggttttgttctccataaataataactattttcatcatcattaacattattatagtcttcatgttactgctgcctgcttaacatgttactggtggcaaaccaatgcatagagaggttaggtgactcatccaaggccacacagcctgtaagtagtaaagttaagtgtgcctcctcccttatccagggagataacatctgaacagggacccagcttcaaatag

SEQ ID NO: 115505 - DNA, 247 bp, Homo sapiens
acaataatttacaattgagatctaattctaaattattgtggcttgtgggccaaatctggcttgcagagcattgtaaagaatgtgcaacagggttgaggtcaggagttcaagaccagcctggccaacatggcgaaactccgtctctgctaaaaatacagaaattagctggacgtaatggtgggcgcctataatcccagctgctcctcgggatgctgaagcagggagaattgcttgaacccgggacgca

SEQ ID NO: 115506 - DNA, 693 bp, Homo sapiens
aattgttaggcaatcacaggagccacacgtttgagggaatatgtacaagccagagcagagcaaggaaagtccttaaggagactatttcagtaatctagtaatgagatacagaagcagaagattgggtctataaggttttcgattagagataaacttagaaagaacaacgaggagaactttgattatatatatataggttgcaccttgtcctgggcacttaatagtccctaaagagtaaacgtagacaactgctgttatttggaacatgtgttttttgcttatagattaacagtgtgtttttttaacctcagtttgttaacagacatagagaacatgttaaacccatgtttctttgcgcccgtgtgacattgtgaactaagtggaaaagatgtctgtgctaaaggcacccatggagtaaaacatatccacaaatactgtgtttagggaaaaggctagaaatagaaactgagagtaggaaatattgcacctgaggggctgttattgtactgtgttccttctccttctcttcctgacataccctttgttatacctttttcctttcctgaattctttgttatttctttattcttttccactttcattctttttctttcatatctttgactcaggcctgcctgggttttttattggcatgtgtggacattgcttagttctgacccattccattagaga

SEQ ID NO: 115507 - DNA, 696 bp, Homo sapiens
ggaggttgcagtgagctgagatcgcgccactgcactccagcctgggtgacagagcgatactccatctcaaaaaaaagaaaaaaaaaaattagggcatggtggcgcgagcatgtagtcccagctacatgggaggctgagtcaggagaatcacttgaaccccggaggcagaggttgcagtgagccgagatcgcactactgcactccagcctgggcaacaaagtgagactctgtctcaaacaaacaaacaaaaaaacccaccttctcatgggttaggatgttgtgccaatgcagtgagacggtgactagaagatgcagtgtttcttaacaaatgagagtattgagtgtccaggcctgtgctgatagccagggttcttaaactcgaagggaaggatgggcacttcttagcaacaagcagtccattgctacttcaaggaagggtatggctcttgggcacaaacctttcaatatttcaagagaagctagcaatcaggaaattgtagatgaaatgtcctgttttagatgttggtgattgactaaccaccaaattggccagcattctggcccgcgggcctccactttgcgcccctcaagcagtggtaaatttttgggaatgatgttgaatgggtcccgaggctcagagtaggggggggttttcaggcgggggcctccctatggccagcaggtgcggtggagggg

SEQ ID NO: 115508 - DNA, 287 bp, Homo sapiens
gggaatatggcagaaatgtcttttagtttctaaaaatctcctcctcctagttttcataagattatacacattgcaagaattaggtgtccatggagaggggctttagttaaaatggaactgagaagcaaagcagaattgatacattttataccagtaagaacttaaaactgactgaaatgtcatctcaagaagttttaaggtatctaagtaggggactttctatgtgtaagaaactgagccatcttaagaaaattgtaaagtttctgacctgttgcaaaaggctttat

SEQ ID NO: 115509 - DNA, 318 bp, Homo sapiens
aaggaatgagacttcattaattagttttaaagaagtactcagggtgattgagatgacattccattatgttcccctgattaggatgggcttggcagtttgattcatagaacactatgtagaaagtatcttttcctttggcatgaaattagttaaactggcatgtaaacacatgcaattaatatcttccctgtctaccctgtgccagtaacttaaaaaaataaaaataaagagagaaaggtaataattaatctataaagaaaaagacaatagtacataaaagatttaaagatatatttgaaaattggaaaacagtaaatg

SEQ ID NO: 115510 - DNA, 241 bp, Homo sapiens
tgattctccttcctcagcctcctgaggagctggcattacaggcgcccgccgccacacttggcatgaaattagttaaactggcatgtaaacacatgcaattaatatcttccctgtctaccctgtgccagtaacttaaaaaaataaaaataaagagagaaaggtaataattaatctataaagaaaaagacaatagtacataaaagatttaaagatatatttgaaaattggaaaacagtaaatg

SEQ ID NO: 115511 - DNA, 898 bp, Homo sapiens
ggcttcaggtctcctagcaacaagttgtaccatatgaggacggccgctgagccataatggagatatcaatgcctccacctcagatatatgtagaaaaaactctggccattatcaaaccagatattgttgacaaagaggaggagatacaagatattattcttagatccggattcaccattgttcagagaagaaaactacgcctcagccctgagcaatgtagtaacttttatgtggaaaagtatggaaaaatgtttttccccaacttaacagcttacatgagttctggaccacttgtcgccatgatattagctagacataaagccatctcttattggttagaacttttgggaccaaataatagcttagtagcgaaggagacacatccagacagtctgagggcaatttatggcacagatgacctaaggaatgcacttcatgggagtaatgactttgctgctgcggaaagagaaatacgttttatgtttcctgaagtgattgttgagcccattccaattggacaagctgctaaggactatttaaatttacatataattgccaactctgcttgaaggactcacagagctttgtaagcaaaaaccagcagatcctttgattttggctagctgattggctgctgaaaaataatccttaacaaaccaaaactttgtcaccatccaattgtagaagaaccttattaccaaaaaaatcctcgaaaagaacaaatcatgaactatcttatttatacaaaggcggtacttcttacggtcggaccacctcctttccagggcttaagttacctaccagttacactactctattcctaaaaaacacccaaaccacccagcgaaaacaaaaaccccccaaggcggacccggcaagggcgagaacccagggggcg

SEQ ID NO: 115512 - DNA, 319 bp, Homo sapiens
tatttagcataagaaagaagctgcaacaaattataaatattaaaaggttgaaaacaccataaacatcacaaaatttaatcccctcagtattacattaatcaacttcctaactcacttttatgataccttttccctatagtttttaaattgcttatttaattacctcccttaagagaattattttgttataatttctacggcaagaactgaaaggcatttgcctttccctagtatgtttaataaaaattcattttgtattattaatagtttagaaaagaaaattcagcttcacagcttgttattggtaatgagataaata

SEQ ID NO: 115513 - DNA, 835 bp, Homo sapiens
tactgtagaaggaagaaaggcccaatattggaggacaactagctatgtaatataattgtatgccttattcctttaatttgttaatgtactaaaatgtactaatatattttctaatattaaatcatcttcacattcctaggataaatcccacttggtcatgaagtttttttactgtattattggattctgtttgtgagtactgtatttaggatttttacatctgtgtttattaaaaatatacttgttgatgcaaaaagtagtaattacactttacatttatatggtattttgcagtttttaaaataatttcatacacattcctcctgagaataaatgatcaacaagagaggactatagttttgaaaaagtagatattaagtgtacaaatagaaaatatctacaaatgggacaatataagtttttttggtcacctgaggactatagttttgaaaaagtggatattaagtgtacaaatagaaaatatctacaaatgggacaatataaatttttttttttgtcacctaagttctagagggccaacagtgagactgagattgaagtaaagattagtgtagagaaaagaatacaggaggttgaaaaaggatttttgatcaaacaaacccagggagagatgctgtcactctccagggtcccagggaagaatgggattacaggctttgtgaaatgtctagcactgtactgctattctagatattttattaatacaatgtctaaacaacctggtttgaatttacaagtaaagctttcctagttattaaacaatatttggctttgtgaacttctgttttgattccttattaatctgcatatacca

SEQ ID NO: 115514 - DNA, 395 bp, Homo sapiens
tgtgactagtagtaagtaaaacaaaggagtttctttatgatgatgcaacagttctgcatattctgattgttgtgatggttacatgaatcaacacatgtgataaacttttatagaatcatattcaacacacacacacacacacacacacaaagcgtgcatgtaaaaactggtgaaatcaaacagggtctgtatctgaattcctagcactgtaccaaccatcagttaactggtttttggcaatgtcctgtgattatatgaggtattatcatcaggggaacctccctgaaggatatacagacactctgtactacttctgcaactacttgtgagcctatttcagaacagaaattatattttaaaaaagcaggaactatgcaacagagggacagctactc

SEQ ID NO: 115515 - DNA, 238 bp, Homo sapiens
ttttttctttctattctttcattctctgtttcatttttatccaccctaatatttatgtcctttcttccttctgcttgatttgggtttagtttgcttttctccttttagtttcttaaggtagaagattagttgacttgggatctttctttttgtccttttttttttttttttttgagacagggcctcactctgtcaaacatgctgggatgcagtggcacaatctcagcttgctgtaacc

SEQ ID NO: 115516 - DNA, 398 bp, Homo sapiens
gaatgaaagaacatgtaaataagaaggaagatatcccacgttcaagaatttggagacttaatcttgttaagaagacagtactacccaaagtgatccatagattaaatgcaattcctatcaaaatccaaacgatgttatttgcagaaatagaaaaacccattctaaaatccatatggaatctgaagggagccaaaacaatcttgaaaagaagaagaaagttagaggactcacagttcctgatttatttcaaaagttactacgaaactacagaatcaaaaactgtggggctgcgtgtgatggctcacacctgtaattccagtgctttgggtggctaaggcaggaggattgcttgagaccaggagttcaagaccaggctgagcaacatagccagaccccat

SEQ ID NO: 115517 - DNA, 335 bp, Homo sapiens
  misc_feature (16)..(16): n is a, c, g, or t
gctgttcagaggatcnctcccgtatagacatcataaatatgtgtcattttgagatgtggaagatacattcctataagataaacatataaatgtaaattattgaaagaaggctatttacataggggtttttttggcttaaggtttataggtctcttaaaatggctacatgtgttacataatttcaaattcatatttgggcttattttttaaaagcatgaaaactatagaactcttcagaaacgtatctatggtgagaaaaagaatacttagaattttcaaagatgcggtattctaataaaaaataacaatgctaattttatctgaaaaatacatgt

SEQ ID NO: 115518 - DNA, 549 bp, Homo sapiens
cctaggcgacagagcgagactccatctcaaaataataataaacagttagttaccagccataaaaataatctgttttctgctatgttgaatattgctctttttcaagagcttaaggggtatgtctctcctgtcttctctctgtccctaaaaatgagctacgttgtcttaaaagatgaaagggccaaggcctggagcagtggctcacgtctataatcccagcactttgggaggccaaggtgggcggatcacttgaggccaggagttggagaccagcctggccaacatgacaaaacctcatctctactaaaaatataaaaattagcctggtgtggtggcacatgcctgtaatcccagctattccagaggctgaggcaggagaattgcttgaacccaggaagcagaggttgcagtgagccgagattgtgccactccagcgtgggtgacagagcaagagtctgtctcgaaaagatgaaaggtcctagtaaaaactgcttagaaggccagctgcagtggttcgtacttgtaatcccaacactttgggaggctgag

SEQ ID NO: 115519 - DNA, 926 bp, Homo sapiens
atagtaaaaccaggatgttgacattgaaactgtcaaaagacagaacatttctaccagcacaaggatccttcatgttgccctttatagcccaggcacttccctcccacccagaaaccctccttaacccctggcaacatttaatgttttccatttctgtagttgttacttcataaatatgatacaaagtaaatcatatagtatgtaactttttggagttagcatttttttcactgtcagagtaattctctggtgattcattgttgcgtatttcagtagttcgttacttcttattgctgagtaaatccatggtatggatgtgccacagtttgtttaatcattcacctgttgaaagacatcaaggttatttcaaggttttggctattatgaataaagatcctataaacattcttgtgaacagttttttccctctggcatgcatgctcagaatcatatttgctgagtcttatattatttgcatgctgagttttaaaagaaactgccaccagagtggttgtaccagagactgtcaatccagtttctctgcatccttgccagcatttggtgctgtcaatattttttattttagctattcaagtgggtgtgtagtgatatctcattttggcttcaacttgcataatagttaatgatgttgaacactttttcatctatttatttactgactttatatcctctttgatgaaacgtctgttcatgtcttttgatcattttctaattgaattgtttgtggagctttttttactgttgagttttgagaatttattctatattttattctaggaaatagtcctttgtagctgagtgcagtggctcatgcctgtaatcccaacactgtgggagggccaaagcgggcagattgcttaagcccaagagttcaagaccagcctgggtaacatggcaagacccca

SEQ ID NO: 115520 - DNA, 788 bp, Homo sapiens
aggattcatgatgttacacattttaaagttctttgcaagctatagtaatagttccaggtaaataaatggaataataaattctgtaaaaattataaaaacctagtctgttgataatgggctcttttaggtagagtctagggtaggaaatcaaacattatattcatcatggtacttgaaatatatttaagctgaagctgtacactccatcatgtttttgatatatttttccttggcattacttgaaaggcatgctcatgaaactggatttggatctgtttcatgttttcacttgcgttctctgacccctacttagagggcaccaggtgcttcctattctaaccgtttgcaaattcaagacttggttggagggccattcaggggactggtgtggggttagataggatctggacacagcgactccctcgctcctgctccagtattttgaccttaatttgaacagttcaatgaactggcaactgaagtcgttttttcccactgaactagacctttcattgttttgcagaggaagatgactcatagccaggttctaccattgtgctaaagtgaaattttagtctaggactaaaggaacacaggccaaactttctgtctgagctgcagagtattgaaacttagattgtgagctgggcaggaattcctgtggccctctgtgtggagttgctctcaaggaaaaggagcatttaaatacgtttttgactccaaatttaatttttagtaatatagttcaaatgtcctttaaaatatcttaagtaatcagactgttttct

SEQ ID NO: 115521 - DNA, 577 bp, Homo sapiens
tcgtcttttccagatacagatatttattggcccataaatatctacacaataaatagtatccaaagcaaagtttttaaaatcgaatgcacactgcataatagtctctcttgagaattaacacagaaaataagtagaggaaagcaaaggaagctggatttctgggaaagcctacattcttgtgtcagactttggaagaaaaataaagtgttaccacagactttgttctccgtgaaacccctgagcagcaggattgagttctgacgtgaatgctgggaggtgtttctcagtgagggcacagggcactggctgataaaacctggggccactggcctgtttcgcaattctggttgagttgttaatatttacatatgtggtttccctactataaggtctctttagtttccaagtttttagtcatccccaaagctcctcttatatccatccacagaccagacagtgtcagcagttcctttctatgaagcagacacgggcattaggaaagccttctttgcctgagtccgtgtattgccacctaagctttccttgtctggtctggagcaaaccagtcttctgtaga

SEQ ID NO: 115522 - DNA, 231 bp, Homo sapiens
tctaaactcatctggcaactaaacatgaccaacatgaatataaagctgttcatggctttaatttatcccattttgtgtgttttgctgcagaaatattaactttttaattacaaagattgctatcccagatcccactggatgaaatgcggaatgtacactctattactactttccaaaatctgaaataatctgaattccaaatgcctggccccaggggttttggataagggt

SEQ ID NO: 115523 - DNA, 525 bp, Homo sapiens
gcagggaactgggggacaatggacctacaattgaggaagcagaagttgcacaggcctcaggagaggcagccaaggatttacaataagcggaggaggagctagagagggcaaggagagtaagcagctgggttgtaaggtggggagatggagcaaaactacgtgccagaggagctggggccagtactccaaaaggagaccaaagactgggtaaaaccaaactcagaacaagagctgagttggatatgagtcagtaacaggctgggctggcctgaggaccaagggatgagctgccccagtgagatgctagaggattcattcattcatttattcacctgatgtttactgagttgcctgctatgtgccaggcactggcacagagcagtgggcaagactgataaggttcctgccctctcagagcttatctcaagttagggagatggccaataaaaaagcaaccaagtaagtaatggagaaaatctcagaagtgatgtgccacagaggaaagatgggaaatgataggaacaa

SEQ ID NO: 115524 - DNA, 371 bp, Homo sapiens
tcttgcctctttggtgtcttttaagccaacccatgactggctgtgccagtacagtgtggttaccagactgagaagatatttgcaggaactaggagacagagggtataaggagaaagcaaacaatgggcagtgttggaaacttaaattccaattgtgactgtcactgtcttgcgtgtgatgttggataagccccatttcctctctgggtctcatttccccattgataaaacatggttaataatatggtgctatttccttcagaaaattgcttggcggtcaaaatgagataaaggatgctaaagaattttgtaaattaaaaagtgagtttgcaagaactctgtgttcctccatgttccacccaccaacaccaa

SEQ ID NO: 115525 - DNA, 340 bp, Homo sapiens
ataggtagatccgtgtatacctagactgacaagcatataagcatgaacatatggaccagcacgatggtactaacggtacgaagactgacaaagagccagtgttggaaacttaaattccaattgtgactgtcactgtcttgcgtgtgatgttggataagccccatttcctctctgggtctcatttccccattgataaaacatggttaataatatggtgctatttccttcagaaaattgcttggcggtcaaaatgagataaaggatgctaaagaattttgtaaattaaaaagtgagtttgcaagaactctgtgttcctccatgttccacccaccaacaccaa

SEQ ID NO: 115526 - DNA, 344 bp, Homo sapiens
acacctccgccccagcatcatccccaccgtcagcagcaccttcatcaccaagaagcagttgttgaatattcatgggtgctgtgctgggtgttctctggctgagtagatggttggggacctcctaccatatggatggaggaagaaggggaggaagagagagaaccacaaagcagtggaccctgatcacaagggaatcatcttcaaaagctaaaaagaaatcaccagaccaggcgcagtggctcacgcctataatccaagcattgtgggaggccaaggcgggcggatcacttgaggtcaggagttccagttcagcctggccaacatggtgaaaccctgtctctact

SEQ ID NO: 115527 - DNA, 190 bp, Homo sapiens
aaaacaaagcaaccccagcccattccctgtgcctcaggacacagacagttggacccagttaattgaaatttaagcttcgggcaataggatttgtacaaacaccaagaaaatagcaggaggatgctgacagcatgcaaatcgatgagatgggagccctttaagacaatcattcagtttgggcagcccaggt

SEQ ID NO: 115528 - DNA, 564 bp, Homo sapiens
acttaggatttgagcatctttctgttatgctgttgccccactcctattgcaatactccccttcttaagaaagtttttctagactaatgtctagattaaacttcttttctttgacaataatgatgccatgacttggacaaaatgcccattgcctctgggtcctgctttcttcacccagtgctgccttagttggactccttgtgcctctccttggctggggaaatcagaatacacagtggtaagtcatgatttctaatccagtgctccagacgtctgtctgttgtagcacagtgagaagttgacttatatttctctcatttttgtcattttcttctgtttttccatctttcccttctgccttttttgagtgtggtgaaagcccctcattctctcctgagaatcatacctgagttgaaatcccaaagcctctagcaccagcaggtgtcccttccattatcatgagaaaccgtcaatttggctgttgttctccagaaccctcaactctggggtatgctctgtgttactatggtaataattccacccactttcttccaaaaaaaaaaat

SEQ ID NO: 115529 - DNA, 482 bp, Homo sapiens
gacgctctctctgtggggaaatcagaatacacagtggtatcccacttctaagatgcctgatctgaaggacagtaaaacaactgacctttgccagcatgtaaaacacatggtttaactagtcctccaggaacaacactgagcaatcctgacctgggactactttactcggccatctcctacttgagatgctccttgtctctctgttcaaggacaccttttctgagcctttcttgaacaagagtggaggaccgatagggcgattaaactgtccttgacacaactttaggttggtttgcctaaactactaggttctcaatctatatgaacctcctccagcattctaatttgtttgctctgtcttagacccagaatcccaccccatgtgcctaaccatagaccaatcttcctgccttaacttctctgctaccaattttgatgtagcccagtaagtttcagcatcatccctcaccaccccacagtcc

SEQ ID NO: 115530 - DNA, 509 bp, Homo sapiens
acttaggatttgagcatctttctgttatgctgttgccccactcctattgcaatactccccttcttaagaaagtttttctagactaatgtctagattaaacttcttttctttgacaataatgatgccatgacttggacaatccttgtgcctctccttggctggggaaatcagaatacacagtggtaagtcatgatttctaatccagtgctccagacgtctgtctgttgtagcacagtgagaagttgacttatatttctctcatttttgtcattttcttctgtttttccatctttcccttctgccttttttgagtgtggtgaaagcccctcattctctcctgagaatcatacctgagttgaaatcccaaagcctctagcaccagcaggtgtcccttccattatcatgagaaaccgtcaatttggctgttgttctccagaaccctcaactctggggtatgctctgtgttactatggtaataattccacccactttcttccaaaaaaaaaaat

SEQ ID NO: 115531 - DNA, 805 bp, Homo sapiens
acttaggatttgagcatctttctgttatgctgttgccccactcctattgcaatactccccttcttaagaaagtttttctagactaatgtctagattaaacttcttttctttgacaataatgatgccatgacttggacaaaatgcccattgcctctgggtcctgctttcttcacccagtgctgccttagttggactccttgtgcctctccttggctggggaaatcagaatacacagtgatggagtctcactctgttgcccaggctggagtgcagtggcacgatctcggctcactacaacctccgcctcccaggttcaagagattctcctgcctcagcctcccgagtagctgggactacaggtatcccacttctaagatgcctgatctgaaggacagtaaaacaactgacctttgccagcatgtaaaacacatggtttaactagtcctccaggaacaacactgagcaatcctgacctgggactactttactcggccatctcctacttgagatgctccttgtctctctgttcaaggacaccttttctgagcctttcttgaacaagagtggaggaccgatagggcgattaaactgtccttgacacaactttaggttggtttgcctaaactactaggttctcaatctatatgaacctcctccagcattctaatttgtttgctctgtcttagacccagaatcccaccccatgtgcctaaccatagaccaatcttcctgccttaacttctctgctaccaattttgatgtagcccagtaagtttcagcatcatccctcaccaccccacagtcc

SEQ ID NO: 115532 - DNA, 456 bp, Homo sapiens
ggctggagggagctcactggggcactctgtggtggcgccctgggtggcaagcaagtgacaggccactagccaggacctgcccatcagtcctatcatgcaaacaaacacccttcaagaggctactgaattgcaaagggagaacggctcgatgctaatcagagcacaaagaagaaaattagagggtgcaaaagttgctgttttcacagaattccgtggagctttgaaaacggaaaggctgtttgtgttcataaccaccagccctgtctcctttgaagttcaggccccgccttcccctgctatggctgccctccttcttggctcttgaaaatggctatgataggtgtattctcttccccaaagagtggggaatgtcaaattacgttattatgtttattgttccagagtgcctgccgagagcagtcatctccaatttggaagagagtctgctgcacctga

SEQ ID NO: 115533 - DNA, 574 bp, Homo sapiens
gggacagacaagaaccctgtctttagctgaactaaggaaagtcctgcaacagcaatagactaaacaaagactattgtgcctagttgaactattttttatgcttcttcaggtaaattgcttatatgtgtaggcaaagtcattgttttgtttgccctcagaaaatctcctgtgttattcccatttagcagaaaaatagaaacagagaagatcgagtttccctgcttaaggcaaagaaggctgttgatatgactattcttgacttttcactggacttttttcaacaagactgtacatcattaggacagggacttagtcacatcatcactcttaaaaacttaaggctgtctctgaccttatgaatcatcttccgcaggggaacattatgtattcagttttggaccacacactatttttgaggcactgatgaaagctctggaccctcctccaagaaaaatgcacatatgcacccaccaaacttggcacttacattcagtggcatcatgaacctccgtccgcagacctcctgggggccgatgccttctggccaagaatccctgatctaatgaattttaaa

SEQ ID NO: 115534 - DNA, 206 bp, Homo sapiens
tggtgtggggaggccccttgctcagatcagcctgtgccttccccaggccccggcccatgcacctgcccttccgtaggtctgagcacctgttcttccacgcccaggacgacctggtcctgagtttggccgggaccccctgctatctgccgtccacaggcctggtgacagagaaagcagtgccctggaacagcagcccggctgtgggg

SEQ ID NO: 115535 - DNA, 125 bp, Homo sapiens
ctcactctttcttttctctttaacattcctctgcacagcattacttgcctcttcacagaaaacctatccaaccctctagaacaagtgcttatcattattttatcaagttccggaaggagcgagac

SEQ ID NO: 115536 - DNA, 598 bp, Homo sapiens
tcagcccagctcctgatttggtcaaggttgtaaacgcctttgtgattgccaggggtcattttacacagagagctacgtgcagcgtcgtagctgagcatctgtgtcgtctgtgttctctgtgaccttgaactcataattattgctcttttgttacctctgttaagcagtattcttggccgggcatggtggctcaagcctctaatcccagcactttgggaagctgaggcgggcggatcacgagttcaggagatcgagaccatcctggctaacatggtgaaagcccgtctctactaaaaatacaaaaaaattagccgggcgtggtgtcgggcgcctatagtcccacctcccaagtagctgggactacaggcacccaccacacctggctaatttttatatttttaatagagacggggtttcaccatgttggtcaggctggtgttgatctcctgactcatgatctgcccgccttggcctcccaaagtgctgggattacaggcgtgagccaccgcacctggcctaaaacagcgttttggggcaggaaatgacaagagaaaaacatggtgaccaggtgagatggtggtcagggaatggcatctgg

SEQ ID NO: 115537 - DNA, 420 bp, Homo sapiens
tttgcataatttatgtcctcccctctcccttggtgtcttggaagagaaggctttgctaccagttagctgactatggaataaatgattcttcctttacttagagccttcttagtcatggccttgtcaaagaagaaagcagcataacaccgctaacaattataataaatagtttagcttggtgagagagaatgtggctttgaatctcgatctctcgatgtctcttacatacacattcatggtactaccagctctgggtactttattacagacatagaagcaagtagccttatttcattgtcacctgagcaacaggaagagagggtgaacatttgttcagtgcctgttatgtggtagatgtcttggttcttgtgttatttcattcacttccccaaacttcctacaagatgggtattattactg

SEQ ID NO: 115538 - DNA, 137 bp, Homo sapiens
aggcccactgtaaccactacttggctaccatataagtttattcaaagccttggtactctgtgattaataggtggcaaagccagccaggtttgtgtctctgcctgtagggtggcaagttcccctagccatgagtcggt

SEQ ID NO: 115539 - DNA, 385 bp, Homo sapiens
ccaagcctactccacacccacctccatcatgaagccccttccatccccatcctaaaccatatttgtcatctgaaactctgaagacactcttcaacaagttccatttctacaaactaaaacttttccctaaccacaaacccattttaactatgtttgattcttttttcagctgaggagaggaaatgactcctctctttggctgtcatcttccactggagttcagtaattctcctagtttctggaagatgaaacgctctacatcttccatgcctgtggtttatatttcaccaagtggtgtcagcgctgacagagtaacctcccatttttattgagccgcacacaatgtaattgatgacatctgctggggctgatattttaagtgaag

SEQ ID NO: 115540 - DNA, 396 bp, Homo sapiens
gcaattaggtttactcacagataaacacagactgcaacaaggttgggtatataggccgcagtgctgtgagctctggaaaaactgtgttcattaaacccttcttggtatagtcccatagaggactcagaataatcatgtagaaacagtcacacaaaacttgcttgtgtatcttttggaaaaatgctgttaaggacaaaaagtctatcttgtcacctctagcaaaaagcatcaaactaatttcccaagatttaagtgccatgaaatactgacatcccctgaggaacggacccgctttctcctcagaatcagtgcacatcatgtaacttaccatgattctctgggtgtgatggtggccaaagattttggacacaagctgacacttaatgtagccaacag

SEQ ID NO: 115541 - DNA, 218 bp, Homo sapiens
tgacagtgaagattttttttggaaagaaaatcatttgacaaagcatattttgacctttgatttagatattaatttgtagaaaaaggcaatatgctatggctaaattaatttgattatgatccttaagagatacattttactttgtgaatgctgtatatacacatataggaaactaaaaagttttatgaaacaatattccaatattttctgttatattt

SEQ ID NO: 115542 - DNA, 328 bp, Homo sapiens
ttacctacttgccttctcgaatgctgtggactgtccaccacctacttccccagactgtagactgccaaatgcctgtttatcttgtatcgcttatctcttggcgtcctccaggaagccttcctgagctccccgaggtggcccccggctcccttccccatgcctccacagcactttgtgcaggtctgcaggacaatgctttccagaccgtcttctaatcattcatgtgtctgcctcacccagtagactgccagttcctcagagcagcgttgtattccacactccccttgagcatagctcctggcacacaggagaccctcagtgcctgctg

SEQ ID NO: 115543 - DNA, 298 bp, Homo sapiens
atacatccggttacaacctctgcccttaagaaaatcaagttgtctatcgtaagtttaaatgtacataaatcagaccagaagaggcaactggcaaacagtccatgaaacagcattctataaagtcttatttccatatacttatcccaaattagtttgttgcccaaattattattttttttttttgagacagtcttgctctgtcacccaggctggagtgcagtggcacgatctccgctcactgcaagctctgcctcccgggggttcacgccatttttctgcctcagcctcctgagtagct

SEQ ID NO: 115544 - DNA, 806 bp, Homo sapiens
gccagcccctaagggccaggctgaggcccatgtttccagggcgaggacccagccaggatggctcagcactctgcaggagtcagacactggctccaggaccctgacactgcaagctgacatctgatgcacctggccacaggtgtgcgacaggtctcaaaacagtggaggttagagacggaaacccttttccacaatgcaaacccagagaaagcagtaactcagggacactgtggattgtcccatctgttctgaaagatggaacaccactgtttcctgtacttcttcaattatcagtaaaccgtttctggtatatagttctaagatttttatccacatgtggactcacgcattcataaccacaatcaggacacgcggcggcttacgtggcccctcacacccgtgctgctgtgcccccagcaccccggggatggctcctcagggatgggccgcgggaaggaatcgcaccgcgcggatcctcccgatctgggcccctcttgcacggaggcccctgggatgcagtcacgtggcagacgtgtcggaagtccacggctcctcactgcccagacactgcccctgcagagatggacatggcgtgctcatctattcacctgtgtccctgccagcagaacagagtcccaggtggccacatcctggccagaaccagtgtcccgaccggcatgtgggcaggtggacatgggtctgcccatgggtttcggcttgcctttctctaattgctaacaacaccaggatagccccagctgccatcctttacaccctctttggcaaactgtctgctcatttctttt

SEQ ID NO: 115545 - DNA, 393 bp, Homo sapiens
cacttccttgcacattacctctcctcagagatgccttcaccacttaattttaaagtagctgcccctaatcttgggcgcttgctatcccatcacccccttgaatttggttgagagtactcagcaatatctgaaaatattttaggtactgtatgtctccttccagagaaaacaattcataagggcagtgacctcttccacattgttaggcctagcacctagcagcaagccggcactcaaaaaacattggtgaataaataaataaaggtcatttacgatacaatctctggcctaggtggttcaggggtttttaaaacaagcagaggaatgcacaacgtgcagagaagaacattctctgcaagataagtatctggaccaaggtgaggtggagaggcc

SEQ ID NO: 115546 - DNA, 274 bp, Homo sapiens
tgtgtgcgcatgtgagtatatttatatgcatgtattgtgcctatgtgtatacgtgtatatgtacatatgtatgcatgtatatgtgtatatgcacaagtatgtctacatgcatttatgtgtacgtgtgtgtgcatgtgggtatatttgtatgcacgcattgtgcctgtgtgcatgtgtgtatgcacatgtttgtgcgcacatgtgtgcctgtgtgcatgtgtgtatgcacgtttgtgcctgtgtgcatgtgtgtatgcatatgtgtgtgcctatg

SEQ ID NO: 115547 - DNA, 871 bp, Homo sapiens
ttctctgtaccttacccacttatacttgcgattgcggccgatcttggtttatttccattgattttttatgtctactttatacagtactacagtgtttttatcactgtagctttatagttaagttttgaagtcagaaattatgagtcctccaattttattcttctttttcaatattgtttggcattttggagctccttgcaattctatatggctttgagggttaactttctcatttcttctaaggcaggtaaagtgctctccggacgtatcatctgctagagtagcacgggctgcctctatagactgccacgactggaatagctaatacagcatgaatgcagaatactgtgtgacggagcttaagtgatacagtaactacaccttagcgtctagaatgcgacaggacaaagcacttgattgtgataacattgatctgtgttcagctcttctggtcgttatagacagtgagtggccaactgttgatggtcgcacaggaaggtgtatacaatttgggggagtgtaaggatcagattttgcacgcttacccctatcgcgactcacaattatgacgtctcatatcggttggtatcttgtattattgccgcctcttatgtctgctctttaaccgaatagtcaaagagaaaagcggaagaagatagtcttagtcgaaccactatcctgccatgagtagtagcagatcgcgcgtttctaaattagtccatccctttatcactatcatttgcgatagcggtggcggccgagtcgggaatctacggccggtgccgcagtttcgggagtataagtgtactgcgaagcttgctgcggtataatgtacgtatcattacttgatccttttaacatctttactact

SEQ ID NO: 115548 - DNA, 274 bp, Homo sapiens
cctgacctcaagtgattttgctttgttgttacagtttataatgacccaggtaatcaaagagtggagatggggtcacttaatcttacacttttggggctgtgttccaggctctgtgctgacaactttttgtgtattatctcatttaattctcaacagccaacctgtgagggaggtgctgttattgttcattttacaaatgagcaaacagaggcatagaaagataaatggctgttcccagggacatttagctggttgatctggaattgaagctcca

SEQ ID NO: 115549 - DNA, 199 bp, Homo sapiens
ctcccgactgttctgtcagctccactgctgtcctgcttgatccaatttccacaccaaaactctaatcatgtcaccctctctgccatcctaaccccactgaaccctctgttggttttctgttgtttgtgagatcatctccatatccgagacctggccctcgtggccctgcatggctggcccacccaacctccatctttgt

SEQ ID NO: 115550 - DNA, 351 bp, Homo sapiens
gctatacatgtgataaaatcgtatagagcaacataaaattaataacaaatacatacacacatacaaatacatgtgtatgtgtatcaacctgaataagctctgtgggttgcagcaatgccagtgacccagttttgttattgccctatagttatataattgggggagggagggcaaagagtgcctgcgacctccctgtacatttctttgcaactttcttattataatttttttcaaaataaaaatacatatacttctctaagaaggataataaacctagaaggaaaaactgaaatgtgagaagtaatggtgagaaaataaattagtaaacatgtttttggaaaacctaaatga

SEQ ID NO: 115551 - DNA, 139 bp, Homo sapiens
agttcaggtggagggcacaggaggtggagacagcagagaagagcttcacagagaacatctaggagggacagctgaagaagcgctttggggccgggcgtggtggctcacgcctgtaatcccaacactttgggaggccgag

SEQ ID NO: 115552 - DNA, 679 bp, Homo sapiens
ggccgacgcgccgagcgcgggtttccgctcggggcgggcgatagagacagcgcgtcgcgcctttagcttctttcccagactccggcccagctcctgcgatctccacagcagcctctgaggccgcccccagagagcatcaggatggctgaggaaaagggtggaaagcaagtcctggaagaatctgcatttgaagaaatggaaagagattttcagggagttctccatgaactttctggagacaaaagtttggaaaaatttcggattgaatatgagaggcttcatgctgtcatgaaaaagtcttatgacaatgaaaagcgtctgatggccaaatgcagagagctaaatgcagagattgtagtgaattctgcgaaggtcgccactgcccttaagctctctcaggatgatcagaccaccattgcatccctaaagaaggaaattgaaaaggcctggaagatggtggactcagcctatgacaaagagcagaaggccaaggagacgattcttgctctgaaagaggaaatagtgaacctgaccaaactagtggagcaggggtctggactgtcaatggaccagcatagcaacatccgagatttactgaggttcaaagaagaagtgacaaaggagagagaccagctcttatcagaagtggtaaaattacgagaatccctagctcagacca

SEQ ID NO: 115553 - DNA, 319 bp, Homo sapiens
cttccttcatgaactgtagagcttcctatggagagcatttgtggtagccacgcaaatcctttagtaaatctttcattctctttattaaccttggaataatttgaaaggtttttgaattgggactatttcttttttttttcaatccactcaacatttattaaattccttaataaatcattggaggaaagcagtgatatttttgagaatattgcaattaattattgaggatgagaagaaatgtttgacttaggatattatagataacttaagggcacttaaactttttttcccctatgtaagaaataagtgccttggaaaa

SEQ ID NO: 115554 - DNA, 826 bp, Homo sapiens
catgtaattctgtgttacttaatttccctacaaacagtattttcttactgcttaatctcagatgttgagagtgatttaacatttataaaatgtgttctttttcttcatgtatgtggctttctgtaatgatagggagaattattcacatacactaagaaaaaattactcacaagctggccatggaaatctgggccccattaggttgactgggagagcagtgattttatgtgtgtgggctcttaataatttctgcttccccaggccagcttcgccttgttcttaaagaaaaaccagtgtgcactcagtggttctttgtttgaccatatctcctgatgtgttgttttatgcttttggaaatatgaactctgaactcttgattttctgtggaataattaaataagctggtctaagtagcatggtctttaagcctatagtaaatgttttattcatacagctcacttttgtatattaatatttttaatgagaaataatactgatgtttttacttttggaaattttgatttcttttgccaaaaaattgtttttttttctttttcaaaaaaggcctacctctttgtggttagaacaactttgaagagcatctttcttagttcatgtgctaaaagttaatgtaatagaagcacaaagactgtaaccgctattactcgactaaaaaaatagtttctaaaagtatgagatgcataagaacaaaatctataattttagttatgcatctgaatgtctgtcaccatgatgacaacttttaaaagaaaataaagacagaactaatgccactttaaaggctcaaattatgaatgtggagata

SEQ ID NO: 115555 - DNA, 453 bp, Homo sapiens
gaccttcctctacacaaacaagtcttgttcccacactgccttccctggtgtcttttcatcatagtcttaacagaatcacctccgataaaagcactgcttctagagaatgtgcccagggaagtgactgttcccccattctccttccccctttccctcatagatacttctgtacccaaatccgtattgcttatgtgacttgcaagcaggtcaaaaagatacctgaattttaaatactctgtgggggccagaccatctgatccctgcagccatttctatgatcccctggctgatccttttctatggagggaacttctcctcacctaacccatgctagattgctttctttcagtaccagagtctctgagaaaaggaaaaggcattctgacttgcagttagaatgttgcactgggagtctggactgggcatggtagagctggtccagacaaaggcaag

SEQ ID NO: 115556 - DNA, 416 bp, Homo sapiens
atgagactcagggccaagaaattggtaaggaagacaaaataacatgaacaaacatgcacaatgataggtttcagagcagattatgaaagtcattgtgagtcatcggtggtagtactgttgtttaaaaagaaacagtgtctgccaggcgcagtggctcatgcctgtaatcccagcactttgggaggctgagacgggcggatcacgagttcaggcgatcgagaccatcctggctaacacggtgaaaccctgtctctactaaaaatacaaaaaattagccagcctggtggcgggcgcctgtagtcccagctactcagaaggctgaggcaggaaaatggcgtgaacccgggaggcggagcttgcagtgagccgagatcacgccactgcactccagcctgggccacagagcaagactgtct

SEQ ID NO: 115557 - DNA, 288 bp, Homo sapiens
tatgtagaaatatgttttcttacatctgtctgtctttcttgcacaatcctcaggtccagacctggtttattatctctgtttcctgatagcacagtgcctataacacagtgggtgccaactaatgtatgaaatagaggccgggcacgttggctcacgcctataatcccagcattttgggaggccgaggcggtggatcacgaggtcaggagatggagaccatcctggctaacacagtgaaaccccatctctactaaaaaatacaaaaatttagccgggcgtggtggtggg

SEQ ID NO: 115558 - DNA, 222 bp, Homo sapiens
gagaattgcttgaacccgggagacagaggttgtggtgagccgagatggtgccgttgcactccagcctggacaacaagagcgaaactctgtctcaacttgagttgtagagcctggactagagccagcctcatgttccctttaccacttgcccttggagggagagatgcacaggttaagagcatcttattccgtcttttctttcttttctgggccagcaccctt

SEQ ID NO: 115559 - DNA, 335 bp, Homo sapiens
taagtgctatataaaagtgttagctattatatactaggcacatgctaagaactttacattcaatttctctaattttcagcaaaagatcctacagggaagtaggtgctatccccattttacagaaatgaggaaagagaggctgggcacagtggctcacgcctgtaatcccagcacttcgggaggccgaggcgggcagatcacaaggtcaggagttcgagaccagcctgaccaacatggtgaaaccccgtctctactaaaaatacaaaaattagccaggcatggtggcacccacctatagtcccagctactagggaggctaaggcaggagaatcact

SEQ ID NO: 115560 - DNA, 691 bp, Homo sapiens
agcatgtttttcctcctccaggagacattcctccgcggatcagaccatgctccttccacattgaaagcctgtgctcacactttgaatatgttgactgaaagaccttcatgagccggacacgctccttggtgttacacttgcaggagttgccgatggaggcctgcagtactctcggagttgttggcagctttaaaggtagggtccagaagagtcatatatatttttataatctatggattataaaattgataacaagataatgtcctaggaattataagcaccccaaaggtggggtttttttagaaacccaattgtttagaaaaaaaaaagttctttctttttgtgaataggatataagaatttaatgaatcttatatcctatatctttgaaaatgttctcaaaacttgattcccaggtaggactacacaaacagtggtagagagaattgcatattgccatttgataacaatatcataaaacaatcctgtctctgaaattttgtcacagtggccttataaacctatcagtggcagtagatggatcaaaaaacaaaataaaaaggtgtgcaattgacaatgtttgtgcccccaaccccaaatccatacatcaagcccttaatcccaatgtgttgatatttgcacagtgtatcctttgaaaggtaatcaggtcatgaaggtggagcatgtgtgc

SEQ ID NO: 115561 - DNA, 222 bp, Homo sapiens
aaaaagtctgtaatcaccttgatctggcacttctaggagtttatcctaaagccatggttctcaaccaggggggattttgcaccccatccaccccagggaggacatttggcaacatccgaagatagttttgattgtcagagctggggagctgctactgtcctctagtgggttgaggccagggatgctgctgaacgtcctatggtgcacaggacaatccttaca

SEQ ID NO: 115562 - DNA, 455 bp, Homo sapiens
agacatctgagatcattcttggacgaatgaagagaggatttcaacaggtggagcaggaaggggaaagcacaggattccaggaggagggaaaaacataggcattgatgtgtgttgactagtatttctgtcatctcaggaatttgcccttagtaagaatcctcaagtgccttaaagttaggaccttaggaaattgtgttctctttcaggctagccaaggctaattaacatttttggggtccagtgatttcttataatgtttcctggttccataatgtatacaaaattgaggtattaaattattaaatgatgataaaacactatgctgctttaggggaaggagtacagatgtctgcaattcacttcgaaaggcatccaggaaataaggtgatagaaggatggatagagggatagttagaaaataaacaagtttaataaaatattaacagtagaatcca

SEQ ID NO: 115563 - DNA, 402 bp, Homo sapiens
ttgtgtttttagtagagccggatcacctgaggtcaggagctggtcttgaactcctggcttcaagtgatctgtccatctcagcctcccaaagacctgggatcacagacatgagccaccacgcccggcacaaaatttaaaaatttaaaggtcattatgcttctggtatcatcttggcaacagctttcagaaagtctacacaagttgtgttcacagattctgccttggtttgtgtgttgcttgacccctacaaagaaatcctaaaaatcatttgggcgtctcctccttatggagccagtgttgcttttcattcagtggctggtgcttccttaaatattagtcattctgagattatgcaaatatctgtgccttccagccacgtaccccaaacgaaattcagcccaa

SEQ ID NO: 115564 - DNA, 426 bp, Homo sapiens
tgagatggagttgtactctcgtccaggctggagtgcaatggcacaatcttgggtcactacaacctccgcctcccgggttcaagtgattcttgggcctcagcctcctgagtagctggggttacaggtgcccaccaccacacctggctgatttttatatttttagtagagatggggtttcaccatgttgccaggctggtcttgagctctagacctcaagtgatccacccatcttggcctctcaaagtgctgggattacaggcgtgagccactgcacctgacctaattcttattttttaagaagtgtatctttacattttagtgtttcatgccataaggaggtagctagatcttacatgcagtaacagatgcagaagcatggagagtcttggttacacatggataagaattacctgaaagaagatgagt

SEQ ID NO: 115565 - DNA, 869 bp, Homo sapiens
tgtctgtaaggtcataatgagcaaacttaaatgggaaacattaatttggcagctgacaacataaaataaatctagctgccattagcaaggacccttcttaaaatttttataaaagcacagctttcaagtttattgcacatctctttaaaaatgtatttcaaagtaacttcagagacatctatttggcacactcaaacttttggtgatgaaattcccttttgccactaaaattcattatttgaatctccatggtaaattagctttatgagttagctattgtaattatttttctgtgaagcaaaggcaggagtagagacaatttcatcatcttatcatcatttgtatgtggaatcactaaagagtttacccatgtggaaccatgaaagtccctgatttacccctctatcagtaggcataaacatatctaaaccacccaagaaactgtacattaatattgcttctaagacctgggggttggggggtagcatccccacagtcaacaatgttaaagtgatgaaacattttaaataattttaatgttaaaataattggagccatttcttgtttgattattttcacactattggtccttaaactgtttaaatttggttcagaaagtacagagcgggccgggtgtggagggtcacacctgtaatcccagcactttggaaggccgaggagggtggatcacctgatgttcagagttcaaaaccagcctggccaacatggtgaaacctcatctctactaaaaatacaaaattagccaggtatggtggtgcatgcctggaatcccagctacttgggaggctgaggcaggagaatcacttgaacctgggaggctgaggtttcagtgagccaagatcactcca

SEQ ID NO: 115566 - DNA, 261 bp, Homo sapiens
aagctatgcatttactctcacaacatcagtcaactcacatgcacaaggagaagcgtctctcaatcggagcttagagccaaaaattacaaatggcagagacttgagctatccataagataattttaaaaatccttccactctacactcccccttctctccgaccccgctcctatagcatacattttggttccactggttgccggcttatccatttggcggtaactgtctggtaggttaatgcccaacaataggcacttgtat

SEQ ID NO: 115567 - DNA, 424 bp, Homo sapiens
agagtgaaatttcctctccaacaaaaaaatgtgaagggaatgaatgtccttttatttctttggcagggaggagataatgaatcagatagttgtaatgctgaactgaaatcttcatttccacagtaaattttttcattcttgtccaaggcccaaggatgtgaccttctcttggattttcctgattattatgagaggcaagtcgttagtgttgcagtgtgactgtgagtataagccctgaactcctgtgcacttagagtccctgctctgtcatttgcttgaattacttatctcttctaggctttagttttcttatctgtaaaatggaaatcatggtcgtaatcatttgagtgtttcctggcaccaagcattgtgctatatgttttacaagcattatctcactttaccttctcagtacccctattca

SEQ ID NO: 115568 - DNA, 525 bp, Homo sapiens
cacatacaccaatgtgtatataaatagaactttaaaaatggaaagggatcatactccttagtgtgctgttaaatgtttaacaaatggctggcagggaggggccatcctgatttgtagcatttgccaatttctgtggtgtaaacactcccaccatggctggtttcaaagtatcaacatgatgtcaaccagcttgcaaacttcctgaaattttaacaatcagctcttgggaaacatcgagagccaactccagcaggctgccaactacattttgttttctaattagcctttcttcctcacgctatagtacaaacgtcttcatgcctaaacttttcaaaagttgtctttctcaaattacttatttgagtcaaaattgttttcctttgggaatctggaaccgattgtaaatactgtcctctagttagaatttgcctgtttctcatgttccatagatccttgtctgagtggggagtggatccacacttttttattaggtggctggaatagagatgtaattgaaaaaaaaaa

SEQ ID NO: 115569 - DNA, 343 bp, Homo sapiens
tcccaaagtgctgggattacaggtgtgagccactgcgctcggccgactatttttcttttctcttaaactttatgtaatatgtagagatgagatgtcactgtgttgcctatgctgttctggagctactgagctcaactgatccaacccccttggcctcccaaagcgctgggattgcagaagtcagcctgcttcgttcctttggaaggctgagtcatatttcattacaagcacttttttttgttttttgttttttgttgttttgagatagagtctggctctgtcacccaggctggagtgcagtggcgcaatctcagctcactgcaacctccgcctcccaggttca

SEQ ID NO: 115570 - DNA, 441 bp, Homo sapiens
tattcaaggagagggcacatagatacccacttctcattaaaggagcattgatgtcacattgtaagaggaacatgtgagatggcttatattactggggccatctttggacaatccagttggttacacctgccattgggcctaattgttaggggtttctaagggattctagattaacctagagctttttcccctgtatttttctatatctagtttctgagaataatgaaatgtattcccattaaggactatcttacccatttttatcctagaattcatctcctctgggggtaaaccctgtggtaaacatagatgatcaatattctaaaggtcatgtaattcaaccagacaccccttgggataattttctccatgaccccaccactctgaagtgctcattcagcctattcttggatacttgtaataggagacagagatgtgaag

SEQ ID NO: 115571 - DNA, 542 bp, Homo sapiens
gtgtgtgtgtgtgtgcacgcatgtgcatgccaaagtgtgaacctgtgttcctgagcccaagatgaatgactctggagtaaccgttgtttgatattagctgtacttcctctagctgcccagacagctaagagttattgtccctttgtggcagctcactcccaaggtcctggccttctggcagctggtttggggacttgagtagtagggggagtaaaaccatagtggttgtcgtaggagcagcctgcagtttaccttctcggactctaggaaaaggatttgctgagcaaattagaatgaaaatacatattcatgaggaaatgtgcatctgggtcatgaacgcatagttatcacaaggcagggatgttatttgtttgggatcaaatattaatatgctaatttgaacagttcttatctctgtgaaagcaggtaatgtaagtatctctagtaggtaatactttcttgcctagttccagttaccatggcaatcagtcagctagggtggtgcccaccacatgcatgcacccgtaagatcctctagagcg

SEQ ID NO: 115572 - DNA, 363 bp, Homo sapiens
gtgtgtgtgtgtgtgcacgcatgtgcatgccaaagtgtgaacctgtgttcctgagcccaagatgaatgactctggagtaaccgttgtttgatattagctgtacttcctctagctgcccagacagctaagagttattgtccctttgtggcagctcactcccaaggtcctggccttctggcagctggtttggggacttgagtagtagggggagtaaaaccatagtggttgtcgtaggagcagcctgcagtttaccttctcggactctaggaaaaggatttgctgagcaaattagaatgaaaatacatattcatgaggaaatgtgcatctgggtcatgaatccttttcctgcagtttaccttctcg

SEQ ID NO: 115573 - DNA, 423 bp, Homo sapiens
ggtcttctccatattttaacaaggcttaactcataatgagtggtattatataaactattagaatagccaaaaatatactttcttgtgggcctaaaaaatgtctaataagatgagcaaagctgttatttttaccttattaaaaaaccaatgtgaaccaaataattgaaaatatgagatataagttaacttttaaatttccctgttgcatcatttcagaagtttttgttctgaaaacaaaaactttttacacaaatttcgttttttttgtttgtttgtttgttttttgagatggagtctcactctgtcgcccaggctggagcacagtggtacgatcttgactcactgcaacctccacctcctaggttcaagcaattctcctgtctcagcctcctgactagctaggactacaggtacataccacca

SEQ ID NO: 115574 - DNA, 277 bp, Homo sapiens
acaaagtctctcccatcttaaacaaatttcctttcatccctgcttctccatcaagtgacggttccaagtctcattagcaaaagctggggctgagcgcctaccacctgtcaggccctgggcttggtgcttgctgtgcccatctcatttaaccctggtgatgaccctattgggtaggcaccatggatacgatgaggtagctgaaacttgaagacaccagcgtccttgcccaaggtcacagggtggcagacccaacattccaacccaggactatctcctc

SEQ ID NO: 115575 - DNA, 560 bp, Homo sapiens
ccatgatcatgccactgccctccagcctggggaacagagtgagcctctgtctcaaaaaaaataaaaataaaataaaaaacagaaaaggagaggagccaagagtgagagcagtgcctggctgcagggctgaggctcatttgaatggtgtctctctctctctctctctctctctctctctctctcacacacacacacacacacacacacaaatacacacatacacatacacgagaacagcaggttctacaagcacaagcatcagggtctaactcctggcggctgatgcagctgaaaataatcaggccttgggatgtcccatgggcagtgggagccccgtagacacatagagcccagagcacacatgtggctcatgcagccacacacgcacacacacacgcacacatgcacttagaatcacacttcagtgctctcagctctgccttggggtccctggggtccaaacgcagaatgtggagtgcagtgcttcctacagcctggccgaggctcctgcggacaggcaggtgactgtcaagccccgcctcctccgtgcctcctcctcc

SEQ ID NO: 115576 - DNA, 569 bp, Homo sapiens
gacagagcaacactctatctcaaaaacgaaacaaactaaacaaaacaaaaaaaaaacctttgggctatagtgcaaaaacaaatctgtatatctcgaattgtgtaactggtacgtacctggacaggaacaacttctgaatcatactggtttgtttggatcatcttggattgttgctgagtgaccctgaggaagtattgccgtctactgttcggggttgctaggaagaaaccagtcctctctataccagggaagaagagtagctgatgtgagacagtgggatagtaataagctaaacgagggggagagaaagagatttaaatgacagtcccaggcaaggctgtcatcatgggatgtaagtgagactgttaagctcctgagtcatagaactttacagctgggaagttatataaatattcatatatatgtcagtttccacttctgtggccctgacaagatgcctcagggcctgcagcttggggatccaggctgtaggagttgaagactgttcctttagggcatagccaacaggatgaatttcagccttttaatcattctgtttgagattcaga

SEQ ID NO: 115577 - DNA, 654 bp, Homo sapiens
aaaaacatttgtatacatttgaggttaaacgtacacattaccgacttctttctcccagcacacaggacatcagctcttaggaagaaggtggataagaatttcttcctcaacctcccttatactttcaacttttcatggcttattgggtataaaagatcattgttttgaaagtgcttatgtgagaaatacttccatgcaagtagaaaaaagcgcatgtatttcctcgtattgaagcattaggaatagtttattttattttgcaaaccccaaatccatttgtttaatttggcaatattcgtcttttggccatgtttaattttctttttccaacattttgaaagatccaactctatccattttttagggcagaaatattcaattgcttctttttttttagttcagaaaaaaatatataatgttaagtatgactgtgaagaattaacttgtgtttgaattgatattttgctggagctttaagtaacagtttaaactttattgtcgggagtagacacaataaatatcatcttttcacacccaggagattcggggccagctatatctttctcagttcttatttcattgtccatataattgaataaaatatctaatgtaatattaaggtcacagatttaaaaatacagaacttggggaatg

SEQ ID NO: 115578 - DNA, 352 bp, Homo sapiens
tgatttcttaaattttccaaaaaggtattattgcaaacatataggatttccccccattttaaccttaccagtttcaaaggaaagtaaaggtactggattacatgaagacagcatgtgtgcgagtgcacacgcatgcagggtggcaggtagagtgtcttaattcctttttcttactacccaagtctcacttcacagaaatcattaggtaaaggaaaaccaacgaggagttctgcagttttcttttaataactgaggctgaggcaggagaatcgcttcaaccctggaggtggaggttgcagtgagccaagattgtgccactgcattccagcctgagcgatagagtgagactcca

SEQ ID NO: 115579 - DNA, 341 bp, Homo sapiens
tttagactcaaacttctagaacactgttctgacccagctgagctattgaagatagttttcacggcactgctatccttgattgacctcctaagggatctgtctctcttgagaataggcctcaactctaatttccttgggcccaagaccaagagtgggcaaggggagcctagcctgcaccttgccacctggtgttggccattatcagggtgccaggagctgaagtggcacatgttagtgtctacagagtgccacgtgggtagtgctaggtcttccaggaggctcagccactgatgactttaaggcatgcaggtctccagcatggctgcaggaaaactaagaga

SEQ ID NO: 115580 - DNA, 3655 bp, Homo sapiens
  misc_feature (673)..(673): n is a, c, g, or t
  misc_feature (850)..(850): n is a, c, g, or t
  misc_feature (1102)..(1102): n is a, c, g, or t
  misc_feature (1167)..(1168): n is a, c, g, or t
  misc_feature (1294)..(1294): n is a, c, g, or t
  misc_feature (1297)..(1298): n is a, c, g, or t
  misc_feature (3362)..(3362): n is a, c, g, or t
cacattttagtagcattcacttataatccaagacattttggcaatcccctccctccgtttttcccattttcattgtacatagagcctatatgaggcattacagaggatactaaaatgaacgaaaatcataaaccctgcagtcaagaatctttcagtctaatgaagttatgagtaaagatgaatacaatgaggaatagtaaataactttgagataaagaaactaaagtatatcataagactgatgcaacttgacacagaattgtgattatttttgatgtctccagttttgatagtcaaaggagacactatcaatagatattgcaagggcaacaggcataaactaatattatcttggacaatttgatatatagagtcaccctactcttaagtttctttacttttgcttttactttttattatggacattccatactgcctgtaaagactgagataactatttaagtacccatcttccaacttcaactattatcaccacgtggccaatgttgtctcctctataccccctaaatccccaccctcatttactaaaagcaaatccaaagcattttcttgattcatcaaccagtttttcactacttcattctttttctctcctgattccttacttatcacctttccaacccatctttttatttttacttccagcactgcngttctgatctaactctgccaggacacagatccacagggtcagccctgcatcctgagcagcttagagggagaagccagaccagcagtgcctcacaccttgtcctcttctgctctggacagatggctccataacgacagcttcataatggcagtggatgggaccctcgtgtacatcagngtcactcttctgctgctctggcttggggtatttttgtctatttccggctactgtcaggctgggccctcccagcatttcacttccccggaagtggtgatccccttgaaggtgatcagcaggggcagaagtgcaaaggctcctggatggctctcctatagtctgcggtttgggggccagaaacacgttgttcatatgagggtcaagaagctcttagtttctagacacctcccagtgttcacctacacagatgancgtgcactcctggaggatcagctcttcatcccagatgactgttactatcatggttacgtggaggnngcccctgagtctctggttgtgttcagtgcttgttttgggggctttcgaggagtattaaaaataagtggcctcacttatgaaattgaacccatcaggcactctgccacatttgaacacctggtttanaanntaaacagtaatgagacacaattcccagctatgagatgtggcttaacagagaaggaagtagcacgccaacagttggaatttgaagaggctgagaactcagctctggaaccaaaatctgctggtgactggtggactcatgcatggtttctggagctagttgttgtggtgaaccatgatttcttcatttactctcaaagcaacatctcaaaggtgcaagaggatgtatttcttgttgtcaacatagtggattccatgtataagcagttaggtacttacataattttgattggaattgaaatttggaatcaaggaaatgttttcccaatgacaagcatagaacaggtcctgaacgatttctctcaatggaaacaaatcagtctttcccagctacagcatgatgctgcacatatgttcataaaaaattcacttataagtatacttggcctagcctatgttgcaggaatatgtcgtccacctattgattgtggagttgataattttcaaggagatacctggtctctttttgccaacactgtggcccatgagttaggtcatacgttgggtatgcagcatgatgaagaattctgtttttgtggggaaagaggttgcatcatgaatacttttagagtgccagcagagaaattcaccaattgcagttacgctgattttatgaagaccaccttaaaccagggatcatgtctgcataatcctccaagattgggggaaatctttatgctaaagcgctgtgggaatggtgtggttgaaagagaagagcagtgtgactgtggatccgtacagcagtgtgaacaagacgcctgttgtctgttgaactgcactctaaggcctggggctgcctgtgcttttgggctttgttgcaaagactgcaagttcatgccatcaggggaactctgtagacaagaggtcaatgaatgtgaccttccagaatggtgcaatggaacatctcatcagtgtccagaagatagatatgtgcaggacgggatcccctgtagtgacagtgcctactgctatcaaaagaggtgtaataaccatgaccagcattgcagggagatttttggtaaagatgcaaaaagtgcatctcagaattgctataaagaaatcaactctcagggaaaccgttttggtcactgtggtataaatggcacaacatacctaaaatgtcatatctctgatgtcttttgtgggagagttcaatgtgagaatgtgagagacattcctcttctccaagatcattttactttgcagcacactcatatcaatggtgtcacctgctggggtattgactatcatttaaggatgaacatatctgacattggtgaagtgaaagatggtactgtgtgtggcccaggaaagatctgcatccataagaagtgtgtcagtctgtctgtcttgtcacatgtctgccttcctgagacctgcaatatgaaggggatctgcaataacaaacatcactgccactgtggctatgggtggtccccaccctactgccagcacagaggctatgggggcagtattgacagtggcccagcatctgcaaagagaggagtttttttgccgctgattgtgattccttctttgtctgttttgactttcctgtttactgtcgggcttcttatgtatctacgacaatgttctggtcccaaagaaactaaggctcattcatcaggttaagaaaatgtctctaacttaatattccatgcattagtacactttagtctcttggcagtagaaacattagtacatccctgaaactgagcacatttctgaccatttccagaaagctgcaaagatcttcccttacattagtaccacaaacattgtcattaagttcaagttattcttaacatgtttctatctattgtttattgttttaagcagcaaataaagctacatccttccctccctttagtccttgttgtgtttcttgtgcatagagatgacttatgggaaatgtatgagatgtttctgcctcagagtgtccaggggtgaggcttacctctctactgacatttatcaatgtgggaaaattacttaaattttctgatgntctgcttcaaaatctgaaaaggggtagggttcataataatatttgtcccacccaacttcttggttttatttggtaaccaaaagagagaaataagtgaatttttgttaagtataaacagattgttatctgatgaaatctcctgatcttgctccctgtgtgcttcctagctctttgtcttaatttggcagtttggatatccttttggagcatttgcttgcttcacataccaaaatataatctccatgagggtggggttgttttcatctgttttgctcatcattgtatccttgata

SEQ ID NO: 115581 - DNA, 398 bp, Homo sapiens
cccgtggacctcgcctgcgtcctgcatgtttgagcgctgccccttgtggaggccgccagcactggtggctgcagggcctgtagtgtggcacgtccagagacccggcctggagaacgggtcctggatgtctccgtcatgttttacgttcgcttcacacggacgcagcgatgtctcagatacctcggatcacacagagcacgtcgccaaggcttgttttgtctgttcctttccacctgtcttacgtggataccaggagatccgccacgactcccgtggccccgtccacactgcgcggcgctctccggcgtggccgccaggtgccccttcgagggcaggtgtgagtacagggtggtccctgtggagaagcgcctgcaggcgagtgagccaggctgtgccct

SEQ ID NO: 115582 - DNA, 422 bp, Homo sapiens
taaaagacagggagaaagaaaaacaaacaacaataatcgtggagtagtgatattgacagactgaactaagaaacagtgtggataagaaactttatgctctacagtactgcagtcagcagaataatggtccctctaaaaaaggtaccacaactctatctcttattagtagtgtgatttggggcaatttaaaagccctgatcctcagtttcctcatctgtaaaagaaaaaaaaaaaagaatagcaatgtcttaagtcaggatccccaggatcaaaccctgagatgaagattgtctgcaagtgatttattatagaaatgctaccaagaaaaactcatcaggtaccacagtaagcaagatagggaagaaggtggtttcaggcaaaatattaacatcaatataattctataggggagcctcagggtg

SEQ ID NO: 115583 - DNA, 701 bp, Homo sapiens
gggacagaacttggccacagttcacaggatgaacaatttccattctctggtgaagagcaaagacttagggaagtgggttcaaaagaggctcctggtagcttgggattgctgcagcgtgcctggctctgaactcagggaaacacataacttttgctgacttactagaagggatgttacaaaggatgcagatgaagagatggatggggagaggcttgggaaaaggggagcaccaccctccgggaaaaccatgtgttcatcagctatctggaagctctccaaatcccatcaattttgggggttttaatggaggtttcatgatgtaggtgcgattaactacatcactgggcactggtgaccaacttaaccttcagcccctcccagttcccgaggctggggggtggggcagaaagtcccaaccctattactatgctttggtctttctgtggaccagccccatcctgaagttaccagacaacaaacagtagcatataaaaagacacttaacctcttcgaagattccaaggattttaggagttgtatgccaggagatggcaattaagaccaaatgtatgtttcataatatcaagcatcttatcctccaacaaaatactcctttgcctgtcctgtagtttacctaggcttgggaacatctttcgatcatttctctaattcattgtctcttaagctcaatgtgcaccaga

SEQ ID NO: 115584 - DNA, 1572 bp, Homo sapiens
cacatataaaataagagttatgttcagaaaatcaaccagacataagttttgtgtgcatttttttcataagtaattgctacctatggaactctatgagactaagaggattgtaactagtgaaaggaaaagaaagagaaacagctgaaaaccttgtgtcaacatgtattcctaggttattttgagggtcctagcccagagttcaaaattgcttaaggtctactgttttatcttaaattaatgtgggttttacatcccacactgcaaaatgtttttgtttgtttgtttcagatagggtctccctctgtcacccaggctgcagtgcagtggcccaatctcggctgactgcctcccaggttcaggcaattctcctgcatcagcctcctgagtagctgggattataagcgcctgcggccacgcccacctaatttttgtatttttagtagagatggagtttcaccatgttggctaagctggactcaaactcctagcctcaagtgatctgtccacctcggcctcccaaagtgctgggaatacaggcgggagccactgtatccggtctttattttttaatattagtactttttaaacatttttttttaagtcaagatctccctatgttgcccatgctggcctcaaacacttgggctcaagcgatcctcccaggtagctaggaatacaggcatgtgctgctgcgccctacttgaatgcattttaaatgaccgtaaaatcgttcaccaattttctacctgtcttagtgattagtgggtaagatgtatagattgcatcgggtgtatcaattttagtaaattaggctcagtgggagagaactgaaccagagtaaaacgttcagcatctgtttcttttctattaaccaggatactgagagcccaaactcacagaaatatatgcgtacaaatggcaacatataaaaaaaaacttatttaccagattgtgttaagatcagtattaaagaatatccagaattctactaaagatgtggaataatgtatcattttgaggcctttattgatccaagactcacctattttcattgaattaacttggatgtttcacagacacatcaaactcaatatattcaaatctaacctaagataccactaactgaattttccttatctcccgttccctgcctgttccttttcccctcccaaatttatgttccttcttaaaacccttcagaagtatctaattgttgtaaggatctgttcctaaatctttacacagtttacaaagccctgcacaatttggccatcttttttctcctcatatattgccattttctgcctcaaacactaaggagccttttaaaacttcttccagccctcttttatttgtggtctttttactctaagcgtggttttaaaatacttaagagcactattaaccccatcattaacaacaggtataaaaccagttggtattgaaatgcaggatgtaaataaatgtagaaaagataaacattgagaatagtattcatatgctaaatttgcatatgtagatgaaatgttcaacagtagaaatgactctgaacaacagaatgaataatgaaat

SEQ ID NO: 115585 - DNA, 922 bp, Homo sapiens
tcaagaagcatcctgagttgctgggactacagatgcatgccatgccaccatgcccagataatttttaatttttatttttttgtagagacagggtcatgccacgttgcccaggccagtcttaaactcctggtctcaagcagtcctcccacctccgtctcccaaagtgctgggattacagacgtgagccactgtggcctggccatctgtttcttttctattaaccaggatactgagagcccaaactcacagaaatatatgcgtacaaatggcaacatataaaaaaaaacttatttaccagattgtgttaagatcagtattaaagaatatccagaattctactaaagatgtggaataatgtatcattttgaggcctttattgatccaagactcacctattttcattgaattaacttggatgtttcacagacacatcaaactcaatatattcaaatctaacctaagataccactaactgaattttccttatctcccgttccctgcctgttccttttcccctcccaaatttatgttccttcttaaaacccttcagaagtatctaattgttgtaaggatctgttcctaaatctttacacagtttacaaagccctgcacaatttggccatcttttttctcctcatatattgccattttctgcctcaaacactaaggagccttttaaaacttcttccagccctcttttatttgtggtctttttactctaagcgtggttttaaaatacttaagagcactattaaccccatcattaacaacaggtataaaaccagttggtattgaaatgcaggatgtaaataaatgtagaaaagataaacattgagaatagtattcatatgctaaatttgcatatgtagatgaaatgttcaacagtagaaatgactctgaacaacagaatgaataatgaaat

SEQ ID NO: 115586 - DNA, 1083 bp, Homo sapiens
ctaaggtgaggaggagacagaatcagaggtcaagacagtgtgagattcataaggatatacacacagatcaatggaatccaaaaacagatgcagaaaggcaatccaatggagaaagaaaggtcctttcaacaggatacaaaaagcactaaccagaaaagaaaaatcaatacactggactttatcaaaattaaacctctgctcttggaaagactaggagtaaatatttgccaaacaaaaatctgagaaaggacttgtatccagaatacataaagaacttttacaattcgataataagatggcccaataaaaaagtggggaaagattttaatagacactacaacaaaaaataaacatacagctaaaatacatagaaagttgttcgacatgcggctgggcgcggtggctcacgcctgtaataccagcactttgggaaagaagaaagatactccacatgcaaatcaaaagcccaatgacataccactacatgcctaccagagtggttacagctgaaggccgaccatagtaagtactgtccaagatgtcaccctgtcacacacggctggggactggtgaagtgttacaaccacttgggaaaccagcatggtggttccttataaagttatcccagaggaatgaaaacttacatccacaaaaaagactgcaaagatgttcatggcagctttattactaacagctccaaactggaaacaacccaaatattcctcgacgtgggaacagataaacacactgagatatataaagatagaataatactcagcaatgaaaaggaaatgaactgctgatgccgacgacatgggtaaattgagagaagccagacacaaaagagcccctactgtgtgatgatgacatgtacacggaattctagaacaggcagaaccgactgatagtgacagaaggcatcagtggttgactggggccggggttagatattgtgggggttgactgcaagggtaagaaggtttttgtttttttgtttgtttttttttcttttttttgagatggagtctcactttgtcacccagggtgaaaccttatctcaaaaacaaaccaaaaaaacccaga

SEQ ID NO: 115587 - DNA, 777 bp, Homo sapiens
gtccaataagtgtatagacccatgtaaccacaatcccagttaagatttagaactctgttgtcacctcaaaagcaccttcttaggctgggcgcggtggctcacgcctgtaataccagcactttgggaaagaagaaagatactccacatgcaaatcaaaagcccaatgacataccactacatgcctaccagagtggttacagctgaaggccgaccatagtaagtactgtccaagatgtcaccctgtcacacacggctggggactggtgaagtgttacaaccacttgggaaaccagcatggtggttccttataaagttatcccagaggaatgaaaacttacatccacaaaaaagactgcaaagatgttcatggcagctttattactaacagctccaaactggaaacaacccaaatattcctcgacgtgggaacagataaacacactgagatatataaagatagaataatactcagcaatgaaaaggaaatgaactgctgatgccgacgacatgggtaaattgagagaagccagacacaaaagagcccctactgtgtgatgatgacatgtacacggaattctagaacaggcagaaccgactgatagtgacagaaggcatcagtggttgactggggccggggttagatattgtgggggttgactgcaagggtaagaaggtttttgtttttttgtttgtttttttttcttttttttgagatggagtctcactttgtcacccagggtgaaaccttatctcaaaaacaaaccaaaaaaacccaga

SEQ ID NO: 115588 - DNA, 756 bp, Homo sapiens
attgtacattgcaaatacacacagtacctcatttgtcagtgatgcctcaataaagctgtaaaaaagaacccttcaattataagggaaaaaagtgcgagcttggtggctcacgcctgtaatcccagcactttgggaggctgaggcaggaggatcacacttttttcccttataattgaagggttctgttaacttctttgattgtgctagtttctcgggtctatacacatgtcagaacctattacattgtacattgcaaatacacacagtacctcatttgtcagtgatgcctcaataaagctgtaaaaaagaacccttcaattataagggaaaaaagtgcgagcttggtggctcacgcctgtaatcccagcactttgggaggctgaggcaggaggatcactggagcccaggagttggtgatcagcctgcacaacatagtgagactctgtctctacaaaaaaaaatttaaaaattagccgggggtggtgactcgtgcctgtaggcccaggcactctggaggttgagtggggaaaatcacttcagcccaggaggttgaggctgcagtgagctaagattgggccactgcacttcagcctgggcggaacagtgagaccctgtctcaaataaataaataaaataagaataaagtagaaaaaaactccacaccaaattgggcaaaagaagctgggcatggtgactcacatctgtagtcctagctactctggagaccaaggcaggaggatcacttgagcccattag

SEQ ID NO: 115589 - DNA, 641 bp, Homo sapiens
ggaaaggcaggtagggtggggtgggcaggagggattttgaaggggcaaggggacatgagtgatgagtctgttaacttctttgattgtgctagtttctcgggtctatacacatgtcagaacctattacattgtacattgcaaatacacacagtacctcatttgtcagtgatgcctcaataaagctgtaaaaaagaacccttcaattataagggaaaaaagtgcgagcttggtggctcacgcctgtaatcccagcactttgggaggctgaggcaggaggatcactggagcccaggagttggtgatcagcctgcacaacatagtgagactctgtctctacaaaaaaaaatttaaaaattagccgggggtggtgactcgtgcctgtaggcccaggcactctggaggttgagtggggaaaatcacttcagcccaggaggttgaggctgcagtgagctaagattgggccactgcacttcagcctgggcggaacagtgagaccctgtctcaaataaataaataaaataagaataaagtagaaaaaaactccacaccaaattgggcaaaagaagctgggcatggtgactcacatctgtagtcctagctactctggagaccaaggcaggaggatcacttgagcccattag

SEQ ID NO: 115590 - DNA, 727 bp, Homo sapiens
caactagttagggctttatgaagacaaaacttaaaggaccatggcgccaaacaaagccacaaagacggcttgaaaatgctgtctcgagaagtcaagtctaccatggcatttgatttattacttttgtagttgattttacttatttttaatatattggcaggtgtgcctactctgggaagtattcatctttaaagaatattagttctctgttcatttattttggtttttaatttatttgcttttttgaatctcagcataaccaggttgaatctcttttcaaaaatattattaaaaggtagcaatttttaaaaaattgagaataatttgtttgaaatgtactggcatttatatgccttgttaatgcatttctgaaatcaagactttgctgaaatgtttatacgttgaataaccgtatcagacatttagtggaagtatagttttacaattttgtatagaatttcatttccagataggttttagtatgcaaaatataagcctatggaggattacttctatgaaatgttacttctatgtgcatatgtataaaaaattcagaaattgttttaatcctatatgtatgttgtattttctaagatgtatgttcttgttgatgattaatgtatattgttatttcaaggtacaaagaatttatttatggtttaaggttttaaaaagttaaattattttaatataatagcattttataaatttattttctcctatgaag

SEQ ID NO: 115591 - DNA, 296 bp, Homo sapiens
ctcctgctaatctgtagtactaaagtcacttaccttaagggcacacatacatgtagatgatgctctcatacgatgtttattgtgcagctactactctatgccacgtgttttgctgcccacaggaaatacagagataaaagacaaagactttgccctggagaagctcatggtccaatagaggagaaagacaagtaaaccaaaaactactctacaataccataaactgctatgacagagattgggtactgcagtgataaaaggacaaaggggtacctaatttggggcaggaaattggg

SEQ ID NO: 115592 - DNA, 533 bp, Homo sapiens
caagtgacatgattgaggtctgcacactagtgatgggggctggcacttcatctcataacattgaaagaaaaagcatttcccccctcagtctttgttgaatttctctgatgcgtcttgatttacgttacttctgtgccggaaaaccttcttgcgccttccgtcaccttcaggattaagttcagattgggcatgccagtttgcacatgatctggcccttgcctacctttccagtttatcttccactgtatatccctgcttccccgccttccccctcacggccttacctctgttctctgtagctgccctgcacctgcctgttcaccctgttccctttcctgtgctctgagtcgtgcagtcagtccttcaaggcccattgcaagtcatatctacaaaacaggagccgcctggatccgcccactacccccaggacttgtctcaccttcctctgatggccatggtactgaaagcgtctgctctcatcgtccccctttatagtctaaacatgttttctgtctgcttccaccgtcactgaa

SEQ ID NO: 115593 - DNA, 420 bp, Homo sapiens
tgagacagggtctcgttctgtcacccaggctggactgcagtagcatgatctctcaacgtgcagtggtgtgatcttgactcactgcaacctccacctcctgggctcaagtaatctaacagcctcagccaaccaaagtgctaggattacaggtgtgagccactgtgcctggcccagcaaatttctatacaggaccagagagtaaatattttagggtctatatttggggctctataatttctgtccaactctgctagtgtagaaggaaagcagaatagacaacatgaaaacaacatgtttgtgttccaacaaaaaaaggacaaaaacaagtttttggcctataggtcaaaatttgctgacccctagtctggaccaaaacaatgcaccagtccaaagaaaactacattttttcagaaagccctc

SEQ ID NO: 115594 - DNA, 287 bp, Homo sapiens
ggacagaaattttagggtctatatttggggctctataatttctgtccaactctgctagtgtagaagtaaatattttagggtctatatttggggctctataatttctgtccaactctgctagtgtagaaggaaagcagaatagacaacatgaaaacaacatgtttgtgttccaacaaaaaaaggacaaaaacaagtttttggcctataggtcaaaatttgctgacccctagtctggaccaaaacaatgcaccagtccaaagaaaactacattttttcagaaagccctc

SEQ ID NO: 115595 - DNA, 586 bp, Homo sapiens
tactctatgaacttagcttctgtctctgatctgacagaatgtctcacggtgacctttcccacatagccctcttgggaggcattgtggtgaaaattcccattcccttcaaaaaataattctcactggggaccaggagcacttgaacagtagacggataaactccaaatagttctcctatcttgattatatctttaagttcataagacaaaaaaatctctttataaagataataatgaaagtaggagaaaatgagagataatcaagaagcaaataaaatttgtgacctaagtttctcaaaattttaaaaattgtgaaccgtctaatggctataggtacttatattggttacaaatttcatataagttttcaaagatgtatcacagtttatacaacatagttttaaaacattttgttttacagcaattaaaggattgatactgcttataaccttttgccaaagtagatttggtttgatcattgtgtatcaatgtgtgtcaggagagcctgggtaatgctgatgtacaataatctctaagtcttggagatttagagtaacaaagatttatttcttgctcagactacatgt

SEQ ID NO: 115596 - DNA, 270 bp, Homo sapiens
agtgcctgacctcgtctgacccctgatgctggctgtgggcccccatgatgcccgcccggaccccacccagtgccgtcccaccatttgggggtgggtagcgtgcagtgaccactgtggcatccacaagtaattcctgagccaccttgaaaatacggacagacaatggccgggcacagtggctcacgcctgcaatcccagcactttgggaggccgaggtgggaggatcacgaggtcaggaaatcaagaccagcctggccaacatggtgaaac

SEQ ID NO: 115597 - DNA, 432 bp, Homo sapiens
ggactctccagtccttcagttacacagacagaaaagctctttccccatgtggatccacacaccatgttccctgggctctcattcatcccattttccagatgaagagactgaggctctaaatgataaagtaatttgcccatagtcccagaccatggcaaacctgaggcctgagactgggtctatctgcacccatggcctgattccttaaccatcaaacttctttgtgcccccaaaacagtagctctagaaggcccaggcctgccgagactaggcaatcagaaacacagggactgggtgaaaaattgatctggtgatccaggccaggagaagtaaatcatgggccttttctgggaactctgggggaaatgtgggctttcccatgagaattgagcttctaggactcattgttgacgtcatgagggaaagactgtc

SEQ ID NO: 115598 - DNA, 706 bp, Homo sapiens
ggggaggcttgttggtggaccatacaccctgcctctaagcagcgatcagaaggagaaaaagtacgagttggagatgacctcatcttagttagcgtgtcctctgaaaggtacttgcacttgtcttatggcaacggcagcttacacgtggatgccgctttccagcagactctctggagcgtggccccaatcagctcaggaagtgaggcagcccaagggtatctcattggtggtgatgtcctcaggttgctgcatggacacatggacgagtgtctcactgtcccttcaggagaacatggtgaagagcagcggagaactgttcattatgaaggtggcgctgtgtctgttcatgcacgttccctttggagactagagacgctaagagttgcgtggagtggaagccacataagatggggacagccattccgactacgccatgtcacaacaggaaaatacttgagtctcatggaagacaaaaaccttctactcatggacaaagagaaagctgatgtaaaatcaacagcatttaccttccggtcttccaaggaaaaattggatgtaggggtgagaaaagaagtagatggcatgggaacatctgaaataaaatacggtgactcagtatgctatatacaacatgtagacacaggcctatggcttacttaccagtctgtggacgtgaaatccgtgagaatgggatctatacaacgta

SEQ ID NO: 115599 - DNA, 537 bp, Homo sapiens
ttattatcataaaaatcaatgacaacaacaacagctgacttgactgagcgctgctctgtgcaggtggtggtttgtattactgtattagtacaccgaatgctcgtaacaacagaagcaagtgattcccacttgacagatgaggaccctgagctaaaggcgagcagcagaactggctcagtgcctccccttgaaccaccacattacagtgggtcatttcacaaatgatgccctgaaatccggccacccagctgaacgcatggaactaaatccatttcccaccaactgcctcaggtacgcacagtgtgctcgaggcactgcagacactcagagacagccaagtcccagggtacatcaggatcccagccctgccattctgcactccttccatctcctcatgaacatgggccgcagcacctccttcagctcccttctcatcgatgtcacccagacactgctccattcaactgtgatgctgtcaaggcatgccctgggcacgcaacagcagctctggaacatccctacctgtcagggcgccaa

SEQ ID NO: 115600 - DNA, 224 bp, Homo sapiens
ttcagaaaagaatctttaaattttaggagcaggtaaagatttctgaataatggcttaggagctaataaaccaagagtcaccaataggaagaggtattaccaaaaccctaattctttcaatttcaagtacacagtggtctgtgacaaaaaaagtttaattaaacagaccctctcaaactatatttccttctctgcctagttagcatctcctttttctccccaaca

SEQ ID NO: 115601 - DNA, 721 bp, Homo sapiens
aggctcatttgctactctggtcacttactgacaggacctgtcagcttctgactcttcaaaggagtcagacagtcggagaaggagacatttcaggtagggagcagctgtggggtctggcgtggtaaaccttgctggcttgtttagatcctagattttagccagaatacttaaaaagttcatctggatggtagccagtgcatgtcccacagagtgcaatggccatttccacctgtggctttcgaggccgactgtcttggctcaaagccagccctggcacttgctctgtaatgttggtgagttgatgaacctctctgtgcttcagtttcctcatctgtgtaacggggataagaacaatacctaccttgcagggttatcagtgacgattacatgcacaggtaaaactagtttgaacagtggcacaagtgtccaataaataatactagtatgttaacaattggtagtagtaacatcacccttctcctggttaccctgatgtgtgtgacaccaaccaggcagccttctccagcctattttcaggcaaagtgcatggggcccacctccacctcccttagcttgaccacagcaaaaactaacttcactaataatgtaagggaaaggcccttggatttgagtcagccagaggttcaagtgctggatctgcaccaaaaggacaagtcagtttttcctctcgtctgaaaaatggggatactgctccctgtca

SEQ ID NO: 115602 - DNA, 236 bp, Homo sapiens
aatatcatttttaagcagcttagaagaaatcagactaagcagagagaagagactaaaagaaaaaaaaaaaaaaaaaaaagttgttaaccatatgatagacatagaaggtgaacatctggccgggtgcagtggctcatgcttgtaatcccagcacactgggaggccgaggcaggcagatcacctgaggtcaggagttcaacacaggccagccaacatggtgagatgccttctctact

SEQ ID NO: 115603 - DNA, 417 bp, Homo sapiens
cccgggcctcacgccatgtccacaagacagagaagagaaacttgctgagcaatgtgttttttctcttttcctttttttaaataaagccccgcagtggctcacgcctgtaatcccagcactttgggaggccgaggtgggcggattgcctgaggtcgggagttcaagaccagcctggccaacatggtgaaacccctctctactaaaaatacaaaattagccaggtctggtggtgcatacctgtaatcccagctactcgggagactgaggcaggagaatcgcttgaacccgggaggcgaagattgtggtgagccgagattgggccattgcactccagcctgggcaacgagagtgagactccatctcaaaaaaataacaaataaagcccctgaagggaggcttctctgggctgcaggtgac

SEQ ID NO: 115604 - DNA, 312 bp, Homo sapiens
tgagctgagatcatgccactgcactcccgcctaggcaacagagcaagagtccgtctcaaaaacaaaaaaagaaaaacctcatctccattagactcactgtgtaatttctctttggcctattctgagttcctttgttaaggcttccaaggtgctgcctgcacccagtgctgtgctgtgaatagtgacctcagactggttctctatttgtgtgtttgttcttgcaattctgtcatggacattaatggaaatatttaggttttagtgaaataatttttttttcctaggagaatgaaatcaatgggcccagtagac

SEQ ID NO: 115605 - DNA, 608 bp, Homo sapiens
ctcgtgccctaaaatgtgttttctttgatatatgtaggtgaatatttactgataaatttcaggttttataaagtttttttacctttcagatttaaagagctggtacttaattttatgctatttacttaatagcaagttactttttaaaaattgtgctttacattctgtgaaatgcttttgcattctctaatgtgattgatcttcagataccactatgaaatagtgtcagtgattcccattttacagagggtaaagaaattatttggcctatcaagtgacgtggctaaaaactgaggtctctagtgttttctttctacagtgaagacatttattctaagtgaaaattaaataaaagcattgaggaaagattggtgaggtcaaattatcacccttacagatgtgagagtgttttgaaaagtagaaagtagagtacaaatgtagggaataatatccagaaggcatactacattaagagaaataactcttcaagccttgttggttagttttaaatttaaggagaatcgttttataaatgatgtatttttggaagcatgacctataaatatagtctgaaaagaaatgttaagtttgatttgacagccatttta

SEQ ID NO: 115606 - DNA, 532 bp, Homo sapiens
tgccccagaaggagcatggcagctggattccaactgacctcactttttccctgccaggagacctggggcaaggcttgcagcctgccaaaccctgtaaacggagattatcagaaaacccatccccggggctagacgagacttaaatcaggtgctgggtagaaaacaccctttctaaggcactaagcactgcacaaatgttcttttccctttaattgccctccctttaattgtgagaaaaataatgatttggggtcagaatgtatactacatactgatctttctagaccatcattaaatgtagaggtagaaacaactcaaatgtccatcaactcatgaatggagaaagaaatgtggtgcatccatacaacagaatactatgcagcattaaaaaaatgaatggcacataccacatgggtgagcttcagaaacatcatggggaatgaaagaagccagatataaaaaggccgcaaactgtatgattccattcatatgaaaagcccagaatagggagacccacagagttgcccagagc

SEQ ID NO: 115607 - DNA, 404 bp, Homo sapiens
gtagagatggagtcttactatgttgcccaggctggtctcaaactcttgggctcaagcaatcctcccaccttgatctcccaaagcactgggattacaggcatgcaccacagtgcccagccagtagtgattattgtgactgttcgtccccacatggaatgtcagaaaccctctgaggatggtcccattaacaggctaatgtgtggcagaaggtggtttcgtgaaaggccaggaaggcagtggtccgcgtagtggtcatagtcacaccatcttacacaaagagacagcttgagtggatgtagtctttaacaggaggggctctgcaaggacaacccactcctcccaccctagaatctggaattctagatccctgaaccctgcttttaggcagagatggctcagagaag

SEQ ID NO: 115608 - DNA, 575 bp, Homo sapiens
gttttaaaaacaggctaatttagttggaagctggtaatttctttttcttcttttttttagggacagggtctcacttcgttctgtcacccaggctggagtgcaatagcgcaatcatggctcattgcagcctcaacctcctggtcttaagtgatcctcccacctcagccttccgagtagctaggaccacaggcatgtaccactatgcctggctaattaaaacaaaaaatttttttagagacaggatgtcaccatgttgcccaggctgatcatgaactcctgggctcaaacaaatgatcctcccgccttgtcctcctcaagtgctgatattagaggcatgagccaccacatctggccaaagctggtaatttctttctcaaccaggaggttgaggctgagacagagtcttgccctgtcacccaggctggaatacagtggcgcagtctcggctcactgcaacctccacctcccaggttcaagcaattctcctgcttcagctcccaagtagctgggattacaggtgcctgccaccacgcttggctaatttttttgtatttttggtagagacggggtttcgc

SEQ ID NO: 115609 - DNA, 292 bp, Homo sapiens
tcatactactgaattatgacaatttttgtagtcacatgaggaacacaaagaacatgaagaaaaaatgtgaagttatttaaaatctatttcttcaactttactaaagacatagctgtagaataacacatcttcacagaattctaaaactactgtataatcccttcttcccctttttaatatccttcatacaagtcataaaacactaaaatttacatagtagacattaacattttatacaccaatatctgaactacatggtccataaattattcttttgttgttgttgttgtat

SEQ ID NO: 115610 - DNA, 401 bp, Homo sapiens
ggagtgctgggggtagagatggatgtcaatagggctgaaagtggggatccgggggagcccagagtaggagtccgaggaggctcagagcttggagtcctaaaaggctcggagtcggggatctgaatggttcagggagggaagaagatttgggagtcagcctcagagctaaagatctcagggtgctggagtgaaggggcgctcaggaggggaaatccgaggggcgtccaaatggggggatccgaggaggctgagggtggacatgtctgaggaggctcagattggggtcacaggagtgcacagaatgggattcggtggggggcgggggtcgctgagtgttgatagccgggctcacagttgcaggtctgaagcggggtctcaaggtgtttaaaggggctctggag

SEQ ID NO: 115611 - DNA, 309 bp, Homo sapiens
gtttctgacacgtgcctctggagcccggctgctgcatttctgggggaagcggcttcagtgcaccccccgggctccctgctgggtggcagacacggggaatctgggcctttttgttttttgcctgtgtgggtctgtttgccttgaggatcctgctatcttcagcattagcaacacccaccgcttgatcatgggtcccaagattctggtttggtcggctcgagggccgcccgtcctgaccgtgggcttgggagggcgccccggtctcatcctcaccacctgtgtatattgtgtgtcttttccatcgcgggc

SEQ ID NO: 115612 - DNA, 361 bp, Homo sapiens
attacccatgggcctgatttcaacccagcttctcacttagcacccaacgcaactgaaccacatgactgtatttcactaatacacatagcatcttccccctttcctcatatttctattcttccaattccaaacctagaccacacttggtttatcgatggcagttcttctaaacccaatcaattttcaccagctaaagctggatatgctgtcatgtcccacacctccattatcgaagctgctgcacttcctccctccactacttcccaacaagccaaactgattgctttaactcgtgtgctctctctcgctaaaggaatgcatattaacatttatactgacttcaaatatgctttccacatcc

SEQ ID NO: 115613 - DNA, 356 bp, Homo sapiens
ggagatggctggggctaagtcaggcagaatgtgttcaaacctgtttttctctgacctgagattgcggagggaatattgggaaggtatagttacctggtgaggagagccagttttgtgaagaatcaagaatgaggagatttaatttgttatgcagatgtctgggaaccacagcagattatcaggagagcaaaattgttagtcagaattacatcgttagaaggtaatccttaagttttgtagatttctagaatgtaaggaagctctcagaggtgccataaggtgagtatggcctaaggatgtggctatggcagtgtagcaaaatggacaactatgaaaaatgtctagagaaaagtgca

SEQ ID NO: 115614 - DNA, 231 bp, Homo sapiens
ttttggattaaccgctgaaactccttccttcctttctcccttgtatttttcaaggtgagggagctatgtgaataactcatttagtttaaatgcacatttttaaaaattatacttaagtcagagatttgcttgtgcatgttaatttgtgatgggaaagtgttagtatttacttcagaaaaaaggaagctaaagacgaggaaagaagagaaagggcaaagaatttggaagcat

SEQ ID NO: 115615 - DNA, 278 bp, Homo sapiens
ggcttgggaaaacagaatggccctagacatgatattagccaaaaaaggtggagtttgtgttatgatcaaaactcaatgttgtaccttcatcccaaacaatactgcccctagtgggagcataacaagggccttacaaggccttactgctttatccaatgaattagctaaaaattctggagtcaatgaccctttttcaggatggctagaaaggtggtttggtaaatggaaaggaatcatagcctcaattcttacttctcttgcagccgtaataggtgtag

SEQ ID NO: 115616 - DNA, 1193 bp, Homo sapiens
tgtgacttagaggacagggatggattccaaggttcttcattcattttttaattccagcaaagcacagagtttgtacgtgttcagtctgttgacagtgggtccctcggccaaaaggttaccttgaatctctggatgctgagtctccactcttccaagagtaactgaagatgtccataataaggggtcgtgaactgaggagatgatatagttactttagaaggaacagtagagttctggggaatttggcacgaggcgcccttggacattactctctggatacaacggagagtgtgccaaggcttagttagtgctacattaaaataaaaaatgtatgtggcaagggctgtaccaaaatagagtccacctcagactatgggaattagggtgggcggatttggagaaacttaaaaaaaataactagatttggttaggaaattaccatccatagaatatattgatttatttctttttactttcttaggtaccacatgttttattgcaaaccttcttaggtttgggctgttaattaatctgacattttactttctgtatttcctctacttctgtctctttgctagaattacagtgctactctttagaaagaaatctaactttccgtttagaatttaggaactatgaaattcagctaattctggaagggtacatgccccagattcatctgctaaatagtaccagcttaaccagaaccaattagggcaaaagaggaaggagccctactttcttgctatcctcttaaaaaaaatattcagcagcaccagcatttcaaagcatctctgatattacagaggtcttcaattatcatttggaatgtggatgagcaacaaactaaaacttctctacatgttcagaaagatactttcctcctttataaaataacaaactagtagaagttgtttcaaatatggctttattttttagggttgtgaaattaatgaatctgtggtgtggagttaatactgtaacacttttttttgagctagaaaataacattcggtatcagagaaaatggcaaattgccaatcataaaagttttcaataagaaatgactccagtactttatataatgtttgcaatagccctgagactcggtccccaaattcatttcttttgctaaaaccgtcaacatactgaagacaacaattttaaaaagtaaaaaataaaataaaataaaa

SEQ ID NO: 115617 - DNA, 440 bp, Homo sapiens
agaggaagcttagcaacgttacatatgtcttccttggaatctaacaagggccacagaatctaaaggctctctcttcattccttccttccttcctttttttcttttttctttctttctttctttctttctttctttctttctttctttctttttctttctttctttctctctctctttcctttctttcttttcttctttctttctttctttctttctctttcttctttctctctctttccttccttccttccttccttccttctttctctttctttcgtcatggttgagaacacagaaggcatcaagtttgatgccttctgtgttctcaaccatgacccattttacaaatccatgtgctcaatgttctgtgactagactaacaagcaccagtcacacccttaaatctttttgtctcttaggttgttctagcccagaaatct

SEQ ID NO: 115618 - DNA, 307 bp, Homo sapiens
agagtggtgcacggccacggtttacgagcctcaacgtgcacttcatgagcaagcaagtttacagccccttttacaggaattggtgcacattccctctgcttgcccctgtccctgcccacatgaaaacacagggattttttgctactactgctgaagaaaagttagaggacaccttgacctcatgattttgctgagcacttgctttcttaacagtgtgctttctggacccttagtttattttttatttttttaattttttttttttttgagacaaactcttgctctgtcgcccaggctgtagtgcagc

SEQ ID NO: 115619 - DNA, 265 bp, Homo sapiens
attttcttcacacttttttttttctacttagacaagataattccaaattgatttgtcttccacttcactgaggtttttctttggcctgttcaaatcttctgttgaaaccctctagtgaagtcttcatttcagttattattctttcacatcttctgtttggttccttcttatcatttgtatctcttcattgatattctggatttgtttagacattgttttcttggtttccttcatctctttgtccatggtttccattagctctttg

SEQ ID NO: 115620 - DNA, 1872 bp, Homo sapiens
ggcggcgtgcgcgccgtgagccccgccgcctccgccagcccgagctgcccgcccggcggcgactgcgccggccgccgcccagcaagccgggtcgcggagcctcgccggccgccatgtggagctgcagctggttcaacggcacagggctggtggaggagctgcctgcctgccaggacctgcagctggggctgtcactgttgtcgctgctgggcctggtggtgggcgtgccagtgggcctgtgctacaacgccctgctggtgctggccaacctacacagcaaggccagcatgaccatgccggacgtgtactttgtcaacatggcagtggcaggcctggtgctcagcgccctggcccctgtgcacctgctcggccccccgagctcccggtgggcgctgtggagtgtgggcggcgaagtccacgtggcactgcagatccccttcaatgtgtcctcactggtggccatgtactccaccgccctgctgagcctcgaccactacatcgagcgtgcactgccgcggacctacatggccagcgtgtacaacacgcggcacgtgtgcggcttcgtgtggggtggcgcgctgctgaccagcttctcctcgctgctcttctacatctgcagccatgtgtccacccgcgcgctagagtgcgccaagatgcagaacgcagaagctgccgacgccacgctggtgttcatcggctacgtggtgccagcactggccaccctctacgcgctggtgctactctcccgcgtccgcagggaggacacgcccctggaccgggacacgggccggctggagccctcggcacacaggctgctggtggccaccgtgtgcacgcagtttgggctctggacgccacactatctgatcctgctggggcacacggtcatcatctcgcgagggaagcccgtggacgcacactacctggggctactgcactttgtgaaggatttctccaaactcctggccttctccagcagctttgtgacaccacttctctaccgctacatgaaccagagcttccccagcaagctccaacggctgatgaaaaagctgccctgcggggaccggcactgctccccggaccacatgggggtgcagcaggtgctggcgtaggcggcccagccctcctggggagacgtgactctggtggacgcagagcacttagttaccctggacgctccccacatccttccagaaggagacgagctgctggaagagaagcaggaggggtgtttttcttgaagtttcctttttcccacaaatgccactcttgggccaaggctgtggtccccgtggctggcatctggcttgagtctccccgaggcctgtgcgtctcccaaacacgcagctcaaggtccacatctgcaaaagcctcctcgccttcagcctcctcagcattcagtttgtcaatgaagtgatgaaagcttagagccagtatttatactttgtggttaaaatacttgattcccccttgtttgttttacaaaaacagatgtttcctagaaaaatgacaaatagtaaaatgaacaaaaccctacgaaagaatggcaacagccagggtggccgggccctgccagtgggcggcgtgtgctagcaaggcctgccgggtgtgccgcagtcaccacagggttctgagaacatttcacagaagtgcctgagacgcggagacatggctggtgttaaatggagctattcaatagcagtgacgcgctctcctcagccaccaaatgtccctgacaccctccccagcccccacagataacatcagctgaggtttttttcagtatgaacctgtcctaaatcaattcctcaaagtgtgcacaaaactaaagaatataaataaacaaaagaaaggtgtgttaggaaaact

SEQ ID NO: 115621 - DNA, 1938 bp, Homo sapiens
caggcgcgctgctgataagagcctgcgggtttgcagagaagcgcagcagcgcgcaggtcctcaccagagctctggtggccacctctgtcccgccatgctgctcaccgacagtggccaggcccacagcaccaagaggcttgggccacaaagtaaagggtcgcggagcctcgccggccgccatgtggagctgcagctggttcaacggcacagggctggtggaggagctgcctgcctgccaggacctgcagctggggctgtcactgttgtcgctgctgggcctggtggtgggcgtgccagtgggcctgtgctacaacgccctgctggtgctggccaacctacacagcaaggccagcatgaccatgccggacgtgtactttgtcaacatggcagtggcaggcctggtgctcagcgccctggcccctgtgcacctgctcggccccccgagctcccggtgggcgctgtggagtgtgggcggcgaagtccacgtggcactgcagatccccttcaatgtgtcctcactggtggccatgtactccaccgccctgctgagcctcgaccactacatcgagcgtgcactgccgcggacctacatggccagcgtgtacaacacgcggcacgtgtgcggcttcgtgtggggtggcgcgctgctgaccagcttctcctcgctgctcttctacatctgcagccatgtgtccacccgcgcgctagagtgcgccaagatgcagaacgcagaagctgccgacgccacgctggtgttcatcggctacgtggtgccagcactggccaccctctacgcgctggtgctactctcccgcgtccgcagggaggacacgcccctggaccgggacacgggccggctggagccctcggcacacaggctgctggtggccaccgtgtgcacgcagtttgggctctggacgccacactatctgatcctgctggggcacacggtcatcatctcgcgagggaagcccgtggacgcacactacctggggctactgcactttgtgaaggatttctccaaactcctggccttctccagcagctttgtgacaccacttctctaccgctacatgaaccagagcttccccagcaagctccaacggctgatgaaaaagctgccctgcggggaccggcactgctccccggaccacatgggggtgcagcaggtgctggcgtaggcggcccagccctcctggggagacgtgactctggtggacgcagagcacttagttaccctggacgctccccacatccttccagaaggagacgagctgctggaagagaagcaggaggggtgtttttcttgaagtttcctttttcccacaaatgccactcttgggccaaggctgtggtccccgtggctggcatctggcttgagtctccccgaggcctgtgcgtctcccaaacacgcagctcaaggtccacatctgcaaaagcctcctcgccttcagcctcctcagcattcagtttgtcaatgaagtgatgaaagcttagagccagtatttatactttgtggttaaaatacttgattcccccttgtttgttttacaaaaacagatgtttcctagaaaaatgacaaatagtaaaatgaacaaaaccctacgaaagaatggcaacagccagggtggccgggccctgccagtgggcggcgtgtgctagcaaggcctgccgggtgtgccgcagtcaccacagggttctgagaacatttcacagaagtgcctgagacgcggagacatggctggtgttaaatggagctattcaatagcagtgacgcgctctcctcagccaccaaatgtccctgacaccctccccagcccccacagataacatcagctgaggtttttttcagtatgaacctgtcctaaatcaattcctcaaagtgtgcacaaaactaaagaatataaataaacaaaagaaaggtgtgttaggaaaact

SEQ ID NO: 115622 - DNA, 245 bp, Homo sapiens
gtcaacttcccactatggccagagatgaaattataaagtattctaagtatgccactccccaaattaacttggttatatttttattggtttttccagtatttatatcttgattaattgatttatcaccattaaagaatctatttgattcctgtataggcatccctctatcccttatctctcatcttctttgtcctatggacttttgttacagtaattctaaattgccatgatttacaattgatttc

SEQ ID NO: 115623 - DNA, 906 bp, Homo sapiens
atctaggcagatgtttgactttagtaagatccactattcactcatatgttcattcattcaatgtatttggagggacggggagcatttactgtgtgtcatgtactgtactagatgttgaatatacaatgagatgcaaaatagacacattccatgacctaaaggtgtcaactgcagaattaagtttcagaagcaagacgctattcttcagtctcagtgaagactattaagaataagtgcaggctatggattcaaagaaactttgagagtaaatagagtgttatagtggggactatgccactaaaacaaatacatactgcatttgactttgtatagatccatgaagcccctgacctaagttttcatctcttcaattggtaacaattttagtctcagaatggtagtaaaccaagacattctttatacacattaatatcattgtttttaaatgtttattctctactgtgttcatgctggaatatcttaagacaaaactgcagaggtaatatccatgttccattttatcttctgccctttacaagccacctttcattatctataaaaaaaagaagcagttttgtacatttaatgacatagttagaaagatatcgaacaacaacaacaagaaaaccatcagcagtttgtccaggcatgtagctcagtgatagctaatgtaattaaaacctaaaggtttttccttattctcctctgtacgtgaacttggtaacaggtgggttattcttgaagactcattttgcagacttcctattcacaactgtatgtaccttattctgaaattttctcaccagttttgatcccttttccctttacaatacgcattttggtgactatatattgttaactttgcaaattactcttatcattgattaaattttaatctcttattgt

SEQ ID NO: 115624 - DNA, 479 bp, Homo sapiens
gtaccttcagacttgtctaacccacagcccatcatatctctgggtgtttctccagacagctttgggagagaaagcacaagactatgcctttctatttactttagatcataacagtgagcaatgagggcatttaaagacccccaaacaggggctgaatttgttgaattgcttgactcacctctcagcaaatgccttcccatgtgtcctcttcccagctgaactgtgagctgcctgggaaagccagtgcctgactcttcgtatctgtgttcacagctcagagcacagcagggccacttagtaggttccaataaatgcttattgaacaaatgaatgaatttaatgatttgtatattttactaatagttcttgccctccttaggtgatgttagcacagcaaagcttggttaaattacactaaggtagtggttcttaatgtgtgattcctggaccagcagcatcagcatcacctggaaacttgt

SEQ ID NO: 115625 - DNA, 201 bp, Homo sapiens
aaaaattttgtttgtttttgtcatactcatattattctaaggcccattgattttagaaagaaaatctgttttataaacttagcatattaaaagcaaatgcatagctccattttcttagaaatgcgtgaatacataaacatgttttactgagagtaggacttaatttatatgtattaaactgtcagaatatacaagttcttt

SEQ ID NO: 115626 - DNA, 326 bp, Homo sapiens
gctggcaacgttggctttgtaatttcagctgagatgaagtacagaagattgttagttcttagaacataattttctgtgataggcagaagcaagctgcaatttggtggcatgcaaagcggggaggattcatttaactggatgcatatggaaagctgactccacggacatagaattccccattcagatctgatagccaccttcccctttactcccttatttatcattctgagagcaaagtgtttgtcaggtacatgtgtgggaaaatattgtttgctagtagcaatgttcccaaattcttactcacttagccccatgaaggttgcctg

SEQ ID NO: 115627 - DNA, 546 bp, Homo sapiens
tagtgactttaaggaagatgagtaggaatcatggtagaatttatagtagacagagtagcacctgtacctatcagaaagatttgctttctccctctattattaaagataatcctccttaatgatttgaaggagaaattgggcactataatattgcccagagtcccttcattattcctatttagaataacagggaaggagcattacttctgtttcattttagttaagatgggttacttttcctagtgctctcccctttgttaagtgcagttggccctctgtatctgtggatgacacatccatggatgtaaccaacctcagataaaaaaatttggaaaaaaatgaaaaacaataatacaaaaataaaaatacaaatttaaagaacaatgcagtataacaacattgtattaggtattataagcaatctggacatgatttaaagtataggggagaatttgtataggttatatgcaagtagtacaccattttattttagagacttgagcatctgtggattttggtgtctgcagcaggtcctggaaccagtcc

SEQ ID NO: 115628 - DNA, 285 bp, Homo sapiens
gaaatccttcattctatccatgagcttgttattcttgagaaaaaaatttactttgagagtctgaggaatgataagtttgttacattccggaatctagttttggtgttgtgtccatcctttagatagggtgcagctctgttttaccatagcaacaactaacttttatttccatagccactgactgcactcctgaccctgccaaccatcttgcaaatacatcctcttgcttagaagaaccaggggaggggtggggcatggtggttcatgcctgcaatcccagcactt

SEQ ID NO: 115629 - DNA, 508 bp, Homo sapiens
gtggaatctttcagttataataatcattgatcatatgctaatgtctgtcaagaactatgaagagtttgaagttttaccctatttataggctgacaagttaacttggcatagtttaatggcttatggtagaagtcattgaaatgacttggtcatagatgaagaacgatgcactgtgtcagtagccagacagtcagcatttgcatcagatttctgagctccagtttgcataggtcattgggaagaggtccaggtgaaacctgcacaagtagtgaaatcccaagcttagagaaactcagatcttttataatgggtcataaatacgctttttgctctgggacatgtctttcttccaggacccttcactatataactatcctgaaaagattggaacaaaggcttccagtgcttctcttctcaagacaggcagaaaatcaagagactccatggagagttgtcttccaaaactgtctagtgaattttctcagtttcccttttgttatttgcttaa

SEQ ID NO: 115630 - DNA, 779 bp, Homo sapiens
atgttttcttctaagagttttatagctttaactcttacacttagggctttgattcattttgagtttatttgtgtatatgctataaggtaggggtttaacttcattcttttgcatgtggatatctaattgccccaaaaccgtttgctgaaaagactgttctttcttcactgaattttcttggtatcctgttgacacattcattcttatattaaaataaatacgtattctctgtgagtcagaatgagtgagtcaattgtaagtttgttgtattgcttttaaaactgagtagatcataaaaatgtctctgttgtttcatctataaactgagggtgatactactttttggtagcataatttaaggtgtaaaatatcttgctgaaggcagagggctagatcgtattacctcccaatagattggacactagccttaattgtaaacctctaattgatgccaatgtggttgaaagacttttgagtctgaccaacatagatccaaatcttgactccattacttactaactgcgtgaccttgagcaagttagttcttgggaactggtttattgtgaggattgaataggataatgtataaaaatatttgacaaaattactgagatttattcattcatttattcatccatccgtccatccattcattctggaaaaacttacggagtgcttaaaaaagctaaaataaattgaatagacaaagtccgtgctctcatagagtttactttgtcctggggacacagataataagcaaataaatcaataaatatata

SEQ ID NO: 115631 - DNA, 125 bp, Homo sapiens
acctcggtaccctattattaagaacctggttaatatttggaagtctacaatgtactcttaatgtcttgaagtataatattatttacagttcttagaatagttaaatcttcatatggaccctcatt

SEQ ID NO: 115632 - DNA, 360 bp, Homo sapiens
cagagctccctgggcaaagttggtataaatgagattgtttcaaagggagctcacgacttaaagagtcctggccaggtgcggtgactcccgcctgtaagcccaacactttgggaggccgaggcaggcaggtcacttgaggccgggagttcgagagcagcctggccaacatggttaaaccccgtatctactaaaaatagaaaaattagcggggatggtggcacgcacctggagtcccagctgctttggaggctaagccaggagaattgcttgaacccgggaggcagaggttgcaatgagccaagatctcgctgctgtactccaacctgggcgacagagtgagactccatctcaaaaaaaaaa

SEQ ID NO: 115633 - DNA, 852 bp, Homo sapiens
ctcgatttgtggttggctgaggtggaggaacaaaatggcggcgccggcggcgtgaccgggccctctggcccacagccgttggtagcggtggcagcagtactgctgccccaactcgctgtgccccctttctcagcccacgacatcgccacgacagcgaggcagcgaccgccaccgagaaagaggtggtggcccagcctggaaccttgagaaaccctcgcaaactgtggcctggcggaaatcctggtgtgctgcagggatcaggctgactccacgccctgtaacaccgggaaacgcctcggtggccatttccagcagccctcatcctcagccttgcgggccggtgggccccggaggcctccatcctcccctagaggggtcagggctgagcccagcctccatctttgcctctcaggatgacaaacaacagcggctccaaagccgaactcgttgtgggagggaaatacaaactggtgcggaagatcgggtctggctcctttggagacgtttatctgggcatcaccaccaccaacggcgaggacgtagcagtgaagctggaatctcagaaggtcaagcacccccagttgctgtatgagagcaaactctacacgattcttcaaggtggggttggcatcccccacatgcactggtatggtcaggaaaaagacaacaatgtgctagtcatggaccttctgggacccagcctcgaagacctctttaatttctgttcaagaaggttcaccatgaaaactgtacttatgttagccgaccagatgatcagcagaattgaatacgtgcatacaaagaattttctacaccgagacattaaaccagataacttcctgatgggtactg

SEQ ID NO: 115634 - DNA, 169 bp, Homo sapiens
aatgatctctctcaggatacctgattctgtaactatagctactctctagtaatagaatgaaaactttggtctcctgccagtcgaggcatgtcggaggaaaacactggatctatttgatgtcctcacatgaaagtaaattccaaacaaagcaaatagttaaatgttcaaa

SEQ ID NO: 115635 - DNA, 484 bp, Homo sapiens
caagcaggtgatattatcaaaattttacagctgcaactcagacaaatccagactttggaaggatcagcataaaggatccttctaccacaagaacaaaatactgcaaaatgaaaaagggaagacagaccgaatgatcagaagtattcctcagaactgataatgttaaatcatgttaagtagtttcctagttatcagcatagtgaagtagggaggtgggtaagaagtagggaagttggccaggcgcagtggctcatgcctgtaatctcagcactttgggaggccaaggctggcagatcacctgaggtcaggagttcgagagcagcctgaccaacatggagaaaccctgtctctactaaaaatacaaaatcagccgggcgtggtggcacatgcctgtaatcccagctactcgggaggctgaggcaggagaatggcgtgaacctgggaggcggagcttacagtgagccaagatcgcgccactgcactc

SEQ ID NO: 115636 - DNA, 546 bp, Homo sapiens
cgaggagcagggaagaggagaatgagcatcatgggccttcaatgcccgctctgatagcccctgaggactctcctcactgtgacctgtttccaggtgcctcatatctcatgactcagattcccgggactcagacagagtccagggctgaggaactgtcccccgcagctctgtctccctcgctagagcccatcaggtgctctcaccagcccatttctctactgggctcctttttgactgaggagtcacctgacaaggaaatagatcaaaacagccagcaagaggaatccaggctgaggaagggaacagtgtccagccaagggactgaggtggtctttgccagtgcatctgtgactcctccaaggacaccagattcagctcctcccagtcctgctgaagcctaccccatcacacctgcctcggtatctgccaggcccccagttgcctttcccaggagggaaacctcttgtgctgcacgtgctccagaaactgccagtgcccctctctcaatggatgacccatctccctgtgggacttctgagatgtgcc

SEQ ID NO: 115637 - DNA, 401 bp, Homo sapiens
aaggtctataaagatagaaaatacctgataaaaaggctacattttgaggaatggcaatgaagcctgtgagaggacgttttcactattctctttctcttgaaagaaagagaaagaaggaagggaggaagaagggactgggagtgttggtaatagataacccttaatatcccattcagatcaaatttctataattataatgtggctctctgcctctggaggtcactcagtaacaaagaaatataactttaaaaatagccaaagtaggaaaaataacaatcattctcataaatctgcagtttctttctttctttctctctctctcttttcttctctctctcttctcttccttcctttctttcttctttctttctttcttttcttttctttctttctttcctttc

SEQ ID NO: 115638 - DNA, 235 bp, Homo sapiens
ggcccgaatagacagagaagaaggaaggaagagaagagagagagaagaaagagagagagagtaacaaagaaatataactttaaaaatagccaaagtaggaaaaataacaatcattctcataaatctgcagtttctttctttctttctctctctctcttttcttctctctctcttctcttccttcctttctttcttctttctttctttcttttcttttctttctttctttcctttc

SEQ ID NO: 115639 - DNA, 872 bp, Homo sapiens
aggaaaggtataagaaaatgtattttcctctcttctctacctcatggctttccttgaaattcaagtataatatagatgatgtaatttttatggatggcttggcagactttctctcaaaggtttagactttgtggaccacgtgatttctattgcaactactcagctctgctgttgtggcacaaaagcagtaaatgggtcaggcacagtggcttatacctgtaatctcagcacttcaggaggccaaggctggaggattacttgaggccaggagttcaaaaccagtctgggcaacatagcaatactccatctctacaaacaaatactaaagttagccagacatcatggcatatgcctgtggttccagctactcaggaggctgagatggtgggatcgcttgagtccaagagttcgagactgcagtaagccatgattgattgtaccagtgcactctagcctgggtaacagagtaagaccctgtctcaaaaaaacaaaaaaataaataaagcttccaggcatggtggcgcatgcctgtaaatcccaaagtgttaggattacacatgtcagccactttgcctggccagaaatttttattgttaggggctcgtaactgtaggcaattctggagcatcaagtgctttattaagaagcatttattgagtacctactttatttcaggaagtatgccaaaatgctgctgaatagcaagaaattaaatgagacttggttcttatacgtcagatgccttatggtctagaggaatggtgtacaaaagcaaggtgcaaattattttcataatactaagacattatttgacttttggactatgttgacatttgcattgaaaaaatgataggtataatcctggttgtatc

SEQ ID NO: 115640 - DNA, 435 bp, Homo sapiens
tttgatcactcctgaggggccaggatttattttaatgcattttaggggaggagaagatatcctaagcctggcaaaataaaaataacacagattaaggaaacaatgaaacattattttaaaagaaatgcacttcagttaatattattctatgggatctcctgagtcctttgaaggcagagcttatcttagaaaatatgtctcctttagtgggcaggaggttagttaagcaacctcacaccagatcacagattatactgaaatgatcctaataaggaaagactttccaaagctatactcattttagcatgaataaatggattcaagtcttatttgtgggattttaatttccaactttgaatttgcaaactatcaaattccttcaaagacacggtgtgcagagaaggctctgagtaataggattgcttatttttaaag

SEQ ID NO: 115641 - DNA, 413 bp, Homo sapiens
tgagtctgtgttcacctctgcagagcattgtaacatattttacccttaattatattatttcatcactatttcttttcccttaactgtgttctaataaacatgcttatttctggaacttagggactcattacactctgcattctttcattgcataaaatcaaactctcaatcaatatttaccccagcagttctccatcaccacaaaagaaagagaagaaattgcataggtaaacccaaagggaggatgaggcttaggaaaaagaatgaaaacaaggagccattaaatgtatacaggtttctcaaggaatctgtaaaatcttcccctgtgaaagacatctaactaaaggaaaaatggtcttgaaatgtttattattcttcaaacactgtcttctcctgacaccagatagtctgga

SEQ ID NO: 115642 - DNA, 654 bp, Homo sapiens
  misc_feature (282)..(282): n is a, c, g, or t
  misc_feature (285)..(285): n is a, c, g, or t
  misc_feature (287)..(288): n is a, c, g, or t
  misc_feature (293)..(293): n is a, c, g, or t
tgggccggggggagggggaaaaaaagaattttgtaaaaaaaataacccttcaagggtgttcatttaactttcaccatactttctcttttctggtaaaagcatttccgaaaaaaaagaacagaatgtttatgggagacatgcataaactgaattcaagaatattttttccataggaataaatgtgaaatgagatggccataggagttctcaaagtacatatgtccacatccattatagcatgtttttcctttatgctcctttttatttctgagcattatctcnaantnnatttntcagatttctttaaatgaatggcacagcatacattggggccatttggcttttttcaaaagattttattatctcttctttgtctcataattactgatttggtggcagttttttaagcactagccttattaccaccacttaatgaaggcttggatgatattattattatgatagaaaaatacatgattttataagtagtcatgagtgcatcaaataacagcacaggatacaacaaaatcacttgcagaagacctaacgctcataaattctagggaaataaggcaataaacaaaaaggaaaaaaaatatttatttaaaaaaaaggaaagaagttaaaaagcatcagtgttgtaagaaaaaaaaa

SEQ ID NO: 115643 - DNA, 103 bp, Homo sapiens
ctgccagaggggaaaggcctccaggacagaagctgagccctagaaagaatcacatgagccagatgtggtggctcacgtctatcatcccagcactttgggagga

SEQ ID NO: 115644 - DNA, 480 bp, Homo sapiens
ggtacaaaccaggttaacttttaatacatcttgttaacttttaatatagattgaatgtctatatgatgatgtttaggatatgttaggttatataaaatatattgttgatttcacttgtttctttttactttttgaaatgacactaatagaaaatttaaaattatatttggcttacattataattctaatctgatataaaggactagcaatagactagttgcttgttgagtgttttgactgtggaatgaaaatgccttatagggttttcctgtatcttctgatacaggaaattgtagagcaaaggatgtaagtttcttgtgaactagacagtggccccgaaagtctgtgtaggattttcttgggtcctgttcaagaaggccttttagatggatgagaagacctcaacagggattgaccttccagattcccaggagctgagaaaagagccaaaaatggccagttgagggtgtataccaagca

SEQ ID NO: 115645 - DNA, 752 bp, Homo sapiens
gcttgtctgggagcgtctgctgttactcgaagtcccagctttgcctccgtctttctccctctaacccaagacaaagagcagtgtgctggattcctggctgttgctaaattctggactgctccacgcccctgggtttggcttctgtgttcttccacccattctctgcattacatttcctccctgtgaaatgtcttgagtcaattctgtctctcgactagaccacgcctgcaacactaactgttccgttcggacagaaggttcctgagaacacactggcgctgctgcgctccacaggactgctgctcacagggaaaacagagacagagatggagaaggagactcctgagttcatcaagaaacaccttgatccagccttgcttggaacgttggggtagatgaacaacaggagaatggacaagacatcataaaggcggtaatcatgcttccttcggccagaaacggtccccatcccatctattgatgagaacgcagccatgtgaccacatctccttgccaggcaggctgggcaatgtggcttcaccacgtaccaaggaaggaggagcagcaactggtgagcatacagcgcagcacccacttgtggtgccagaccatcaggtaaggccagacacagccgggcagcctggcagcaaggacaacgaaacctggagctggtttatcggtgacgagtggaatctgtttcctgaagagcctgagaaggcaaagagcctcctctgcgggaagacgggagtgag

SEQ ID NO: 115646 - DNA, 410 bp, Homo sapiens
cagtgagcagtgtgagtggtcatcagagaatagctatctttcataatgataagacaggccaggcagcctcatgcctgtaatcccaccactgcgcccggccaggcatgggtttttatgaaacaccgctggtttcatacaataagatcaacatggagcttccttctttggaagcctctagcaaggccaaatgaatgtggcccagagaaagggagaactgaggcatgatatgtgggtttacctcaatcccaaactaaagcctaggagttggacactaaatctaagctacagatgcttttgcctgactttgtcctatgtgcttcacttcctgtcaatatctagcaagtgtaatttttgcagggggaaattaaggggtcctcaacctggccatacttaacaactaatagcaccca

SEQ ID NO: 115647 - DNA, 404 bp, Homo sapiens
tcactgctttcactccactttgaccgatgtccaccggggactgctatccatccatggtctgatattcacctggagacagatgttcaactggggtttctaatgacagatggggaagccaaggtgaagcagaagtcatccctgaagtcttcccttagaagccgtttgcagccttttctgagacagtcttgctctgtcacctagtctggagtgcagtggtgcaatctcggctcactgcaacctctgcctcctgggttcaagcgattctcctgcctcagccttttgagtagctgggactacaggcgcctgccaccacgcccagctaatttttgtatttttggtagagatggggtttcactgtgttggccaggctggtctccgactcctgacctcaggcgctctacccg

SEQ ID NO: 115648 - DNA, 378 bp, Homo sapiens
tcaacatctgaactctgtaaaattgctttaagctgcaagttacaaatctacaaaaatttaggttgaagaacacagactaaaactacaggcaatgaaacaagttataaaaggagatatgatttacataaatagatgctataaatacagaaacactgtgaagacaagataatccatctgcacattggaatagatattaaatctcacgtatatgatttgaaaattctactttttgttccagagacaaaagatatcaaatatgtattagacagagaaacttgcagacaattacaggaacacctaaacattaaagtctgagttcttctgcataatatttattcattctttctaaggatctgggccaatttttttaagtaggcg

SEQ ID NO: 115649 - DNA, 360 bp, Homo sapiens
ctggatggcacagacagcaaaggagatggtcttccgggatgacaggaggtggaccagcatcagaggcacaaaggtgggcgtgtagcagatgtccagggtagagaggttgcccaggaagaagtacacgggcgtgtgcaggtggatatctagcacgctcaccgccatgatggctgtgttccccaggagggtcaccaggtacatggctgagcacagagggaagagcagatgctccagggctgggtagccagaaaatcctttcagaaagaactcggacacctctgttctgttgagcggctccatgctgcagagttctgaagagatggtccacagctgggatggaaggagagagggtacagggtg

SEQ ID NO: 115650 - DNA, 370 bp, Homo sapiens
acagaccgtcacataaccagtctgcctcatcctcctcatctgtaaaatggccagaataaaagtgtttactcataggaaaatccttatttgaggattaaatgaggtcatttaatccccagagtggtatatagcaaaaattaagtccatggtcgatggttatttaattcattaggtaatttatttcataaaacaaacctgatgacaagagaatagaacataaaggacaaaaatcttcaaggaaagtagcaggggctcagctgaagtataaggagtaatactgtgggggatgtgccagtgagtaccaggaggaaagatgccttgaaaagatgcggggggagagaaagagaagagtccagagatctcatcattt

SEQ ID NO: 115651 - DNA, 245 bp, Homo sapiens
taaggactgtaattttgaaaggtttactgtgggtaaagttccatcagacagcattatacgctacagagaaatcttttgtgaaagaagagttggccgggcgtggtggctcacacctgtaatcccagcactttgggaggttgaggagggcagatcacctgaggtcgggagttcgagaccagcctggccaaaatagtgaaaccctgttactactaaaaaaatcaaaattagctgggcgtggtggcagg

SEQ ID NO: 115652 - DNA, 330 bp, Homo sapiens
ccccagcctgtccccgcccactcttctccaagtcatctcctgcatacctttcaagccgcagcaccctctgcccactagccctctggacctaccgcagactactgctactagtctactgtcagccagacccacaagcttcctgagggcaaggactgtgccacttttgctttgttatctggtgtccaatttatagaagatgctccataaatacctgctaaattaatgtaaaaatgaaaaaaacttttcctggctgaggcaggagtctaaactgagctgcaccagacacagctgcaatgtgccccctacagtgctgaagagagagaaaatcac

SEQ ID NO: 115653 - DNA, 529 bp, Homo sapiens
ggctgcattcaccgcaaactgatagaagagtccttgagttttaaatgaacatttgtggtggcctggcagaacccccatggagtggttttggtgatggccccaaagagaggctcctatgcctgtggaaaggggaaggaaaagtgggaaggacttcgtattgtagtgtaagtgccagcttagccactgtagtctagaacatcaggtatactgttaaggttacagactctaagccctggttcacagacagcatctctggacatgctccaagcctgggggaacttactaccttgaagggaagggccttgggcagcacccagtgctgtgttggcttcaggtctgacccagcacagtcccagtagtggtggtcacaggggtgcttgcatcaccacatccccaggtccaggtgtctaagtgcagagagagaaagtctctgcttatttgggagaaagtcagagaaaagaacaaaagtctctgcctggtaatccagagaattattctggatcttatccatgtccaccaaggtggtacc

SEQ ID NO: 115654 - DNA, 1653 bp, Homo sapiens
gacccacgcgtcgctgcagaagatgaagctttgagtaacattgccagagaggcacatggatggagtgaaagccattatcctcaacagactaacacaggaacagaaacccaaacactgcatgttctcacttataagtgggagctgaacaatgagaacacatggacacaggaagaggaacaacacacactggggcctgtggagagggagcacagtggggtgagggagagcatcaggataaatagctaatgcatgtggggctaaatacctaggtgataggttgataggtacagcaaaccatcatgacacgtgtttacctatgtaacaaacctgcaggtcctgcacatgtatcccagaacttaaaaatcagtgagatatttttcagttaaaagatttaaaaatgaaaacgtagatacgactctacagtgagtgatcttaactatttgcacaaatgaagcattttggaaacaacataattgtagttgaaatttgaaactacccagaatgtttcctttcaaaattggagggatttacccagatttctgtaagggaggaaaatgccaccaccttctagtctccttttgtgttgtcactaagtatttgaacttttttttttaatgtgatgctttctttaaaaaattgtataggattctaacatccagcacttgctgagtgctgtgtagcaaacactattctaagcattttacatgcattaattcatttaatccttataaaatctgcagtcagtttttttatctgcatttggcagatgcggaaaccattgcacagaaaagttaagtaacttccccaaggttacgtagctaggaaatagtagagccaggattcagactctgaagcttggctccagagtctgtgcatttaacctcttactatgccagattgtttctcaatcagtcttctctaattccaccattaatagcttattttttgtttttcagtaacttttcatgactttgaaagcagtttcacatcttgattctcacaaaagtcttgagctaagtaggatagatattattactagccatgtttacagctgaggaaacagatgatgttcagatagctctctaaaatgtatcagaagcaaggctaacattcacccatttgaagtcattgttcatgttccaggagaggtgggctttggagacttacagggatttggagaaaaaaattcagatggcacaatatcattaacctaaatttgaagacagtactagcaacacctttttttccccctctcacaagtatttatattagtccccaaattagtatttttggttaaatgtatcattgcagatccaaagttttactttttgtatactgtttattgggttgtataaagtcctctctcattccaaaagaatatttttgctgtcaaaaggtctccgagtaaatggaagatatagttgtttgacatcagaaaaagatgagttaaaattcctagagtttatctactacatgttggtgtttatgctcagaaaaatttaaatatttgtcctcaactaccaaaaacttaaagtggttaaacataatcatattgtaagatttaattaaaaatttttgtactaaagggaagttgctaggaaatagagcagtaatttttgttaatttggaaaccatggcaacacagtaaatatt

SEQ ID NO: 115655 - DNA, 602 bp, Homo sapiens
ttccttcagagggtctgtgtattctctcagctttcctggtatattcctgcagtagttctggagcaaaagcatgatgcaagtctccacatgctactcggtccacctgagtgtgagctgcaacctaatcctgcctcctatcttgccattttcccaataacagtctctccagaacacaagtattttaaaaactaacccagtaccatattctcactaatcaaagatgagttaaaatttgattgcttatttttatgtttcttacattgaatgtttaattaatgattttaaatttttttgtgattaatagcaaagatattcaagtccatacatttttctcaaaatacaactttaactacatcttataactttgggagagccatgatagttatttttattggtcttttacatgaggcatggactgaggctgtgtaagagagagaatccatttaggattataaaagaacaaaagtaagaaaaaacagtattgctctttctgagtaactcattgagattaaaatctgtctctgaggcttctgtaacaagcaagtttttctcttcacagaagcatttcaggggcctgaggctaatgctccgcaaaggatagg

SEQ ID NO: 115656 - DNA, 587 bp, Homo sapiens
catcctcagttggtggggtggatcttgattcaattcagatatgcctttcaagctggccctgctgagctgggccggaaaggcacttggctcatctcatctgcatgtgacagtctctttgaagtccccagaagtgcctgctcagagtcatgctcgggagggaagaggtaaggcacagaatgagtacagactgccacccagccgcaggaaaggtgactgcacaccagaggttcctggtagggaggtgactcacccgcgagtgtctcacctgtccaaagtgtgtgtcacctgctctgtgttcacccactgggttcatcagaggggcacttgaacaaaacaggaatgtcactggagaggggaacatgtgctgtccccaagtccttccctgccgtttagagtaacacgaggccctgtccgcatatcctcacccccatctggcctcgtgtgtgtgccagaattatcaggaatctctccattctaatttcagccattctctgtgaagatgaaaggttaggggcggggagtggacaccctattgaaatagaaatggttcttcatatgtcagaaacagtccagagtaatctgggagt

SEQ ID NO: 115657 - DNA, 600 bp, Homo sapiens
tggtgggatggagtggtctcagatgtgtctgggacatctggggtgcagaatctgtatttctgggccccctctccagtcatcatcctggagccgatgaaggcaggggcttcctcccatgtgcattttgggagtctgttctgccctgtctcaggtaacccccaagagggaggagtctctccgtatagaaggaggaaacctgccagggtggcggggtgcggtccaggccacagcctggctgctgaggcccacccacaaaggacagagctgaggagctgatgggcatggagtttgattcgtgtgtcgtgtttcataaatgctgagcagactaccccaggggaagcccgtttccaggacaacctcagaaggggaaggagccatgagggcggctgtgtcggattttagctctatggacgcagtggccccgagacggtccccacacacagcctggtccccacacacaggctggcaggacagaggctggttgctgccctgtcgtatatatggtgcttctgggtcctctgggccttcatggtgaagaagagaagtattgtgtgctgagtcactcaggccagtggcagatgcccatccaagagccaccca

SEQ ID NO: 115658 - DNA, 515 bp, Homo sapiens
gctgtgatcgcaccactgcactccagcctgggcaagacagtgagaccttgtttatgtacatatatatctatatttattttcattcttacaaaacgatattgcaaaacttttacgtctgcagtgattgaaatttcactcaagcattgcagacttgtattttctatattcaatatcctacagcttctttgatagcaaatggcaaagtaaaattgttagactatccaaggagacacaggtagatgtaaatttgatccttgtttctcagtgaggctgataacaatgttgatgaggtttggtttggttttcaacaatcgcattcttattaccatcattttgtgtgaccatggtagttgaagaggaaacttaaacaaatggaagattgtgatggctcctttaagttttgtaataataatatgctgagataagatgtctttaaggttcaagggttctataatgctgatgtgttctactagtgtgccttccatcaaggagctaatttccttgccttcagtgaa

SEQ ID NO: 115659 - DNA, 388 bp, Homo sapiens
atggagcccaagagagatcccaccacaatcaactctagggattaaataaattctcttggcttgctggaatcttacattaaatattcttggaaataagtaggccataggctaatgctaagaaatctttcataataaagatattcaggttgtaatgtaactgtcattataggatttgacctgaatagaaagaggaactaaacagagctttctcaacagagctctttgaggatggagcgtgctgaatccccagggggaaagagcagctctttcacggaactttaaagatgcccacctctcctataagaagttcttgctgtgaaaaccagagagaaaaaacgctcctgggacgtaaaaaagtacacggacttcagattcaaaggatttagag

SEQ ID NO: 115660 - DNA, 574 bp, Homo sapiens
gtttagatgggaagtggatgggtctgaggaatttgaacaaacaccgacagtgaaggagagtgacctgagcaagcagtagtggggtaaatggaaatagacaaaatgggaatcagcagagatatggaggacagaatacaatgaggaggccttgaccgtcagtagcagagagggcagcagaagcctaattcccaaattccttagatggttttctgatttccaaattagtttcccttttaaatttattgtgtcaggttcagcttatgaggcctcaatacttttcagtcttaattgtatattgaaaatactttttgtttactaaatgctttttacattaattcagtgtgcacttcgtaaggataatgatgatttgagttagtttagtattcaacagcttcctctattcctttatatgatctctgtatttaatagctgtggcataaagtttccaactaagtataagtatcaagttttctttgtgatgttttctgcaaatattgaaggatgacctggattgtcctagaactttgttccaacagattacatgtgttcataacgaataaattgctcaaagata

SEQ ID NO: 115661 - DNA, 365 bp, Homo sapiens
gcaaagcccattgccactgcagaagaacgttcgtgaatgttaatgctttgtgtgtttttggaaagttggcaaattttatttatttatttatttactttatttatcttttgagacggagtctcactcctctgacggagtcttaccctgacggagtctcactctgtcgccaggctggagtgcagtggcgcgatcttggctcactgcaacctccaccgctgggttcacgccattctcctgcctcagcctcccgagtagctgggactacaggcacctgccaccgcacccggctaatttgtgtttttagtagagacagggtttcactgtgttagccaggatggtctcgatctcctgaccttgtgatctgc

SEQ ID NO: 115662 - DNA, 178 bp, Homo sapiens
ggcgctggtcgtttggggagcgggcgcagggacaagggtgctgtggtgtctggtaggttggaaatgcctttgctaaaaaggaaaagcctccctttaagctagacccggtgggcactcacccccttcctttcgtgggactttcattctcccacgaaagggctgcggtattttcttcttt

SEQ ID NO: 115663 - DNA, 368 bp, Homo sapiens
aactatatttgctgattgtattattaaattaatattttctgatagtctacttatttcttatgctgtatatttgaaagcagtacaaagtcgagtatacccgaaacaaattgaatgttttgcctagatttctttttttcctcccctcatatactgttttgccttaagaaattgttttcttggcatgaaatcactaatcagaaattccagtcaattctaaagtgacattctccccacatgctattggtgttaactataattaatcccaacagctgttgtcttcttttatgtgtgacatttgtcaagaagtcatcctcgtagtgtcagctaattattttgtatccggactgttttattcaaactagaaaata

SEQ ID NO: 115664 - DNA, 320 bp, Homo sapiens
tcactcggacctgactatcctagaaatcgctgtccctaagtcagagcaggcctggctctgaacttaggccctgtctttgctctctgctgtttccagacatctaggctatatctgtcttttcagagatctgggtgggatgaaactgaagctggtcattagggcagtgtcccataaagctggggaagctggttgtacactcctgtctcctccctgtatgtaggacacaagatccaagatccaagttgctgtttcataatgagcagtaccagctatggggacggggtgatgcaagcaaaatgaaactgtttttcctactcgtt

SEQ ID NO: 115665 - DNA, 295 bp, Homo sapiens
tccctggattcacatttggctggattgtcaggaaaaatatgtgttctgggtgccacctgatcttttcatctagcttctgtcctcaggtaaacattccctgttaaaattctaaatgttcatctgcttcctctaaagagattggtaaaaaggcataaaacacctaagaatcagtgttacttgtaatgagcccagggctgccgcagggagcaccatatacatagaataccaggtgagtgagtggggccctcagggctgaagtattatgctctaggccagaaaaaggatattttctttt

SEQ ID NO: 115666 - DNA, 360 bp, Homo sapiens
gtccaatttccctgacagggctcaagcagccttaaaagcagccgccgccattctccgacaattcgctctatcagctatcccaatcataggttctgtgggcacaataacctccttctcttcgcctccactcctttgtatctcccatcctgtcgggctagtcggggccccgactagcccgacagggaggaggcagggagggcaaatctgcactgcacaggaggcgtcactccacagtcacggtaggagcagatgggatgaaggagtcgtctgctttttggtttcgtatcaaagcaagcgggtcaatgccatatatccacgggtgcaagctggttgacaacggagctgtcgggctagtcgggg

SEQ ID NO: 115667 - DNA, 367 bp, Homo sapiens
cgcaagggtgttagttctctgaatggctcatcctggccgtgtccactcccgtgaggccttgtgtgtcagtgtagggtggtgtatgggcccatcctggcttatttttcattccagaccatcagccagggataggacacagattctttgctccatgactggaaagagtaacaacactttgcccttggagaatgtgttcacttccacaggcctctacatctggttcttttacctctgtgttctcttacaacctgctttgcaggtagaggggtgagcattgcactcacattcctctctggggaaaccaacacagggctggtcacccagtaggaggtaaaatcagggcagatggcaagtctccatatgacaa

SEQ ID NO: 115668 - DNA, 373 bp, Homo sapiens
aaggaatatttgttaactaggtttcaatacaaaactgtgtttaaattcaagcatgcctctgcatggatgctcactgcacacagttggtggatcgtccagagagggcagagaatagtaagatacagaaccattgcaacgatcaccaggcacccatcagcgtgggtcccgcatgacagaacagtgcagtgcagtggttaaaggcactgactctgaagtcaggctgcctgggttgaaatcctggctctgcagctccatagttcttaaaccaaggtaaatccaaacttcacaactctgtatttccctcacttcaaaaattatttctcctatagtcttttccatcttcctaagtaataagcctagaagtaagtcatcc

SEQ ID NO: 115669 - DNA, 373 bp, Homo sapiens
gccgggggtcccgggacagcggcctcctcggcgcaggaaggtcccgccccaggccctgcagcgcgggaggtcaaggtccccaaggggacctgcttcctccatctcaaaccgccctggcgtcccccgggtgcctcccaggcccccagagggagctcagaaagcccagaccccacggcccgcccctctccctgctctgagctggaggcagagtccgggtctgcggggccggccctccctgtatccctgtgagagggtcggggacccggggcgtctgtctggcttcccccagccctgctctcagctccctgggagcgcaggatttggactcgcggactagctttcggagccacctaaaggaaatctcaggcggccc

SEQ ID NO: 115670 - DNA, 644 bp, Homo sapiens
cgcagtggctcacatctgtaatcccagcactttgggaggccaaggagggtggatcacctgaggtcaggagagttcaagaccagcctgaccaacatggagaaaccccgtctctactaaaaatacaaaattagccgggcgtggtggcacacgcctgtaatcccagctactaaggagggtgaggcaggagaatcgcttgaacctgggcggtggaggttgccgtgagccgagatcacgccactgccctccaacctgggcaacaagagcgaaactccgtctcaaaaaataaataaataaataaatcgagtcttttgttcagaaagcatttcccaaagcgacaggccattagatcatgtagcgcccaggaaatagatacttacgttacaagctatgttgaagtcctgcacgccccggcttggatgtacaatgaggagtctgtgtgcctggctgcctggccagcccagcccgagcctcctaccttctgaaaatacacttgctggacatagcagagaaagctggtacatctccagcccttcagggcttcttgggacacactgttctggggaaaaccctttcatcaaaaggcatgtggggggctcacaaggaggtgaaggagtgaataggatgtgcctggcctttaatgaccc

SEQ ID NO: 115671 - DNA, 555 bp, Homo sapiens
ctaaggcagttttgtaaattggtgtgggggcagcaagtacaagactccaagcatcccctctggtggttggcagaggatttcagtctgctgggctgacgaagtggagaggctgccctgggcttcaaactggacctggtactacctccaaccctgtggatgtttgctcctgtagcatatggcccaatgcacctgattgccttagttttccatggaaaagacaagaaggtggttttcactcctctaccatgtttattcagcctcgttaactccactgagtttgctctgataggccagaaaaaaaataagttatggttaaggtgtaatgtgtccagaagtgcccaaattgttgttttttgccaggatggggaagtccactgagatgtaaagatctaagctgagattgacctttgaatcttttcaacaggtattcattgaatctataggaagtctggtactatgtgaggttttagggatgggtttggagctgaacagagaaaaaaagaagtaaaagaaataatccctgttcacaggagttagtgtgtgagacagagatat

SEQ ID NO: 115672 - DNA, 161 bp, Homo sapiens
aggtagtgaaaattgccaagtttcttcagctttcctagtgtgactcatctccaggagagtaggaagcaggtgggtctgaacacagaaatccacacgacttgcttctgccctctgcacagaagcgcgttctttatgccaggacctcattcccttccacacag

SEQ ID NO: 115673 - DNA, 190 bp, Homo sapiens
gtttatctgtaggttcaatgcaatcttgatcaaaatccccataaactttttttgggggaaggaaggggtaattgacaagttgattcttatttcatatggaaatgcacagggattcaaggttgcagtgacccctgtttgcaccactgcactccagcctgggagacagagtgagaccttgtctcaaaaaaga

SEQ ID NO: 115674 - DNA, 1434 bp, Homo sapiens
agggagagagggtcgtcacttcctgtcactaggactacagtttgtagtctctctcagggagagagactacaaactgtagttaaaaaaatcagaggtggaggtcagggggttaggtccagaagaaaacctctctggagcccaccctgcatctctacgtcttggaagagtctggagtccaggcaccctacagcaccccccacagcaatcatccgtgctcccacccccaccccggcctctgggaggctctgaggcaacagtgggggcctgtggggtggggtgggattgagagaccagctgcagagacatctttgtgacccaggagcaccactggtccctcatctgccaccgaggccaaggaagacccagagacctgcctcaccagtgctgccgttgtgctgaaagacaaccatgaatgctgattttctgctgccgtattatacggcccagagtggctccagcatgagcatgttcaacaccaccatggggaaactgcagcgacaactgtacaagggggagtacgatatattcaagtatgcaccgatatttgagagcgactttatccagatcaccaaaaggggagaagtgattgatgtgcacaaccgtgtccgtatggtgaccatgggcattgcacgtaccagccccatcctcccactcccagatgtcatgctactggcacgaccggccaccggctgcgaagagtatgctggacatggccaggccaccaagagaaaaaaacgcaaggcagcaaagaacttagagctcaccaggcttctgcccctgaggtttgtacggatctctgttcaagaccatgagaaacaacagctgcgcctgaagttcgccactggcagatcttgctatctgcaattgtgtcccgctcttgacacacgggatgacctctttgcctattgggaaaaactaatttacctcttgcggccacccatggagagtaacagcagtacctgtggcattccagctgaagacatgatgtggatgcctgtgtttcaggaagacaggaggagcctgggagccgtgaaccttcaaggaaagggggatcaggaccaggtcagcatccaaagcctccacatggtctctgaggtgtgtggggccacctctgctgcttatgctggaggggagggactccaaaatgactttaacaaacccactaatgtgctcaatgcatccatccccaaaacatctacagaacttgctgaggagccagcaacaggggggattaaagaggcagcagcagcaggggcagctgcaggggcagcaacaggcaccgtagcaggtgccttgagtgtggcagcagccaattctgcccctggacaggtgagcgcagccatagctggggcggccaccatcggtgcaggaggaaacaaaggcaacatggcccttgcaggcactgccagcatggctccaaacagcacgaaggtg

SEQ ID NO: 115675 - DNA, 637 bp, Homo sapiens
actattaaaatgacttatcaaatatatatttttctatttttaactctgaaatttgtttgatatttattgatatgatggagtgatgcttgggatgcctgcgacccagccagcaatggaaaatagtttaggattggccctagttcttagattagactctggtctcttttgaaaaggttgtgaaatcagtggaaatagggtatataaatatatttttatatcatctttattctgtgatgatatatcattagcattaatccctgtatgatagtttaatagaagcactttgtaaataatggttttataaaattaatgtagtaatgagaatattacattttaccattttacaaattacctacatgaagattaaagaagtaacttgcgaaagaaattcagctagctagtgtagaacagagatccgactccagttcagaatctacatctgactcctagtctagtgccttttttatatttttatttttaagtactttaaatataaatgtacgtgtctaagagaataaacaaaccatagtgatgtttcacatggatttttcttttgatatagcttataatgttacagtgttactgttaacagtattaaccattaattaactggtatgtgcctttgaaacttttgtat

SEQ ID NO: 115676 - DNA, 193 bp, Homo sapiens
agtacagaggaaaaagcagccagccccacctgcaggagcctagaaagtagtagcatttgatccaggcttcagaagaggcaaagcagggcagtccattggatgagagggggcccatgtgcaaagtccctcccaaaagcagtcgtttgagcatgtgtggcaagagcagagatgacaagaagaacgggaggcagta

SEQ ID NO: 115677 - DNA, 1259 bp, Homo sapiens
  misc_feature (490)..(490): n is a, c, g, or t
  misc_feature (555)..(555): n is a, c, g, or t
  misc_feature (558)..(558): n is a, c, g, or t
  misc_feature (1050)..(1050): n is a, c, g, or t
agactaagggatttgcccaaagcagcctgacagcaaggggcagacccagagatagaaccgcaccctgcactgcgtacacttcctccccacctccctggccaggatggggatgggaaagaaggtgtgcgttctttttgtttgaacatctacgtggcagtgggttagagttgattttaggagagaagttacgtataagggaggctttgtcctcagtatctcttcggggtacagttgttgaaaagaggttgaatattaagagcccaagtcccgtttccccaaaaatcccccccagcactggtgaatgacaggcagtccttctcttttagcaccttgtttcactcctgcctccaaagcctgcctcatgtctcggccttcctgatgacagaatgatcatccctgtatgcaacaagcttccccccacaccagtgttcatcagtctgtcgtctgcaccttggtttctcaaggtatcatcagggattggccgatgganatgaaatgagcccctgtgtcctcgctcctgcatcactgacgttgccgtgggctattgagttgganaanacattgggcttccctgtcctggcttccataaggggcagagctctactgcaggtcctggtcttgcctgcaggtcaagggccacctcaccctgagttcaagcaggctcttccccaggatgggggtgccgccttgttcctgaacatcctgggctggctctcatcccagcctcaaaaccagcctgtttcttttatcttgctggccttgatttatagtaactgccagacaccactaattgacagttcctggtccggcctcctgcctctgcccagcaggatagagtctattcagcaattgcagagtgtcatggaatcaggggtcagaggatggcagagctggaaccactcgttctagtgaaaagaaagccatccaaccaaaggaagtgatttgacaaagttccagttagtaaaagagcccaccctggaacctggatctcctggctcctactcagggctctttccattactcaaagtagccaggctcactgggtgagangactgcttagaatcacgtctagaaggctctcccctgcccatcagggtttccggtcttctgttgttagtggtgacatttctggtgcccttcaaatgctgtgcatgcaagaatcgctagaacccaggagacggaggttgcagtgagccgagatcacgccactgcactccagcctgggcaacagagagagaccttgtctcaaaaaaaaaaaa

SEQ ID NO: 115678 - DNA, 440 bp, Homo sapiens
tgatggagtctcgctgtgtcacgcaggctggagtgcagtagtgcgatctcagctaactgcaacctccgcctcccgggtccaacagattctcatgtctcagcctccccagtagctgggattataggtgcaaggcaccacacccagctaattttttgtatttttagtagagatggggtttcaccgtgttggccaggctcgtctcaaactcctgacctcaagtgatccacccacctcggcctcccaaagtgctgggattacaggcatgagccatggtgcccagccaccttagaatgtttctctggctatttcacatgtgatttttcacagttaaaatttctttcttcaaggtcaaggccttcagtatactaaaacaacttaatatgatgttttgcaaggcataattagtgtttgcccaataaaattaatacatagtctgtaat

SEQ ID NO: 115679 - DNA, 436 bp, Homo sapiens
ataactaaatgacggggtgctgcccctggaaattacacccagacatctcttttctcgtagacctgggcccctagcttttagacaggatgacaaatcactgacaggtgctgactttacatgcactgtggcctcatgcttcagccattcactgccaggcagtcttctagggcagcaaagagctcagccacacagcccgggccacagtcaggatgagacctggcgttagacctcccctcagcgccgctcaccccccattctgggcatttcaatctccaacaggagatttaaatgaagaaaacacgcacctcacacagctgtaaagggaggaactgggaatttctcccaaatcttgacccttgagttctagaaatggggttctccctggaatgcatgatggcattattctggaaggcaaaaataaagctatttaatatag

SEQ ID NO: 115680 - DNA, 327 bp, Homo sapiens
caagcagtcctcctgcctcagcctcctaaatttctgggattacaggcatgatccgtgatggctgtccagtttctagtatctttatatgtgaaaatggggctgatgatacatacccaacctatctcaaagggcatcttgagaagatggagagagaatcatgtgaaaaagcactttgaaaattgtaaaactccctacaaatgtaagatattgttaatgaccttacaaaaaccacctttttaaaatgatttggaatcatagactctaaaagttgattctagtggtctagtccaaattcttagctactgaaaaaaacccttttccataatt

SEQ ID NO: 115681 - DNA, 369 bp, Homo sapiens
aaacaagggtttgacccctttctgaaatatatttctctgaagacctgtaccctcagtgatatgggaggctcattttagaccattgggcacttttgtctccggaccacaatttgccctttgtgacctgctctactaagaaattcaagtgtaattcaaattagtttaccatctgctgatcaggggagattgctctgggtgcaagttcaagacaggcactcacatcttcattcgtaccccaaatctcagcatcacacaatacatccatgtaataaacctgcacaggtaccctccagaatctaaaatgaaagttgaaattcattaaaattttaatttcatcttattacaaaacaaagatacatttacttcttt

SEQ ID NO: 115682 - DNA, 315 bp, Homo sapiens
ttgaaccctggcacctctgacaacaaagtccatgttctttttactatgccctaatacctttcatcagttatccacattgatgctacatctgtattttataggtaccctatgttaggtgttctgggggatagaaaagaaataagcaggccaggctcagtggctcatgcctgtaatcctagcattttgggaggctgaggcagcagagctgcctgagccccagggttcaagactgcagtgagctatgatggcaccactgcattctagcctgggtgacagagcaagactctgtctaaaataaaaaaagagaaaagaaaa

SEQ ID NO: 115683 - DNA, 349 bp, Homo sapiens
gctgcagtgggctatgactgtgccattgtactccagcctgggcgacagaacaagatcctgtctcaaagaaaatgcagtgaagagggaggaaaagaggccctttctgctacaaaatgcaatctaggggaaccaagagataggatgaagaaagaaagggagggaagacttagcaggagataaggctgtggggtagggtgagcaaaagaaggcttccccaggtctctcccaagcactcaggtccagtattcacagcctgaaaatgggaaacgttattcaagatgcaaccgcaaagcttgggcaaggggcaaatgaatgatgtctctccagcccaaccagttatccccgccag

SEQ ID NO: 115684 - DNA, 288 bp, Homo sapiens
caggaggaagacgtcggccggccggggacccgggctttgtgtttgggaaatgggagcagcacttattagaaatggggaaggacagccgtgtggcgggaggagcaagcccgttttctgtctgttcacaggagatgcaggggcgcctgtaagagaggctgcagccccaagcggtggcacacacctgtggtcccagcatttggggacaaggctgaggtgcaaggatggctcgagcccaggagtttgagaccagcctaggcaacatagtgaggccccgtctcttaaaaaaaa

SEQ ID NO: 115685 - DNA, 462 bp, Homo sapiens
ggagagcaggagcagctgtgtggggagggaggagccagcctggatttatagctctactgggagaaggctcggagacaagaaaccttcctcaatctcagtgagaggaggtgtgcattttacaagagaggcccattggtctcaaggttgctcgaatgctcctgttctcccagtttcatgctagtatacatctgtacctttaatgtctgtgctaggttggagctaataatgacaagaaagaccctgctatgttactcgtgggttcacctgcttaaatattatgatttactttttaacattccaaaaagaatagaaattgcactttgattcaacaggctcagggaacaaatgcttcttattttctgaagatgggtcctgctgttctctggaggtctagattctggtgtcctatatgagttccaatggaatagcgagtaattcacttcaggattcaggtgacttacc

SEQ ID NO: 115686 - DNA, 374 bp, Homo sapiens
gtgccatgatctatatccatgaagggtgaggtggttcagcctgcttgtccaggcaaacagttgctccaaatgcctggatttttgccagggagtagagcagagagggccctgctgcaccacaggggaacaggctgtggcaaccaatcatggcacatgcagaccagttccaggttgctaagctggatctggcttgaagtctggttgtccaggagaaacaatagctgtagcagctcttctctcatccttgacctgcagtggaggagagcacaatcccagcacctactgctgaggcactaactacagtgtggctgtgaagacctctgtcctgctccagagccagaagcctatgtggccatgctactgggttgccaaag

SEQ ID NO: 115687 - DNA, 398 bp, Homo sapiens
acatccttaccgtgagttatttttcatgctgcagccatgtatctttttaaaacctgcatcagatcaccttgttcccatgcctgaaaacttccaatggtagtgcccactctgcttcaaagaaactctagttccctccccatgcccacgatgccctgcaatcccaacactgaccgttctcatctcatctctttccatctgcttcctgctcactccagcccagtagctctgaacattcttcttcctcttccagatcatgactaagtatttctctcaacttactttgttctttttctgttttattctatgcttttctctcaggctaaaataaactttagtttaaaagtctcttgcattcttagttaagtgattttttctggtaatattgtaaccacatcgca

SEQ ID NO: 115688 - DNA, 115 bp, Homo sapiens
cctgtgagtcgctcttggacggcctggctcctatgctatgtactcctcgtccggggacctatgtccaccttgaacttctaagtttctttccttaaaccttatgagccaagcggtg

SEQ ID NO: 115689 - DNA, 176 bp, Homo sapiens
ctggctctccgtgcacagtttttgtgttccacccaaaaagcgtggcagcgactttccttacccccactttagagatgaggaaactgtccttagagaggtgacgtttattgcccaaagacacagagctagttaatgctagagcgtggtttatagcattgaagcagttccagctctgt

SEQ ID NO: 115690 - DNA, 269 bp, Homo sapiens
caaactcttctatctcaagttttcacacacatcacagtgcctagaagaaagagactggataccctgaggtgggcaccagaggttgacaggggaacagccaattcaggcatcttaatgcaatattaagatcagaaatagtacccaaatttctggcaaggtgccctatttagctgattaatctgggctgatagactggctgtgcctcacactctatctagaaacatctcaactaagctgtcttttttaaggagtccctggacaacccccgc

SEQ ID NO: 115691 - DNA, 832 bp, Homo sapiens
aacctccctttgttcaggacataacagtacaggtgagccaaatatagaagaatctaccccatagcagttagtactgtattcacattgcaccagactatgttggaagagttccatccttgaacatatttgttcaaaagttatgagggggtagcaaatgctttttcctcagccaacgccagcaacaatatgatttgatacccatcagtaaagctttaagtttatcctcaagccaacaagaaaactttgcttagttacaggtgacacttcatttaaaatggcatcttactctcgagtagaatatttagataaataagagatccaaataaccttaactagcacaaagaaccttgaagtcattaaatactttcttggctgatatatttatgaaaatgggcattctctacattggaattattaaagtcaaaattctgaaacactgaatatagcacaggacctgagataaactatttctatgagtacacccaatactgaaattttaattgttacagaaaagcataatattccctatacatttatattgttaatttaaatttattagtttcatagtttcaaaattcaatttataaatttttcttaatcatcttataagaacaataacttacagccttcttctctggtttatatatatttttaaagcataaaaataacatattttcatacttggaaactgagataattctttctgttaaaaataagtccaggcacaaagaggggaacgacactggggcctccttgagggcagagtttgggaggagggagaagatcagaaaaagtaactattgagtactaggcttagcacctgggttacaaa

SEQ ID NO: 115692 - DNA, 772 bp, Homo sapiens
  misc_feature (17)..(17): n is a, c, g, or t
aacagacagttcacagnaagagaaatacaaatgactagtaaacatgaatcagcgaaatgcaaattcaaacaagcaactttttttcaaccatagattgggtcaaccttaaacacaagttgaaacaagatacccatttttttgcccatcaaagtggccagaatgtaaaagattaataatgccaattattaatgagggtgaggaagacaggtactttccttcgttattggtgggaatgtaaatgaacccatcttttttagaaggcaacttggcagtatctacaaaatgtaaaacgcacatacctctcagttccatcacagtgccttctgtatgccctctcatcaggcttacaaggaggagagtgcaaaagcagccatatctcctaagggccaggcctaaattggcatggcagtccttctgccaccttctgtaagcccagagaagccacaggccagtccagatcacaaggagggaatctagctcccggcagaagaatggaataagtggaattattggccgctacattttcgaactaccacatagatagaaaaagcatattccttcgtgtaccattttagcagcatttcttcagtatttatatgtttatataaatttcaaaatattctattgttttagtccatatttccttcctgacctaaaccatgtgactgggcacctattcagttttttgtttttaaatttttttcttgtggtctgtggataagttatataaacaaacaactacacattgaaccccaccatagtaaatgcagtc

SEQ ID NO: 115693 - DNA, 373 bp, Homo sapiens
gaaaacagattattttgttttcaagaaggctgtatctaggacaaaaataagccagtatctctcagtaactaaacagcatgtaggatctaacaaccggggactattactgaaataggtaagacgtatatggggacaaagggaggggagagaatttaaaaaggtaggaagcttcttttatttgaaaatataaaataaatcaagaaagacgtggtgtggaacttgagattttaaaaggcattaaggactattccacacatatattcttatacagatatgtgcatatgtttgtatacaggatgtatatatacacaccgtgtttttatgttctattatattatacatatgtgtatgtatatttgtaattttatgtttt

SEQ ID NO: 115694 - DNA, 297 bp, Homo sapiens
gttttgcatagattatctctaaattatattaaaacccctgcaaggtaggtatttttatttccattttaatgatgaggaaacagaagcttaaggtgacatggctagtaaattacaaaatcaggcctagggtctgcttgcttctgaaagcatctacaattttcattctgccaggctgttaaactgccaaaatttgccttagtttattcttccagtcctgctttctcctatcaactcttatgtctttccagccaaaaacccaattggctatcatctacatttctgtctttaaaaatcatc

SEQ ID NO: 115695 - DNA, 235 bp, Homo sapiens
acatggtaataaagagtatttaatctatattgataacttgtcttatatatagtctactaacttcgaagtgcaaccgtttatcacagtttttctgtattacagtattagataatagttgttttatgcagtaagccaaagtaggctgtatgtaatgtttgattctgtttgattgtttttgtttgctttggcaaagaatgttaaattttgctattccatatagatgcaaatattttcc

SEQ ID NO: 115696 - DNA, 406 bp, Homo sapiens
aggccaagggaaagtcttccctacagccttcaaaaggagtgtggcccagatgacatcttgatctcagacttctagcctccaaaactgtgaataacctaagttcagagccaggcctggctctgaacttaggacactttcattaatactttgagtgtgaatcaatagtaatatcaacaataatgtgtagcagaggtaccattacataaataatagtatattaattactagcatttatttgacactacgtaccagacattaatgtccattttcccccatagcagccacagtgatttttcaaaagtataaatcagatcatgccatccctttaaaaatcctcatggacttactttgcacttaaaatgaaacctgaacttttcaccatgtgctaaaggccttgattctctca

SEQ ID NO: 115697 - DNA, 309 bp, Homo sapiens
agcaaatactaaaaacttgtgtttataaatttgacaagtgagaaggatgaaccagtccttcagaaaccataaataactaaaattcaactaaaataaaaatagactatctgggccaggtgtggcagctcacccctgtaatcccagcactttgggaggctgaggtgggcagatcacttgaggtcaggtgttgataccagcctggccaacatggtgaaactccacctctattaaaaatacaaaaatttacctagcatggtgacaagtgcctggattcccagctattctggaggttgagacaggagaatcgct

SEQ ID NO: 115698 - DNA, 194 bp, Homo sapiens
aacatagggagaccttatctctacaaaaaaaaattaaaattaaaattagccaggtgtagcggtgtgtgcctgtagtcccagctgctctggatgctgggtacttgagcccgggggtggggatggggacgagaggggatgtcttgaggctgggttgagctgtgattgcgccactgcactccagcctgggcgacaca

SEQ ID NO: 115699 - DNA, 506 bp, Homo sapiens
gctgggatcataggcatgagctgcagcacctggccctattttctttattttatagttgaggaaactgaggctcagcgagtccaagtacatgtgactaatgggtgtagctggagatccctatcggagaaggggcagataaaatatctgttcagaggaggaggagacagcttttgttttatggggacgggagataaaaaggtcagagaagtctttagggtggaatgtgacttgggactcaagggtagataggattttaagatacggaacatgggagagagctttgcgggggtggggaggagaatataggaatcaatcactgatccttccctcgcccttgtgttctctcttcacttagaatggagtcagtgggcaggaagatggtgattacctgtccgttgaccctccctatctagacacatgacttccacgtgacataaatgtgactgcagtcaggaaaaattcaactcggactgtgctgtgttgagtaatcagagggagaagcagtg

SEQ ID NO: 115700 - DNA, 374 bp, Homo sapiens
gagcaaaataaatcacaattatacaactcaagaaaaggtgaaataactcaaaagaatagaagtaaaaggaaaaattcattttagaaatgaatacaaattagaaggctcacaagagtgattaaatataacaaataatgccttagagtaaataaaaggttttaaaaagggtaaaattttttaaaaccataaagaatgaagaaagtgacatcagcaaaatgccagagtaggcagctccaagctccccatagaaacactgaaaaacaagcagaaactatcagaaccaactttgttaaaagtctcgaaaacagtcaaaggtttacagcacccaagtaaacgctgaatcaagaaaaaggcaattaaaatataggaaagct

SEQ ID NO: 115701 - DNA, 323 bp, Homo sapiens
ggaggggggacatttaatttaactatagtgccaggtctctttaaaagatattgattaattccaattagtttggccttaaacatgaaaaaaatttagtctagggacattaccaaaagtattattttcttacacatgttctcagtaagtcttagtaaaacatttcaaatgaagacctaactctgaagtctggaatatttgttgacattattgtcaacattattgttctgatcacagagtgtctcctggagaataaccagctaaaaatatgtgtttgtgtgtgtgtgtgggtgtgtgggtgtgtgggtgtgtatacatatagaacc

SEQ ID NO: 115702 - DNA, 266 bp, Homo sapiens
ttagtttgtataaaagcaaataaaaccattttggctctgtctcctgatgctcttttacacattattttaaaacaccactatgagttcaattaaactcatagaacagaagaacagctctaagaggtcaatgattcaaagcaaaacaattcttaaatatgatgctttaatcatcaggtaggaataaataaatgctataagaaaagccatcaacctaaagaatccattcaaacctaatttggattaaaactttgaaaagatgttacaag

SEQ ID NO: 115703 - DNA, 365 bp, Homo sapiens
ctctgttgttggatgaggactctcgttccttcatcaaaatccccagctctggcttctgggcagatgcctgtcccagccctttccagcctctccatggccttgggaagacttctctgggtggttctcattggtctccatcccccaggacctgaggcccatggggaatcttggcctcgtcagaagtggagaatgcagtgtcagcatgacacctccggggcatggaggctcgcgccagggctgcacctagctgcctcttctcctggcctatgtcccaaccctggagaatgctgccctcagaagcctgggaccttccagccctggagtagcctagtctgataagtctcaacaataaaccctgacttttg

SEQ ID NO: 115704 - DNA, 3463 bp, Homo sapiens
agcaatcatctggggggctaaatgtgacaaaccgagaagatggccaagatcaacacccaatactcccacccctccaggacccacctcaaggtaaagacctcagaccgagatctcaatcgcgctgaaaatggcctcagcagagcccactcgtcaagtgaggagacatcgtcagtgctgcagccggggatcgccatggagaccagaggactggctgactccgggcagggctccttcaccggccaggggatcgccaggctgtcgcgcctcatcttcttgctgcgcaggtgggctgccaggcatgtgcaccaccaggaccagggaccggactcttttcctgatcgtttccgtggagccgagcttaaggaggtgtccagccaagaaagcaatgcccaggcaaatgtgggcagccaggagccagcagacagagggagaagcgcctggcccctggccaaatgcaacactaacaccagcaacaacacggaggaggagaagaagacgaaaaagaaggatgcgatcgtggtggacccgtccagcaacctgtactaccgctggctgaccgccatcgccctgcctgtcttctataactggtatctgcttatttgcagggcctgtttcgatgagctgcagtccgagtacctgatgctgtggctggtcctggactactcggcagatgtcctgtatgtcttggatgtgcttgtacgagctcggacaggttttctcgagcaaggcttaatggtcagtgataccaacaggctgtggcagcattacaagacgaccacgcagttcaagctggatgtgttgtccctggtccccaccgacctggcttacttaaaggtgggcacaaactacccagaagtgaggttcaaccgcctactgaagttttcccggctctttgaattctttgaccgcacagagacaaggaccaactaccccaatatgttcaggattgggaacttggtcttgtacattctcatcatcatccactggaatgcctgcatctactttgccatttccaagttcattggttttgggacagactcctgggtctacccaaacatctcaatcccagagcatgggcgcctctccaggaagtacatttacagtctctactggtccaccttgacccttaccaccattggtgagaccccaccccccgtgaaagatgaggagtatctctttgtggtcgtagacttcttggtgggtgttctgatttttgccaccattgtgggcaatgtgggctccatgatctcgaatatgaatgcctcacgggcagagttccaggccaagattgattccatcaagcagtacatgcagttccgcaaggtcaccaaggacttggagacgcgggttatccggtggtttgactacctgtgggccaacaagaagacggtggatgagaaggaggtgctcaagagcctcccagacaagctgaaggctgagatcgccatcaacgtgcacctggacacgctgaagaaggttcgcatcttccaggactgtgaggcagggctgctggtggagctggtgctgaagctgcgacccactgtgttcagccctggggattatatctgcaagaagggagatattgggaaggagatgtacatcatcaacgagggcaagctggccgtggtggctgatgatggggtcacccagttcgtggtcctcagcgatggcagctacttcggggagatcagcattctgaacatcaaggggagcaagtcggggaaccgcaggacggccaacatccgcagcattggctactcagacctgttctgcctctcaaaggacgatctcatggaggccctcaccgagtaccccgaagccaagaaggccctggaggagaaaggacggcagatcctgatgaaagacaacctgatcgatgaggagctggccagggcgggcgcggaccccaaggaccttgaggagaaagtggagcagctggggtcctccctggacaccctgcagaccaggtttgcacgcctcctggctgagtacaacgccacccagatgaagatgaagcagcgtctcagccaactggaaagccaggtgaagggtggtggggacaagcccctggctgatggggaagttcccggggatgctacaaaaacagaggacaaacaacagtgaaaatgcagcatctgtctcctgcttcacagggtcgactgtcagggtgaccgtatgtggccgcagctgtgtggcatggaacttggtcagggttgaattccagctctactcaccctttgaaagctgtgtgactgcctgagagaacctgtttcttcacctaaaaaatgggactttttgtctcagtcccagtgaagtgccaggtttgattgtgaagtccgcatgaaacactgcaccaggcagggctttgcaaagtgcaaggtatccccagtccaagtatatgaaaacgtgcacacaggactctcattacttttttatggaatctgcaaggtgtttttaggctttttaatctgattttcttataaatgaaagattatttagtcacctttctcctgtccaacttcaccaccacctgataatgggtatataacaggaagctgaaggtacaacatagtgactaaaattcagacttacacaagacagtttgaggcatatttcttaatctggtatcacctcgtgtgttctttggggccctagaaaccctggcttttgggagtgctatggcaagtagaagttctgccggatggaaagaggctgccccatttgaggtcatttaaaatctgtgaagcaaatccagactccttgccgttcagccactgtgaaaccagaatctgcttcacagaaaaaagcatctcagttaggagaagagacatcccctccttctcacttgccaaagagattcaaagacagcccctatcctccattcttgagtcagggccctaggtgacctattctaactcaaggaggagagctatgtacagggagagcattttagattgaaggttggaatggtgtactaaaccaaaaaagctgacaactgagagttttagaagattagaccattaggaacgtatctttgcaaactgcccattcacccatgaagaggaagcctcaagatcccttggaattgcatcccaaggcaaagcttttggctcaccgaaagctcacagattgcagaaattagcttttttaaaaaacaaaccccagtaaatataatttcattaacattttataacagatttatatttttgagttccgtgattgcaaattatgacctcaaattccatccttcacttatgtaacatgttgcaaattacccaaagatgagtctttcttctttctttcctttttcctttcttcttcctttccttttttctttcttcttccttctttcttcctttttctctctcctcttttcctcctcaaaatgtatatattttaaaagccttaactgttagttatgcctgcattcatatttgcacaggaaaaataaagacctggattt

SEQ ID NO: 115705 - DNA, 3777 bp, Homo sapiens
aaatcaattctgcttgctgcatatctgatttcctagagcccactcgtcaagtgaggagacatcgtcagtgctgcagccggggatcgccatggagaccagaggactggctgactccgggcagggctccttcaccggccaggggatcgccaggctgtcgcgcctcatcttcttgctgcgcaggtgggctgccaggcatgtgcaccaccaggaccagggaccggactcttttcctgatcgtttccgtggagccgagcttaaggaggtgtccagccaagaaagcaatgcccaggcaaatgtgggcagccaggagccagcagacagagggagaaggaagaagacgaaaaagaaggatgcgatcgtggtggacccgtccagcaacctgtactaccgctggctgaccgccatcgccctgcctgtcttctataactggtatctgcttatttgcagggcctgtttcgatgagctgcagtccgagtacctgatgctgtggctggtcctggactactcggcagatgtcctgtatgtcttggatgtgcttgtacgagctcggacaggttttctcgagcaaggcttaatggtcagtgataccaacaggctgtggcagcattacaagacgaccacgcagttcaagctggatgtgttgtccctggtccccaccgacctggcttacttaaaggtgggcacaaactacccagaagtgaggttcaaccgcctactgaagttttcccggctctttgaattctttgaccgcacagagacaaggaccaactaccccaatatgttcaggattgggaacttggtcttgtacattctcatcatcatccactggaatgcctgcatctactttgccatttccaagttcattggttttgggacagactcctgggtctacccaaacatctcaatcccagagcatgggcgcctctccaggaagtacatttacagtctctactggtccaccttgacccttaccaccattggtgagaccccaccccccgtgaaagatgaggagtatctctttgtggtcgtagacttcttggtgggtgttctgatttttgccaccattgtgggcaatgtgggctccatgatctcgaatatgaatgcctcacgggcagagttccaggccaagattgattccatcaagcagtacatgcagttccgcaaggtcaccaaggacttggagacgcgggttatccggtggtttgactacctgtgggccaacaagaagacggtggatgagaaggaggtgctcaagagcctcccagacaagctgaaggctgagatcgccatcaacgtgcacctggacacgctgaagaaggttcgcatcttccaggactgtgaggcagggctgctggtggagctggtgctgaagctgcgacccactgtgttcagccctggggattatatctgcaagaagggagatattgggaaggagatgtacatcatcaacgagggcaagctggccgtggtggctgatgatggggtcacccagttcgtggtcctcagcgatggcagctacttcggggagatcagcattctgaacatcaaggggagcaagtcggggaaccgcaggacggccaacatccgcagcattggctactcagacctgttctgcctctcaaaggacgatctcatggaggccctcaccgagtaccccgaagccaagaaggccctggaggagaaaggacggcagatcctgatgaaagacaacctgatcgatgaggagctggccagggcgggcgcggaccccaaggaccttgaggagaaagtggagcagctggggtcctccctggacaccctgcagaccaggtttgcacgcctcctggctgagtacaacgccacccagatgaagatgaagcagcgtctcagccaactggaaagccaggtgaagggtggtggggacaagcccctggctgatggggaagttcccggggatgctacaaaaacagaggacaaacaacagtgaaaatgcagcatctgtctcctgcttcacagggtcgactgtcagggtgaccgtatgtggccgcagctgtgtggcatggaacttggtcagggttgaattccagctctactcaccctttgaaagctgtgtgactgcctgagagaacctgtttcttcacctaaaaaatgggactttttgtctcagtcccagtgaagtgccaggtttgattgtgaagtccgcatgaaacactgcaccaggcagggctttgcaaagtgcaaggtatccccagtccaagtatatgaaaacgtgcacacaggactctcattacttttttatggaatctgcaaggtgtttttaggctttttaatctgattttcttataaatgaaagattatttagtcacctttctcctgtccaacttcaccaccacctgataatgggtatataacaggaagctgaaggtacaacatagtgactaaaattcagacttacacaagacagtttgaggcatatttcttaatctggtatcacctcgtgtgttctttggggccctagaaaccctggcttttgggagtgctatggcaagtagaagttctgccggatggaaagaggctgccccatttgaggtcatttaaaatctgtgaagcaaatccagactccttgccgttcagccactgtgaaaccagaatctgcttcacagaaaaaagcatctcagttaggagaagagacatcccctccttctcacttgccaaagagattcaaagacagcccctatcctccattcttgagtcagggccctaggtgacctattctaactcaaggaggagagctatgtacagggagagcattttagattgaaggttggaatggtgtactaaaccaaaaaagctgacaactgagagttttagaagattagaccattaggaacgtatctttgcaaactgcccattcacccatgaagaggaagcctcaagatcccttggaattgcatcccaaggcaaagcttttggctcaccgaaagctcacagattgcagaaattagcttttttaaaaaacaaaccccagtaaatataatttcattaacattttataacagatttatatttttgagttccgtgattgcaaattatgacctcaaattccatccttcacttatgtaacatgttgcaaattacccaaagatgagtctttcttctttctttcctttttcctttcttcttcctttccttttttctttcttcttccttctttcttcctttttctctctcctcttttcctcctcaaaatgtatatattttaaaagccttaactgttagttatgcctgcattcatatttgcacaggaaaaataaagacctggatttaaaaataggaatgactcttgcttcagctcttgccataaaggaagtttcagtcccagagtatgtttctagggcaatggcttccctagaaaggataggtgctgatgtgggggacggcacacattccaagaaagtgacaaagccaagtgctgttaagggcacaaaccaacaagaactctcattcattgctggtgggcatgcaatattgcaatatgcaatatggaagacaatttggtagtttttataaagttaggcatatgctttagcatatgacccagcaatcacaccctaggtatttacctaaaagaatttgaaacttatatgcacataaaaacatgtatataaatgttggtagcagctttattcattattaacaaaaatctggaagcagtaataatatcattcaataagtgaatggatagataaacagtcaggcgaggtggcgtgtgcctataatcccagctactaaggaggc

SEQ ID NO: 115706 - DNA, 1887 bp, Homo sapiens
  misc_feature (348)..(348): n is a, c, g, or t
  misc_feature (476)..(476): n is a, c, g, or t
  misc_feature (482)..(482): n is a, c, g, or t
  misc_feature (659)..(659): n is a, c, g, or t
  misc_feature (982)..(982): n is a, c, g, or t
  misc_feature (1073)..(1073): n is a, c, g, or t
  misc_feature (1217)..(1217): n is a, c, g, or t
gataactaaattgaaagtgctggcagtccatttggggattgattagaatctaggggagatgtagttgtcagtgttcattctgtatgtaactcctgtctttggtttcagatctggttaggttctgttgatccttggggaactttctcatttgtttttatttttgccttggatctatgaatacctgaatgtattgtctaaaatggaaaaatcttaatgtagccattctattactatcactgaccctaggcctgaaaaaagtcacacctagggttaagaaatttttattttattttattttatttacttatttagagacagtttccctcttttgcccaggctggagtgcantggcatgatcccagttcactgtaacctctgcctcccaggctcaagtgattctttagcctcaagcctcctgagtagctgggattacaggcgcccaccaccatacccagctaatttttgtatttctagtngagacngggtttcgccatgttggccaggctggtctggaacccctggcctcaagtgatcaccttgcctgggcctcccagagtactgggattacaggcgtgagccaccacgcccagccaaggacatttttctagtagaatgcaacacatgtccaagttgtgcatgatccaaaaaaagtgactagnaaaaaaaagtaatgatgtcttcatgtccagatctagatatcttctacttcatgtaactaaagagtaagcacagtgtgaataaagcatcaaataagtacaattatcattttaaaataatgtcttattaatgtaattttaagagaaaaaaattaaacatataaccttaagtggacatagtacttccttaacacgttaatgctgcagggcacagtggctcatgcctgtaatcccatcactttgggaggaggccaaggcaggtggattgcttgagcccaggagtttgaaaccagcctgggcaacatggcaaaaccctgtctttacangaaaaattttaaaattagccaggcgtggtggtgtgtgcacctgtagtccctgctactcgggaggctgaggcaggaggattgctttatcccnggaggcagaggttgcaatgaactgagatcacgccattgcacaccagcctgggcactgtctcaaaacaaaaaacaaaagttaatgctcacatagaaaggattctttttaacaactttgttgagatataattcacataaccccccnaaaaaagaaataaaaaataattcaaatactataaaattcactgatttaagatatataattcagtaagttcacagggttatgcagctatcctcacagtctaatttcagaacaatttttaacccagaaaggaatcctgtacccattaatagtcattccccatgaccccacccacctccccccttactctaggcaactgacccactttctgtttttataggttgtctgttctgggcattttctataaatggaatgaatcatataacgtgaagttttgtgatgagcttctttcacttaatgttttcaaggtttatccacgttaagtacttcatatatagcatgtattatggccaaataacattccattttatggatataccaccttcatcaactgatggacataggggttatttccactttttggctactatgaataatgctgctacatacattcatacatgagctttagagtggatatgtgttttcagctctctgggatataaaagagtagaattgttgggttaaaactccatgtttaacattttaagaccaggcacaatggctcacacctgtaatccccacactttgggaggctgaagcaggaggatcacttgagcctaggagtttgagaccaacctgggcaatatagcaaaaccttgcctctacaaaaaat

SEQ ID NO: 115707 - DNA, 270 bp, Homo sapiens
taaagcccggcttccaaactattggcatggtcctcctacccggtggtagttatctatcactcttcccttcaaggaatacctatacctccagggagagccaaaattcagccacctcaaagatattagattagctaaagaccacctgtgcccaaagtgatattttaaacctaaactcacccagtataaaatgccattggatcacatcaaaaactgagatagaaatgtgagtttcctcacttaaacaccctaacctcccctactctccaagag

SEQ ID NO: 115708 - DNA, 198 bp, Homo sapiens
tagcaggagattcgttagaccattcttagcacattacgctcatggagactgtggggttcctgtggagaggcttgtgaaacaggtgtttgtggtaaaactggttacaatttttctcaaatatggcagcggtacttcttttttatcctagaggataaagccatattcttattccacctataactattattattatttttt

SEQ ID NO: 115709 - DNA, 440 bp, Homo sapiens
tggctaaaggtgtgtttttgcacccaagacaactctttagaaatatttttcttcagtattttaggttgtctttagatggacaatcagtttttatatttcttattttgtggttatcacactttaaaatctttgagttattttttgtgtacaatgtgtattttatgataagatcctagaatagtaatgtaacactagtgctttgtcctgtaacttttccatgaaaacaagacatttagtttgaagaaaatcagaaaaatttagaaaactcttattgtctagttactaagagacactttcaagatcattgagtttggtgattctgacgacttgttcatgttgagccaaaagttgttcattgtagtagaaaagtaaatctctacaaaaaataaatctgcttaagtaaagcatcctttaaaaagagaaaagagcctgtttatgaa

SEQ ID NO: 115710 - DNA, 614 bp, Homo sapiens
gaaccatgcaaatacaacagggtacgcactcttctatcttatactttaccagtcttagttgcaaaatccgtcttaacaagatgaaaatatatcttcttgacccagagcttgtgagtccagaagagcctctgttttcagactttcagggcttccagaaatgcgctttcattgccattttacgtccaaaattgtgtctcactcgagtttttgtatccgccagtgcccagcacaatccctagaaaagcaatgactggtaacgtggaaacttagatactgtttatttaattttcagttaactccctattgtgtacatttagatcttagtctcgagtgtctgaatttattacttcctataggatttgctttggacataatttcttgtgactaggtcttccacaggatatgtgagaaaataacagtgaatcagagttgtgtaagctgtagtaggttgggtaagaatgttccacttagtttggaactaccagctagatctactacctatgccgtcactctaaattacttgtttgtatcattattttttgaatttcagttgttttaggggtgcttttcagggtgaggataacttgtttcaaatagtacaacttgattaattt

SEQ ID NO: 115711 - DNA, 805 bp, Homo sapiens
agcggagctggaagcccggccgtgaccatgtaaggaagccgggacccgctgagatggggatgggggggcgatgaacgggggaacccgaggtgggggcgtggaaaggagggagcgccccggcccacccgagcccagcccgccggcctgccgcggaggcggcacaccccagccttggcctcagctgcagggagccccaggaggccagagccagagagaagtggcttctccagaccaagccccagagccgctccctagggagacttacagacacggactgaggcccccaaacagacaccgctcaaagctagcgcctgagtcctagacaagagcctccctcccacccatgccattcctgggagacttgtcccagacggaattttggattggtagcaggagtgatattctaaggctcaattagacctcaggttcggagaccctcccatcggagaccctgacagataaatagaggccccaagaggcatacataccagacacaaagaaatctgagggacggggacagacacagtgaacccacccacagactctacactaggaccttccctccaagacttggtcatggacacacgtaaactcgaacccgggcgcaagccccttgcaaattcggggaaaacactcccaggcaaccaaaccccagccagcctgcaagacaaagcccttcctcagcactgaggtggcccaggcctgctctgaaacagccctttcccaagttactgatgaactcagagcagaaagcaagacacagtctccagccacaaagtggcaaggccttccctggactgagacc

SEQ ID NO: 115712 - DNA, 241 bp, Homo sapiens
ccatataagagaagacaggaaacagggaaaaagggaaaaagaagcttgctttggaggcatgatgtataaatcagtatttctcactcttgaatgtgcataggattcatcaagggagcttattattaataaaacaaagattctttgcatgacccaactttcatgatctatatttatttcattagctatatatttatcaggctcccaaaccttctcctaggcccatctgtcgggctagtcgggg

SEQ ID NO: 115713 - DNA, 390 bp, Homo sapiens
tcaaataatagaagtttggagatagatcctctaagatttggctgtatggtaaaatcagagactcaggctccttctagttgttgctttgttatcttttaaatgttatctcatggtccgatatggctatttaaactccagccatcacatctacatttcagccagcagaatattttagcagacttcctgaaaaccacatacagcactcattcatatctcactgtccagaatctagtcacacgatcatatgtacctacaagggagattcagaaatgtcatcttttatttcatttatttatttattgagacagagtctcactctgtcgcccaggctggagtgcagtggcgaaatctcggctcactgcaaccttcgcctcctgggttcaagcgatt

SEQ ID NO: 115714 - DNA, 446 bp, Homo sapiens
ttttctgcaaatgttgagattctactgtttttaagaattgccggaggagccaagatggctgaataggaacagctccggtctacagctcccagggtgagcgacgcagaagacggtgatttctgcatttccatctgagggaccgggttcatctcactagggagtgccagacagtgggcgcaggtcagtgggtgtgcgcaccgtgcatgagccgaagcagggcgaggcactgcctcactcgggaagcacaaggggtcagggagttccctttctgagtcaaagaaaggggtgacagacggcacctggaaaaacggctccctcccacccgaatactgcgcttttccgacgggcttaaaaagcggcgcaccacgagattatatcctgcacctggctcggagggtcctacgcccatggagtctcgctgattgctagcacagcagtctgagatc

SEQ ID NO: 115715 - DNA, 228 bp, Homo sapiens
ttatatttgaataaaaaataatcttggttacatttcatattcagtaatcatcacagcttaataaaggtctactcatcaagggttgaaataaatggcaagatatataaaagtgccttgaaccaacttattagataatatatttgttatgaccactatttatctatctaacatacctgcttttgtacattttcaaaggtacagtctcattcacatatttcacaatttgat

SEQ ID NO: 115716 - DNA, 862 bp, Homo sapiens
agcggctccctggggtcacatggctatgattttctctttactgagggtaggcaaggtgtcctctttttttgttttccaagaactaaggcataataggtggttaatagatgttttgaggaatggagtaatgaatacatgaatccatcttctctcagctgttcagtttgtgaggaattttcaaatccttaattaagaatagatacatctatatagaagcaagctagaagtgtaaaacaagccttcaatatctattatttagagttgattgtatgtacttatgtgtttaggctaactcagtactaaagcatttttagtttttacgttggagttcagtcatttttggaaaatacttatgtcaaatttcttaagttttacattctagacattaccaaaattctgaatcacagagtgggttaaactaagtaagtggcatattgcaacttctattgttttacaagatccgattctgtctcaatatgtggcatttcatcatagcacctggcctcagtggaacttttcaaccctaaatgctaatctgatttaattcttcagggtaaaaaaattcagattagtctctatctaaacctgagtcagaaatactgaaactggtggggcttaggggaggagaatgggtccctcagtggtggacccatagagggtccttctggcttctcctctacccttagccaacgtaggcactggggcagcaagacctcaaacgtcccagcagcatgtatcccactggcctgctcctcccgcttctgctcctccttctattccttgtctcttcatcttccttccttttccttctttcctcttttctccattcacagtccttactccctccttcttccactgaagg

SEQ ID NO: 115717 - DNA, 231 bp, Homo sapiens
cggaaccggtggttagcacacttaagaggccgcagaacttagtggtgcattggaacggtgaaatccttcttgtggtccactgcgttggggaatttaaggaaccaatgatggagcggagaactctgccaaactaagaggctcgtcacctccagcaaacctacacctggaatgcgatgtgaaacaagcacgatccggaaaggcatgtcaagagcaggctggtgtagggtcagg

SEQ ID NO: 115718 - DNA, 380 bp, Homo sapiens
gcccaccaccacgcccagctaattttttgtagttttaatagaaatggggtttcattgtgttagccaggatggtctcgatctcctcacctcgtgatctgccctcctcggcctcccaaagtcatttactgttttaaacaaaacaaaaactagttacaaaggtagaattggcaggatttggtgacctcttagatatgggtcaaagctaaagcttgtctaacttgatagtaaagacttgaaggcgtggagtaggagaaacagtgtgtagaggataaggtaattaattcctttttggacacactgatatatctgcagtcctattggagatgtctagctggcattgagtatactggtgtgctgaaaacctaggtgatcactaaagt

SEQ ID NO: 115719 - DNA, 329 bp, Homo sapiens
tgtcaaacttcatcctatttttatggaaagtgggcaacgcagttaatctggctgcttcctgctgaaagggggcatagttgggaagtaccagaatggaatctattcacttggagttggaaatatatccacattcccagatctatagcaggaacttgctggagccttacagtgtgaggactgaggacctaggaacttttgagaaagtctgtcctcagtgtataacagtagtaaaatccatagcagctgatgaggacaatgagaagaataccaaccatgctgtatatgaaagtcttttataaggaagtcagctggaccacactgttaaaggg

SEQ ID NO: 115720 - DNA, 562 bp, Homo sapiens
ggaatttttgcttagtttgacttaatattatgctttctttcaaataaacagtttgatttgtttagaaaaggtatattctagcaaataacaatcatttagataaataatgctaagttccatctgtattaaacctgttcctatacatcatgtcaaaataataggaaaggaaaatctgatttatatatatgtattttttaaacaaacaataaaatgctaaagccttagtagctaaggaaatgatatgagcagatagtttataaaagaagaaatcaaggaggtcgataactgtaagttcaaactcaccagtgtatgaaatacagactaaattaattaatttttccacttaatggatagatattatgctctgggctgctgtgagatgggagctctgcatcacctgttgagagcatattttgattaatacaaacttaggggaaaacagttgggttatatatatgtaacagaagccttaaatgcttatacctcttgaactgaaatctcacatgtagcttggtaacctacaaaaacaattaaaaataaggacaagtttttaaacaaggat

SEQ ID NO: 115721 - DNA, 467 bp, Homo sapiens
agctcctgaccaaactgactgtgtttgccttttggaggttgccggctcacacagggtaaatgtttgaccttcttattttattgaccaagtatccaagtggctgccgtggccatagtgagtgacagagtgccatctgagtggctgccgtggccatagcaagtgatggagtgtgatctgagtggccgccgtgggcatagcgagtgacgggaatgcaatcagagtggctgccatggctgtagtgagtgacgggatgtgatccgagtgactgctgtggccgtagtgggtgacgggatgtgatccgagtgactgctgtggccgtagtgggtgatggagtgtgatccgagtggccaccgtggccacaccaagtgacagagtgtgatccaaggggccatcgtggccatagcaagtgatggggtgtgatcagagtggctgctgtggctgtagcaagtgacaggttgcgatcacag

SEQ ID NO: 115722 - DNA, 190 bp, Homo sapiens
gacctagtcgactatccattaatcgtccatgacacctcgttgcatatcaagccttgctagaatactggggtctacagcaacaacaacaacaacaacaacaacaacaaaaaccccacaaaaacaaagaacctctcatttaaaagtgggaactgatggctgggcacggtcactcacgcctgtaatcccagca

SEQ ID NO: 115723 - DNA, 641 bp, Homo sapiens
tgagactggagactcattctgttgtaaaaatgctttctccaaagatgttaaaaaagaaaaggggaaaatgtgaaagaaaaatatcttgggtcccttcaagatgggaactgctcagggcaaatctgccttctattctattcaagtcatccatttgctcacagagacagatgcatattctgattgcctcctttggaaagacttatcagaaactcaaaagaatgcaaccatctgtctctcacctacctgttacttcgaagcccccaatagggggtcttgctttgagctgtctccgcctttccggacggaactaatgtacttcttacatagtgattgatgtctcatgtctccctaaaatgtataaaaccaagctgtggccggaccaccttgggcacatgtcatcaggacttcttgaggctatgtcactgggcatgtcttcaaccttggcaaaataaactttctaaattaattgagacctgtctcaaattttgggggttcacaggtgagtgggctcaggcatgtgcactagtatgacttcctctagaaacactcgactggtaagggaagaatgcctcaactgagcatgtgcacaactcccataaacacacttgtgcttgcggagcctctcaagtgctggcaggcca

SEQ ID NO: 115724 - DNA, 311 bp, Homo sapiens
taaggatctcggtcaaggatcctcgggtcaaggatcctctcggctcctcagcctccttgtctcttttctcttattccttcattctcttccaggaagcttttctgaactgaccacgtccccctcaccactccccatacctgcagcctagagattggtcagcctgaatgatctgcagacctgcctctgtcctgtctcgtcctcaggctgcaggctttctgaggacaggggctccctcctccattaagtactttttaaaaaataaacaatgctggccaggcacagtggctcatgcctgtaatcccagcactttg

SEQ ID NO: 115725 - DNA, 293 bp, Homo sapiens
tgatgcttgtggggtgtcttcttgctataggctgatacatgtatgggtaaaaccaggaagtggtgcacagaaaggcaggagataaacaataggaagacctggggccaagttccaacccccatccaatatgactgaacaaagtcactgaatttttgcctcaatttatgtgtaaaacggcaattccattataagaagccaaggagaaaaatctacataaagcatctgcaaagtagaaggggctagaaaaacacttatcttaataaaacttttttttttttttttttttttttttt

SEQ ID NO: 115726 - DNA, 424 bp, Homo sapiens
ttttgaactcctgggctcaagcagtccatccacctcggcctcccaaagtgctgtgattacagacatgagccacctcttctggcccctggaacctactaatcagatgtttgaccttctgaacccatcctctaacttttttactttatctcacctgtttttttcttttcgttgtttttatcttttctaggttttctcgattttatcatgcagcatttctattgatttttaatttctactattccatttttaatttaaaaaactatttttgttttgaaggactatttttatgtccttcttgcaacctcctgtttctttatcacttttgtaatatcttttctctctaagatactgatgattttggggtgggaaatgttttcttctaccccttcaaagttactttcttccagtttgttttttggttttt

SEQ ID NO: 115727 - DNA, 101 bp, Homo sapiens
cattgtcattgtctggcctgccaccccgctccacactgtgccctgggaggtttgaatgagggtggtgagggatgcgccggtgaggaggcacgcggggacac

SEQ ID NO: 115728 - DNA, 182 bp, Homo sapiens
cttgtcttagcccaggcttcccgtggaaaacagagccagagagaagggctcacatgcttagcttttgttttggagactgacctggagaaggaggcaaggcttagatagagctgcatctttcatttagctgccatgggcagtggtcttgaccctgaggactttacaaggtgcatgaggaatgt

SEQ ID NO: 115729 - DNA, 782 bp, Homo sapiens
acaagggtttcagtctattccgtgctttgggtgccagggagagattatgtgtctcttgtttttatctatatccttttaaatccaggaatagagtcaggaaaatatatttttcagtcttttgaagatgaatttttaaaaatctcagtttggacagtagtcagaatgacctttcattttgtgctttgattcctagtgaggtggctagagaaatctatcctatgagaagtgagcagttaaaaacagagagagagagtgcgcaagagcgtgagtggtgaccaagagaaagagtgttcaatattttttgctgtatttgatgtttttttagtgcaactttaaagacattttcagtcaaagctttcaatgggtagggatgtttttaattaacttctacaatagcttcaaggcaggtctattcttgtgaaaagtaagatggccacttgagattttaatgtttttgataaatatgtttgttcttcataactactttctttctttttttttttttcctttcctttattaggaaactctgagatttccctcatgctagctaatggtgacacaggagtgtgaaaggcacagatgccttcaatcagggtttagtattacacatggtacaaaataagcacacaataagcatctgaaagaatgaacaaaccaccttcagcctgaaggaaaacgctttttacctagggtcctgcatattttaaaagccctgaaggaagaggtcttctacagactcttcacttgagagagttcaagagctactgccatatgggaactaa

SEQ ID NO: 115730 - DNA, 663 bp, Homo sapiens
ggagagagatgagggaacagctgattagtggagcagtcagagcacacatgacatttatgagttctccatcttataaaggcacctcgataaagtttgtggcacctcaaaacaattacagtaataacagcaaagatcactgattacagatcatcatgacaaataataatggaaaagtttgaaataatgcaagaattaccgtaatgtgacataaaaacccgaagcgagcatgtgctgttggaaaaatggtgccagtagacttgcttgatatggtattgccacatacctacaatttgtaaaaaacaccaatttgtaaagctaaataaagctaggtatgcctttaataggtttcaacttgattcagaacaaggaatcctaaattcatttagctgtctttgagtcaaagcaggaaaccttatttcagggagagagctcttggggctaatacatgtagaaatagaaataatatctctgaagtattgattgtcgtagagcttttggcttactttcttcacaaggccctacaacacaataattggataattgggtgaattgttaacatgtcatgttatgtatgttcctttaattctagttttctaaaatatctttaatatttttaattctagttttctttgttatacttatttaaaatttaattttattata

SEQ ID NO: 115731 - DNA, 591 bp, Homo sapiens
tagtgcctgggatggctcatgtcttcagaagggcctaatgatatgggaaagagaggatgcatgaataagactgtgtttgggatggacagtagactggtttgggaaagtgacagaggagaccactagttctgatcccaggggcactttaggaacagtaattcttttggagtccctctcatggtttctgagctgtgttcttttgattggatgcatctcactaggaatatgagggtgaatggggaaggggacaactccttggccagtggttctactaattcttcccccaaacgacactgcaggagagatgaaaagaaggcccagctatctctatagactttggtatagacactgtcccttcatttgccactgaccttccattacctcctgtggactctgcccgtttgattcagtcctccagcttgaatcaaagatggttgagacattattgaattaaccaaagttgttcttagtgataatgggagcatgaagtagatgtctagcctgactcactcatcacccccattctttgggaatgatggcacccagaggcccagctgaagggacaggcctgggttgccatgtttgagacct

SEQ ID NO: 115732 - DNA, 406 bp, Homo sapiens
tgtcggggctctgagctctgtaagggaatgccaaaagcaagctgctgcctccagaagcctcgctgtgcgcctcgtgggcataaactggaaccttggcaataaacttctgcacacaaggtcgccctgtgcgagcgtttctggaatccagatttaatactgcatacaacaccttgttttgaaaagagaagatcactgctttcaatgttatggaagtctattccatgctgaacatcgaaatactgatgctctctaggcagagaccatggagaaggaagctggggacgttttgtcctccctgctgcctgcctgcaggagtggactcagctgagactgtgccatgagcctccttctcatcacaaaggccggcttgtcaatggaagaagatgtgccagacagccacttcaca

SEQ ID NO: 115733 - DNA, 480 bp, Homo sapiens
cgacatctctaccagatcctgtccttgctgttcctctcaaccttcaggaacactgagcatccttacaacaccaaaaatttccaggaaagacactgaacttcccttctctgttcacaaggaggaatagccagtacagaatcaagctcagggtagaacagaaccaggctcaacattaggtaaaagtgtaccctcgctgactcaaaaaaaagttggtttataggtagaaagaaagaaagagaaagaaagaaagaaagagagagagagaaagaaggaaggaaggaaggaaggaaggaaggaaggaaggaaggaaggaaggaaggagatatgggagtgggaaagtggttttctttagtaagtctgggctgttttcatagcctaggatgaagtccagcaatactcaaccttgaggttttccaggcaccttctccttgacacgaatctcctgcaaacagatgtctaatagagaatgtctaataggga

SEQ ID NO: 115734 - DNA, 948 bp, Homo sapiens
atactaccagtattttgtctactgaatcctattccatagaaagttgagacatttccaaaaaaggaaaattatttctgcaactcatggaaataatcctagggacagacattttaggaattctgttttctggagcactatgaggaagagttaatacttgcagccctcaagttagaagttgggtaagaggcaagaaagggatctaaatttatggattatttcccgtataacagattatttcatttatttctcataacactcctgcgaggtagaaattatttccctttgctctgaagatgagaaaacttaggcctgaagaggtttctgtttcacagcatcgaactagagggttccctccatggccttcttgtattgtttaggacttgttttccttaagtatcatccctagacactcaataaatgttcaaatattcatttcatgcttatcagcgtgtaccacatttatttagttaaaattttcaggccagggtgctgggattacaggtgtgagccaccgcaacccagctatggtataattgtcatgtgcataaaaaccaggaggagaggtacacatgaaggtgatcaataccagaatcttgtagtctagatatccaactactattcagatggatcattctcatgcttccattctctagattatgtgaaataatttatcatggctgaaatgggcgactctggaaggactaagaactcatgacactttggtacctgtcgagatactacaggacgcgactgaccactggggtacctcgaccgtacgggaaaccataaaggagcatctacacgccctctgcggcatagaaaacggcccatcctacggtacttgttaaaagtacaagttctattacatctaaccctcaacattccgaattccatggcgcaaccggcacactttgcaagaccaaactggaaggactactaccactagcg

SEQ ID NO: 115735 - DNA, 408 bp, Homo sapiens
tgcagtcctggtaggaaacatcctaaggacaaagacagctacaaagaaatcctaaaatgtgttcagtaaacatactgttagtaataatactgttactgttatcttgacacaacacaaataagtggatcactatataaaggtaagatgaagcaagtgaatatgtcaatttcattagtaaccaagattttcaataagaagtatacaaatataaactattgatatatgtgtctgctaaaaatttatatttctgaatttcatagcactagctactgaaaaagcctagaagtaatgactaaccccatgaaggatcacctccatcacccagattgtgtctctcaataccactaaaaggaatcagaactccttagagaagtggctgcttagaaattgggacaagtaatatatgaa

SEQ ID NO: 115736 - DNA, 390 bp, Homo sapiens
cagaaagaacctcagaagtcttggtctatggtctgttcaggttgatcccagcatacattgggggctcctaagggacccgagcctaatggatttgtgggagttccagaccgtggggtgcagaggttgcggccacgggcgagaatccccatctgagaggagcgttgctgttttcggtgcgtcagggtaaattaccttttctctctatgcaaaagaatgcaaatgagcagaacttttaaagaagaatttaaagtaaaattacgtcaaaatgtagctgctttgacctcttcgtctcagatccgagcataggcttcccctttgtgctatttgaagggacttaggataaatttgaaaagcctgaactaaagaaatggttggagagactccgtctca

SEQ ID NO: 115737 - DNA, 141 bp, Homo sapiens
agtgctgggaagacaccgaagtgtaaaacgccctcagagcgcttccagtctggtcgggaaagcaagacaggaactccttctttccttctcctaccaaggttcagttcctggccgggtgcggtgactcatgcctgcaatccc

SEQ ID NO: 115738 - DNA, 361 bp, Homo sapiens
cttgtggtcgttcttggagcaaaagtttatgatgtaagcctccacatactgttctgttcgtccaagtgggagctgcaagttagtcctgctttgtagccacgattttccccaatattttgcatttctgatagttgccgtgagactttgatgttgctggtctaggaaccgtagtttgagaacaactgttctagcataattgaaagaaggttatctggccatagtcaaaccatcaagggaaccaacaaatataaaagcaaaaattcccaaccaaaaggcagtaagttcgaagattcaagaaacatcaagccacacagatgaaaaagaaccagaagaaaaacaatggaaattcaaaaagccaaag

SEQ ID NO: 115739 - DNA, 291 bp, Homo sapiens
ctggctcctttgtctcagggagctgctgtcctgcgactgccgcgaagaggttaaggcctgtgctactgccctgcaaagtgcctgaagctgaaaggaggaagttactttcctgtggctaggagaggccttgggtttagtcctgtggctgcgttgagacagtttacagcctaaggaaagaactgggcacctggtttctaagaggacgggcacttgattcctgggggccattaggacaaggaggtggaagctgtaggttttgcaaggactaaagaagcaaattggttttctgga

SEQ ID NO: 115740 - DNA, 380 bp, Homo sapiens
aaacttcttgcttctcacggtgagtctgacactggcgtcaccagggagaaatacaggttctcaggccaggcgccgtggctcacgcctgtactcccagcactttgggaggctgaggagggcagatcacctgaggtcaggagtttgaggccagcctggccaacatggtgaaaccccgtctctactaaaaatacaaaaattagccaggtggcgtgggcctgtaatcccagttgctcgggtggctgaagcagaattgcttgagcccagaaggtggaggttgtagtgagccgagatcgcggcagtgcactccagcctgggcaacagagcgagactctgtcaagaaagaaaagaaagaaagagagagagagagaaagagagaaaga

SEQ ID NO: 115741 - DNA, 510 bp, Homo sapiens
ctcggtctacctgttcgtacatgtgggtatatatgtgtatacaagatggtacctatccacactcacctgcatactttgtatcttagtccctgccttctcagtcatgtaagtcaactgatactgagtttctagtaactagtatagaccaaacatatacccctattgagagctttgcttagttccctagaaatgaatctctagaaatagaagattgtaatttgtggaatatttgagagaggagagggcttcagagaagctgctgtgtctgactgtgatcactgtgtcgtttgtttattgaacataggctgtaaaacgactttcttctcttccccatgcttttccatgttcctcgctctctctcttttttctctcctatttctcactttcccacgcttgtgtcactcacattacataaaatataatatatagtgaagccaacttaaataccacatcctcctcgaaaccactccttccctttccacttgaaagaaatctccgtcctctgtacct

SEQ ID NO: 115742 - DNA, 379 bp, Homo sapiens
tgtggtggaattcggctcttaacttcgcttgtcctctctgcaggccctgccgaagctccccctggtttcccgcagcgatcccgcgcagagtcccgctctgtcgcccagtctggagtgcagcagcgccatcatagctcactgccacctagaagctggggtgaagcaatcctcctccatcagccttcagagtagctggactacctgcgcggcccaccacacccggctaatctttgtggtttttgttttgtttttctgttctgggtttccgccgggcgcagtggctcaggcctgcaatcccagcactttggaaggcagaggtgggcggatcacccgaggtcggagaccagcctgacaaacatgaagaaatcccgtctctact

SEQ ID NO: 115743 - DNA, 379 bp, Homo sapiens
tttcaatggcagagccacagtccaataatacaatggatattctatgaggatatgacctcattttcgaaatatcccttagacatagcaggccagcaattatctttaatataggcagattctcatatttggtctcttagtgggtacagggaaggaatcttgatgagctgctgggataaaaagcattcatttagaaatatccttgactttctgacactgaggcatagccattgtttttctgagacttactcaattcaatacttatctcttccaaagggccttccctgatcaaagtaacatggacagtttactcactgctatgttctcatgaacgctgggtgcaaacttggaaaaaaattaggaagtatatgtttagtctgag

SEQ ID NO: 115744 - DNA, 359 bp, Homo sapiens
caggcccagaaggccaagctggatggtgcgtggctggagggggacctgtccctggccgacaaggacgtgactgccaaagacagcaagttcaaaatgcccaagttcaagatgccgtcgttcggggtatcggccccagggaagtccatcaaggccttggtggatgtgtctgcacccaaggtggaggccgacctgagtctcccctccatgcagggggacctgaagaccactgacctcagcattcagcctgcttctactgacctgaaggtccaggctgaccaggtggatgtgaagctcccggagggccacctgcccgagggagctggccttaaagggcacttgcccaaggtggagatgcccag

SEQ ID NO: 115745 - DNA, 627 bp, Homo sapiens
atccttccctctctctgttgcttcccagccccaacttcaactctccagctggtgttcagcatcaagttcagaacgtaagcaccctgcaccccaaaaacccagcaagttttcccttgccacaccaagctcccagattcactccagattccatctgcctcccactacggtttctccctttctttatactctgcctcctctcttcctggatggttggtgctgagaatgggcaattgctcagagctgggcaaaccttaatatcactgtacccaccaggcctatacagctgaagaagctgaggtccagagatcttgcccaaggatacacaggcagggacaggacagccggaagcctgattccccaccctgcccccagcactggctttctcctcatatagagactgagactgactctatttggaccctgaggaagaaaagtattcatctccactccaccctctgctgacatccaattagaaggctctctcaggctatctataccaaccactgcagcaggcagcctcttcctcactaccccttcctcccactacaatacatatagacttttaggagcaaaggattctcctatcttagctagaattgcgaccttaattatccatccaaacccccc

SEQ ID NO: 115746 - DNA, 225 bp, Homo sapiens
ttttataaactcttccggtgggaagctgaggactactgagctctccaccctgaagatgtctttctccactcgcttgttttcatcttagattctggtggccccaagtggctgcagcatggggtcagggtggtggccaggaaacaaagggtggttctagtccttgcttgctgctacttgtccatgtgactttgggatctttaagctccctgggtcttgatgtacttt

SEQ ID NO: 115747 - DNA, 175 bp, Homo sapiens
ggacaagtgaggaattccttaagactcagtgttagtttcctagggctgacataagaaagcaccaaaaaccgggtggcttaaaacaacagaaatgtattacattacagttctggaggctggaagtccaaaattggtgtcagtagggtcatgctctcctgaaggctctgtaggagga

SEQ ID NO: 115748 - DNA, 264 bp, Homo sapiens
gggagactgtcaagccaacgggtgccagagaaagaggggagagcttcaaacaggtgtgtgtggtcacagggccacatgtcttcgggaagtcaaatgtaacaagaattgacaggagataaccagcacccgatgtggttccaagggctgtggcagggcaggggctgtaggaaggaagcagcagtggagacgggggacaagaagaggtgctccatgtgactagtgggaaagggctcaagtggctcagaccagcagaaacaattttgc

SEQ ID NO: 115749 - DNA, 276 bp, Homo sapiens
cctgcaaacaaagtatcaaatcttgtttttttcaattaacaaaatgagaactatagactatagaaagccagctgtcaaaaaaatagggaagaattcctttagtatgagaagtgaataaacataaaaagggaaatgtattttgttagtgaccaaaagaacaggtgcattagttggtgatcaaaataaccagtcccccctgtaaagggggactggttttaaagggcattagtgtttcaagcaagtaggatggtgctcagagaaagattagtccctgtg

SEQ ID NO: 115750 - DNA, 409 bp, Homo sapiens
gaggtgctcagaggatcccgatatgctgtctcagctgatagagcaagaaaattgtgtatatgaacccatgtatatgcacatatctataaactgagctaaacctgagttcatgtaatgactcccaactctaatccatcaccacatggatcattctagcctccttcccttgtttatctgtacaattccactccagaagtggcaatcctggccacctgtcaactatttaattatttaatttcattatatatggacatcagtatcagaattgttaattgtgaattgtgaaaaactcttatcaactagaatacagtgctatgtacagttcctcttgcctttggtcttacagatgccactcatttccaattacataggtcagcgccttttcttcctgcccctcagtgaggttgtt

SEQ ID NO: 115751 - DNA, 612 bp, Homo sapiens
tgtctctacacaaatgctgatgggaaaaaataatggcaataatttttctcctaagaatccataaccacgggtcaagtctttatgttggttgggaattcaaattcctattacctgctttcagataaatccaaaatagagaaatcaaagtgtctgggttggcagtgcccactagtaacgaaacaatgcaaatcttttttggatgaaaacttgctcaacagaatgctactcaggttatccacaaatttggctgaatgtaaattccctttcagaaacaaccatacacactggaaaagaagccccaaagagtgaaagtcagcagaaataacaatagcctgagacccacaaagactttagatattagaggccgggtgcagtggctcatatctgtaatcctaccactttgagaggctgaggcaagaggctcaacatagcgagaccctgtctctgcaaaagattaaaaaattagctgggtgtggtggtacatgcctgtagtcctagctattcaggaggctgcagcaggaagatcgtttaagcccaggaggtcgagactgcagtgagctatgactgtgcactgtactttagcctgggtgacaagtgagatagtctcaaaaa

SEQ ID NO: 115752 - DNA, 762 bp, Homo sapiens
tgaaacttaagttctagcttaagatcatttagtcgtaacaaaacatcttgggtcagtcacttaaaccctctggacatcagtttctttttctgtcagtgaacaagtaaactaattattggccactgtggttcggcctgtctttgaccagagtcccaggtcctgttttttcaatcagaattgtttgagtcaaatggactctaaatgggaccctcatctcatgggactttctgggaccctacctatcccttgatttttgcctccctataaaccacctgcttgcatgtgccctgaggaactcctgaggcttcagccccaaccctaccccagagtggttttatgaggggtgtgcctccttagtcagcctgccttgtagtgtcttcttaaaaaccatcattgtttcaggtttgtgggtgcccacattccttggaaagttcatgcctctcaatgtctgacttgaaagcaataatattcttagtctttttacatagctctttccaatttacattatgcttttatatgtagttgtccgtcagtatcctcaggggattggttcaaggactacccccacttccctcaggataccaaaatctgcagatgctcaagtccctgataaataatggtgtggtatttacgtataacctatgtacacacatccttctgtatactttaaatcatctctagattacttataatacctaatacagtgtaaatgctatgtaaatagttgttatactgcttttaaaatttgtattattttaaatt

SEQ ID NO: 115753 - DNA, 344 bp, Homo sapiens
tgaaacttaagttctagcttaagatcatttagtcgtaacaaaacatcttgggtcagtcacttaaaccctctggacatcagtttctttttctgtcagtgaacaagtaaactaattattggccactgtggttcggcctgtctttgaccagagtcccaggtcctgttttttcaatcagaattgtttgagtcaaatggactctaaatgggaccctcatctcatgggactttctgggaccctacctatcccttgatttttgcctccctataaaccactctgtggtagggctggggctgaagcctcaggagttcctcagggcacatgcaagcaggtggtttatagggagg

SEQ ID NO: 115754 - DNA, 612 bp, Homo sapiens
gctagttgtgggcggctctgaaggactcctccctgcctggacatctgtccatgcctgacaccgtcactgctgaccctgacgtaaagaagaacaactggatgcctatggtaaaccatcaataaatggttttccttgtgcgctttgtccaaaacccagacagtaccatatacatcggtataaacaaaacgtggcctctgtctttcatgggccgatctaaacttgttcatgagcctccatgcgctgagtagcaataggggcgttcctgaccagacagaggctccatttcaccttaatgtcaacagtactctgggtcctcagtgtcctctgtggcagggtggttggtgcagctcagcacctgggccctgacactgcaccactgagggacggtgggctacttgaagtttggtgtctcttgctcagggacccaaggccctctctggctgacctggcctcgtctcagttctcaccagcatatctcactcagtctcaggtgtcattaatgacagacccctgcaagtctcatccaggaggccagtggaggtcacagctgagacctggagggactgtcagtgctatgaagagctgaggccatgacccccaacctcctaatga

SEQ ID NO: 115755 - DNA, 839 bp, Homo sapiens
cgaccacgcgtcgcccacgcgtcgggcagctggaaaagtatttgaaactaaattgacattaaaattaagatttgttttcaagtggatgtccattaaaagtagaaaaatatttgggataagtgagtgtgtgtttccttacatggctactaaataaaatataatgagtatacaagtatatctcctcttttgctatggaggctccatgttcaaggcaatggctttttaaatcttggctatctaaaattttttccctttgttttgaatatttgtaagtttttaagaagttagtgtcagcaaattaattgaagttatgcttctatactgggacatatttaaatactgagtatagtactgctgctactgcttctacaatgtaaaatgtatgacttggtgttttaaagtaaaaattatgatgttacttgtggagaaactaaaaatgttgtacaactgaccgaaagaaaacccttggggataagtttagtgaggggattggaatccccaaaaagataacatttttcttctgcttttaaaaactgaaattccctgttctagttcctaacaattctcattacatactatgccagattacaaaatacttatttttaaaatgaaatctatatattgactttcttatcaatcatcttactgtgcaatcaaaattagagtactttggtttgaaaacaacacttagagcctccagataacttttaagacttatttagctttgtgggtggtattttcatgcaaataagtaagggtgggttttatattttgtagaagttttcggtcctatttaaagcctggttgggaggtttttggggggggccagaattccttaa

SEQ ID NO: 115756 - DNA, 3317 bp, Homo sapiens
gggtggagtgtaggccagggggttggcggtgccgtgtcatggaggctcagtctctgagcagccattgaaggggaaggaactgcgggtgtgtgtgtgtatgtgtgtgtgtatgtgtgtgcgcgcgtgcgtgcgtgtgtgtgcgcgcgctagtgtgtggacaaggaggtgggggcagctgagttagagtcccaactcttggactccatttgctattctcttctttctcccccacacctatctggtggtggtagtgggcgtttatatttgcgttccttttcattcatttctaaatctcttaaaaattttgggttgggggtattggggaaggcaggaaagggaaaaggagagtagtagctgaagagcaagaggaggacatggagatgaagaagaagattaacctggagttaaggaacagatccccggaggaggtgacagagttagtccttgataattgcctgtgtgtcaatggggaaattgaaggcctgaatgatactttcaaagaactagaatttctgagtatggctaatgtggaactaagttcgctggcccggcttcccagcttaaataaacttcgaaaattggagcttagtgataatataatttctggaggcttggaagtcctggcagagaaatgtccaaatcttacctacctcaatctgagtggaaacaaaataaaagatctcagtacagtagaagctctgcaaaatcttaaaaatttgaaaagtcttgacctgtttaactgtgagatcacaaacctggaagattatagagaaagtatttttgaactactgcagcaaatcacatacttagatggatttgatcaggaggataatgaagcgccggactctgaagaggaggatgatgaggatggagatgaagatgatgaagaggaagaggaaaatgaagctggtccaccggaaggatatgaggaagaggaggaggaagaggaagaggaggatgaggatgaggatgaagatgaagatgaagcaggttcagagttgggagagggagaagaggaagtgggcctctcatacttaatgaaagaagaaattcaggatgaagaagatgatgatgactatgttgaagaaggggaagaagaggaagaagaggaagaaggaggtcttcgaggggagaagaggaaacgagatgctgaagacgatggagaggaagaagatgactagatcattctaagaccagattctctaatgtttctgggtgtgcaatagagtgatcacatctttgtttcttcatgtacgatagctatccctacagaagataatgtgtaactttttataggaaaagtgtggttttactatttttgccttatcattccaaataagaactagtctgttaatgatcatattgtatgtagagaaaaattttcattgactcccattgtggaattccctagcaatttatttagacttaattttttaaattcaagcttactgtattagtcatttttagcccataattaaaacatgatcacttttacacaggtgtagtatggtgcatttcattccttatttataaattaactgaaattacagtttgctataatataaaatgacaatagtctcttgagtggtaagttggttatttttttagaggtgatccaggaatctttagtttgaaggcagttaccttttttttttttttttttttttgactaagagtgtttggttgcttttttgtcacaagtaacttggaaaatagaagcagaatagtaaaggttctattcagcaacatagttcatggattttgtggaggttctattcagtaatatggttcatggatttagtggtgactgataagattttatttttgaaggaaaaattgcttatactaagtccagagacatgcaggtgagcccttttgtcaggctgcaaatcatgacatgccgatggttgtttattttgtttttaggtgtgcattctttttcttcttagcaattcctttatgatcaccttcccttcttgtttcactccctcccgctctctcaaaaggaacttgggaaacttgtgaaacccaggaaaacctttagtcttatacctcaactacctttcagtcctgtctgggttttaaataagtgaagtagaagaaattgagtattttctgacataagaatatattatcaatacagttttatgcagtaagctctccttaccataaatgtttcttggttgacaacatctaagacaatattagtgggatgaagaaagaaaagcaggggtgcttttggaagcagtgttagtgttcctcaaaagtcggaacaattgcctgttgatatattaataagacattaaagtcaaattttaatgttggcctctcaaatgatttggataccactctgcaaagtatttctaacctttaattcccagttttaaaacagatataataatagcatttaattggaatatactaggcagctggaaaagtatttgaaactaaattgacattaaaattaagatttgttttcaagtggatgtccattaaaagtagaaaaatatttgggataagtgagtgtgtgtttccttacatggctactaaataaaatataatgagtatacaagtatatctcctcttttgctatggaggctccatgttcaaggcaatggctttttaaatcttggctatctaaaattttttccctttgttttgaatatttgtaagtttttaagaagttagtgtcagcaaattaattgaagttatgcttctatactgggacatatttaaatactgagtatagtactgctgctactgcttctacaatgtaaaatgtatgacttggtgttttaaagtaaaaattatgatgttacttgtggagaaactaaaaatgttgtacaactgaccgaaagaaaacccttggggataagtttagtgaggggattggaatccccaaaaagataacatttttcttctgcttttaaaaactgaaattccctgttctagttcctaacaattctcattacatactatgccagattacaaaatacttatttttaaaatgaaatctatatattgactttcttatcaatcatcttactgtgcaatcaaaattagagtactttggtttgaaaacaacacttagagcctccagataacttttaagacttatttagctttgtgggtggtattttcatgcaaataagtaagggtgggttttatattttgtagaagttttcggtcctattttaatgctctttgtatggcagtatgtatatattgtgttaagttcctcaagaatctccttaaaaactttgaagttaatacttttgtgcaactgtgttttgaataaagccatgacagtgttaaaa

SEQ ID NO: 115757 - DNA, 3322 bp, Homo sapiens
gggtggagtgtaggccagggggttggcggtgccgtgtcatggaggctcagtctctgagcagccattgaaggggaaggaactgcgggtgtgtgtgtgtatgtgtgtgtgtatgtgtgtgcgcgcgtgcgtgcgtgtgtgtgcgcgcgctagtgtgtggacaaggaggtgggggcagctgagttagagtcccaactcttggactccatttgctattctcttctttctcccccacacctatctggtggtggtagtgggcgtttatatttgcgttccttttcattcatttctaaatctcttaaaaattttgggttgggggtattggggaaggcaggaaagggaaaaggagagtagtagctgaagagcaagaggaggacatggagatgaagaagaagattaacctggagttaaggaacagatccccggaggaggtgacagagttagtccttgataattgcctgtgtgtcaatggggaaattgaaggcctgaatgatactttcaaagaactagaatttctgagtatggctaatgtggaactaagttcgctggcccggcttcccagcttaaataaacttcgaaaattggagcttagtgataatataatttctggaggcttggaagtcctggcagagaaatgtccaaatcttacctacctcaatctgagtggaaacaaaataaaagatctcagtacagtagaagctctgcaaaatcttaaaaatttgaaaagtcttgacctgtttaactgtgagatcacaaacctggaagattatagagaaagtatttttgaactactgcagcaaatcacatacttagatggatttgatcaggaggataatgaagcgccggactctgaagaggaggatgatgaggatggagatgaagatgatgaagaggaagaggaaaatgaagctggtccaccggaaggatatgaggaagaggaggaggaagaggaagaggaggatgaggatgaggatgaagatgaagatgaagcaggttcagagttgggagagggagaagaggaagtgggcctctcatacttaatgaaagaagaaattcaggatgaagaagatgatgatgactatgttgaagaaggggaagaagaggaagaagaggccagtaggaagaaggagtcttccgcgcggttaccctccccgaatataaggacgatggagaggaagaagatgactagatcattctaagaccagattctctaatgtttctgggtgtgcaatagagtgatcacatctttgtttcttcatgtacgatagctatccctacagaagataatgtgtaactttttataggaaaagtgtggttttactatttttgccttatcattccaaataagaactagtctgttaatgatcatattgtatgtagagaaaaattttcattgactcccattgtggaattccctagcaatttatttagacttaattttttaaattcaagcttactgtattagtcatttttagcccataattaaaacatgatcacttttacacaggtgtagtatggtgcatttcattccttatttataaattaactgaaattacagtttgctataatataaaatgacaatagtctcttgagtggtaagttggttatttttttagaggtgatccaggaatctttagtttgaaggcagttaccttttttttttttttttttttttgactaagagtgtttggttgcttttttgtcacaagtaacttggaaaatagaagcagaatagtaaaggttctattcagcaacatagttcatggattttgtggaggttctattcagtaatatggttcatggatttagtggtgactgataagattttatttttgaaggaaaaattgcttatactaagtccagagacatgcaggtgagcccttttgtcaggctgcaaatcatgacatgccgatggttgtttattttgtttttaggtgtgcattctttttcttcttagcaattcctttatgatcaccttcccttcttgtttcactccctcccgctctctcaaaaggaacttgggaaacttgtgaaacccaggaaaacctttagtcttatacctcaactacctttcagtcctgtctgggttttaaataagtgaagtagaagaaattgagtattttctgacataagaatatattatcaatacagttttatgcagtaagctctccttaccataaatgtttcttggttgacaacatctaagacaatattagtgggatgaagaaagaaaagcaggggtgcttttggaagcagtgttagtgttcctcaaaagtcggaacaattgcctgttgatatattaataagacattaaagtcaaattttaatgttggcctctcaaatgatttggataccactctgcaaagtatttctaacctttaattcccagttttaaaacagatataataatagcatttaattggaatatactaggcagctggaaaagtatttgaaactaaattgacattaaaattaagatttgttttcaagtggatgtccattaaaagtagaaaaatatttgggataagtgagtgtgtgtttccttacatggctactaaataaaatataatgagtatacaagtatatctcctcttttgctatggaggctccatgttcaaggcaatggctttttaaatcttggctatctaaaattttttccctttgttttgaatatttgtaagtttttaagaagttagtgtcagcaaattaattgaagttatgcttctatactgggacatatttaaatactgagtatagtactgctgctactgcttctacaatgtaaaatgtatgacttggtgttttaaagtaaaaattatgatgttacttgtggagaaactaaaaatgttgtacaactgaccgaaagaaaacccttggggataagtttagtgaggggattggaatccccaaaaagataacatttttcttctgcttttaaaaactgaaattccctgttctagttcctaacaattctcattacatactatgccagattacaaaatacttatttttaaaatgaaatctatatattgactttcttatcaatcatcttactgtgcaatcaaaattagagtactttggtttgaaaacaacacttagagcctccagataacttttaagacttatttagctttgtgggtggtattttcatgcaaataagtaagggtgggttttatattttgtagaagttttcggtcctattttaatgctctttgtatggcagtatgtatatattgtgttaagttcctcaagaatctccttaaaaactttgaagttaatacttttgtgcaactgtgttttgaataaagccatgacagtgttaaaa

SEQ ID NO: 115758 - DNA, 3239 bp, Homo sapiens
gggtggagtgtaggccagggggttggcggtgccgtgtcatggaggctcagtctctgagcagccattgaaggggaaggaactgcgggtgtgtgtgtgtatgtgtgtgtgtatgtgtgtgcgcgcgtgcgtgcgtgtgtgtgcgcgcgctagtgtgtggacaaggaggtgggggcagctgagttagagtcccaactcttggactccatttgctattctcttctttctcccccacacctatctggtggtggtagtgggcgtttatatttgcgttccttttcattcatttctaaatctcttaaaaattttgggttgggggtattggggaaggcaggaaagggaaaaggagagtagtagctgaagagcaagaggaggacatggagatgaagaagaagattaacctggagttaaggaacagatccccggaggaggtgacagagttagtccttgataattgcctgtgtgtcaatggggaaattgaaggcctgaatgatactttcaaagaactagaatttctgagtatggctaatgtggaactaagttcgctggcccggcttcccagcttaaataaacttcgaaaattggagcttagtgataatataatttctggaggcttggaagtcctggcagagaaatgtccaaatcttacctacctcaatctgagtggaaacaaaataaaagatctcagtacagtagaagctctgcaaaatcttaaaaatttgaaaagtcttgacctgtttaactgtgagatcacaaacctggaagattatagagaaagtatttttgaactactgcagcaaatcacatacttagatggatttgatcaggaggataatgaagcgccggactctgaagaggaggatgatgaggatggagatgaagatgatgaagaggaagaggaaaatgaagctggtccaccggaaggatatgaggaagaggaggaggaagaggaagaggaggatgaggatgaggatgaagatgaagatgaagcaggttcagagttgggagagggagaagaggaagtgggcctctcatacttaatgaaagaagaaattcaggatgaagaagatgatgatgactatgttgaagaaggggaagaagaggaagaagaggaagaaggaggtcttcgaggggagaagaggaaacgagatgctgaagacgatggagaggaagaagatgactagatcattctaagaccagattctctaatgtttctgggtgtgcaatagagtgatcacatctttgtttcttcatgtacgatagctatccctacagaagataatgtgtaactttttataggaaaagtgtggttttactatttttgccttatcattccaaataagaactagtctgttaatgatcatattgtatgtagagaaaaattttcattgactcccattgtggaattccctagcaatttatttagacttaattttttaaattcaagcttactgtattagtcatttttagcccataattaaaacatgatcacttttacacaggtgtagtatggtgcatttcattccttatttataaattaactgaaattacagtttgctataatataaaatgacaatagtctcttgagtggtaagttggttatttttttagaggtgatccaggaatctttagtttgaaggcagttaccttttttttttttttttttttttgactaagagtgtttggttgcttttttgtcacaagtaacttggaaaatagaagcagaatagtaaaggttctattcagcaacatagttcatggattttgtggaggttctattcagtaatatggttcatggatttagtggtgactgataagattttatttttgaaggaaaaattgcttatactaagtccagagacatgcaggtgagcccttttgtcaggctgcaaatcatgacatgccgatggttgtttattttgtttttaggtgtgcattctttttcttcttagcaattcctttatgatcaccttcccttcttgtttcactccctcccgctctctcaaaaggaacttgggaaacttgtgaaacccaggaaaacctttagtcttatacctcaactacctttcagtcctgtctgggttttaaataagtgaagtagaagaaattgagtattttctgacataagaatatattatcaatacagttttatgcagtaagctctccttaccataaatgtttcttggttgacaacatctaagacaatattagtgggatgaagaaagaaaagcaggggtgcttttggaagcagtgttagtgttcctcaaaagtcggaacaattgcctgttgatatattaataagacattaaagtcaaattttaatgttggcctctcaaatgatttggataccactctgcaaagtatttctaacctttaattcccagttttaaaacagatataataatagcatttaattggaatatactaggcagctggaaaagtatttgaaactaaattgacattaaaattaagatttgttttcaagtggatgtccattaaaagtagaaaaatatttgggataagtgagtgtgtgtttccttacatggctactaaataaaatataatgagtatacaagtatatctcctcttttgctatggaggctccatgttcaaggcaatggctttttaaatcttggctatctaaaattttttccctttgttttgaatatttgtaagtttttaagaagttagtgtcagcaaattaattgaagttatgcttctatactgggacatatttaaatactgagtatagtactgctgctactgcttctacaatgtaaaatgtatgacttggtgttttaaagtaaaaattatgatgttacttgtggagaaactaaaaatgttgtacaactgaccgaaagaaaacccttggggataagtttagtgaggggattggaatccccaaaaagataacatttttcttctgcttttaaaaactgaaattccctgttctagttcctaacaattctcattacatactatgccagattacaaaatacttatttttaaaatgaaatctatatattgactttcttatcaatcatcttactgtgcaatcaaaattagagtactttggtttgaaaacaacacttagagcctccagataacttttaagacttatttagctttgtgggtggtattttcatgcaaataagtaagggtgggttttatattttgtagaagttttcggtcctatttaaagcctggttgggaggtttttggggggggccagaattccttaa

SEQ ID NO: 115759 - DNA, 2690 bp, Homo sapiens
gggtggagtgtaggccagggggttggcggtgccgtgtcatggaggctcagtctctgagcagccattgaaggggaaggaactgcgggaaagggaaaaggagagtagtagctgaagagcaagaggaggacatggagatgaagaagaagattaacctggagttaaggaacagatccccggaggaggatggatttgatcaggaggataatgaagcgccggactctgaagaggaggatgatgaggatggagatgaagatgatgaagaggaagaggaaaatgaagctggtccaccggaaggatatgaggaagaggaggaggaagaggaagaggaggatgaggatgaggatgaagatgaagatgaagcaggttcagagttgggagagggagaagaggaagtgggcctctcatacttaatgaaagaagaaattcaggatgaagaagatgatgatgactatgttgaagaaggggaagaagaggaagaagaggaagaaggaggtcttcgaggggagaagaggaaacgagatgctgaagacgatggagaggaagaagatgactagatcattctaagaccagattctctaatgtttctgggtgtgcaatagagtgatcacatctttgtttcttcatgtacgatagctatccctacagaagataatgtgtaactttttataggaaaagtgtggttttactatttttgccttatcattccaaataagaactagtctgttaatgatcatattgtatgtagagaaaaattttcattgactcccattgtggaattccctagcaatttatttagacttaattttttaaattcaagcttactgtattagtcatttttagcccataattaaaacatgatcacttttacacaggtgtagtatggtgcatttcattccttatttataaattaactgaaattacagtttgctataatataaaatgacaatagtctcttgagtggtaagttggttatttttttagaggtgatccaggaatctttagtttgaaggcagttaccttttttttttttttttttttttgactaagagtgtttggttgcttttttgtcacaagtaacttggaaaatagaagcagaatagtaaaggttctattcagcaacatagttcatggattttgtggaggttctattcagtaatatggttcatggatttagtggtgactgataagattttatttttgaaggaaaaattgcttatactaagtccagagacatgcaggtgagcccttttgtcaggctgcaaatcatgacatgccgatggttgtttattttgtttttaggtgtgcattctttttcttcttagcaattcctttatgatcaccttcccttcttgtttcactccctcccgctctctcaaaaggaacttgggaaacttgtgaaacccaggaaaacctttagtcttatacctcaactacctttcagtcctgtctgggttttaaataagtgaagtagaagaaattgagtattttctgacataagaatatattatcaatacagttttatgcagtaagctctccttaccataaatgtttcttggttgacaacatctaagacaatattagtgggatgaagaaagaaaagcaggggtgcttttggaagcagtgttagtgttcctcaaaagtcggaacaattgcctgttgatatattaataagacattaaagtcaaattttaatgttggcctctcaaatgatttggataccactctgcaaagtatttctaacctttaattcccagttttaaaacagatataataatagcatttaattggaatatactaggcagctggaaaagtatttgaaactaaattgacattaaaattaagatttgttttcaagtggatgtccattaaaagtagaaaaatatttgggataagtgagtgtgtgtttccttacatggctactaaataaaatataatgagtatacaagtatatctcctcttttgctatggaggctccatgttcaaggcaatggctttttaaatcttggctatctaaaattttttccctttgttttgaatatttgtaagtttttaagaagttagtgtcagcaaattaattgaagttatgcttctatactgggacatatttaaatactgagtatagtactgctgctactgcttctacaatgtaaaatgtatgacttggtgttttaaagtaaaaattatgatgttacttgtggagaaactaaaaatgttgtacaactgaccgaaagaaaacccttggggataagtttagtgaggggattggaatccccaaaaagataacatttttcttctgcttttaaaaactgaaattccctgttctagttcctaacaattctcattacatactatgccagattacaaaatacttatttttaaaatgaaatctatatattgactttcttatcaatcatcttactgtgcaatcaaaattagagtactttggtttgaaaacaacacttagagcctccagataacttttaagacttatttagctttgtgggtggtattttcatgcaaataagtaagggtgggttttatattttgtagaagttttcggtcctattttaatgctctttgtatggcagtatgtatatattgtgttaagttcctcaagaatctccttaaaaactttgaagttaatacttttgtgcaactgtgttttgaataaagccatgacagtgttaaaa

SEQ ID NO: 115760 - DNA, 3419 bp, Homo sapiens
gggtggagtgtaggccagggggttggcggtgccgtgtcatggaggctcagtctctgagcagccattgaaggggaaggaactgcgggtgtgtgtgtgtatgtgtgtgtgtatgtgtgtgcgcgcgtgcgtgcgtgtgtgtgcgcgcgctagtgtgtggacaaggaggtgggggcagctgagttagagtcccaactcttggactccatttgctattctcttctttctcccccacacctatctggtggtggtagtgggcgtttatatttgcgttccttttcattcatttctaaatctcttaaaaattttgggttgggggtattggggaaggcaggaaagggaaaaggagagtagtagctgaagagcaagaggaggacatggagatgaagaagaagattaacctggagttaaggaacagatccccggaggaggtgacagagttagtccttgataattgcctgtgtgtcaatggggaaattgaaggcctgaatgatactttcaaagaactagaatttctgagtatggctaatgtggaactaagttcgctggcccggcttcccagcttaaataaacttcgaaaattggagcttagtgataatataatttctggaggcttggaagtcctggcagagaaatgtccaaatcttacctacctcaatctgagtggaaacaaaataaaagatctcagtacagtagaagctctgcaaaatcttaaaaatttgaaaagtcttgacctgtttaactgtgagatcacaaacctggaagattatagagaaagtatttttgaactactgcagcaaatcacatacttagatggatttgatcaggaggataatgaagcgccggactctgaagaggaggatgatgaggatggagatgaagatgatgaagaggaagaggaaaatgaagctggtccaccggaaggatatgaggaagaggaggaggaagaggaagaggaggatgaggatgaggatgaagatgaagatgaagcaggttcagagttgggagagggagaagaggaagtgggcctctcatacttaatgaaagaagaaattcaggatgaagaagatgatgatgactatgttgaagaaggggaagaagaggaagaagaggaagaaggaggtcttcgaggggagaagaggaaacgagatgctgaagacgatggagaggaagaagatgactagatcattctaagaccagattctctaatgtttctgggtgtgcaatagagtgatcacatctttgtttcttcatgtacgatagctatccctacagaagataatgtgtaactttttataggaaaagtgtggttttactatttttgccttatcattccaaataagaactagtctgttaatgatcatattgtatgtagagaaaaattttcattgactcccattgtggaattccctagcaatttatttagacttaattttttaaattcaagcttactgtattagtcatttttagcccataattaaaacatgatcacttttacacaggtgtagtatggtgcatttcattccttatttataaattaactgaaattacagtttgctataatataaaatgacaatagtctcttgagtggtaagttggttatttttttagaggtgatccaggaatctttagtttgaaggcagttaccttttttttttttttttttttttgactaagagtgtttggttgcttttttgtcacaagtaacttggaaaatagaagcagaatagtaaaggttctattcagcaacatagttcatggattttgtggaggttctattcagtaatatggttcatggatttagtggtgactgataagattttatttttgaaggaaaaattgcttatactaagtccagagacatgcaggtgagcccttttgtcaggctgcaaatcatgacatgccgatggttgtttattttgtttttaggtgtgcattctttttcttcttagcaattcctttatgatcaccttcccttcttgtttcactccctcccgctctctcaaaaggaacttgggaaacttgtgaaacccaggaaaacctttagtcttatacctcaactacctttcagtcctgtctgggttttaaataagtgaagtagaagaaattgagtattttctgacataagaatatattatcaatacagttttatgcagtaagctctccttaccataaatgtttcttggttgacaacatctaagacaatattagtgggatgatgttcctcaaaagtcggaacaattgcctgttgatatattaataagacattaaagtcaaattttaatgttggcctctcaaatgatttggataccactctgcaaagtatttctaacctttaattcccagttttaaaacagatataataatagcatttaattggaatatactaggcagctggaaaagtatttgaaactaaattgacattaaaattaagatttgttttcaagtggatgtccattaaaagtagaaaaatatttgggataagtgagtgtgtgtttccttacatggctactaaataaaatataatgagtatacaagtatatctcctcttttgctatggaggctccatgttcaaggcaatggctttttaaatcttggctatctaaaattttttccctttgttttgaatatttgtaagtttttaagaagttagtgtcagcaaattaattgaagttatgcttctatactgggacatatttaaatactgagtatagtactgctgctactgcttctacaatgtaaaatgtatgacttggtgttttaaagtaaaaattatgatgttacttgtggagaaactaaaaatgttgtacaactgaccgaaagaaaacccttggggataagtttagtgaggggattggaatccccaaaaagataacatttttcttctgcttttaaaaactgaaattccctgttctagttcctaacaattctcattacatactatgccagattacaaaatacttatttttaaaatgaaatctatatattgactttcttatcaatcatcttactgtgcaatcaaaattagagtactttggtttgaaaacaacacttagagcctccagataacttttaagacttatttagctttgtgggtggtattttcatgcaaataagtaagggtgggttttatattttgtagaagttttcggtcctattttaatgctctttgtatggcagtatgtatatattgtgttaagttcctcaagaatctccttaaaaactttgaagttaatacttttgtgcaactgtgttttgaataaagccatgacagtgttaaaaacaaacaaaaaaatttgcagtactcctgattattcttttattgtttttgactgttccctgtttttttctgtgactgctgtaacttaaagtttttgaaactgaattgcttcaaataaattgaagatttgttataatgatta

SEQ ID NO: 115761 - DNA, 1494 bp, Homo sapiens
gggtggagtgtaggccagggggttggcggtgccgtgtcatggaggctcagtctctgagcagccattgaaggggaaggaactgcgggtgtgtgtgtgtatgtgtgtgtgtatgtgtgtgcgcgcgtgcgtgcgtgtgtgtgcgcgcgctagtgtgtggacaaggaggtgggggcagctgagttagagtcccaactcttggactccatttgctattctcttctttctcccccacacctatctggtggtggtagtgggcgtttatatttgcgttccttttcattcatttctaaatctcttaaaaattttgggttgggggtattggggaaggcaggaaagggaaaaggagagtagtagctgaagagcaagaggaggacatggagatgaagaagaagattaacctggagttaaggaacagatccccggaggaggtgacagagttagtccttgataattgcctgtgtgtcaatggggaaattgaaggcctgaatgatactttcaaagaactagaatttctgagtatggctaatgtggaactaagttcgctggcccggcttcccagcttaaataaacttcgaaaattggagcttagtgataatataatttctggaggcttggaagtcctggcagagaaatgtccaaatcttacctacctcaatctgagtggaaacaaaataaaagatctcagtacagtagaagctctgcaaaatcttaaaaatttgaaaagtcttgacctgtttaactgtgagatcacaaacctggaagattatagagaaagtatttttgaactactgcagcaaatcacatacttagatggatttgatcaggaggataatgaagcgccggactctgaagaggaggatgatgaggatggagatgaagatgatgaagaggaagaggaaaatgaagctggtccaccggaaggatatgaggaagaggaggaggaagaggaagaggaggatgaggatgaggatgaagatgaagatgaagcaggttcagagttgggagagggagaagaggaagtgggcctctcatacttaatgaaagaagaaattcaggatgaagaagatgatgatgactatgttgaagaaggggaagaagaggaagaagaggaagaaggaggtcttcgaggggagaagaggaaacgagatgctgaagacgatggagaggaagaagatgactagatcattctaagaccagattctctaatgtttctgggtgtgcaatagagtgatcacatctttgtttcttcatgtacgatagctatccctacagaagataatgtgtaactttttataggaaaagtgtggttttactatttttgccttatcattccaaataagaactagtctgttaatgatcatattgtatgtagagaaaaattttcattgactcccattgtggaattccctagcaatttatttagacttaattttttaaattcaagcttactgtattagtcatttttagcccataattaaaacatgatcactttta

SEQ ID NO: 115762 - DNA, 1315 bp, Homo sapiens
gggtggagtgtaggccagggggttggcggtgccgtgtcatggaggctcagtctctgagcagccattgaaggggaaggaactgcgggtgtgtgtgtgtatgtgtgtgtgtatgtgtgtgcgcgcgtgcgtgcgtgtgtgtgcgcgcgctagtgtgtggacaaggaggtgggggcagctgagttagagtcccaactcttggactccatttgctattctcttctttctcccccacacctatctggtggtggtagtgggcgtttatatttgcgttccttttcattcatttctaaatctcttaaaaattttgggttgggggtattggggaaggcaggaaagggaaaaggagagtagtagctgaagagcaagaggaggacatggagatgaagaagaagattaacctggagttaaggaacagatccccggaggaggtgacagagttagtccttgataattgcctgtgtgtcaatggggaaattgaaggcctgaatgatactttcaaagaactagaatttctgagtatggctaatgtggaactaagttcgctggcccggcttcccagcttaaataaacttcgaaaattggagcttagtgataatataatttctggaggcttggaagtcctggcagagaaatgtccaaatcttacctacctcaatctgagtggaaacaaaataaaagatctcagtacagtagaagctctgcaaaatcttaaaaatttgaaaagtcttgacctgtttaactgtgagatcacaaacctggaagattatagagaaagtatttttgaactactgcagcaaatcacatacttagatggatttgatcaggaggataatgaagcgccggactctgaagaggaggatgatgaggatggagatgaagatgatgaagaggaagaggaaaatgaagctggtccaccggaaggatatgaggaagaggaggaggaagaggaagaggaggatgaggatgaggatgaagatgaagatgaagcaggttcagagttgggagagggagaagaggaagtgggcctctcatacttaatgaaagaagaaattcaggtgaatacacacttcttacctgcactgaaaattaatttctaggcataggagtaagtactatataaagtgtgttttgtagcaatctgagagttgtttctaagttgtgggtgtgcatatgtctatccacctgtcttttttttcattgtcctccaccccaaactatatccagataatcataaacacctattgattttacctcccagataactttcaaatctgttacagccatttagcctaaatggctgtagcgacagcaggca

SEQ ID NO: 115763 - DNA, 723 bp, Homo sapiens
tacaatcagctcggtacctgccaagcgtagtacccaaatgtaaaatgtatgacttggtgttttaaagtaaaaattatgatgttacttgtggagaaactaaaaatgttgtacaactgaccgaaagaaaacccttggggataagtttagtgaggggattggaatccccaaaaagataacatttttcttctgcttttaaaaactgaaattccctgttctagttcctaacaattctcattacatactatgccagattacaaaatacttatttttaaaatgaaatctatatattgactttcttatcaatcatcttactgtgcaatcaaaattagagtactttggtttgaaaacaacacttagagcctccagataacttttaagacttatttagctttgtgggtggtattttcatgcaaataagtaagggtgggttttatattttgtagaagttttcggtcctattttaatgctctttgtatggcagtatgtatatattgtgttaagttcctcaagaatctccttaaaaactttgaagttaatacttttgtgcaactgtgttttgaataaagccatgacagtgttaaaaacaaacaaaaaaatttgcagtactcctgattattcttttattgtttttgactgttccctgtttttttctgtgactgctgtaacttaaagtttttgaaactgaattgcttcaaataaattgaagatttgttataatgatta

SEQ ID NO: 115764 - DNA, 606 bp, Homo sapiens
cttaatgaaagaagaaattcaggtgaatacacacttcttacctgcactgaaaattaatttctaggcataggagtaagtactatataaagtgtgttttgtagcaatctgagagttgtttctaagttgtgggtgtgcatatgtctatccacctgtcttttttttcattgtcctccaccccaaactatatccagataatcataaacacctattgattttacctcccagataactttcaaatctgttacagcctcaatggcatggtatggtggaaacattttacaaatgtctgtgaacctcaatttctgcatttataaaacagattaggccgggcatggtggctcacacctgtaatcccagtacttttggaggctgaggcaagtggatcatgaggtcaggagttcgagaccagcctgaccaacatgagtggggaaaccccgtatctactaaaaatacaaaaattagctgggcatgatggcacacacctgtagtcccagctaatcgtgagactgaggctgagaatcacttgaactcaggaggcggagattgcagtgagctgagatcgtgcctctgcactccagcctgggcaacggagcaagactctgtctc

SEQ ID NO: 115765 - DNA, 3457 bp, Homo sapiens
gggtggagtgtaggccagggggttggcggtgccgtgtcatggaggctcagtctctgagcagccattgaaggggaaggaactgcgggtgtgtgtgtgtatgtgtgtgtgtatgtgtgtgcgcgcgtgcgtgcgtgtgtgtgcgcgcgctagtgtgtggacaaggaggtgggggcagctgagttagagtcccaactcttggactccatttgctattctcttctttctcccccacacctatctggtggtggtagtgggcgtttatatttgcgttccttttcattcatttctaaatctcttaaaaattttgggttgggggtattggggaaggcaggaaagggaaaaggagagtagtagctgaagagcaagaggaggacatggagatgaagaagaagattaacctggagttaaggaacagatccccggaggaggtgacagagttagtccttgataattgcctgtgtgtcaatggggaaattgaaggcctgaatgatactttcaaagaactagaatttctgagtatggctaatgtggaactaagttcgctggcccggcttcccagcttaaataaacttcgaaaattggagcttagtgataatataatttctggaggcttggaagtcctggcagagaaatgtccaaatcttacctacctcaatctgagtggaaacaaaataaaagatctcagtacagtagaagctctgcaaaatcttaaaaatttgaaaagtcttgacctgtttaactgtgagatcacaaacctggaagattatagagaaagtatttttgaactactgcagcaaatcacatacttagatggatttgatcaggaggataatgaagcgccggactctgaagaggaggatgatgaggatggagatgaagatgatgaagaggaagaggaaaatgaagctggtccaccggaaggatatgaggaagaggaggaggaagaggaagaggaggatgaggatgaggatgaagatgaagatgaagcaggttcagagttgggagagggagaagaggaagtgggcctctcatacttaatgaaagaagaaattcaggatgaagaagatgatgatgactatgttgaagaaggggaagaagaggaagaagaggaagaaggaggtcttcgaggggagaagaggaaacgagatgctgaagacgatggagaggaagaagatgactagatcattctaagaccagattctctaatgtttctgggtgtgcaatagagtgatcacatctttgtttcttcatgtacgatagctatccctacagaagataatgtgtaactttttataggaaaagtgtggttttactatttttgccttatcattccaaataagaactagtctgttaatgatcatattgtatgtagagaaaaattttcattgactcccattgtggaattccctagcaatttatttagacttaattttttaaattcaagcttactgtattagtcatttttagcccataattaaaacatgatcacttttacacaggtgtagtatggtgcatttcattccttatttataaattaactgaaattacagtttgctataatataaaatgacaatagtctcttgagtggtaagttggttatttttttagaggtgatccaggaatctttagtttgaaggcagttaccttttttttttttttttttttttgactaagagtgtttggttgcttttttgtcacaagtaacttggaaaatagaagcagaatagtaaaggttctattcagcaacatagttcatggattttgtggaggttctattcagtaatatggttcatggatttagtggtgactgataagattttatttttgaaggaaaaattgcttatactaagtccagagacatgcaggtgagcccttttgtcaggctgcaaatcatgacatgccgatggttgtttattttgtttttaggtgtgcattctttttcttcttagcaattcctttatgatcaccttcccttcttgtttcactccctcccgctctctcaaaaggaacttgggaaacttgtgaaacccaggaaaacctttagtcttatacctcaactacctttcagtcctgtctgggttttaaataagtgaagtagaagaaattgagtattttctgacataagaatatattatcaatacagttttatgcagtaagctctccttaccataaatgtttcttggttgacaacatctaagacaatattagtgggatgaagaaagaaaagcaggggtgcttttggaagcagtgttagtgttcctcaaaagtcggaacaattgcctgttgatatattaataagacattaaagtcaaattttaatgttggcctctcaaatgatttggataccactctgcaaagtatttctaacctttaattcccagttttaaaacagatataataatagcatttaattggaatatactaggcagctggaaaagtatttgaaactaaattgacattaaaattaagatttgttttcaagtggatgtccattaaaagtagaaaaatatttgggataagtgagtgtgtgtttccttacatggctactaaataaaatataatgagtatacaagtatatctcctcttttgctatggaggctccatgttcaaggcaatggctttttaaatcttggctatctaaaattttttccctttgttttgaatatttgtaagtttttaagaagttagtgtcagcaaattaattgaagttatgcttctatactgggacatatttaaatactgagtatagtactgctgctactgcttctacaatgtaaaatgtatgacttggtgttttaaagtaaaaattatgatgttacttgtggagaaactaaaaatgttgtacaactgaccgaaagaaaacccttggggataagtttagtgaggggattggaatccccaaaaagataacatttttcttctgcttttaaaaactgaaattccctgttctagttcctaacaattctcattacatactatgccagattacaaaatacttatttttaaaatgaaatctatatattgactttcttatcaatcatcttactgtgcaatcaaaattagagtactttggtttgaaaacaacacttagagcctccagataacttttaagacttatttagctttgtgggtggtattttcatgcaaataagtaagggtgggttttatattttgtagaagttttcggtcctattttaatgctctttgtatggcagtatgtatatattgtgttaagttcctcaagaatctccttaaaaactttgaagttaatacttttgtgcaactgtgttttgaataaagccatgacagtgttaaaaacaaacaaaaaaatttgcagtactcctgattattcttttattgtttttgactgttccctgtttttttctgtgactgctgtaacttaaagtttttgaaactgaattgcttcaaataaattgaagatttgttataatgatta

SEQ ID NO: 115766 - DNA, 3262 bp, Homo sapiens
gggtggagtgtaggccagggggttggcggtgccgtgtcatggaggctcagtctctgagcagccattgaaggggaaggaactgcgggtgtgtgtgtgtatgtgtgtgtgtatgtgtgtgcgcgcgtgcgtgcgtgtgtgtgcgcgcgctagtgtgtggacaaggaggtgggggcagctgagttagagtcccaactcttggactccatttgctattctcttctttctcccccacacctatctggtggtggtagtgggcgtttatatttgcgttccttttcattcatttctaaatctcttaaaaattttgggttgggggtattggggaaggcaggaaagggaaaaggagagtagtagctgaagagcaagaggaggacatggagatgaagaagaagattaacctggagttaaggaacagatccccggaggaggtgacagagttagtccttgataattgcctgtgtgtcaatggggaaattgaaggcctgaatgatactttcaaagaactagaatttctgagtatggctaatgtggaactaagttcgctggcccggcttcccagcttaaataaacttcgaaaattggagcttagtgataatataatttctggaggcttggaagtcctggcagagaaatgtccaaatcttacctacctcaatctgagtggaaacaaaataaaagatctcagtacagtagaagctctgcaaaatcttaaaaatttgaaaagtcttgacctgtttaactgtgagatcacaaacctggaagattatagagaaagtatttttgaactactgcagcaaatcacatacttagatggatttgatcaggaggataatgaagcgccggactctgaagaggaggatgatgaggatggagatgaagatgatgaagaggaagaggaaaatgaagctggtccaccggaaggatatgaggaagaggaggaggaagaggaagaggaggatgaggatgaggatgaagatgaagatgaagcaggttcagagttgggagagggagaagaggaagtgggcctctcatacttaatgaaagaagaaattcagaagaaggaggtcttcgaggggagaagaggaaacgagatgctgaagacgatggagaggaagaagatgactagatcattctaagaccagattctctaatgtttctgggtgtgcaatagagtgatcacatctttgtttcttcatgtacgatagctatccctacagaagataatgtgtaactttttataggaaaagtgtggttttactatttttgccttatcattccaaataagaactagtctgttaatgatcatattgtatgtagagaaaaattttcattgactcccattgtggaattccctagcaatttatttagacttaattttttaaattcaagcttactgtattagtcatttttagcccataattaaaacatgatcacttttacacaggtgtagtatggtgcatttcattccttatttataaattaactgaaattacagtttgctataatataaaatgacaatagtctcttgagtggtaagttggttatttttttagaggtgatccaggaatctttagtttgaaggcagttaccttttttttttttttttttttttgactaagagtgtttggttgcttttttgtcacaagtaacttggaaaatagaagcagaatagtaaaggttctattcagcaacatagttcatggattttgtggaggttctattcagtaatatggttcatggatttagtggtgactgataagattttatttttgaaggaaaaattgcttatactaagtccagagacatgcaggtgagcccttttgtcaggctgcaaatcatgacatgccgatggttgtttattttgtttttaggtgtgcattctttttcttcttagcaattcctttatgatcaccttcccttcttgtttcactccctcccgctctctcaaaaggaacttgggaaacttgtgaaacccaggaaaacctttagtcttatacctcaactacctttcagtcctgtctgggttttaaataagtgaagtagaagaaattgagtattttctgacataagaatatattatcaatacagttttatgcagtaagctctccttaccataaatgtttcttggttgacaacatctaagacaatattagtgggatgaagaaagaaaagcaggggtgcttttggaagcagtgttagtgttcctcaaaagtcggaacaattgcctgttgatatattaataagacattaaagtcaaattttaatgttggcctctcaaatgatttggataccactctgcaaagtatttctaacctttaattcccagttttaaaacagatataataatagcatttaattggaatatactaggcagctggaaaagtatttgaaactaaattgacattaaaattaagatttgttttcaagtggatgtccattaaaagtagaaaaatatttgggataagtgagtgtgtgtttccttacatggctactaaataaaatataatgagtatacaagtatatctcctcttttgctatggaggctccatgttcaaggcaatggctttttaaatcttggctatctaaaattttttccctttgttttgaatatttgtaagtttttaagaagttagtgtcagcaaattaattgaagttatgcttctatactgggacatatttaaatactgagtatagtactgctgctactgcttctacaatgtaaaatgtatgacttggtgttttaaagtaaaaattatgatgttacttgtggagaaactaaaaatgttgtacaactgaccgaaagaaaacccttggggataagtttagtgaggggattggaatccccaaaaagataacatttttcttctgcttttaaaaactgaaattccctgttctagttcctaacaattctcattacatactatgccagattacaaaatacttatttttaaaatgaaatctatatattgactttcttatcaatcatcttactgtgcaatcaaaattagagtactttggtttgaaaacaacacttagagcctccagataacttttaagacttatttagctttgtgggtggtattttcatgcaaataagtaagggtgggttttatattttgtagaagttttcggtcctattttaatgctctttgtatggcagtatgtatatattgtgttaagttcctcaagaatctccttaaaaactttgaagttaatacttttgtgcaactgtgttttgaataaagccatgacagtgttaaaa

SEQ ID NO: 115767 - DNA, 3762 bp, Homo sapiens
gggtggagtgtaggccagggggttggcggtgccgtgtcatggaggctcagtctctgagcagccattgaaggggaaggaactgcgggtgtgtgtgtgtatgtgtgtgtgtatgtgtgtgcgcgcgtgcgtgcgtgtgtgtgcgcgcgctagtgtgtggacaaggaggtgggggcagctgagttagagtcccaactcttggactccatttgctattctcttctttctcccccacacctatctggtggtggtagtgggcgtttatatttgcgttccttttcattcatttctaaatctcttaaaaattttgggttgggggtattggggaaggcaggaaagggaaaaggagagtagtagctgaagagcaagaggaggacatggagatgaagaagaagattaacctggagttaaggaacagatccccggaggaggtgacagagttagtccttgataattgcctgtgtgtcaatggggaaattgaaggcctgaatgatactttcaaagaactagaatttctgagtatggctaatgtggaactaagttcgctggcccggcttcccagcttaaataaacttcgaaaattggagcttagtgataatataatttctggaggcttggaagtcctggcagagaaatgtccaaatcttacctacctcaatctgagtggaaacaaaataaaagatctcagtacagtagaagctctgcaaaatcttaaaaatttgaaaagtcttgacctgtttaactgtgagatcacaaacctggaagattatagagaaagtatttttgaactactgcagcaaatcacatacttagatggatttgatcaggaggataatgaagcgccggactctgaagaggaggatgatgaggatggagatgaagatgatgaagaggaagaggaaaatgaagctggtccaccggaaggatatgaggaagaggaggaggaagaggaagaggaggatgaggatgaggatgaagatgaagatgaagcaggttcagagttgggagagggagaagaggaagtgggcctctcatacttaatgaaagaagaaattcaggatgaagaagatgatgatgactatgttgaagaaggggaagaagaggaagaagaggaagaaggaggtcttcgaggggagaagaggaaacgagatgctgaagacgatggagaggaagaagatgactagatcattctaagaccagattctctaatgtttctgggtgtgcaatagagtgatcacatctttgtttcttcatgtacgatagctatccctacagaagataatgtgtaactttttataggaaaagtgtggttttactatttttgccttatcattccaaataagaactagtctgttaatgatcatattgtatgtagagaaaaattttcattgactcccattgtggaattccctagcaatttatttagacttaattttttaaattcaagcttactgtattagtcatttttagcccataattaaaacatgatcacttttacacaggtgtagtatggtgcatttcattccttatttataaattaactgaaattacagtttgctataatataaaatgacaatagtctcttgagtggtaagttggttatttttttagaggtgatccaggaatctttagtttgaaggcagttaccttttttttttttttttttttttgactaagagtgtttggttgcttttttgtcacaagtaacttggaaaatagaagcagaatagtaaaggttctattcagcaacatagttcatggattttgtggaggttctattcagtaatatggttcatggatttagtggtgactgataagattttatttttgaaggaaaaattgcttatactaagtccagagacatgcaggtgagcccttttgtcaggctgcaaatcatgacatgccgatggttgtttattttgtttttaggtgtgcattctttttcttcttagcaattcctttatgatcaccttcccttcttgtttcactccctcccgctctctcaaaaggaacttgggaaacttgtgaaacccaggaaaacctttagtcttatacctcaactacctttcagtcctgtctgggttttaaataagtgaagtagaagaaattgagtattttctgacataagaatatattatcaatacagttttatgcagtaagctctccttaccataaatgtttcttggttgacaacatctaagacaatattagtgggatgaagaaagaaaagcaggggtgcttttggaagcagtgttagtgttcctcaaaagtcggaacaattgcctgttgatatattaataagacattaaagtcaaattttaatgttggcctctcaaatgatttggataccactctgcaaagtatttctaacctttaattcccagttttaaaacagatataataatagcatttaattggaatatactaggcagctggaaaagtatttgaaactaaattgacattaaaattaagatttgttttcaagtggatgtccattaaaagtagaaaaatatttgggataagtgagtgtgtgtttccttacatggctactaaataaaatataatgagtatacaagtatatctcctcttttgctatggaggctccatgttcaaggcaatggctttttaaatcttggctatctaaaattttttccctttgttttgaatatttgtaagtttttaagaagttagtgtcagcaaattaattgaagttatgcttctatactgggacatatttaaatactgagtatagtactgctgctactgcttctacaatgtaaaatgtatgacttggtgttttaaagtaaaaattatgatgttacttgtggagaaactaaaaatgttgtacaactgaccgaaagaaaacccttggggataagtttagtgaggggattggaatccccaaaaagataacatttttcttctgcttttaaaaactgaaattccctgttctagttcctaacaattctcattacatactatgccagattacaaaatacttatttttaaaatgaaatctatatattgactttcttatcaatcatcttactgtgcaatcaaaattagagtactttggtttgaaaacaacacttagagcctccagataacttttaagacttatttagctttgtgggtggtattttcatgcaaataagtaagggtgggttttatattttgtagaagttttcggtcctattttaatgctctttgtatggcagtatgtatatattgtgttaagttcctcaagaatctccttaaaaactttgaagttaatacttttgtgcaactgtgttttgaataaagccatgacagtgttaaaaacaaacaaaaaaatttgcagtactcctgattattcttttattgtttttgactgttccctgtttttttctgtgactgctgtaacttaaagtttttgaaactgaattgcttcaaataaattgaagatttgttataatgattaaaaaaaaaaaaaaaaaaaaaaccgaggaagaaaacagacacaacgacaagtcaagaaacacagcacaaaacaagaacaccgacagaaactaaaagcaagagggggacgggcactgcaataatatgccacgagcgcagacctacagccgagcatctagtgaacgcggcccacactaggaaacatacacacgcggccgcccatacacgacgcggagaacacacgtgagtggcgagacaacgtagggggaaaggaacaacagaaacaggcaaaaaagaagtattaaacaacctggcgaaatccgctaa

SEQ ID NO: 115768 - DNA, 3167 bp, Homo sapiens
gggtggagtgtaggccagggggttggcggtgccgtgtcatggaggctcagtctctgagcagccattgaaggggaaggaactgcgggtgtgtgtgtgtatgtgtgtgtgtatgtgtgtgcgcgcgtgcgtgcgtgtgtgtgcgcgcgctagtgtgtggacaaggaggtgggggcagctgagttagagtcccaactcttggactccatttgctattctcttctttctcccccacacctatctggtggtggtagtgggcgtttatatttgcgttccttttcattcatttctaaatctcttaaaaattttgggttgggggtattggggaaggcaggaaagggaaaaggagagtagtagctgaagagcaagaggaggacatggagatgaagaagaagattaacctggagttaaggaacagatccccggaggagttggagcttagtgataatataatttctggaggcttggaagtcctggcagagaaatgtccaaatcttacctacctcaatctgagtggaaacaaaataaaagatctcagtacagtagaagctctgcaaaatcttaaaaatttgaaaagtcttgacctgtttaactgtgagatcacaaacctggaagattatagagaaagtatttttgaactactgcagcaaatcacatacttagatggatttgatcaggaggataatgaagcgccggactctgaagaggaggatgatgaggatggagatgaagatgatgaagaggaagaggaaaatgaagctggtccaccggaaggatatgaggaagaggaggaggaagaggaagaggaggatgaggatgaggatgaagatgaagatgaagcaggttcagagttgggagagggagaagaggaagtgggcctctcatacttaatgaaagaagaaattcaggatgaagaagatgatgatgactatgttgaagaaggggaagaagaggaagaagaggaagaaggaggtcttcgaggggagaagaggaaacgagatgctgaagacgatggagaggaagaagatgactagatcattctaagaccagattctctaatgtttctgggtgtgcaatagagtgatcacatctttgtttcttcatgtacgatagctatccctacagaagataatgtgtaactttttataggaaaagtgtggttttactatttttgccttatcattccaaataagaactagtctgttaatgatcatattgtatgtagagaaaaattttcattgactcccattgtggaattccctagcaatttatttagacttaattttttaaattcaagcttactgtattagtcatttttagcccataattaaaacatgatcacttttacacaggtgtagtatggtgcatttcattccttatttataaattaactgaaattacagtttgctataatataaaatgacaatagtctcttgagtggtaagttggttatttttttagaggtgatccaggaatctttagtttgaaggcagttaccttttttttttttttttttttttgactaagagtgtttggttgcttttttgtcacaagtaacttggaaaatagaagcagaatagtaaaggttctattcagcaacatagttcatggattttgtggaggttctattcagtaatatggttcatggatttagtggtgactgataagattttatttttgaaggaaaaattgcttatactaagtccagagacatgcaggtgagcccttttgtcaggctgcaaatcatgacatgccgatggttgtttattttgtttttaggtgtgcattctttttcttcttagcaattcctttatgatcaccttcccttcttgtttcactccctcccgctctctcaaaaggaacttgggaaacttgtgaaacccaggaaaacctttagtcttatacctcaactacctttcagtcctgtctgggttttaaataagtgaagtagaagaaattgagtattttctgacataagaatatattatcaatacagttttatgcagtaagctctccttaccataaatgtttcttggttgacaacatctaagacaatattagtgggatgaagaaagaaaagcaggggtgcttttggaagcagtgttagtgttcctcaaaagtcggaacaattgcctgttgatatattaataagacattaaagtcaaattttaatgttggcctctcaaatgatttggataccactctgcaaagtatttctaacctttaattcccagttttaaaacagatataataatagcatttaattggaatatactaggcagctggaaaagtatttgaaactaaattgacattaaaattaagatttgttttcaagtggatgtccattaaaagtagaaaaatatttgggataagtgagtgtgtgtttccttacatggctactaaataaaatataatgagtatacaagtatatctcctcttttgctatggaggctccatgttcaaggcaatggctttttaaatcttggctatctaaaattttttccctttgttttgaatatttgtaagtttttaagaagttagtgtcagcaaattaattgaagttatgcttctatactgggacatatttaaatactgagtatagtactgctgctactgcttctacaatgtaaaatgtatgacttggtgttttaaagtaaaaattatgatgttacttgtggagaaactaaaaatgttgtacaactgaccgaaagaaaacccttggggataagtttagtgaggggattggaatccccaaaaagataacatttttcttctgcttttaaaaactgaaattccctgttctagttcctaacaattctcattacatactatgccagattacaaaatacttatttttaaaatgaaatctatatattgactttcttatcaatcatcttactgtgcaatcaaaattagagtactttggtttgaaaacaacacttagagcctccagataacttttaagacttatttagctttgtgggtggtattttcatgcaaataagtaagggtgggttttatattttgtagaagttttcggtcctattttaatgctctttgtatggcagtatgtatatattgtgttaagttcctcaagaatctccttaaaaactttgaagttaatacttttgtgcaactgtgttttgaataaagccatgacagtgttaaaa

SEQ ID NO: 115769 - DNA, 3011 bp, Homo sapiens
gggtggagtgtaggccagggggttggcggtgccgtgtcatggaggctcagtctctgagcagccattgaaggggaaggaactgcgggtgtgtgtgtgtatgtgtgtgtgtatgtgtgtgcgcgcgtgcgtgcgtgtgtgtgcgcgcgctagtgtgtggacaaggaggtgggggcagctgagttagagtcccaactcttggactccatttgctattctcttctttctcccccacacctatctggtggtggtagtgggcgtttatatttgcgttccttttcattcatttctaaatctcttaaaaattttgggttgggggtattggggaaggcaggaaagggaaaaggagagtagtagctgaagagcaagaggaggacatggagatgaagaagaagattaacctggagttaaggaacagatccccggaggaggtgacagagttagtccttgataattgcctgtgtgtcaatggggaaattgaaggcctgaatgatactttcaaagaactagaatttctgagtatggctaatgtggaactaagttcgctggcccggcttcccagcttaaataaacttcgaaaattggagcttagtgataatataatttctggaggcttggaagtcctggcagagaaatgtccaaatcttacctacctcaatctgagtggaaacaaaataaaagatctcagtacagtagaagctctgcaaaatcttaaaaatttgaaaagtcttgacctgtttaactgtgagatcacaaacctggaagattatagagaaagtatttttgaactactgcagcaaatcacatacttagatggatttgatcaggaggataatgaagcgccggactctgaagaggaggatgatgaggatggagatgaagatgatgaagaggaagaggaaaatgaagctggtccaccggaaggatatgaggaagaggaggaggaagaggaagaggaggatgaggatgaggatgaagatgaagatgaagcaggttcagagttgggagagggagaagaggaagtgggcctctcatacttaatgaaagaagaaattcaggatgaagaagatgatgatgactatgttgaagaaggggaagaagaggaagaagaggaagaaggaggtcttcgaggggagaagaggaaacgagatgctgaagacgatggagaggaagaagatgactagatcattctaagaccagattctctaatgtttctgggtgtgcaatagagtgatcacatctttgtttcttcatgtacgatagctatccctacagaagataatgtgtaactttttataggaaaagtgtggttttactatttttgccttatcattccaaataagaactagtctgttaatgatcatattgtatgtagagaaaaattttcattgactcccattgtggaattccctagcaatttatttagacttaattttttaaattcaagcttactgtattagtcatttttagcccataattaaaacatgatcacttttacacaggtgtagtatggtgcatttcattccttatttataaattaactgaaattacagtttgctataatataaaatgacaatagtctcttgagtggtaagttggttatttttttagaggtgatccaggaatctttagtttgaaggcagttaccttttttttttttttttttttttgactaagagtgtttggttgcttttttgtcacaagtaacttggaaaatagaagcagaatagtaaaggttctattcagcaacatagttcatggattttgtggaggttctattcagtaatatggttcatggatttagtggtgactgataagattttatttttgaaggaaaaattgcttatactaagtccagagacatgcaggtgagcccttttgtcaggctgcaaatcatgacatgccgatggttgtttattttgtttttaggtgtgcattctttttcttcttagcaattcctttatgatcaccttcccttcttgtttcactccctcccgctctctcaaaaggaacttgggaaacttgtgaaacccaggaaaacctttagtcttatacctcaactacctttcagtcctgtctgggttttaaataagtgaagtagaagaaattgagtattttctgacataagaatatattatcaatacagttttatgcagtaagctctccttaccataaatgtttcttggttgacaacatctaagacaatattagtgggatgaagaaagaaaagcaggggtgcttttggaagcagtgttagtgttcctcaaaagtcggaacaattgcctgttgatatattaataagacattaaagtcaaattttaatgttggcctctcaaatgatttggataccactctgcaaagtatttctaacctttaattcccagttttaaaacagatataataatagcatttaattggaatatactaggcagctggaaaagtatttgaaactaaattgacattaaaattaagatttgttttcaagtggatgtccattaaaagtagaaaaatatttgggataagtgagtgtgtgtttccttacatggctactaaataaaatataatgagtatacaagtatatctcctcttttgctatggaggctccatgttcaaggcaatggctttttaaatcttggctatctaaaattttttccctttgttttgaatatttgtaagtttttaagaagttagtgtcagcaaattaattgaagttatgcttctatactgggacatatttaaatactgagtatagtactgctgctactgcttctacaatgtaaaatgtatgacttggtgttttaaagtaaaaattatgatgttacttgtggagaaactaaaaatgttgtacaactgaccgaaagaaaacccttggggataagtttagtgaggggattggaatccccaaaaagataacatttttcttctgcttttaaaaactgaaattccctgttctagttcctaacaattctcattacataccaccccatccctttcctctcatcattcaccttgca

SEQ ID NO: 115770 - DNA, 1367 bp, Homo sapiens
gggtggagtgtaggccagggggttggcggtgccgtgtcatggaggctcagtctctgagcagccattgaaggggaaggaactgcgggtgtgtgtgtgtatgtgtgtgtgtatgtgtgtgcgcgcgtgcgtgcgtgtgtgtgcgcgcgctagtgtgtggacaaggaggtgggggcagctgagttagagtcccaactcttggactccatttgctattctcttctttctcccccacacctatctggtggtggtagtgggcgtttatatttgcgttccttttcattcatttctaaatctcttaaaaattttgggttgggggtattggggaaggcaggaaagggaaaaggagagtagtagctgaagagcaagaggaggacatggagatgaagaagaagattaacctggagttaaggaacagatccccggaggaggtgacagagttagtccttgataattgcctgtgtgtcaatggggaaattgaaggcctgaatgatactttcaaagaactagaatttctgagtatggctaatgtggaactaagttcgctggcccggcttcccagcttaaataaacttcgaaaattggagcttagtgataatataatttctggaggcttggaagtcctggcagagaaatgtccaaatcttacctacctcaatctgagtggaaacaaaataaaagatctcagtacagtagaagctctgcaaaatcttaaaaatttgaaaagtcttgacctgtttaactgtgagatcacaaacctggaagattatagagaaagtatttttgaactactgcagcaaatcacatacttacaaaaagataacatttttcttctgcttttaaaaactgaaattccctgttctagttcctaacaattctcattacatactatgccagattacaaaatacttatttttaaaatgaaatctatatattgactttcttatcaatcatcttactgtgcaatcaaaattagagtactttggtttgaaaacaacacttagagcctccagataacttttaagacttatttagctttgtgggtggtattttcatgcaaataagtaagggtgggttttatattttgtagaagttttcggtcctattttaatgctctttgtatggcagtatgtatatattgtgttaagttcctcaagaatctccttaaaaactttgaagttaatacttttgtgcaactgtgttttgaataaagccatgacagtgttaaaaacaaacaaaaaaatttgcagtactcctgattattcttttattgtttttgactgttccctgtttttttctgtgactgctgtaacttaaagtttttgaaactgaattgcttcaaataaattgaagatttgttataatgatta

SEQ ID NO: 115771 - DNA, 110 bp, Homo sapiens
ttgctgctccacacctgacttgcgtctcttttgaagctatgggatttaggctggcaccgtgagctgtgcaccacccgccaggctgagtgggcagaatgagcccagcaggc

SEQ ID NO: 115772 - DNA, 508 bp, Homo sapiens
tacatgtgtctaggtagagaaagggggaagtagccattcactgccatccacattcaagggatttgtacttccaatgtgcacaaatatagtctctgtgggtgcagcattcctgattcccagaagaaatcacttccaccaagaggaacaatgtggattgcactaaacttaaagttattactgctcagtttatgttctttgtgctagtgaagtaactagctcagaaagaagttgctctattagcaggagcaattaactgtaatcatgaagaaacagggctgctgctacataattgagacagagcagaagatatcttgcactctggtgatctaccaggatgtcttttgttactagcattgtggatttaactctacagccaatcatagccattaataagggcaaaataaacagggagtcagatcctgcagcaatgagagtttgagaaaaccctcccttcacatacacacacacacaaccctcccttcacacacacacagacacacacacatac

SEQ ID NO: 115773 - DNA, 127 bp, Homo sapiens
ctattaccctgcaacattcacccaaccaatctattgctggcaaatactaagtttccatgtgcccagcttcataccaagctacaggagataaggatgacacagttccctttccctgtccttcacaagg

SEQ ID NO: 115774 - DNA, 619 bp, Homo sapiens
gttaatgctgaaatgagttaagattttcgggaactgttgggaaggcatgattggttttgaaatgtgaggacatgagatttgggaggggccagtggtggaatgatatggtttggctgtgttcccacccaaatttcatcttgaattgtaactcccacaattcccacatgtcatgggaggaaccaggtgaaaggtgattgaattactggggtgggtctttcctgtgctattcttgtgatagcaaatgagtctcacaagatctgatggttttaaaaatgggagtttccctgcacaaactctcttttctcttgtctgctgccatgcgagatgtgcctttcaccttctgccatgattgtgaggccttcccagccacgtggaactgtaagtccaataaacttcttttgtaaataagaaaaacaaaaaaaaaaagaaaaatctgcggaagggcttttatgtcggggggcggagaagaaaagagggcattggacaggggcacaggggtcaatagcaggtctccgatggaccacagtttccttggtacaaaggggcgaaattctcgccgagtctccctattgggaggtcgaataaatacccagaaagccgtgttacccggcatcatggg

SEQ ID NO: 115775 - DNA, 671 bp, Homo sapiens
cggatcagccaaagtcattgatttgtaaaaatgaaaagaaaacagaaaaaagaaaaatgaagtctcactgtctcagtttagcgaatcccgttgtgtccactcctgtcctccagaggcgagcctcaggaaatcacataacttttcactgaggggatccagggggtctccatatagggggagatggaggtttctaggaagagcagcaggtgctggtatttacaatgttgagcacaaacatttgcagcatgtttaaaattgtctagtagagttcaagttgtggatttgcttttccttttattcttataaccttcagtaactcctcctctgggagtcagcactcccatgcccagagttcacccatctggtcatcaaacactcaaagaaggggcttttctggccttttgtcttgatccttatatttccaaataggccccctcccttgcttgcatccacgttggtcaacttgaccaaaacctcactcttcactcaaacaggctctgagaatggacttagtggccaattctaggtacatgagcacttcctgtatcccagttttgggaataaactggctgtatttatagaatgtgctttttttttttcaatttctcactctctctcctatctctagcaagtctcaggcaagatctttgattttcctggatgccacctgg

SEQ ID NO: 115776 - DNA, 336 bp, Homo sapiens
acttcctgctcttctcctcaccccacaccttcatccatttttagaaagtaactcagttccagccgggcgcagtggctcacacctgtaatcccagcactttgagaggctgaggcaggcggatcatgaggtcaggagttcgagaccaacctggccaatatgatgaaaccccgtctctactaaaaatacaaaaattagccgggtgtgctggtgcctgcctgtagtcccagctactcggaaggctgaggcagcagaatcgcatgaacccaggaggtggaggttgcagtgagctgagatcgcaccgctgcactccagcctgggcaacagagtgagactccg

SEQ ID NO: 115777 - DNA, 673 bp, Homo sapiens
ggcagcgagtccaaaagaagctggtgataagctttctctctgctaacccctaatgttctgcatgaaatatgtggaggcagaagagagacagtttattatagagtctacgtggtatagagcgaaggaataagaacatttctgataagtattttcaaaatttgaagaatcattcctatataaatcattcatttaagagactaaaatacaagtaagatgtttcttgccacataaccctcagcttagccaggctctaaaaaggacaacactggacaccttgacagtggtaaaaagcagggtttactcactcttgaatactaagatctggtgctaaccttaggcagcaacttgtctatttggttgaggttcagctcaaatctcttgggttattttcagttgtgccagtcatttaatttattttctgaatcaaataataagaatggatatggttttgagtgtaaacagcattcccagatatatcttacaacttggtgtgccatctgcctaattttgaacctataggacgggaataactgcattgtgaaaaataccaggtgatttccttaaagccaaatactcttgtccctcctacttttcttttggctttcctgctgcatgggacgtggcaataaatggcagttttctgcacacagagataaaattcacttgttgagga

SEQ ID NO: 115778 - DNA, 503 bp, Homo sapiens
tggtctaatgtctacgggaggatgtgcatagctgatatgtaaatactaggccatgttatgtcagagacttgaggatccatggattttggcatccccggggaccctagaactaatccatggataccaagggatgactgtataaactcactcaggaaggcttctcattggaggaaggtcccagttcaggacacacagggacatctccctggactactgtccattcatccatccattcatccattgtctccccccacccccgcatctcggactgtcccagtgacagccctagcaagaagagacaagaaacaagttcacgttgtccagttttgaggtaatggaagaagttgcaccagtatgagaatagtgggtcagttttctacaggatgcagaaagcatatcgggcagcctcggggtgcggaaaggagcctggcctctctagcagccacacaggcctgcagtaggatggggctgtggctggccatgtggatcacttgggcctcatg

SEQ ID NO: 115779 - DNA, 199 bp, Homo sapiens
gccctgctaaactaccctagtttcgcttagggctccatctccctctgcatatcttcatttcctccttccctgtttggagcagtgccagaggtctagaagaaaaccaggaagccacaggtccgagagtataagcaggttttgcttcagacatcggctcagtcggggtagatgatgtcatatcaggggctctagggagact

SEQ ID NO: 115780 - DNA, 292 bp, Homo sapiens
taattttggttttttaaacttattgagacttgttttgttgcctaaaatatggcctttcctagaattgaaaagatatatattctgtatttgttggataaaatgttctgtaaatgtctgttaggcctgattgacctaaagtctagtttaaattcaatgttcctgtgttggttttctgtctagatgatctttctaatgctgaaaatatgatgttgaggtcacccacttattgtattgccctctatctctctatatagatctagtaatatttgccttatgaatatgggtgctccag

SEQ ID NO: 115781 - DNA, 356 bp, Homo sapiens
cacccaatcccccactcctccgaaaagctggtctccctgcatctctcccagtgtatcccctcaaaagcagacaatgtgaccttttaaaaaatacaaacttcggtcgggggcggtggctcacgcctgtaatcccagcactttgggaggccgaggcaggcggatcatctggggtcaggagttcaagagcagcctggccaacatggcgaaatcctgtgtctactaaaaaatataaaacttagctgggcatggtggcgtgcgcctgtagtcccagctactcaggaggctgaggcaggagaattgcttgaacccgggaggcagaggttgtagtgagctgagattatgccactgcactccag

SEQ ID NO: 115782 - DNA, 453 bp, Homo sapiens
taactgcagcagctgctaaaccaaaaatacatgcatcttatattttgtaatggagaatggaatattcagtgattacagtcatttcaattctacaagtttttttgtttgtttgttttttgtttttaaatcaatggctgagcaaaaactgaagaaacaagtaaccaatctctctagctttgttatatacatccagctaatgccatcaaagatggcactaggttatgttcacactgattacatggccttaccctacccttgtttagtttggctgtttagtaaataacttgttttaaattgtgatttagccgggagcagtggctcacgcctgtaatcccagcactttgggaggcctaagcggacagatcacaaggacaggagatcgagaccatcctggctaacacagtgaaaccccgtctctactaaaaatacaaaaaaacttaaccaggtatggtg

SEQ ID NO: 115783 - DNA, 787 bp, Homo sapiens
agtgaagtgctttttcaggagtaaagttcaagaagttaaaacctgtgaatagagatcagtgaacattttagaaaatagaaaacgaccactcctattcaacagagtactggaaggcctagccagagcaatcaggtaagagagaaataaaagacatccaaattggaaaagaggaagtaaaattatctctgttcactgatggcatgatcttatacctagaaaacccaaaagacttttggaaaggctcctagacttgataaacaacttcagtaaagttgtaggatacaaaaccagtgtacaaaattcagttgcatttctgtacaccagtaatgttcaagctgagaaccaaatcaggaactcaaccccatttacaacacacacacacacacacacacacacacacacacacacacacacacaaaacctaggtatacatttaaccacggaggcgaaagatgtcttcttaagaagaagttctacaaaacactaatgaaagaaattttaattgatacaaacaaatggattggaagcatcaatattgttagtatgaccaaactgtccaaagtaatctacagattcgacacaatttctatgaaaataccaaagttattcttcacagaattaaaaaaaaatccttaagtttatatgaaaacaaaaaagaccacgagcaaccaaaacaatcctaaccaaaaagagcaaagctagaggcatcatgttacttgaattcaaattatactacaaagctatagtaactaaaacatcatggtactggtacaaaaatagatgcata

SEQ ID NO: 115784 - DNA, 386 bp, Homo sapiens
  misc_feature (57)..(57): n is a, c, g, or t
aaaaatatgattaaacccaacatctctgtacaacgaagaatcttcctgctctgacanaagccagcttacttcaaatagacattagctaaatcagattaaatcttttgggcagcatcctgttataggaattgacctgtataaatacttgtaagttgtactctacataaaatttctataactgttatactcttcactaggatcaccaagttattgaaattttgatgtagatgaaaatacagtgagtattatacaggtctatcccgaggcttggaaaagaatcagaagtgcctacagaaatttggctttttctcctcactgtaacttaacatagccatgcagacagggtcatgtgcagccaccatggtaagtaactaaagatatgttcc

SEQ ID NO: 115785 - DNA, 278 bp, Homo sapiens
gcaaagtacacattctttgtttcaaagtattttgcagacagtctggtctattaagaacaaattctaggactaggtagtagggcttagaagttaccatgacccaaattgattttttcatttctcttaaagttgatggttcattttttgatgaaagtagcaatcatatctataaaaaccaattttgataggcctatcaaatctgcccataaaacagaaagctattttactttctacaaacatattattaaataagctcactgtgagtatacaagtactgt

SEQ ID NO: 115786 - DNA, 650 bp, Homo sapiens
cagggcaacatagcaagaccctgtctctacaaaaaataaaaaacaattagctgggcgcagtaggacttgcctgtagtcccagctactgggggctgaggtgcgaggatcacttgagtccaggagtttgaggctgcagtgagctatgattgctctgctttgctccagcctgggtggcagagcaagaccctgtctcttgaaaactcaagagctggtcctgctgtagaccacactaggattcttttcactgagactcctcttgtgggcttgaagaccaggactgtgtcagcaccagtgttgtttcccttggcccagtatatggagggatttatatttattaagtatgaaaactatgcgccaagtacttgctagaaactctatatatgttattttagttaaggctttttacaacttcaagattaaggaattagtctacatatttcagccaccgagtagtaacttgcccagggacaaagtaagggtaagtctgaaacttggcttcccatccaggtctgatgatggagctcatgccttttacactccactgtgatgtcctgtgctccttagagaagggaacatagtagcttggagaacatttcttgtcctatcttgcttaaggtgtcaggatctccttctgtatgcatggtccagat

SEQ ID NO: 115787 - DNA, 348 bp, Homo sapiens
ggaccagaatggggtgtccacaagtgcacaagtgctgagcacaaggagctgagtcctggaagcctgcagacttttaaccacctttccgcgtgtgtcctggagtgtgagcctcaggcagccacgtggacaaagcgttgtgtagaggatttacttatctttggccaggattttaaaggtatatgcaaaacctgtctaggatgaaactgtggagaacagaagggctgcttttccctgctaaataattttttttagaagaggaatgaagcattctgttgagtttcttactatgatctggataccaaagcctgggactctcatcctctccactctgcttggctacacggggtt

SEQ ID NO: 115788 - DNA, 652 bp, Homo sapiens
agctcagctcttgcctctaaccattgtttcctgtttaatctgtgaaaccccttgagtcgtctgcacacttaatgaccctgtttgttttctcttaactcccacaataggagttatcactccccaaagcacgctctctctgatgtcatcagtgagcccctgatttcaaatccattgacctcctttgagtctcttccccattgatgccattgttgagttccacaccacctgtcccttccttcctcctcctgggaacactctcctttcgtttccgtgccctcctttacttctccgctttgcccctgagattcttgggccccgttggattgggtgatttcctctgtcgcatatcttcagattccacctgcgtggcgttgacttccaagtcgacacttctcactttcacttgtcttctgggtctagtttcatatttcccgcttcctaggggtaactgtacctggattctctgcagacatcttatattagcatgtccaaaagtgaacgtccctttcctaaacacctttctacattccccatctcaccggaaggcttcgccatgcactcagccactgaagccagatgcatggccgttgtcctggaatcctctactctccacagacttactcccaggttatcatcttgttacactctcttg

SEQ ID NO: 115789 - DNA, 190 bp, Homo sapiens
tgcaacttgattctgtgatcgtatctagaggtatcccccctggttcgaagttaggttaggggtaaagctggggctggaattcagtcaggtgacatttccttggagaagtgatttaacctttctgagctttcctttctgcctatgtaaacagaggtattaataataatagtgccacctcctaaggctattg

SEQ ID NO: 115790 - DNA, 284 bp, Homo sapiens
aacacctctacgtcatcagggcgcgtcctcgtctttcccctcccatctcctcagatcggtggacgtgctcgcctccactcggggccaggtctatgtcccggtttcccgcagtcgcgggcagggcgccaaggcggcaggaggagggtgagcggtcaagagacctccaggaagagcggctctcggctgtttgcatcgccgatagaggtgcggtccgcgggacggtacggaagccagcgggagttacggcgtgggggttttggtggggggatgaaagtacgcctttg

SEQ ID NO: 115791 - DNA, 564 bp, Homo sapiens
tcctcgtctttcccctcccatctcctcagatcggtggacgtgctcgcctccactcggggccaggtctatgtcccggtttcccgcagtcgcgggcagggcgccaaggcggcaggaggagggtgagcggtcaagagacctccaggaagagcggctctcggctgtttgcatcgccgatagagaagagaaaggatgcacgtcccaggagggaggaactactccaacttttcctattcagaaacaaagaaaaaagattattcaagctgtgagggacaattcattccttattgttactggaaatacaggaagtggtaaaacaactcaactcccaaaatatctatatgaagcagggttttcacaacatggtatgattggtgtaactcaaccacgaaaagtagctgctatatcagttgctcagagagtagctgaagaaatgaaatgcactttgggatccaaagtaggataccaagttcgttttgatgattgcagttctaaggagacagcaatcaaatatatgactgatggatgtttactgaaacatattctgggagacccaaatcttaccaa

SEQ ID NO: 115792 - DNA, 238 bp, Homo sapiens
tcggctctaccttgtctccaggcagagctcctgtggactgccttggagacaagggcccttggcatcctggcagcaagtactcacaggaaacttagtatgtgctttatgtggatggcgggtgggagagttgctgatggcaaatggccttttacttttcagtgttttgttgccaacccccacccaaccattaaaaagtggctgttgtgaccagggagcacacacacagacaaagacggaa

SEQ ID NO: 115793 - DNA, 342 bp, Homo sapiens
gatgttgtggtaggaaaatagattttgccacaagctgctacttatagttatgtctatggattgagttgataagtggagatatgcatagccgactcttggcatttatgagggggtatcatcagagatcttaaaaattctagatctgtaaaagtgaaaatgttgatttaagtgcctggcttttttctggaatcatttctgttgagttatgtatttcctatgctttgtctcacaacacaagttaatccctttcaatttcgttaagtttcctcgataactatttttcagaaagaattatttttctcgcttgataagagtgctgcctatataacaacaagtacagag

SEQ ID NO: 115794 - DNA, 239 bp, Homo sapiens
gtcgacaaaaaaaaaaaaaaaaaaaaaaaaaatactaggaaaaatggttagctgggcatggtggtgaatgcccttagtcctaactgcttgggaggctgaagtgggaggattccttgagcccagcagttcaaggttgcagtgaactatgattgtgccactgccttctagcctgggtgacagagtgagaccatgtctctaagaaaagttggtgaggacgccaggggacagctaggaaaaaa

SEQ ID NO: 115795 - DNA, 239 bp, Homo sapiens
tttttgtttttgtattcttcctttctttaccacaaaggtatagaaactcaacaccaactattagaaatgttgtttgatgttccttttgtaactttgttttatggtattcagaacacattttgatgatatcttaaagcctttattgatattagtgggtttttaaaagtcagctttcacagaagtgagaccatgtctctaagaaaagttggtgaggacgccaggggacagctaggaaaaaa

SEQ ID NO: 115796 - DNA, 313 bp, Homo sapiens
taaatataggcgttaagcatcaatgactgccaagatcacaaaaagacagctacattttgtgtgtttcctgtagtcttgccaaagagatccaccgtcagcttgatccattctttggatgtagctgcgtatttgcaggaaatacagaatatagagggaaatgttgaaccgcaccatgagaatgcaatcagcaaaatccagactgggaaactccacaggtcacatggcctgggtctttcaacagaaaagaaaatgaaaaggatggagaggggactgtggattaaaggaaacctaaaagacatttcagcagtgagat

SEQ ID NO: 115797 - DNA, 419 bp, Homo sapiens
ggatttaaaaatttcaggaaaagaattgaatgattacgttttcactgaacatgtgcagacttttttttgcttgtcattattccctaagtcatatagtgtaacaactacttacatagcatttacactgcattaagtattttaagtaatctagagataattaaagtacattggaggatgtgcttaggctacatgcaaatacttcaccatcttatgtaaggacatctgaggattattagcatccaagattttggtatctgtggggagtcctggaatcaatttccagtcgatacttaaggaaaggcttcataccaagttaacatgaccaaaatatacatatttctgataataaggatattttactgcacatgtgtcttaaaaatttcaaagaccttaataaatttggaattttattaaagtgt

SEQ ID NO: 115798 - DNA, 669 bp, Homo sapiens
gcaaacctaacaagagaggccctggcagagcctcatgtgtgcctggtgggaggacctgtatgttgtgagctagagagtgcctgcctggccaaggaccccatctggcctaggcccaagtgcagccacaagttgggtacactgctacaaaagtggccaagcctgaggacagtagcagtgccacctgattccccaagatgtcacctgagaattaaaggcagagctggtagctgggtgagggggctcatgcgtgtaatcccagaacattgggaggccaaggtgggaggatcacttaagcccaggagttcaatcacctgaggtcagggttctccatgttgaccaagctgagttcgagaccagcctggccaacatggagaaaccctctgttaaaaaaaaaaaaaaaattaggccgggtgcagtggttcacgcctgtaatcccagcactttgggaggctgagaccacaggcgtgtgccaccatgccaggctaattttttgtatttttggtagagacaggacttcgtcatattacccatgctggtctcgaactccggagctcaagcgatctgcctacctcagtctcccaaagtgctgggattacaggcatgggccaatgcgcccagccctgaaccatatcttgatgatgcacctcaaaaaactagccccctctctaa

SEQ ID NO: 115799 - DNA, 355 bp, Homo sapiens
gtggagcccctgcctttggcccttgggggaggcactgtctgcttacccacggttgttgcctcataggaatcatacaacagcttcctaactggtctccttgccttcagttggattggggcacaaatccctccttgacatataaaccatggtttaaggctccctgtggcctaaataaagataaagcttaagtatcttaacaagcacctaacccttctccccagcctcggtgatttggctcatcgctgccttcatgtttcattctggcttcactcattcggaatttcttgtagttccttggctgttctcttttccttaccgcctttacaaatgctctcaccatgcatgcttttctctg

SEQ ID NO: 115800 - DNA, 393 bp, Homo sapiens
tggggctgtggagatgagggaatgggttcacaactcttcagagataggattgaagggacttgggggttgattagagcagagactgaggatgaacaattttaaagtgaaagtatgagccaggtgtggtggctcacgcctgtaatcccagcagtttgggaggctgaggcgggtggatcacctgaggtcaggagttcaagaccagcctggccaacatggtgaaaccccatctctactaaaaatacaaaaattagccaggcgtggtggcacgtgcttgtaatcccagctactctggaggctgaggcaggagaattgcttgaacccaggaggcagaggttacagtgagccgagatggcaccattgcactctagcctgggcaacaagagagaaacttca

SEQ ID NO: 115801 - DNA, 455 bp, Homo sapiens
aagagtgcacaagggtaatcatgttgcctgaaggaaaggccctgattgtcattcttatgagtgtccataaaggtcttatttaccattggcatcgttcacagcatacactttcatcataacgaaaatgaagccaaacgtattcgggagagaaaagtcaggtaccagattgctcatcaatttatccaatttcaagtttcatgggaaaacacatattattgtaactcacatttataccccaattgcaagggtacttcagtcataaagattcatcagtgatcaaaacatatcctagcactgttagaatactatactaatattatagaaaatttagtctgtatttagacctcaatgactataatgcattgagcaaaattccaatgtgtcatatttctcaacccttaaaaaaatcaatcctaggtaaaaagtaaggattttctcatgaggattccatcaca

SEQ ID NO: 115802 - DNA, 103 bp, Homo sapiens
gacatctccattttgtgctttttttgttgttgctttaaaagcaaatatattttccagaccacatcaaatatggaacataaaaattaagaacatatgcattcat

SEQ ID NO: 115803 - DNA, 329 bp, Homo sapiens
aatgatgtttttttgaagatgtatctatggttttggttgggtaggacactttagctttgattctgagtatacgcagtagtttggtcgttgtatgatttctttggctctagacagcatcagtagtgtctgtgacttcctcagtggcacaggctatggttgtcagtgtagtccgtagtgcagttttgttggcataaggactccaggtgaacttgtccttgagtccaagtggtggtggcagcatgctaagcatgcctgtccttgggcctctcggtggcgtacacaagcaccaatgttactgggtccaagtaagccaattcgtgggcctccag

SEQ ID NO: 115804 - DNA, 872 bp, Homo sapiens
cgaaaggaaagaaggccaagggaaagaaggtggctccggccctgctgtcgtgaagaagcaggaggttaagaaagtggtgaatcccctgtttgagaaacggcctaagaattttgacattggacaggacattcagcccaaaagagacctaaccagctttgtgaaatggcccccactatatcaggttgcagcggcagagagccatcctctgtaagtggctgaaagtgcctcctgagattaaccagttcacccaggccctggaccaccaaacagctgctctgctacttcagctggcccacaagtacagatcagagactaagcaagagaagaaacagaggctgttggccctggccaaaaagaaagctgctggcaaagggggcatccccactaagagaccacctgtccttcgagcaggagttaacaccatcaccaccttgctagagaataagaaagctcagccggtggtgattgcacacgacgtggatcccatcgagctggttgtcttcttgcctgccctgtgtcataaaatgcgggtcccttactgcattatcaagggggaggcaagactgggacgtctagtccacaggaagacctgcaccactgtcgccttcatacaggttaactcagaagacaaaggcgctttggctaagctagtgggagctatcaggactgactacaatgacagatacaatgagatccgccgtcactggggaggcaatgtcctgggtcccaagtctgtggcttgcattggcaagctcgaaaaggcaaaggctcaagaacttgcaactaagctgggttaaatgtacactgttgagttttctgtacataaaaataattaaaatagaacaaattttccttgaaaaattaaatcaggg

SEQ ID NO: 115805 - DNA, 605 bp, Homo sapiens
gccgggactacagccacgtgccactacgcctggctagttttatttatattttcagtagagatggggtttcaccatgttggccaggctggtctcgaactgctgacttcaggtgatctacccacctcagcctcccaaagtgctgggattacaggtgtgagccactgggcccaccaccctgtcacatatttttatcatatccatctcagacaattgaagtttttcttttcctcaaaaatccaagatgagaggttacaataaatacagtggagcatatttatttgtattctaaactggtcaaatagtcatgtagatggaatcttagaggaaaaattatgaaagattttaaaattaaaaatgcttactcatctagcatactctactgagttttcttagctttttattgtctttgagcttaatataatttattatgtaaattatattgagctgaaaatcatgcaagtgcttttgcccaaagaaatgcaaattaattgtctcaaatagacacgtatttgattatgctaattgtggatattgacttgtttccatctctttgtaaattcattgcaggtttttctgatcgcctatatttatgtatgtttttaaat

SEQ ID NO: 115806 - DNA, 306 bp, Homo sapiens
tgaacagcaacagctgggaggacacagttgcaggcgtaacattcggtcccggagaaggcagcaacagattcaagcccaagagaagtgaggcatgggatgctttaattcaaagacctcctcagctgtaaggtgaacaaatgagggtacagaagagagagttgttagaatctacattggtactttcaaaaatgtttcctttcttccttcctagatgctttctgcattagcactgtgctccatttcttcagtcctatgcccttcccaaaattggcactgcaaggtaagtttaaaagagctgtaatttag

SEQ ID NO: 115807 - DNA, 246 bp, Homo sapiens
tgaacagcaacagctgggaggacacagttgcaggcgtaacattcggtcccggagaaggcagcaacaggtggggtgaaaggaagagaaatggatgtggtaagcttgagggtggggttgtctgagacggatcttggcaggaatcaaattctctacttcagagggaatctctctgggcatgacagcccatgtgcctgaatgtctgtcctttttctgaacaaatacatcttgaaaaaagagtgaggatta

SEQ ID NO: 115808 - DNA, 490 bp, Homo sapiens
acacgcttacacggccatttgtctcttttcccaatgcggcggtgcactttcgctcttgggggctgcaccccagacatagctggcaccagagcagggtgctcaggtggtgggtgctcagggccctgccccaggccactgggccgttttgatgacctcgaaggtcacaggcagaaaataggagcaggatttcccctggggaaaagttctcctgggacatcttctgctcttctgtacatttctagatgcaaataactccttcaccaggcagtgagtggcgtaggctctggagccaggctgcctgggctccaatgccagctctgccacttgctagctgtgagactgtggacaaaccactcagcctctgtgtgcctcagttttcctatttgtaaaatagaggccatagtggtacctattttgaagactaagtaaaagaattcaaataaagagacttggcacagagtaagtgctcagtaaatggttaaaaaaaaaa

SEQ ID NO: 115809 - DNA, 1253 bp, Homo sapiens
tcctggcctggaatcctcagcctctctggccgccagtagcctgaggctacggctcctgctagagagggtggcaggcctgctgctggaccccagaggccactgtgaccgccaaggggccttttccacttccacggcctctccaggcactgaggggaaggcattgctctacctctccctgacattttgctccggggcagatccaaccttacctggggcagcaaactttgtcctggtacctgggcccagctcgccagggatgtgggcagagcaccagcctgggcatcaggaagccaagtttcaaggactgtctttgagtctgtctgtatgaccttgggcctgccacttctcacagaccctaggtatccacagctgtgacatgggggcaagcggctttgtttcagcctaacccaggagcttagtaaaaattgcataagaccagggggaagagtgtcagcgtggggtgggaattcccgcggcctccacctgcttgctaggggcaggatctcattcaggctgccctggaagcacctgcttggccctgccaccttcctccaggggagggccagatggcatcctggcttggggcgggtgggacctacccaggctctgagactttactggcctatgcctgaggcctcttttcctttaactccctaaattatgatgactccaagtccaagcccacccttcccaaagattgggaggttccgccgttcccagaggctcctcctgcggtgctcccaagacttccatagaccatctggaccagtagcccatcccgcagttttcttgggggcagaggaaaacgcttctttctcctccagctgaatcagctggatcccagtgtcctggctgtttggtgattgggcaagattgaatttgcccaggtaggcgtgagagtgtgggttttgatgacctcgaaggtcacaggcagaaaataggagcaggatttcccctggggaaaagttctcctgggacatcttctgctcttctgtacatttctagatgcaaataactccttcaccaggcagtgagtggcgtaggctctggagccaggctgcctgggctccaatgccagctctgccacttgctagctgtgagactgtggacaaaccactcagcctctgtgtgcctcagttttcctatttgtaaaatagaggccatagtggtacctattttgaagactaagtaaaagaattcaaataaagagacttggcacagagtaagtgctcagtaaatggttaaaaaaaaaa

SEQ ID NO: 115810 - DNA, 1127 bp, Homo sapiens
tcctggcctggaatcctcagcctctctggccgccagtagcctgaggctacggctcctgctagagagggtggcaggcctgctgctggaccccagaggccactgtgaccgccaaggggccttttccacttccacggcctctccaggcactgaggggaaggcattgctctacctctccctgacattttgctccggggcagatccaaccttacctggggcagcaaactttgtcctggtacctgggcccagctcgccagggatgtgggcagagcaccagcctgggcatcaggaagccaagtttcaaggactgtctttgagtctgtctgtatgaccttgggcctgccacttctcacagaccctaggtatccacagctgtgacatgggggcaagcggctttgtttcagcctaacccaggagcttagtaaaaattgcataagaccagggggaagagtgtcagcgtggggtgggaattcccgcggcctccacctgcttgctaggggcaggatctcattcaggctgccctggaagcacctgcttggccctgccaccttcctccaggggagggccagatggcatcctggcttggggcgggtgggacctacccaggctctgagactttactggcctatgcctgaggcctcttttcctttaactccctaaattatgatgactccaagtccaagcccacccttcccaaagattgggaggttccgccgttcccagaggctcctcctgcggtgctcccaagacttccatagaccatctggaccagtagcccatcccgcagttttcttgggggcagaggaaaacgcttctttctcctccagctgaatcagctggatcccagtgtcctggctgtttggtgattgggcaagattgaatttgcccaggtaggcgtgagagtgtgggttttaaattcgaagctcaggccatagtttcagagaatcacccttaccccagaccttcatgagacagtgctcatgaagccagtgcgtttcccagaacgaacactaggcggcaccgttggtccacactcagaggcccttggcgccaagactgcatctagaatcgctcaaacacctgtttgcagaccccatgcaccagctggaggggccgtaactgcaggactg

SEQ ID NO: 115811 - DNA, 897 bp, Homo sapiens
cctgacttcaaattatactacaagggtatagttactaaaacagcatggtactggtataaaagtagtcaatgggacagtccaatggaacagaatagagaaatcagaaatgaagccaaatacatacaaccaactaatcttcagcaaaaaaaaaaaaaaaaaaaaaaaaaaaatttttgggggggcttgggccttggaaaagtttttaaaaccattcgcgtgttggggcggcggcgggcgacaaattaggtataagggagaacttgtgggcaaaaagggtggtccataagaagaaactccggggcaatgagaaatagggggtgggagtttgtttcacaatattagagaaaaagggccgggggagggacaaaccgagaggtgtgttgagacaacaaattgcacagaaaggaggatatcccgcggagaggggcacaaaaaagggggggaactacctaaataccaagaggaggggagctcccacagagagcgaagcctcgcgataacatcgcacatattgaacggcaccacgcacgtagccgggcgaacacaacagcacaaaagaacagagacaagcaggaagagacgaataagaggagaaagatcaggagaaaacgactgaaagaaagaaccgcacgaaaggagcgcaggcacacaaaagacagaagaacgaagaagagggaaaaaacaaccaaaacggaacgcacgcagaagaccacgacagggaaagagaaacggaccgcgacacagaagcaggacaaaggggaagacacccgaagaacaggacagatcaacaaagcaatcgaagggcgacagacgaagaagacgacgagcacacaaagcgacacaagcgccgcacacacaaccacacacggcacagagaaaggatgcgcagcaacgaaa

SEQ ID NO: 115812 - DNA, 420 bp, Homo sapiens
cccagaagtaaaggctaaaaatataaatctaaaaggaaacaatattttcatgaccttggggtaggcaaagatttattaaagaggacacaaaaaacaacaaacagaagaaaaacctgaaaattgcatcaatataagtgtctgctcctcaaaagacacctttaagaaaatgaaatggtaagccacagactggaagaagatatttcgaatacatatatttaacaattttgtatcctgaataaataactcctgtaaatccataaaccaaaaaactccaaagtcaggcaaaagattggagcagatgcttcacaaaagatatatgaatgacccagtaagcacatgcaaatgtgcccaccattaattatatgggaaattaaaattaaaaccacaataatataccatttcacaccgaccaagatggaa

SEQ ID NO: 115813 - DNA, 230 bp, Homo sapiens
gtccaaatttgatctggactggattcccagggcttagcccagcaccttgccacagtctgagctcaggatacgttcaccgaaagcaggagttaatgagagaatgaatgacaacacctattcatgccttgtgtggactcattcctggggacttggatgaggcaggtatttgtctgcaagtggccctgaggctcccacaggtacttctgaacgcagaggatgcagctcatggg

SEQ ID NO: 115814 - DNA, 364 bp, Homo sapiens
ctggaaggaagggacaggagagaaaagggaaaatgacgaagagccggcacaacctaaaacaccacagtccctgcggccttctaactaaggggccacagccacacaccactccacagaccctgaggatatgactgtgaggacaaagtcatgaacatgcatcagatgttctagttccaatgctaatttttgctgttttagtgtttgtagtgtaactacaagccatttagcctccctcaacctcagcttcttcaatcataaaatgaagatagtcaagttgcctttccagatctccacgttgaatatgaaagcagtctaagaactaaagtgtgataacatgtacaggtgaagaatgttatttaattaa

SEQ ID NO: 115815 - DNA, 248 bp, Homo sapiens
gtgaattcagaagggttacatattttggggatgaagttagggaaatttgaatataggatggttattagatgatattaagaattattagttaattttgttaggtgtggtaatggtattgtagctgagtgccctcatatttaagagattcatattgtagtatttatgggtgaaatgtcaggatgtctgcaattcacttcaaaataattcagcaaaaatgatgaagcaaatatggcaataagctaataatt

SEQ ID NO: 115816 - DNA, 593 bp, Homo sapiens
caatttgatactccccacagcatccctctaacactggtattatcaccatcgtattgttgaaggaaataaccttagaagacagtgccaaagccaaaatgagatatctagaatttacaacgttcagattcaatactcagtccacacgcacagtggcatgagcataaatttcaaccctagtattaatgtttatcaaacatttaattcactaaaaaattttcaattttcacaaggaatctacaacccaataagacccacccaaacatgtctcaaatgacatgtcaaagtgaattcactgacttactccccaaatggctccttttcccaacatccctacatctgcttatggtaatgctcttttctggataacctaaactcaaaaccttgataatctctttgcatctaattagctgctaaactttaagggctctgatcatggcactgtccataacaaaaaaaaattaaaaaaaaaaaattcagtgacttcctactgcctagcaaataaaatccaaactcttacaccaacacaaaggattcagagctctccacaatagagccccaaagtgccttaatacacagcctaaataacaactaag

SEQ ID NO: 115817 - DNA, 798 bp, Homo sapiens
actctgtgtgatgtaaagtatgttccctaatgtctgtgtgctccgttgtctccctcccatctgtaaagtgttagtagcctgtctcattttgagggtgtagtacagatgacatgatgagtaatccctgtgcctgttctacgactgctaagtgaatactagtaatttgcattctgagtttttttagtctgttttacccagcaagcctctgtttgccttcccaatttttactgcccagctttaaaaattacctagtcttcatttgcaggtctttttagaaatagtttacatgtagataccctccagtagtattaaatttaaaaacaaatggttttgaatcctctaactccagagcagtttcctactgattgtcaactctctaactttactacaaaggaaatattgaaaacaaatatgagaagtgtttttctctatttttgtctcattttttgagagtagttaaggatattatgctatagttgtgttcagggtccaagttttacaagattggccctgttcacagatttagctgacacttcccccatgtagcctcctagaaccttctacttaaacgtgtaccacttactactgtgttttgggtccttaaactgtttggggctttttctaaaagtgtaattaaaaccacccaagagtgagactttctgccaagtaaaggttaaatgaggttggtcacagtttgaatattcataggaaggaaagatctccacacatcatagtttaatttctatatttagagaaataatttttgaacccctggatgttttccccaggacacaattt

SEQ ID NO: 115818 - DNA, 324 bp, Homo sapiens
ctcagcctaattcagactcgcctcttctccttagagaaaggaagaggagcctcttccttatgctctgctcaatgtgtagggtttttcttcctatttgttgcaattctgaacattattagtggatagtcctggttttgagacttacccctgccttagaccccctgttcctagctcttatttcctgggacccagtttcatttttctctttctggatctcaactctcatccctgacagggcatgatcattatgttatatgatctctcttggttatatacaaagaatgtaccagtttgtggagtattcatagactttttttggttttg

SEQ ID NO: 115819 - DNA, 759 bp, Homo sapiens
atttgctgaatctagattctcatttgtcaatctaccagtcagaatcttgtcagtagatgcaaacacatcaggaatttgaaatgagagaattcgaaacaaatgttcctagctaactagtaaaaaatgtaaaagatatctctaaagtgtcccaaagtggcaaattcaaaacagcagctgctacctcaagggtgaggggaagtgaaaaatgaaggaagctaaggtattaggagaattctgcctctctaccccagcattgtcaaagaacgcatgcgtaccaaaagtacaagcagcctgctgggtgtggagaaattcgtcacatggcattgagtggagctggtgagtagaagtgtcctacccttggtagcgagcacaatactgcaggagctggcctgtagaatagagtggggaagtagtaatggtgaagttggagctcccatggaagaatccgccaggtagggagagcaaggtctgaaaatgcatctgacattagtccaggggagcctctgaaatgagtgctgcaagggttctgcatactcatccgctgcctctcacatagatgggaatgaaggcgtccgcaaaccagaagagactgcctatagtcccatagccttgcacattccctccagcaaccactgttggcaaagcctaaatttgcacaaaggagaaatgttacctgtcccagctccaacatcaggaagcagtgcaaagggggtactgaaagacactgcatttgtaactaaagtagggttttgtaggatg

SEQ ID NO: 115820 - DNA, 467 bp, Homo sapiens
agttaagtcacgggagggcgtagcaccgaagtggtagagagctgcggctccggaacgcccggcaggcccagagacgcagcagatggtgcctgaagagagagggcgttgctgcaagcgccctggctggagagcatgcctgcccggcaccgtgctgccctgaggagccgcggacagccccggagctcccttccggagttctttctgctgcctccaccgccaccgtctctctctagccccagctgaaatgaaggccataccgcggccacagaacttggttcagtttcaaaggctaatgtagtccctgggttttctgctcaatgtgaattacgctgcctgtgccttagaggaagccgcggagctcttcgttgctgcaattgcctcaggtggaataagccttcctaaggaggaccagataagaatctttggaaatggctttttttttttttttttttttttttttaaagaag

SEQ ID NO: 115821 - DNA, 562 bp, Homo sapiens
aaagataatgcttttattttaaagaaaaagtgccaagaagaaactgggagaatttccccacagcagcttattttgaaaatattcacccgggcatggtggctcacgcctgtaatcccagcactttgggaggctgaggcgggcggatcacgaggtcaagagatcgagaccgtcctggccaacatggtgaaaccccatctctactaaaaatacaaaaattagctgggcctggtggtgcgtgcctgtagtcccagctactcgggaggctgaggcaggagaatcgcttgaacccaggaggcggaggttacagtgagttgagatcgcgccgctgcactccagcctggtgacagcgagactgtgtctccaaaaaaaaaaaaaaaaaattcaaaacgataggaaagttgaaagaatactaaagtcatttaatatccacatacccttcatctagattgtatctgttgttaacattttgccacatttgatttatttatgaggctatattttatttttgtgctgaataatttgaaagtttgctttattcctcatttataaactctcttgcatg

SEQ ID NO: 115822 - DNA, 288 bp, Homo sapiens
ggtcacagaccctgtacatcttatcatcccacgaaacaagatggggggaaatgttggacttaggtacacttcatagtttttatatatgctttatgtaagtttttcatagtccccataccatccttatcaggtacacattattgtccccattactcaaatgagaacttaaggttaagtgactcttccaagttcacaagccaagaaaagagcaaaaatttgtacctaaattctcctaatctgggaaccattccaccacactgtactacctcttagattcatgtgtatcat

SEQ ID NO: 115823 - DNA, 498 bp, Homo sapiens
ccctctgacaccctgtacatggccccattagctaattgcagatgagccccaggcacacacagggtagggaccaccacctccagttctttcctatgaaagaatatgagcagaccccgtctgagtttagaaacgggatatgagtgggtcatctgtaattcctgtctgtcgtacaacggaaattggtgatacacctggcagctggtgttttccctctctgaatctggggcattgtttggtcatcgagctcacaatgacttctggtttagaggagaaccttttggaggagaatatacaaggacctctcagtgatttccagtggtctctccttgaccctcagaatggctagtcgtcttgtccagctgggagcctgggctaatcttgctggaaggcagagaggggttattaaaagtcagaaagtggccgggcacagtggcttgtgcctgtaatcccagcactttgggaggatggggcaggtgaattgcttgaggtttagagttc

SEQ ID NO: 115824 - DNA, 554 bp, Homo sapiens
ctggcagaacagagtcatatttctcttctttcagaaagcgaataggagaaatatcgctgaattcttttctcagcaaggaataaccccgggaaaacgaatgcattctcaggggtaggtctctaaaatggccactctgggagtgtctgtcttatgcagttgtagacacgggatgaaatatgccctggcctcctgcagcacccccaggcttgctaggattaggaaattccagcctggcgaattctagtcagactggttgtctgatcacgaaccctgtttcctgttaagatgtttatcaatgacaatgtgtgcccagcacgacatggaccttcatcagtaattctagtttcaccctggccttgtgatctcactctgcctctttgctgttgtgatattttactgcctttgaagcatgtgacccactccctattcgtacacccctccccttttgaaacccctaataaaaacttgctggttttgtggctcaaggggcatcaaggaacctgccaacatgtgatgtcacccccagagacccagctgtaaaatttcaaaaaaaa

SEQ ID NO: 115825 - DNA, 417 bp, Homo sapiens
tgtgagcactgtgtaggggtttgctgtccttaccagtactctccttattctcagtcatctccagccatgcaacttccctcacctcctgactgatgatggtcagtcggcccatgcctgccttcacaatgtacaaccctgaagacccagaagttggttttgtccattcccatggctaggatgccaagtgttattaggggaaaatgaacccttcttggtgtgttggacagactcactatgatacctgttctttggaacagtcaccagtacacagagatgggctgccagtgagcccttgtgctctggctgtagctgattgtctaggagtgaacatgtagcctaggctgggcccatcattccatctcccaggaaactgaatctggaatggaggccttgactcgatcctgatcaatggcagaa

SEQ ID NO: 115826 - DNA, 654 bp, Homo sapiens
attgcatataaaaagttacttttttggaaacataaaagtacgttttaaaacttgaacatgacatcattagcactaattctggtttaaatgaaagtcctgcagaaatgccaaagaaggcagggcagagcggcacggattctaggtaattaaaagtgaaagaggcagaagaatagtggacagaactgcaggatagtccttaaaataatggtggtgggaaaggaaaacacagaatgctcctggcaattctaaattcctaggtttgcctttctagaattccttaagaagctgacagagaaatcagagggttacaagaatttcagaaaatttactccaagtgagaggacatactcacaactcctatgaagggtttctaaggtctttgtcctgtgcaatttgacaatgtgccatttctgtgctgtctctgccctctccctatccgtttgttatgggatggggggttaccctgggaatgatttcagctgcttcttacacagatgcctctcaaggtgttcttttgtgtcctctattttcttcttgtgaactgttaaagctacatgcattattttttttccatttactgaaataaagttttcaagttctaaataaaaatattctgactcgatgaaataaataaaggctacaaaagaaggaaga

SEQ ID NO: 115827 - DNA, 833 bp, Homo sapiens
agcggaagactgcatccggctccaggaaaagcgagtgggatatcccaatctttggactgcatcctggttgcctctactgtggtcacctttgggaagaaatgtcttctgtaaaaagaagtctgaagcaagaaatagttactcagtttcactgttcagctgctgaaggagatattgccaagttaacaggaatactcagtcattctccatctcttctcaatgaaacttctgaaaatggctggactgctttaatgtatgcggcaaggaatgggcacccagagatagtccaatttctgcttgagaaagggtaaacattttaggctgtaccacctgaaagggtttgtggtttaatttctttgttacatatttactttaaaattttgcttgtttccatatttatattgttgaactactaaataactcattggctaatttatgtaaaaatgtagcacaatttttctaacttaaaactttgtaacctttttcattgagaaattatttctttatagcaaagcaaatttatgaggagtctaattataaattttcctcccaaatagaaaatgcagatctcactatgactaccaaggacttcttgtagaattttggtatctctttatagtgcataaagcttaatactgttttattttgtgagtaattatccagaaagtgtaagtatccactgtctcttaactttttgtcatttatgattgttcttttaaccttcccaatagtaaactatgtaacaaaagaaaaaaaatctatgtaatcattaaaaagaaggactttaatatgtatctggaaatattttagtgaaataaatacggagaaagtgttta

SEQ ID NO: 115828 - DNA, 803 bp, Homo sapiens
tctctctctctctctctctctctctcctgcatcctggttgcctctactgtggtcacctttgggaagaaatgtcttctgtaaaaagaagtctgaagcaagaaatagttactcagtttcactgttcagctgctgaaggagatattgccaagttaacaggaatactcagtcattctccatctcttctcaatgaaacttctgaaaatggctggactgctttaatgtatgcggcaaggaatgggcacccagagatagtccaatttctgcttgagaaagggtaaacattttaggctgtaccacctgaaagggtttgtggtttaatttctttgttacatatttactttaaaattttgcttgtttccatatttatattgttgaactactaaataactcattggctaatttatgtaaaaatgtagcacaatttttctaacttaaaactttgtaacctttttcattgagaaattatttctttatagcaaagcaaatttatgaggagtctaattataaattttcctcccaaatagaaaatgcagatctcactatgactaccaaggacttcttgtagaattttggtatctctttatagtgcataaagcttaatactgttttattttgtgagtaattatccagaaagtgtaagtatccactgtctcttaactttttgtcatttatgattgttcttttaaccttcccaatagtaaactatgtaacaaaagaaaaaaaatctatgtaatcattaaaaagaaggactttaatatgtatctggaaatattttagtgaaataaatacggagaaagtgttta

SEQ ID NO: 115829 - DNA, 826 bp, Homo sapiens
ggggctcccgcgacagggcggaggtgcggcggtactgaggtcgtagagtttcctgcccaagctgagatggggaaaaggaagcgctacttagggtgtgatttcacctcgaaagaaggaatctcacagtagtggcaagaaagaagaaatgtcttctgtaaaaagaagtctgaagcaagaaatagttactcagtttcactgttcagctgctgaaggagatattgccaagttaacaggaatactcagtcattctccatctcttctcaatgaaacttctgtccaatttctgcttgagaaagggtaaacattttaggctgtaccacctgaaagggtttgtggtttaatttctttgttacatatttactttaaaattttgcttgtttccatatttatattgttgaactactaaataactcattggctaatttatgtaaaaatgtagcacaatttttctaacttaaaactttgtaacctttttcattgagaaattatttctttatagcaaagcaaatttatgaggagtctaattataaattttcctcccaaatagaaaatgcagatctcactatgactaccaaggacttcttgtagaattttggtatctctttatagtgcataaagcttaatactgttttattttgtgagtaattatccagaaagtgtaagtatccactgtctcttaactttttgtcatttatgattgttcttttaaccttcccaatagtaaactatgtaacaaaagaaaaaaaatctatgtaatcattaaaaagaaggactttaatatgtatctggaaatattttagtgaaataaatacggagaaagtgttta

SEQ ID NO: 115830 - DNA, 4180 bp, Homo sapiens
agcggaagactgcatccggctccaggaaaagcgagtgggatatcccaatctttggactgcatcctggttgcctctactgtggtcacctttgggaagaaatgtcttctgtaaaaagaagtctgaagcaagaaatagttactcagtttcactgttcagctgctgaaggagatattgccaagttaacaggaatactcagtcattctccatctcttctcaatgaaacttctgaaaatggctggactgctttaatgtatgcggcaaggaatgggcacccagagatagtccaatttctgcttgagaaagggtgtgacagatcaattgtcaataaatcaaggcagactgcactggacattgctgtattttggggttataagcatatagctaatttactagctactgctaaaggtgggaagaagccttggttcctaacgaatgaagtggaagaatgtgaaaattattttagcaaaacactactggaccggaaaagtgaaaagagaaataattctgactggctgctagctaaagaaagccatccagccacagtttttattcttttctcagatttaaatcccttggttactctaggtggcaataaagaaagtttccaacagccagaagttaggctttgtcagctgaactacacagatataaaggattatttggcccagcctgagaagatcaccttgatttttcttggagtagaacttgaaataaaagacaaactacttaattatgctggtgaagtcccgagagaggaggaagatggattggttgcctggtttgctctaggtatagatcctattgctgctgaagaattcaagcaaagacatgaaaattgttactttcttcatcctcctatgccagcccttctgcaattgaaagaaaaagaagctggggttgtagctcaagcaagatctgttcttgcctggcacagtcgatacaagttttgcccaacctgtggaaatgcaactaaaattgaagaaggtggctataagagactatgtttaaaagaagactgtcctagtctcaatggcgtccataatacctcatacccaagagttgatccagtagtaatcatgcaagttattcatccagatgggaccaaatgccttttaggcaggcagaaaagatttcccccaggcatgtttacttgccttgctggatttattgagcctggagagacaatagaagatgctgttaggagagaagtagaagaggaaagtggagtcaaagttggccatgttcagtatgttgcttgtcaaccatggccaatgccttcctccttaatgattggttgcttagctctagcagtgtctacagaaattaaagttgacaagaatgaaatagaggatgcccgctggttcactagagaacaggtcctggatgttctgaccaaagggaagcagcaggcattctttgtgccaccaagccgagctattgcacatcaattaatcaaacactggattagaataaatcctaatctctaaatctaagaactaagctttgagtattatttaataatttctaataacactcattcctcaagtgatattagagattattcagtactcttgagagtgtcacaacacaaaatacgatgttgggttttcgaaatattttcaaagtgttctgtcttaatcacaaattcatatttttacacatttttacaatattgcctcagattatgttaaatttgggtcagtcttctctgaactttttctctcttggtttcttttcttccttcacagttttatctcacaaaaccatttttctaataagagacatcatgttggaaagatgttgtagaaatgtgcataaatttcagtgcctcttgtaagcattaaactgatgatgaagaaagttcctgatttgagaaatgaatcaaagtaattttaatgaatttttagcttgtattagcttgagttagctggcattgattttttagtccttttgttacctttaagttgtcaatatatggtttttgttcatctccccattgtagtcccacttgctctttcctgggggttccattgttctagcagtggaggtgttacagtgtcgccactcgtctaatttgaccagtgttaagaattttctaatttaataatttaatagtgatctcaataccacaccctcatggaaggagaaaagcatactattatatctgggacctctcttttagacctaaaattaattaacatatctacttatatgttacttatacctaaagctgttattaagacaaaccaagattctctgcttttgcactgaaattaaacttgaaaggaattctcctcaaaggtcggatattaaataagtcccaggcagatttacatatttaatttaaaacattggctttatttcattttgtgatgagtgatgtatctgtgttaacaaaaaattgtataatcattaccaatactatttattatgctcaaatatatcttggctttgaccttatttcaacacattctaagaagccttgacaaagtaagtatattttagagctgaatcagtaagattctagagaaagcaaaacatagtagttcacaattttgcaacatagaaagtcacattttgaaaggctattttgaaattgatttaatagctattatagtttatgaatatcaaaatttgtataatttgcatctttactaatgtatgctagagctacaagagaccttaaggataatatatgaaattagctttccttattttatagataaggaaaaagaaattgtgaaaggtgaatttacctaattagtgaaagttacataactaattacaacagtctgtactatataatgcagaggacgattctccctgtaaaaggaactagaagctattactaaaaatatatatagacaaaattaaaagaaggaatgataagaataaatttaatttaccaaatattgttaattaaaattttagatacttaacatttatttaacttaaataaaagataactgtcagataaaactttattttactaatgagcagtgattttcttaggaattgatgaaggcttattggtatcaagaatttaaaccaaattaaaactgacagaggacatttagatacataataaaattcgagctacataagtatatggaaaataatgtaccttgattattatgaaatagagcatcttgaaattcagttttactctaaatgtacttttaatacttgcagattctaagattacattgtaaaattccaggttttcataatgttaaaataggaaagtagaatataaagtatcaacaagtgtagttatacattttgttttggatatttaatccttacttgggaaaaaatcagcatctaggtaaattattattttaataagaactcttaaattgccaacctctgagaggtgaaaagctatgtaaatagaaggaatggccagttcaaaagaatagtagatgtgatagtgccgtgaatgtattctactggaaatgaatgtaataatacattaaatttttaaaatctaaaaaaaaaaaaaaaaaaaaaaaaaaaaaaaaaaaaaaaaaaaaaaaaaaaaaaaaaaaaaaaaaaaagagaacagaacaagaaaaaaaagaaaaaaaagaaaaaaaagagaagaaagaagacgacgaacgcacaagacccgccaacgcccacggaaacgagacgaaagaaagaagaaaaaacgaaacaagaagagaaagaagaagaacaacaagagaaggagaacaaaaagagaacaaaaaaaagcacaaacaaaacgagaaaacgaaaaacacagacaaacgaagcccgccacacaaaagcaagaaaagaaaagagcaaagaacaaagaacaagacaagaaaacgagaagcagccaaaaaacaaagaaaacaaacacaaaaaagaaaagaaaaatagaaaaaaaaaaaagaaaaaaagagaaagaggaagagagaaaaaaggagcacaaagaagaaaaggagggaagagacagcaacagaaagaaaaagcagagaagaagaagaggaaaggaaaagaaagaaaaaacgaagaacgaagcacgcaacaacgcaccaaagggacaaagcgacaaaaaggaaagagagaacgaaaaagaggaagacgcaaaaagagaaaagggaaaaaacaccgaacgagagccgacaagaagacaaccacagaggcaggcagagacagggagcagaga

SEQ ID NO: 115831 - DNA, 1349 bp, Homo sapiens
agcggaagactgcatccggctccaggaaaagcgagtgggatatcccaatctttggactgcatcctggttgcctctactgtggtcacctttgggaagaaatgtcttctgtaaaaagaagtctgaagcaagaaatagttactcagtttcactgttcagctgctgaaggagatattgccaagttaacaggaatactcagtcattctccatctcttctcaatgaaacttctgaaaatggctggactgctttaatgtatgcggcaaggaatgggcacccagagatagtccaatttctgcttgagaaagggtgtgacagatcaattgtcaataaatcaaggcagactgcactggacattgctgtattttggggttataagcatatagctaatttactagctactgctaaaggtgggaagaagccttggttcctaacgaatgaagtggaagaatgtgaaaattattttagcaaaacactactggaccggaaaagtgaaaagagaaataattctgactggctgctagctaaagaaagccatccagccacagtttttattcttttctcagatttaaatcccttggttactctaggtggcaataaagaaagtttccaacagccagaagttaggctttgtcagctgaactacacagatataaaggattatttggcccagcctgagaagatcaccttgatttttcttggagtagaacttgaaataaaagacaaactacttaattatgctggtgaagtcccgagagaggaggaagatggattggttgcctggtttgctctaggtatagatcctattgctgctgaagaattcaagcaaagacatgaaaattgttactttcttcatcctcctatgccagcccttctgcaattgaaagaaaaagaagctggtaagaaatgaatgctgcttttcattggtaaaatctggtttttagacttgagttggagttgtatgtatttgcactttccaggggcactctttttccagtaagcagtgaaattagactgtcttcatcagaaacttcttaaagttctcaccctaggggactactctcctgggcagttagtagttctaatcagcccagactgatttcctgagaattaaccctggtgcatgatgatctcatttgattcttcattgaataattcttagttcctgctacacgtagaacatgatggcaaagactttgactgttttgttttgtattctgttgatggggctttttatggcatggtaagaaattggggtttgattctaaagccatttaaatgtaacctaacctgtgtttaaaatatttttttaaaaaagacactgcacactggctgcatcatagagcataaattg

SEQ ID NO: 115832 - DNA, 3493 bp, Homo sapiens
agcggaagactgcatccggctccaggaaaagcgagtgggatatcccaatctttggactgcatcctggttgcctctactgtggtcacctttgggaagaaatgtcttctgtaaaaagaagtctgaagcaagaaatagttactcagtttcactgttcagctgctgaaggagatattgccaagttaacaggaatactcagtcattctccatctcttctcaatgaaacttctgaaaatggctggactgctttaatgtatgcggcaaggaatgggcacccagagatagtccaatttctgcttgagaaagggtgtgacagatcaattgtcaataaatcaaggcagactgcactggacattgctgtattttggggttataagcatatagctaatttactagctactgctaaaggtgggaagaagccttggttcctaacgaatgaagtggaagaatgtgaaaattattttagcaaaacactactggaccggaaaagtgaaaagagaaataattctgactggctgctagctaaagaaagccatccagccacagtttttattcttttctcagatttaaatcccttggttactctaggtggcaataaagaaagtttccaacagccagaagttaggctttgtcagctgaactacacagatataaaggattatttggcccagcctgagaagatcaccttgatttttcttggagtagaacttgaaataaaagacaaactacttaattatgctggtgaagtcccgagagaggaggaagatggattggttgcctggtttgctctaggtatagatcctattgctgctgaagaattcaagcaaagacatgaaaattgttactttcttcatcctcctatgccagcccttctgcaattgaaagaaaaagaagctggggttgtagctcaagcaagatctgttcttgcctggcacagtcgatacaagttttgcccaacctgtggaaatgcaactaaaattgaagaaggtggctataagagactatgtttaaaagaagactgtcctagtctcaatggcgtccataatacctcatacccaagagttgatccagtagtaatcatgcaagttattcatccagatgggaccaaatgccttttaggcaggcagaaaagatttcccccaggcatgtttacttgccttgctggatttattgagcctggagagacaatagaagatgctgttaggagagaagtagaagaggaaagtggagtcaaagttggccatgttcagtatgttgcttgtcaaccatggccaatgccttcctccttaatgattggttgcttagctctagcagtgtctacagaaattaaagttgacaagaatgaaatagaggatgcccgctggttcactagagaacaggtcctggatgttctgaccaaagggaagcagcaggcattctttgtgccaccaagccgagctattgcacatcaattaatcaaacactggattagaataaatcctaatctctaaatctaagaactaagctttgagtattatttaataatttctaataacactcattcctcaagtgatattagagattattcagtactcttgagagtgtcacaacacaaaatacgatgttgggttttcgaaatattttcaaagtgttctgtcttaatcacaaattcatatttttacacatttttacaatattgcctcagattatgttaaatttgggtcagtcttctctgaactttttctctcttggtttcttttcttccttcacagttttatctcacaaaaccatttttctaataagagacatcatgttggaaagatgttgtagaaatgtgcataaatttcagtgcctcttgtaagcattaaactgatgatgaagaaagttcctgatttgagaaatgaatcaaagtaattttaatgaatttttagcttgtattagcttgagttagctggcattgattttttagtccttttgttacctttaagttgtcaatatatggtttttgttcatctccccattgtagtcccacttgctctttcctgggggttccattgttctagcagtggaggtgttacagtgtcgccactcgtctaatttgaccagtgttaagaattttctaatttaataatttaatagtgatctcaataccacaccctcatggaaggagaaaagcatactattatatctgggacctctcttttagacctaaaattaattaacatatctacttatatgttacttatacctaaagctgttattaagacaaaccaagattctctgcttttgcactgaaattaaacttgaaaggaattctcctcaaaggtcggatattaaataagtcccaggcagatttacatatttaatttaaaacattggctttatttcattttgtgatgagtgatgtatctgtgttaacaaaaaattgtataatcattaccaatactatttattatgctcaaatatatcttggctttgaccttatttcaacacattctaagaagccttgacaaagtaagtatattttagagctgaatcagtaagattctagagaaagcaaaacatagtagttcacaattttgcaacatagaaagtcacattttgaaaggctattttgaaattgatttaatagctattatagtttatgaatatcaaaatttgtataatttgcatctttactaatgtatgctagagctacaagagaccttaaggataatatatgaaattagctttccttattttatagataaggaaaaagaaattgtgaaaggtgaatttacctaattagtgaaagttacataactaattacaacagtctgtactatataatgcagaggacgattctccctgtaaaaggaactagaagctattactaaaaatatatatagacaaaattaaaagaaggaatgataagaataaatttaatttaccaaatattgttaattaaaattttagatacttaacatttatttaacttaaataaaagataactgtcagataaaactttattttactaatgagcagtgattttcttaggaattgatgaaggcttattggtatcaagaatttaaaccaaattaaaactgacagaggacatttagatacataataaaattcgagctacataagtatatggaaaataatgtaccttgattattatgaaatagagcatcttgaaattcagttttactctaaatgtacttttaatacttgcagattctaagattacattgtaaaattccaggttttcataatgttaaaataggaaagtagaatataaagtatcaacaagtgtagttatacattttgttttggatatttaatccttacttgggaaaaaatcagcatctaggtaaattattattttaataagaactcttaaattgccaacctctgagaggtgaaaagctatgtaaatagaaggaatggccagttcaaaagaatagtagatgtgatagtgccgtgaatgtattctactggaaatgaatgtaataatacattaaatttttaaaatcta

SEQ ID NO: 115833 - DNA, 3439 bp, Homo sapiens
agcggaagactgcatccggctccaggaaaagcgagtgggatatcccaatctttggactgcatcctggttgcctctactgtggtcacctttgggaagaaatgtcttctgtaaaaagaagtctgaagcaagaaatagttactcagtttcactgttcagctgctgaaggagatattgccaagttaacaggaatactcagtcattctccatctcttctcaatgaaacttctgaaaatggctggactgctttaatgtgtgacagatcaattgtcaataaatcaaggcagactgcactggacattgctgtattttggggttataagcatatagctaatttactagctactgctaaaggtgggaagaagccttggttcctaacgaatgaagtggaagaatgtgaaaattattttagcaaaacactactggaccggaaaagtgaaaagagaaataattctgactggctgctagctaaagaaagccatccagccacagtttttattcttttctcagatttaaatcccttggttactctaggtggcaataaagaaagtttccaacagccagaagttaggctttgtcagctgaactacacagatataaaggattatttggcccagcctgagaagatcaccttgatttttcttggagtagaacttgaaataaaagacaaactacttaattatgctggtgaagtcccgagagaggaggaagatggattggttgcctggtttgctctaggtatagatcctattgctgctgaagaattcaagcaaagacatgaaaattgttactttcttcatcctcctatgccagcccttctgcaattgaaagaaaaagaagctggggttgtagctcaagcaagatctgttcttgcctggcacagtcgatacaagttttgcccaacctgtggaaatgcaactaaaattgaagaaggtggctataagagactatgtttaaaagaagactgtcctagtctcaatggcgtccataatacctcatacccaagagttgatccagtagtaatcatgcaagttattcatccagatgggaccaaatgccttttaggcaggcagaaaagatttcccccaggcatgtttacttgccttgctggatttattgagcctggagagacaatagaagatgctgttaggagagaagtagaagaggaaagtggagtcaaagttggccatgttcagtatgttgcttgtcaaccatggccaatgccttcctccttaatgattggttgcttagctctagcagtgtctacagaaattaaagttgacaagaatgaaatagaggatgcccgctggttcactagagaacaggtcctggatgttctgaccaaagggaagcagcaggcattctttgtgccaccaagccgagctattgcacatcaattaatcaaacactggattagaataaatcctaatctctaaatctaagaactaagctttgagtattatttaataatttctaataacactcattcctcaagtgatattagagattattcagtactcttgagagtgtcacaacacaaaatacgatgttgggttttcgaaatattttcaaagtgttctgtcttaatcacaaattcatatttttacacatttttacaatattgcctcagattatgttaaatttgggtcagtcttctctgaactttttctctcttggtttcttttcttccttcacagttttatctcacaaaaccatttttctaataagagacatcatgttggaaagatgttgtagaaatgtgcataaatttcagtgcctcttgtaagcattaaactgatgatgaagaaagttcctgatttgagaaatgaatcaaagtaattttaatgaatttttagcttgtattagcttgagttagctggcattgattttttagtccttttgttacctttaagttgtcaatatatggtttttgttcatctccccattgtagtcccacttgctctttcctgggggttccattgttctagcagtggaggtgttacagtgtcgccactcgtctaatttgaccagtgttaagaattttctaatttaataatttaatagtgatctcaataccacaccctcatggaaggagaaaagcatactattatatctgggacctctcttttagacctaaaattaattaacatatctacttatatgttacttatacctaaagctgttattaagacaaaccaagattctctgcttttgcactgaaattaaacttgaaaggaattctcctcaaaggtcggatattaaataagtcccaggcagatttacatatttaatttaaaacattggctttatttcattttgtgatgagtgatgtatctgtgttaacaaaaaattgtataatcattaccaatactatttattatgctcaaatatatcttggctttgaccttatttcaacacattctaagaagccttgacaaagtaagtatattttagagctgaatcagtaagattctagagaaagcaaaacatagtagttcacaattttgcaacatagaaagtcacattttgaaaggctattttgaaattgatttaatagctattatagtttatgaatatcaaaatttgtataatttgcatctttactaatgtatgctagagctacaagagaccttaaggataatatatgaaattagctttccttattttatagataaggaaaaagaaattgtgaaaggtgaatttacctaattagtgaaagttacataactaattacaacagtctgtactatataatgcagaggacgattctccctgtaaaaggaactagaagctattactaaaaatatatatagacaaaattaaaagaaggaatgataagaataaatttaatttaccaaatattgttaattaaaattttagatacttaacatttatttaacttaaataaaagataactgtcagataaaactttattttactaatgagcagtgattttcttaggaattgatgaaggcttattggtatcaagaatttaaaccaaattaaaactgacagaggacatttagatacataataaaattcgagctacataagtatatggaaaataatgtaccttgattattatgaaatagagcatcttgaaattcagttttactctaaatgtacttttaatacttgcagattctaagattacattgtaaaattccaggttttcataatgttaaaataggaaagtagaatataaagtatcaacaagtgtagttatacattttgttttggatatttaatccttacttgggaaaaaatcagcatctaggtaaattattattttaataagaactcttaaattgccaacctctgagaggtgaaaagctatgtaaatagaaggaatggccagttcaaaagaatagtagatgtgatagtgccgtgaatgtattctactggaaatgaatgtaataatacattaaatttttaaaatcta

SEQ ID NO: 115834 - DNA, 601 bp, Homo sapiens
agcggaagactgcatccggctccaggaaaagcgagtgggatatcccaatctttggactgcatcctggttgcctctactgtggtcacctttgggttagtagaagcagtggggagttagtcgtctcattgcctcctctgggggcggtgaccacttccctgggctctttggttcccgcgctgccctgcgtggccctgctgagttgtgtggcggagcctcgtagtggtttggtgggcgcaggcgcgggagccacggacgcatttgcaggggctcccgcgacagggcggaggtgcggcggtactgaggtcgtagagtttcctgcccaagctgagatggggaaaaggaagcgctacttagggtgtgatttcacctcgaaagaaggaatctcacagtagtggcaagaaagtaaaatatcttaaggcattttaccattttcagagaccgtgcacgggtggcacttaattggtcttgagtgcccagggagtggatgaaattcgttaattgatggtcagtgatttcagtgacagagcgatatttaaggtcctgtcctgtcccattcggtctgtgtgagcatgcggaagtcatgggccccgggttacatgtc

SEQ ID NO: 115835 - DNA, 401 bp, Homo sapiens
agatgatacttaaaactgagaaacagaggctgtggtctgcccttggcttcctgaagttaagcagagtctagctggaaaagctgtgttgaaaggaacagtgggaaatgagaccataggaagtgcaaggagtgggaaatgactatctttattatgttaaccagtgcagaaaggaaattccagttcagatgagggatggccaggtttagtctgaacaaacccccaacatagttcaagtatatcagataaaatgaggcctcaaaaattaaatgaagaagctgaattcattcccttttgatataatctgagactctaaattgatgctgccatatagacaagaaatataagtatttagacagcccaatttttgaaggcaggaaaaaaaaccgctgaggaaaaaaaaa

SEQ ID NO: 115836 - DNA, 540 bp, Homo sapiens
tcaatcccaactctgccaggcatcagcctgtagccttgagcagcttctttaaggtctctgagcctccatttcttcatctataaaaaggggttagtaataacacccttagcaattcaactcaaagggctaaaattttcctctaaggaatgacaaattgaaggaaaagcccaacagcccaaagaaaaacggtgtgaaaagatagtgtacccaaaataaaatacaaatggctcttaaatatgtaaacacatcctcagtctcactcataagagaaatgctcattaaaatcacactgaggcagggcatggtggctcgtgcctgtaatcccagcactctgagagtctgaggcagatggatcgcttgcggtcaagagttccagaccagcctggccaacatagtgaaactccatctctactaaaaatacaaaaattaggcagatgtggtgatgcatgcctgtaatcccagctacttgggaggctgaggcaggagaatcacttgaacctagaagtggaggttgcagtgagctgagatcatgccactgta

SEQ ID NO: 115837 - DNA, 607 bp, Homo sapiens
ccccatctgccgccaggaggaagagaggggccccactgcgacgccccagcttctatggccatctctgctggccacacagctccccctttcaaaaatgagatgaagccactgccccagagggcctagagtggtttgttctctgggcatcgctctggacttagggtgtggccagcatggccgctgggtctgggcagagccaacacgcactcttcagctccggcatagcatgtgtagaatgacacggctattagcatttcatcccgggtttacagaaaggacacactgccgtgactgcaggttgaggactgctgcagaaattcgctcatttgatcctcaaagcaatctcctgagggaggccctgcgatcacccccattccacagatgggtaaaccgagacctggagagatgaagccatgtgctccaagctgcacgtctcagtgggtgttggaggggagacgtggtccaggtggccggggggccgtgagcgggatggcaccacggtgctgcttcctctccactggcttcttggtccaaaggccctgagcctgccaagggtgtttcttccctgcaatgcccccgggttgtgcaagctctctgtgccctcctt

SEQ ID NO: 115838 - DNA, 400 bp, Homo sapiens
acctcttttccccagataacttatcctcacagcattgagtctgatactgagaaaagaaagcctctgcaagtttagcttcactgacgtgagcagttcagttactgcactgtagcaaggacttcattagttatcgaccttattgctggtataaaatctgggagctagaccccaaatgagttccacatgtccctcagatccccagcaattttgccattggagcaatacttgagaaaagctctctttagcctcaagtttctggctgatttttttggtcttccatctcttcccccagtcttagggcccaaatctctcttccatttatcatgtcacctgcaaatcaaatctctgttctctgcattcccacaaccatctacctatgacccagccagccttttccaga

SEQ ID NO: 115839 - DNA, 360 bp, Homo sapiens
gttcttttttctttcatataaaagttcagcattgttcaataaatttaagcagttcctttataagacaagttaattttcttatgctggttgcatgggggtggggggcatgctatggggacatcctatcaaaccccaaacctctctaacttttgcctggaaagaatttggagtcagagtttttacgtaacgtttgcaaccctacggcgccacctagtggaataggatttttctccatgggaagccctgtcagccctcttccccaaacttctagtttcctaattctttttccttttatgtccctctatcagtgatcaggcaacatgtcctatttgtaaacaaaaaaactccactttcaacagc

SEQ ID NO: 115840 - DNA, 305 bp, Homo sapiens
acaggagggaagtggccatccttcccaggcacatgactatctactcagagcctgcaaaagaaagtgttcgtgtcgaaaggggcaggttgtaaatccctgtacagaaggccctggaaccagtgaggggcccgggcatggcaggcacactggtgagtacccagtggggtgggtgaatggtcagccaggtgggccttggagcctttggagactggttctttcttaaggactttcccaaccctgtgaacctttgcatttcacaagttattgccacgtcaactttacacaaattaaaaccgcttgttctc

SEQ ID NO: 115841 - DNA, 735 bp, Homo sapiens
atgacaataatacacaagaggatagagaagggataaacagaccttaagttgtttaacgaccttatgtattatattaaactctaataagtcaaagatacatatttaatctgtagggcagtgattttcaaattttagagttgtttagaattatatgaagggcttcttcaaagtgtgctatataccaccctcaaagtttctcatttaactttttgagtggtggggtggggtcaaaagtttgcattcctgctaaaagttgcagatgcaattttttttaagaagacactttgaaaactacttctgtaaggtaaactattgaagtagtggtaaaataatatgtagtgtatagctagtagaacagaaaatacactaaaaagaataatagtaataataataataataggcctgactactccaaagtgagcaagaaaggagagaaagaacataatatgaatgagtcaaggacaaatcaaattgtgacaaggtaaatttaaatccctaggaactacattttatttagaaagactattctaattaaaatgcaaaaattataatattgaataaattatgaaatgaaatttacagagataaggtaaaaaatgttgaaaatagatataaaaaagttttacacaaatattaaccaaagaaaactgtgtgaatatgtttatatcagatgcagtagtcattaaggcatgatgcatttattaaagataaaaagattgttttcatattgataaa

SEQ ID NO: 115842 - DNA, 536 bp, Homo sapiens
ggtgtctcagatgtttttgccacgatcggtctacagcattgactctaggttagactgagtgttaccatggccacgcaggacgcacggttcctccacccgtgatcagacacggaatcggctgcgatgggtgatcgccaatgagccccttttctagagcctttcctggccatctacaggcagggtccggctgggaaaaagacgactggaatttctcgaatgtcgatggtttgcacacttgaggattctacgtggttctcttggttcctttggtgtgtgtgtggaggatgccaaggcccttagctgaccttcagctcgtcgtacaggaccagcacgaagcccgcccccacccccatgcctttgagggcgttggaccacacacccttgaaaaaggcctcgccccgctcatctctgaagatcttcctccaacagtcgacggtgcccgtgtacatgatgtcagctcctttgcgccgggactgcatcatcgtccgccgccgcactgtgtcgaagggttaggagagcacgccagccacggccgt

SEQ ID NO: 115843 - DNA, 639 bp, Homo sapiens
gagcttagaaagcttatttcattagtaaatggtttgaaccgtcaaggtccagctgtggtttccactgatggaggaacaggaagaagaggagccttgacatttatctcaagcgccagcagcttctcttggatcaggaagacataaaagtccaatgtcatcttcaatttgtgcaggctccccttggagttgcagagccagtgaagtgaagtagaacagttaaaaaaacacccggggaagtgataaatcacagagagagattgcatatgcgggaaaggtgtctcccacaattaaaacaagtggccagagcctccctggcgacctctggtctgcattgccagccctgaagatggctcctaaattacttaagtttaataggtagttaatatagccaaccctccttatgaccccagtgggctgaatggctctgcttgctttaggaactgggcgttgtatggtagagcatcttggccttgacataaaaggtagcatactggctccccagccctgaaccttccctgctagagcaaggcaggggtgagagggggaaggaaagaaaaaggagtggggagtggggtggggagcaaggattaacagggagcagtagcagcaccagatgtgggcatagcacactgggaagaa

SEQ ID NO: 115844 - DNA, 591 bp, Homo sapiens
ataaagatgtgtgttatgaaaaaacttgagacttttaggaatttggacactctggttttacatctagatatttgacttggaagagtgcagtctttaatggtctatttaaagtaattagctaacatttgtgggtaggaggtgacaaaattggatgtactaatcctagaattatttggtagcatttttatgcctggcataacagttttatgaaaactttatatgtgaaaagccagtgtgtctgcttcagggtgagatgaattatgttgcagtagttgtaattataccatgagacatgtgaaagaagcaaagcaaaatagagaaacagctggagaacacaattctgcttttccaaggaaaatgaactgagcaatctgttgagcagcctctgacccttggacccaccgtgggcctaagtgcagcctcatgcaaatcagaaggatcagggaaatgacatcttcagggtaccctccttagagaatccctccgtggaagtgcaggagccagccaagaccctcagcatgctggggtcttgtgtggaatccttcttagggctctgactagaatgttctggtgaggccctctgggaaatag

SEQ ID NO: 115845 - DNA, 1068 bp, Homo sapiens
taagggaatgcaaggacatgaaagagtgtcctaggcagagggaacaacatatacaaaggccctgaggtgggagtgaacaaggaactgagagaagaactgagagaaggccactgtggaaagccagatgctgtgtgacatgaataatgggacacaggaaattgagatattagcaaaagagagattgatgacccataggcttgaagatgtactggaactaaagtaaggggcgaggataaataaaaagagggagaaattggagaaacagagtgcttggaagccctgatgaatttgaggaaaaggatggtgatagagttgacctagccagctagaagagtagtactttttagtcagtgagccctccatcccatttctcattaattcttgtaacactttctcacttcctatattctgtcatattttatagttgtttatataattatcttattctttataccaattgtagtttccctgggtgcttattatggattaacaattatattattattaataatatgggtgaatgtttacaaagaaagaagtcttttttgctattcttattttatttctttaatctttgatcaggggtttttatttatgaattcatcttatatgtcacttgacaaacactgaatgctgaatgccacagagtacatgacactttagcagcataaagaaaggcaccaaaaccaagcagcaaactacatgctacaaaacaacaatttttggaattaatgaatgaggctaattttctggagtcctctctctcttttaaaatgtaagaagtgttagtatggccaggcatggtggctcatgcctgtaatcccggccctttgggaggccgaagtgggcagatcacctgagatcaagagtttgagaccagcctggccaacctggggaaaccctgtgtccactaaaaatacaaaaattagccaggcatggtggcacgtgcctgtaatcccagcaaattgggaggctgaggcaggaaaatcacttgagcctgggaggcagaggttgcagtgagctgagatagcaccactgcactccagcctgggcaacagagtgagactc

SEQ ID NO: 115846 - DNA, 237 bp, Homo sapiens
ctgtggcaaaaagacaagcgcagagtgggaatgactcagcttgggccctgatcatactacatccaggtgtgataatgaattaagttaatctgtgagtattttcttaaccatagactggaaaactcttattcccaagaagttattttgacttttaagcagggaatcctgtaaaaggtagactattataaactctcctcaagcaaaatatttgctttatgtaaatagccttctcaaggt

SEQ ID NO: 115847 - DNA, 581 bp, Homo sapiens
gccaccatgctcctgttagaactttcactggcttaacccaattagatgccagagggcccaggagccccacacaggccagccctctagggcagggagcagggtggacatactggttttctgttgctgcaaatcagcagcttacaacacacatttgttctctcacatctcctttgcaccaggagtccaggaatagctcatctgagtgctatgcttaggtcctcctaaggctgtggtcagagtgtcaggcgggctgcatcctcatctggggctccagtggggaaggatctgcttcccagctccctcaggtttagtgttggcagaattcctttccttggagctgtcagggatctgtcttgcacagtggggaatggacagggcaaacaagaagatactcagagaaggtgacacctgagccttcctgaagatgagcagagggcaaagaagagaacacctgcgcagagtttcggaggcaagggagtcatcagtgtgtccacagatctgccagtccattcatttggcctagagtataaggcagaggaggtataggacctgtttcacggtggcctagtgagacttactga

SEQ ID NO: 115848 - DNA, 759 bp, Homo sapiens
gcacctcattgctgcatcatctagtggagatgaacactgtgttctcatatggcagaaaggatggagggcaaaaaggactgaactctgtgtgaagccccttttataaaggccttaatcttattcatgtgggagcagcccttataacttaatacctcctaaaaggccccacttcttaataccatcacaatggggattaagtttcaacatgaattttggtggggacacacattcagatcatagcatttcacccctggctcccccagatttatatcctgcacacatacaaaatatatgagataaatgcacgtgatacacatttattccatcccaaaagcccccaaaagacttaccttgttccagcatcaactttaaaatctaaagtttcatcttaacactatctaagtcagatacggagatgagactcaaagtacaattcatccagagacaaattcctcttcagctgtgagcctatgaaattatacagttatatgcttccaaaagacaatagtgggacaaacaggatagatattcccactccaaaatggagcaacaggaaagaacaaagggctaacaggttctaaccaaatccaaacacctcagataaacaacaaaaaactcagtagggcaaacattaaaccctgaagcttgggtgtagtcttttactcccatttctcattttctggacacactggggtggaagttggacccccaaggctccaggcaaccctacttcatcacattgctggctgcatttcttgt

SEQ ID NO: 115849 - DNA, 240 bp, Homo sapiens
gctggacgtggtggcgggtgcctgtaatcccagctactggggaggctgaggcaggagaatcacttgaatccgggaggcaagggttgcagtgagctgagatcccaccattgcactccagcctgggtgacaagagtgaaactccacctcaaaataaataaataaataaataaataaataaagtaaaagagggaatgctgagagctgggcgtggcctgtggctctgtagctacgcaggaggct

SEQ ID NO: 115850 - DNA, 425 bp, Homo sapiens
gagtggattcacagcctcatcccgaccccgcgtgtcaccgcgagtgggttcacagcctcatcccgaccccgcgtgtcaccgcgagtgggttcacacgctcatcccgaccccgcgtgtcaccgcgagtggattcacacgctcatcccgaccccgcgtgtcaccgcgagtgggttcacagcctcatcccgaccccgcgtgtcaccgcgagtggattcacacgctcatcccgaccccgcgtgtcaccgcgagtggattcacacgctcatcccgaccccgcgtgtcaccgcgagtgggttcacagcctcatcccgaccccgcgtgtcaccgcgagtggattcacacgctcatcccgaccccacatgttcacgtgtttaatgaacactgtgctagaaggtcagcagtaaacatgccacagcaccccatct

SEQ ID NO: 115851 - DNA, 440 bp, Homo sapiens
gtgctggaagttgctggtgtggcaatgagaactgggccccggtcaaggcagcactactttggtagatccagaatcaaccatgataaccgtgacagtgtcttcaacagtgcagcagtagacacaggcccctggtgctggaatccaatacagggacaggagcagcacggagtcacggaacaccgtcttgccttcatgtcactttaccatttcttctttctccctcttactctaccagctacctgtggagatgttgaaccttttatctgtcgctgtctgcttaggaacagaagaaaaggcagctcattgcttgactcagctttcagcttgatttttttcctttggcagagtgaattggggtcccaggtgttcattttccttttgtagtacctttcctcagcatgcaattaatacaaaaagaacaataaaccttaacaaagttt

SEQ ID NO: 115852 - DNA, 615 bp, Homo sapiens
cacctttagtatagtggtgagtaaaaataaaataaaaacaaggccaaattgcgtttttctaaattgcaagttccctgttttccatatcccagtaacaaacctactgttgtgcaaataggaaataacatctagtagctactttagcaatggacgtggcaaaataaataaattagtagctatggctcattatttaggatttaaatgagccataactactataaatgaaattgaagatcatgttcttaatttgaaattaaggatcatgatctcattggtactgatgagtcagcagctatcaatatataaggataacccttatattttaggaattattttaggagaaagaactattttaggaattattttacacagaattctaatcatgctgccttggaggttaggcaactaccattcctcactttgtagctttattgattctcttctgaagcttgcagtagcctcctaacttgccttgctgccagtccttccttgtcccagtctatccttcacattgccaccagtgttatttttctgaaatacgaaagcgaatatgaggcttctctgctccttggtgataatagtataaagtccaaactcttaagtattacataaaaa

SEQ ID NO: 115853 - DNA, 325 bp, Homo sapiens
atggaaagacatagaaagattagaaatatgtcttagacagaatcagctggacttagtgacagattggttgtaggggaggaggagaggaagaagtcaaacacaacaccatggtgtctggttggacagggccattttctgagatggggagggcatagatatgtttaaaagctctgttttgattactccacatcaggatttaaataaagtccaaagaatggtcatggtaatgacaataactgagcaaagtaatttaattttttaaggtgttacagttctctagagaagcagaatcagtaggatactggggatagtggggaggggagag

SEQ ID NO: 115854 - DNA, 364 bp, Homo sapiens
ttgcatttattgagcaagtatttattgagggcctcttgtgtgctagggactgtcctggatgctggagatatcagtgaccaagacaggtcttctatagggaagaccagtaaacaaacaaatgaatagacaaagcaaaaataggtcataatgaattctgtggaagaaagaaacagggtgctgtgatagagaacaatgggggcaaggcagctgctttagatggggtggtcattcggagaatcagaagaggctggctgtgagaagagcctgggaagaagtgttccaggaaggaaaacagaaaactaaaggcacagtgttgagggaagaccttggtatatcctaagaattaatggaaggtctttgtggc

SEQ ID NO: 115855 - DNA, 612 bp, Homo sapiens
tgggggtgcttcctgcctgaagcaccaggtgtcatattggctaggatgcccaggcagaaaatgggggctaacaataccgtgtttcacctgaagtgtttcctctctgcaccctgcttggccttccttccctccctcccgcttcaggctgggcctgaaatctgcagaaggaatggccctggccctcagaggaagggacccagcactatagaatgctgtggttaagagcacagctcaagtgctcttaacaagccgtgtgttcctgtgaagttacttcacctctctgtgcttctgtttcctatcagtaaaatggggatgctaataatagctccttccctaaaggcttactgggaaggagattaaagaaatgaggtagtgagtgtgcagcattcagcataccacgcctggtgtggagcaggcgcctagcaactggcatccttctgtccctcctcagacccagggagttgaggtgacttgcccaaggagcgccaaggtatccatctgggtggattgggaccaagacttgggcttccccctccctgtttctcttgctgcatctccacctccattcaggaagaaagaagatacttggactccaggaaatgatcaccgtgg

SEQ ID NO: 115856 - DNA, 741 bp, Homo sapiens
tataaatggaaatataaacagatgctcctcgacttttgatggggttacatcctgataaacctgtcataagttaaaaatattgtgagttgaaaattcatgtaatacacctaacttactgaatatcctagcttggcctagccaaccttaaatgtgcccagaacacttacatcagcatatttgggctgatgtaacacaaaccctattttatcataaactgtttaatatctcatgtaatttattgaatactgtattgaaaatgaaagataaaatggttgtatgggtactcaaagtacagtttctattgtctgtgtatctcttttgcaccatcgtacagttgaaaaatcctgtgtcaaacaatcataagtcagggaccatctgtactgttgaaatagcatttcaagctggattcctttttagaaaaaaaatgatctaaaagggatatgccataaaaatctacaaatgaagtgtaagaggtgatgtacacatgagcaatttcactatattcaagaatactaaaaattggttgtgattcccttgacgtttaaggaagtggttttgaattttaaaatagcaatgctttatgcagtaataaatatatacaatttattaccactgggaagagatccagccagaaaaattttgaaagacacatttagaaagttttagatatattcatgtacaatcatgcaaatcaaataaaaatgatatagcacctactgtattttaggcactcatgatcca

SEQ ID NO: 115857 - DNA, 271 bp, Homo sapiens
ttattgggtaacacctgtgaaagataaagggtcagggaaccaggtttggaagggaaggtcttcacacagcagcgcaggcctgagtaacacctgtgaaagcagaggggcggaggaggagcagctgccagtgagcagcgaggaacaccaggagaatgtggagtcgtggaagccaaaggaagacagcaactcaagcagaagggtgacatcgagtgtggatcaagtaaagtgagtgctgaggattgaccactgggtataaccacgtggaggtcac

SEQ ID NO: 115858 - DNA, 220 bp, Homo sapiens
tggtggtgccccgcgccagcccaggcagctgcagtagcaggaattagctcagtaagctaaggcttctccagtggtggggctgtttatagaggcaccgtcaccatgagcagcaccttctccactctgtggaccgactttcttctcataaggcctggagcaggctccctggcagggaaatgcaattttagaaagtagggcaggggcctaattacagtcggct

SEQ ID NO: 115859 - DNA, 586 bp, Homo sapiens
tcagtcgctctagggggattatccagtacaggcttgcttcttggtagccactgtacatagagttttgtttataattagacggtgtagtgttaattatgctggtggccctgccagtatcctacagaggctacaggaggagatcaaaacaatcattccagaattatgagtcacttcactctctccccactacacaccacgggcagcccctcaaccctggaaaaaggaaattatgcacactatttgcctatacagtctttcacatttaggatgaaatattgagttccaagagctgctctacatttacttttctagaataacggatacatttcagtccgggtaactttgggctgttcaagaattagaagtagaggagagaaggtttaggaaactctcaaggcccggtttatgctgtagaagaaaagaatttctgcataagtaaagtgcaattataagttttgctccagatatgaataattcctccaagggagaggttcataacctcattcatctttgtattcctggtgcctagcagggaagaaacctggcataaggtgttgaatgaaagtagaataatctaatatattaa

SEQ ID NO: 115860 - DNA, 677 bp, Homo sapiens
ttgatctcttggcctttcagcaactgtcatttgggactgctgttgctggtaattaaagactcttaggtcagctggaaagccgtctccaggtacataactgtgggtctaggcttcttctaactgctttccatgaaaaatcatacgctgaactcacaaatgacccctctgctattaaaaggagaagaagctgcctcatagaattatgagccattccaagttctggattctgatgcagactactggctatttaagaatgaaatacttggttttttgcacttaatgatgaatggagcagaatgaaatcatacaatatgctgatttttaaaattaattataacaaagtgaattttagacttcagatacacagattaatagtataccttttgaaaacaatttatagtatgctgtaaaatttttcttatctatttataagggttttccagatatataatttccatttttaaatttctgaatttatacacacacacataatcatatgtatttctactgcggcaacaattctttaaccattttgtttcagaagcaaagtttagggacactttctaaatgttcttttgactttgtggcctctaatactttcttaaaattctgaatctaagtttaattcaaacttagattgtaaattcaggtaatagataagttgtcagctttaaatg

SEQ ID NO: 115861 - DNA, 536 bp, Homo sapiens
caaatcttgtagactggattacagaggacatcgggcaatcttaatcagcagtctggagattcatgacccctctccacagcctgactccagggtacacgggtaagataatagtgacaacagccatgaaacgaagggggctggttttccatgaccccacacattctgcctaaggccacgcacctcccaaaggccacgatggatgagcaggcgggcctgggcactcaggtttttctggtaagtgacgaatctaagtcaatattgcaaagtagacgtggctcccctggctctgcaaatattggaccaaagacttgagtgaggcgatgctattgacgattacgagatggtagcattgttgtctttgttgccatgaagtgcagctcggtggagcctggcctaacatcctgtgtacacagaggggacagtgtgctcggaggcccgtgtgtttgctctgccaatatgcgccagtggccagccctcgaacactcccccatcccatggttacagctgggggtgttggaaacataccgccctctcct

SEQ ID NO: 115862 - DNA, 2212 bp, Homo sapiens
tcctgcttcgccctcccagcgcctagaagcctgcagctccggagcagtggccgcgccacgccggccccagcgcgcagaaccctgcaggccccgcccgtccgccccgggccgcgcccgccatgtcctacccgcagtttggatacccctactcctcggctccccagttcttgatggccaccaactccctgagcacgtgctgcgagtccggcggccgcacgctggcggactccgggcccgccgcctcggcccaggcgccggtctactgcccggtctacgagagccggctgctggccaccgcgcgccacgagctcaactcggccgcggcgctgggcgtctatgggggtccctatggcggatcgcagggctatggcaactacgtgacctacggctcggaggcgtccgccttctactcgctgaacagctttgattccaaggatggttcgggatctgcgcatgggggcctggcaccagccgctgccgcctactacccttacgagccggctctgggccagtacccctatgacaggtatggaaccatggacagcggcacgcggcccaagaacgccacccgcgagagcaccagcacgctcaaggcctggctcaacgagcaccgcaagaatccctaccccaccaagggcgagaagatcatgctggccatcatcaccaagatgaccctcacgcaggtctccacctggttcgccaacgcgcgccggcgcctcaagaaggagaacaaggtgacatggccgccgcggaacaagtgcgcagacgagaagcggccctacgcggagggcgaggaggaggaggggggcgaggaggaggcgcgggaggagcccctcaagagctccaagaacgcagagcccgtgggcaaagaggagaaggagctggagcttagtgacttggacgacttcgacccgctggaagcagagccgccggcgtgcgagctgaagccgcccttccactccctggacggcggtctggagcgcgtccccgccgcgcccgacggcccggtcaaggaggcctcaggcgcgctccggatgtctctggccgcgggtggcggagctgctctggacgaggacctggagagggcccggagctgtctccgcagcgcggcggccgggccggagccactgccgggcgcagagggcggccctcaggtctgcgaggccaagctggggtttgtgccggcgggggcgtcggcaggcttggaggctaagccgcgcatctggtccctggcccacacagccaccgccgccgccgccgccgccacctccctgagccagactgagtttccgtcgtgcatgctcaagcgccaaggtcccgcggcccctgcggctgtgtcctccgcgcccgccacgtccccgtctgtggcccttccccactctggcgccctggacaggcaccaggactccccggtaaccagtctcagaaactgggtggacggggtcttccacgaccccatcctcaggcacagcactttgaaccaggcctgggccaccgccaagggcgccctcctggaccccgggcctctgggacgctcgctgggggcgggcgcgaacgtgctgactgcacccctggcccgcgcctttccgcctgccgtgccccaggacgccccagctgcaggcgccgccagggagctgctcgccctgcccaaggccggcggcaaacccttctgcgcctgaggcgggcgggtcccgagcccaggagggaacccgcgctcaggcggacggcgccgactcttttcactgagtttccagaggaagactagcgcggccaccgcgaagccgccaacccaccggagagggggcttctgaacttggactcctgggaacatggacaagcccggcgctgccacgccggggcctccaccgcctgggcctgagcctgaccgggccattcccaaatttgggacgcggaaggagaggctctcggagcagaagaggccagataccctgaagcataaagtttaacgtcaaaagtttaacatggagaaggcggttccgttctgaagcgtggtctgctgtcccctgggcgtgaggcctcctgggcctgtcgggcctccgatttcatcctcagacgtaatgctcaccaacagcacttgcactgagttgactcttgcacactcgactccataatatgatgctttttaagatgtatgttcacaccaataattgcctgcttcagaggctaatataacaaaaccaataaaaccgag

SEQ ID NO: 115863 - DNA, 477 bp, Homo sapiens
aggccagattcgccggcacagcagttaaagtcgcccttccagccggtacgcgacaactctctggccccgcaggagggaacgccgcggatcctagcagccctcccgtccgcctgattaagggtcttcttttacttttgcgggggggaggggggaggagttggggagggagggaatgtgggaggaattaagacaaatatttcagactggtgtaaaggacaaatatgacaacgacgtcaaggactcgcatccgtcgctttctgcagaaaggggcttcttcggtcccgagctcgcgtccaggtggccaggcctctgccggcggctccagtggctgcgattatcgggttcggtaaatgcccccacgtgcttgtgtctctttccccccttttctgtatatagagtggtttcagattgtaaatagcgcgtcagcgaacttgtctaaatcatatatttttgtctaataaactaaatgaaatgaca

SEQ ID NO: 115864 - DNA, 845 bp, Homo sapiens
gccgccgcctcgtcgggccgaccgggggccgcggagctgggcggcggggcaggcgcggctgcagtcacctcggtgctgggcatgtacgcggcggcggggccgtacgcgggcgcgcccaactacagcgccttcctgccctacgccgcggatctcagcctcttctcgcagatgggctcgcagtatgaactgaaggacaaccctggggtgcaccccgccaccttcgcagcccacacggcgccggcttattacccctacggccagttccaatacggggaccccgggcggcccaagaacgccacccgcgagagcaccagcacgctcaaggcctggctcaacgagcaccgcaagaatccctaccccaccaagggcgagaagatcatgctggccatcatcaccaagatgaccctcacgcaggtctccacctggttcgccaacgcgcgccggcgcctcaagaaggagaacaaggtgacatggggagcgcgcagcaaggaccaggaagatggagcgctcttcggcagcgacaccgagggcgacccggagaaggccgaggaattaagacaaatatttcagactggtgtaaaggacaaatatgacaacgacgtcaaggactcgcatccgtcgctttctgcagaaaggggcttcttcggtcccgagctcgcgtccaggtggccaggcctctgccggcggctccagtggctgcgattatcgggttcggtaaatgcccccacgtgcttgtgtctctttccccccttttctgtatatagagtggtttcagattgtaaatagcgcgtcagcgaacttgtctaaatcatatatttttgtctaataaactaaatgaaatgaca

SEQ ID NO: 115865 - DNA, 383 bp, Homo sapiens
gccgccgcctcgtcgggccgaccgggggccgcggagctgggcggcggggcaggcgcggctgcagggtgcgccgcacggcaagcccaagatctggtcgctggcggagacagccacgagccccgacggtgcgcccaaggcttcgccaccaccacccgcgggccaccccggcgcgcacgggccctccgccggggcgccgctgcaacaccccgccttcctgcctagccacggactgtacacctgccacatcggcaagttctccaactggaccaacagcgcattcctcgcacagggctccctgctcaacatgcgctccttcctgggcgttggcgctccccacgccgcgccccatggccctcaccttcctgcacctccaccaccgcagc

SEQ ID NO: 115866 - DNA, 1135 bp, Homo sapiens
gccgccgcctcgtcgggccgaccgggggccgcggagctgggcggcggggcaggcgcggctgcagtcacctcggtgctgggcatgtacgcggcggcggggccgtacgcgggcgcgcccaactacagcgccttcctgccctacgccgcggatctcagcctcttctcgcagatgggctcgcagtatgaactgaaggacaaccctggggtgcaccccgccaccttcgcagcccacacggcgccggcttattacccctacggccagttccaatacggggaccccgggcggcccaagaacgccacccgcgagagcaccagcacgctcaaggcctggctcaacgagcaccgcaagaatccctaccccaccaagggcgagaagatcatgctggccatcatcaccaagatgaccctcacgcaggtctccacctggttcgccaacgcgcgccggcgcctcaagaaggagaacaaggtgacatggggagcgcgcagcaaggaccaggaagatggagcgctcttcggcagcgacaccgagggcgacccggagaaggccgaggacgacgaggagatcgacctggaaagcatcgacattgacaagatcgacgagcacgatggcgaccagagcaacgaggatgacgaggacaaggccgaggctccgcacgcgcccgcagccccttctgctcttgcccgggaccaaggctcgccgctggcagcagccgacgttctcaagccccaggactcgcccttgggcctggcaaaggaggccccagagccgggcagcacgcgcctgctgagccccggcgctgcagcgggcggcctgcagggtgcgccgcacggcaagcccaagatctggtcgctggcggagacagccacgagccccgacggtgcgcccaaggcttcgccaccaccacccgcgggccaccccggcgcgcacgggccctccgccggggcgccgctgcaacaccccgccttcctgcctagccacggactgtacacctgccacatcggcaagttctccaactggaccaacagcgcattcctcgcacagggctccctgctcaacatgcgctccttcctgggcgttggcgctccccacgccgcgccccatggccctcaccttcctgcacctccaccaccgcagc

SEQ ID NO: 115867 - DNA, 303 bp, Homo sapiens
agtgatctactcatggggaaaatcttgatgatgcaagaaagaaagggatttgttggaatcttgtcctataacgggtgagaggggatgggttctagaagaaaaggcatgggtctttgtttgagatcaggcaattcatctgtaggaaccagtaggaagatggttaagtgggtacctgtggtagtggatgtttgtgaacattcttttcttttccattgtttctattttctcaataaagtgggaagcaaaaatcagctgagtgaagatgaggaagaaggtgttaaaggtttgaagaaaaaaggaaaa

SEQ ID NO: 115868 - DNA, 238 bp, Homo sapiens
agtgctgggattacaggcttgagccaccgtgcccaaccaagacttagtttttaaaatgaacatttggattttataaagtatcagttcctaatgtcatttttcacatgaaaatcataagatacagagaaatgtagagtagaacattgaaaaagacccatactcttacccccatgtaactgtgatgttgaaaacaagtagtgatgacacatgcatgattagaacatctggtcagcttgag

SEQ ID NO: 115869 - DNA, 257 bp, Homo sapiens
caggctggaccgctgaaggcccagttccttgcctgttgcacagggaagcccctgacacacagggaaccccactgttgtcacgctgtgttgggcctgaggccaagggcaaccatcctcctaccgtgtccccagctccagctcctcgccctgtggcactgcatggaatgcgctctgctagacaagcagggtgccctcgaccagacccaatctgctatgggcagatgcctcctgtttgtaaggcaaggggcctagcaaag

SEQ ID NO: 115870 - DNA, 361 bp, Homo sapiens
atcaaaaccgcaatgtgacatcacttcacccgttaggatgtttattattaaaagatctaaatataatgagtgttggtgaggacgtgaagaaaagggaaaaactgcatgctgttggtgggacggcaaattgttatagtcattatggaaagtagtatggaggttccacaaaaaaataaaaatcaaaatagaactgccatatgatctagcaattccacttctgggtgtacgttaaaaaataaaatgaaatcattatctcaaagacataactgcactcccatgctcactgcactattattcacaataatcaagatacagatgcaacttaagaatccattgatagatgaagaaattgtagtaacta

SEQ ID NO: 115871 - DNA, 218 bp, Homo sapiens
gatccacccacctcggcctcccaaagtgctgggattacaggcgtgagccactgcacccggccatttcttggtttctttaattgattttccctctcccttagtgagagacatgcagaatacatcaaaatataggctggacttttttttttttttttttttttttttttttttttttttttttttttttttttttttttttttttttttttttttttttt

SEQ ID NO: 115872 - DNA, 344 bp, Homo sapiens
attgtgaagggtaatttcttaaattcattttcaaatgagctttttaaaaagaaaactagtgtcattccttgagtttcattttaatgtatctattcacatactgcttttaacttcttttcatactgctaattttttttcaatttgatcttttcaagattgagactacatattccaatttatagtaaatcagaaatgagattttcaatttcataatgaactttaataaaatagatttgttttctgtcagtgaaaatatttaggctaaatttccagaaaaatttcaccttcatttaataactgcattgttgaccaaaacttctgattaccttatttcgcaaatgtaa

SEQ ID NO: 115873 - DNA, 530 bp, Homo sapiens
actcttgttgcccaggctggagtgcaatggcacaatcttggctcactgcaaccaccacctcccgggttcatgcgattctcctgcctcagccttctgagtagctgggattacaggcatgtgccaccacatgcagctaattttgtacttttagtagagacggggtttctctatgttggtcaggctggtcttgaggtcgggagctcaggtgatctacctgcctcagcctcccaaagtgctgggattacaggcgtgagcactgcgcccggctttaacagatatttttataagcaaatcatttataagtatgggtgactattctttacaaatccatttgtgatgcagtggtaatttggtggcactgcaattatggccagcaatgaagattataaaataattgcctgaggaaccaagctcatgtgcactaaaaagaagcagggattcttagaagattcttagaagtatagagtagtgatttttttggggatggagtcttgctctgtcgcccaggttagagtgcagtggtgcgatat

SEQ ID NO: 115874 - DNA, 193 bp, Homo sapiens
agaagtgagctgccactgtcatgggtggaggtcagtcccagcaactgccccatctgtttcacccttgcttgatcgtagctagaaaatggtcagagatttagcccgcaagtgagtacacatgggacgtggccctgtttcgctgctcacttgctttgtgagccttggtgctgtgtgtgtgtagtgtgtgtgggtg

SEQ ID NO: 115875 - DNA, 620 bp, Homo sapiens
gaaacttcaaagaacatgattgttataaatattacacatttctatctactttcttaaaatcctaaaagagaaattgctgggtcacagagtataaagaatttaaggttattcgtgaatcggcaaattgtcctctgacgattgcattaccttaccttcccactggcaaaaagaccgctgccagtttcccccactctcatccccattaaactttgtttgtttaaatcatagggcacttattataattcttactcaagaaaacatacccacttttggccgagtgcagtggctcacgcctgtaatcccagcactttgggaggctgaggtgggcagatcatgaggtcaggagatcgagaccatcctggctaacacagtgaaaccccatctctactaaaaatacaaaaaattagccgggcgtggtggtgagcacctgtagtcccagctactcaggaagctgaggcaggagaatggcttgaacccgggaggcagagcttgcagtgaaccgagatcttgccactgcactccagcctgggcaacagagcaagactcagtctcaaaaaaaaaagaaaaaagaaaacatacccacttttgcctactgcaatagccagaacattgagcagcac

SEQ ID NO: 115876 - DNA, 3497 bp, Homo sapiens
acgtcagtccccgcgcttttcggaggctgccagcgtcccacaccagccgcaggtgaaaaccggcagaaagacattaagagattttcctgcagtcactgctggcagatgatagagccaggatttgaaagcaggcagcctggctccagaccctgtgctcttaactcccgttttgcatcaagaacagaatcctatgaaaggcttgtacagtgcttggatagcagcatcaaggagcattgtgtacatgcagaagtgcacagtacctggagtgaaactgcttgtgttcgatttctgataccattcataactggctgtgtgatctcaaaacctctaaaatgcagacctccagctctagatctgtgcacctgagtgaatggcagaagaattacttcgcaattacatctggcatatgtaccggaccgaaggcagatgcataccgtgcacagatattacgcattcagtatgcatgggcaaactctgagatttcccaggtctgtgctaccaaactgttcaaaaaatatgcagagaaatattctgcaattattgattctgacaatgttgaatctgggttgaataattatgcagaaaacattttaactttggcaggatctcaacaaacagatagtgacaagtggcagtctggattgtcaataaataatgttttcaaaatgagtagtgtacagaagatgatgcaagctggcaaaaaattcaaagactctctgttggaacctgctcttgcatcagtggtaatccataaggaggccactgtctttgatcttcctaaatttagtgtttgtggtagttctcaagagagtgactcattacctaactcagctcatgatcgagaccggacccaagacttcccggagagcaatcgtttgaaactccttcagaatgcccagccacctatggtgactaacactgctaggacttgtcctacattctcagcacctgtaggtgagtcagctactgcaaaattccatgtcacaccattgtttggaaatgtcaaaaaggaaaatcacagctctgcaaaagaaaacataggacttaatgtgttcttatctaaccagtcttgttttcctgctgcctgtgaaaatccacagaggaagtctttttatggttctggcaccattgatgcactttccaatccaatactgaataaggcttgtagtaaaacagaagataatggcccaaaggaggatagcagcctgcctacatttaaaactgcaaaagaacaattatgggtagatcagcaaaaaaagtaccaccaacctcagcgtgcatcagggtcttcatatggtggtgtaaaaaagtctctaggagctagtagatcccgagggatacttggaaagtttgttcctcctatacccaagcaagatgggggagagcagaatggaggaatgcaatgtaagccttatggggcaggacctacagaaccagcacatccagttgatgagcgtctgaagaacttggagccaaagatgattgaacttattatgaatgagattatggatcatggacctccagtaaattgggaagatattgcaggagtagaatttgctaaagccaccataaaggaaatagttgtgtggcccatgttgaggccagacatctttactggtttaaggggaccccctaaaggaattttgctctttggtcctcctgggactggtaaaactctaattggcaagtgcattgctagtcagtctggggcaacattctttagcatctctgcttcatccttaacttctaaatgggtaggtgagggggagaaaatggtccgtgcattgtttgctgttgcaaggtgtcagcaaccagctgtgatatttattgacgaaattgattccttgttatctcaacggggagatggtgagcatgaatcttctagaaggataaaaacagaatttttagttcaattagatggagcaacaacatcttctgaagatcgtatcctagtggtgggagcaacaaatcggccacaagaaattgatgaggctgcccggagaagattggtgaaaaggctttatattcccctcccagaagcttcagccaggaaacagatagtaattaatctaatgtccaaagagcagtgttgcctcagtgaagaagaaattgaacagattgtacagcagtctgatgcgttttcaggagcagacatgacacagctttgcagggaggcttctcttggtcctattcgcagtttacaaactgctgacattgctaccataacaccggatcaagttcgacccatagcttacattgattttgaaaatgcttttagaactgtgcgacctagtgtttctccaaaagatttagagctttatgaaaactggaacaaaacttttggttgtggaaagtaagtgggatacttggaatcaaggcatctctgtattacagtcttctttattttttagcatagaaagttggggatgtgttaattgtatttttaagaatatattctaaattctgtacttcaaataatagcacagattttacatctgattgacatagtgtatgttaatgtaagttttgctttccagtgattacctgatacgtaagcctatttgaacaaagtgagaatgaacttttgtttctaagaagtctttatcttgaagctatataacatgaaaagtgagctcaaattttttttagttgaagattacatataaagttgtgtctgattaatattcatcttttattgaagaaagtgccttctgatggccacataattcttaatgtcagctagtataatggtttacatttggacaaagtattgcttagtgttatttaagtagatttaagatctcaaagctaaagtgccaatttttactttcttcagccaatttgttacctcttttatggtttttaatttttatcaggactaacattttcagaaatagcaaggtgtgatctagtattagattcacagaactgaaaggttaattaagaatgttggttattttcacgggagcgtgtgatatttaacattaatattttatttgacactacagcctgtaatactgctctctttcaaaagcaagttttcagatttttataacagacccattttgttttatgaaacatgttcattacagaaacatgagaaaatagagataagtaaaaagaataaaagtcactattatcctaccactttgcgggacacactattaatatttaagcatagattcttccagatgttttgttttatacagcagtaggattgtgtaatgtattctctcttgtagcctattcttcaaagcgtatcttcactttccatgttaacataaatgtccttttatgattgtctaggattccatggatggatggaatataattgagtcatctggtagagcgcatataggacaggacgctaggttgtttatcttttgtttattgtaaaggaactatgtgggatgcatttggtgatctttttaaaaaatgtataaatttcttgagtaattcctggattaaagaatatgcactttttaaagcaaaaaaat

SEQ ID NO: 115877 - DNA, 3942 bp, Homo sapiens
acgtcagtccccgcgcttttcggaggctgccagcgtcccacaccagccgcaggtgaaaaccggcagaaagacattaagagattttcctgcagtcactgctggcagatgatagagccaggatttgaaagcaggcagcctggctccagaccctgtgctcttaactcccgttttgcatcaagaacagaatcctatgaaaggcttgtacagtgcttggtactgagtaggcactccgtcagtattttagtagctattattccaaaggacactgtattctaggtactaagacaatgtgaatggaatggaaaacaattcctccctgcagaagccaactgtctaggaagacagataatgacattattaaaataatcagaacattggcaaaataaagaagattgaaatgcagttcatatgacagtgctaattaatcatactttttagatctaggaaaggccataaaggttaaattgacttggaaatggtaaacaagacaatggttgtgtcactgatcggtgatggccagtttttggttatccttatttgccatttaaatgattgaattgaaaggaagaagtaagacttggaagatgaatattgaaggaaaggtgaagatggaaaagagaagggggtttattctgagaacagtgactagaactctgaggatagcagcatcaaggagcattgtgtacatgcagaagtgcacagtacctggagtgaaactgcttgtgttcgatttctgataccattcataactggctgtgtgatctcaaaacctctaaaatgcagacctccagctctagatctgtgcacctgagtgaatggcagaagaattacttcgcaattacatctggcatatgtaccggaccgaaggcagatgcataccgtgcacagatattacgcattcagtatgcatgggcaaactctgagatttcccaggtctgtgctaccaaactgttcaaaaaatatgcagagaaatattctgcaattattgattctgacaatgttgaatctgggttgaataattatgcagaaaacattttaactttggcaggatctcaacaaacagatagtgacaagtggcagtctggattgtcaataaataatgttttcaaaatgagtagtgtacagaagatgatgcaagctggcaaaaaattcaaagactctctgttggaacctgctcttgcatcagtggtaatccataaggaggccactgtctttgatcttcctaaatttagtgtttgtggtagttctcaagagagtgactcattacctaactcagctcatgatcgagaccggacccaagacttcccggagagcaatcgtttgaaactccttcagaatgcccagccacctatggtgactaacactgctaggacttgtcctacattctcagcacctgtaggtgagtcagctactgcaaaattccatgtcacaccattgtttggaaatgtcaaaaaggaaaatcacagctctgcaaaagaaaacataggacttaatgtgttcttatctaaccagtcttgttttcctgctgcctgtgaaaatccacagaggaagtctttttatggttctggcaccattgatgcactttccaatccaatactgaataaggcttgtagtaaaacagaagataatggcccaaaggaggatagcagcctgcctacatttaaaactgcaaaagaacaattatgggtagatcagcaaaaaaagtaccaccaacctcagcgtgcatcagggtcttcatatggtggtgtaaaaaagtctctaggagctagtagatcccgagggatacttggaaagtttgttcctcctatacccaagcaagatgggggagagcagaatggaggaatgcaatgtaagccttatggggcaggacctacagaaccagcacatccagttgatgagcgtctgaagaacttggagccaaagatgattgaacttattatgaatgagattatggatcatggacctccagtaaattgggaagatattgcaggagtagaatttgctaaagccaccataaaggaaatagttgtgtggcccatgttgaggccagacatctttactggtttaaggggaccccctaaaggaattttgctctttggtcctcctgggactggtaaaactctaattggcaagtgcattgctagtcagtctggggcaacattctttagcatctctgcttcatccttaacttctaaatgggtaggtgagggggagaaaatggtccgtgcattgtttgctgttgcaaggtgtcagcaaccagctgtgatatttattgacgaaattgattccttgttatctcaacggggagatggtgagcatgaatcttctagaaggataaaaacagaatttttagttcaattagatggagcaacaacatcttctgaagatcgtatcctagtggtgggagcaacaaatcggccacaagaaattgatgaggctgcccggagaagattggtgaaaaggctttatattcccctcccagaagcttcagccaggaaacagatagtaattaatctaatgtccaaagagcagtgttgcctcagtgaagaagaaattgaacagattgtacagcagtctgatgcgttttcaggagcagacatgacacagctttgcagggaggcttctcttggtcctattcgcagtttacaaactgctgacattgctaccataacaccggatcaagttcgacccatagcttacattgattttgaaaatgcttttagaactgtgcgacctagtgtttctccaaaagatttagagctttatgaaaactggaacaaaacttttggttgtggaaagtaagtgggatacttggaatcaaggcatctctgtattacagtcttctttattttttagcatagaaagttggggatgtgttaattgtatttttaagaatatattctaaattctgtacttcaaataatagcacagattttacatctgattgacatagtgtatgttaatgtaagttttgctttccagtgattacctgatacgtaagcctatttgaacaaagtgagaatgaacttttgtttctaagaagtctttatcttgaagctatataacatgaaaagtgagctcaaattttttttagttgaagattacatataaagttgtgtctgattaatattcatcttttattgaagaaagtgccttctgatggccacataattcttaatgtcagctagtataatggtttacatttggacaaagtattgcttagtgttatttaagtagatttaagatctcaaagctaaagtgccaatttttactttcttcagccaatttgttacctcttttatggtttttaatttttatcaggactaacattttcagaaatagcaaggtgtgatctagtattagattcacagaactgaaaggttaattaagaatgttggttattttcacgggagcgtgtgatatttaacattaatattttatttgacactacagcctgtaatactgctctctttcaaaagcaagttttcagatttttataacagacccattttgttttatgaaacatgttcattacagaaacatgagaaaatagagataagtaaaaagaataaaagtcactattatcctaccactttgcgggacacactattaatatttaagcatagattcttccagatgttttgttttatacagcagtaggattgtgtaatgtattctctcttgtagcctattcttcaaagcgtatcttcactttccatgttaacataaatgtccttttatgattgtctaggattccatggatggatggaatataattgagtcatctggtagagcgcatataggacaggacgctaggttgtttatcttttgtttattgtaaaggaactatgtgggatgcatttggtgatctttttaaaaaatgtataaatttcttgagtaattcctggattaaagaatatgcactttttaaagcaaaaaaat

SEQ ID NO: 115878 - DNA, 3744 bp, Homo sapiens
acgtcagtccccgcgcttttcggaggctgccagcgtcccacaccagccgcaggtgaaaaccggcagaaagacattaagagattttcctgcagtcactgctggcagatgatagagccaggatttgaaagcaggcagcctggctccagaccctgtgctcttaactcccgttttgcatcaagaacagaatcctatgaaaggcttgtacagtgcttggatagcagcatcaaggagcattgtgtacatgcagaagtgcacagtacctggagtgaaactgcttgtgttcgatttctgataccattcataactggctgtgtgatctcaaaacctctaaaatgcagacctccagctctagatctgtgcacctgagtgaatggcagaagaattacttcgcaattacatctggcatatgtaccggaccgaaggcagatgcataccgtgcacagatattacgcattcagtatgcatgggcaaactctgagatttcccaggtctgtgctaccaaactgttcaaaaaatatgcagagaaatattctgcaattattgattctgacaatgttgaatctgggttgaataattatgcagaaaacattttaactttggcaggatctcaacaaacagatagtgacaagtggcagtctggattgtcaataaataatgttttcaaaatgagtagtgtacagaagatgatgcaagctggcaaaaaattcaaagactctctgttggaacctgctcttgcatcagtggtaatccataaggaggccactgtctttgatcttcctaaatttagtgtttgtggtagttctcaagagagtgactcattacctaactcagctcatgatcgagaccggacccaagacttcccggagagcaatcgtttgaaactccttcagaatgcccagccacctatggtgactaacactgctaggacttgtcctacattctcagcacctgtaggtgagtcagctactgcaaaattccatgtcacaccattgtttggaaatgtcaaaaaggaaaatcacagctctgcaaaagaaaacataggacttaatgtgttcttatctaaccagtcttgttttcctgctgcctgtgaaaatccacagaggaagtctttttatggttctggcaccattgatgcactttccaatccaatactgaataaggcttgtagtaaaacagaagataatggcccaaaggaggatagcagcctgcctacatttaaaactgcaaaagaacaattatgggtagatcagcaaaaaaagtaccaccaacctcagcgtgcatcagggtcttcatatggtggtgtaaaaaagtctctaggagctagtagatcccgagggatacttggaaagtttgttcctcctatacccaagcaagatgggggagagcagaatggaggaatgcaatgtaagccttatggggcaggacctacagaaccagcacatccagttgatgagcgtctgaagaacttggagccaaagatgattgaacttattatgaatgagattatggatcatggacctccagtaaattgggaagatattgcaggagtagaatttgctaaagccaccataaaggaaatagttgtgtggcccatgttgaggccagacatctttactggtttaaggggaccccctaaaggaattttgctctttggtcctcctgggactggtaaaactctaattggcaagtgcattgctagtcagtctggggcaacattctttagcatctctgcttcatccttaacttctaaatgggtaggtgagggggagaaaatggtccgtgcattgtttgctgttgcaaggtgtcagcaaccagctgtgatatttattgacgaaattgattccttgttatctcaacggggagatggtgagcatgaatcttctagaaggataaaaacagaatttttagttcaattagatggagcaacaacatcttctgaagatcgtatcctagtggtgggagcaacaaatcggccacaagaaattgatgaggctgcccggagaagattggtgaaaaggctttatattcccctcccagaagcttcagccaggaaacagatagtaattaatctaatgtccaaagagcagtgttgcctcagtgaagaagaaattgaacagattgtacagcagtctgatgcgttttcaggagcagacatgacacagctttgcagggaggcttctcttggtcctattcgcagtttacaaactgctgacattgctaccataacaccggatcaagttcgacccatagcttacattgattttgaaaatgcttttagaactgtgcgacctagtgtttctccaaaagatttagagctttatgaaaactggaacaaaacttttggttgtggaaagtaagtgggatacttggaatcaaggcatctctgtattacagtcttctttattttttagcatagaaagttggggatgtgttaattgtatttttaagaatatattctaaattctgtacttcaaataatagcacagattttacatctgattgacatagtgtatgttaatgtaagttttgctttccagtgattacctgatacgtaagcctatttgaacaaagtgagaatgaacttttgtttctaagaagtctttatcttgaagctatataacatgaaaagtgagctcaaattttttttagttgaagattacatataaagttgtgtctgattaatattcatcttttattgaagaaagtgccttctgatggccacataattcttaatgtcagctagtataatggtttacatttggacaaagtattgcttagtgttatttaagtagatttaagatctcaaagctaaagtgccaatttttactttcttcagccaatttgttacctcttttatggtttttaatttttatcaggactaacattttcagaaatagcaaggtgtgatctagtattagattcacagaactgaaaggttaattaagaatgttggttattttcacgggagcgtgtgatatttaacattaatattttatttgacactacagcctgtaatactgctctctttcaaaagcaagttttcagatttttataacagacccattttgttttatgaaacatgttcattacagaaacatgagaaaatagagataagtaaaaagaataaaagtcactattatcctaaaaaaaaaaaaaaaaaaaaaaaaaaaaaaaaaaaaaaaaaaaaaacaaaactaaacaggaaccaaaacaaaaacgacagccacagtcagcaaccaactgaccaaacaagattacaaccaccagaaaacaaagagagggggcgccgccctaaacacaatccactccggcgggcgcccacaatgccacaccacacccaacccattttataaaggaggcgccccccaaatgagagcctataacaaacaacggccgccacgggcgtcaaaaccacgttgatgggaaaacaacagcactgtcagtatcgtacgagaaacaccccactcggggcgggacacactggccgacacccacccccaagacaatgccgcgcccgagacaaacaccatcgggtcagcgtggacaccccgccttcctgccgcagacatggtctcgtgtattctcaaaatcacggcccgcaatcatagtcaaagcgacagacgagctcgcccagacacagaccagaccggcgtacaagctgactgaacacaccagacagccacggcggaccaccaactacgacgacagcgacgacccgaaccagcccccaacctctactcgttg

SEQ ID NO: 115879 - DNA, 4030 bp, Homo sapiens
acgtcagtccccgcgcttttcggaggctgccagcgtcccacaccagccgcaggtgaaaaccggcagaaagacattaagagattttcctgcagtcactgctggcagatgatagagccaggatttgaaagcaggcagcctggctccagaccctgtgctcttaactcccgttttgcatcaagaacagaatcctatgaaaggcttgtacagtgcttggtactgagtaggcactccgtcagtattttagtagctattattccaaaggacactgtattctaggtactaagacaatgtgaatggaatggaaaacaattcctccctgcagaagccaactgtctaggaagacagataatgacattattaaaataatcagaacattggcaaaataaagaagattgaaatgcagttcatatgacagtgctaattaatcatactttttagatctaggaaaggccataaaggttaaattgacttggaaatggtaaacaagacaatggttgtgtcactgatcggtgatggccagtttttggttatccttatttgccatttaaatgattgaattgaaaggaagaagtaagacttggaagatgaatattgaaggaaaggtgaagatggaaaagagaagggggtttattctgagaacagtgactagaactctgaggatagcagcatcaaggagcattgtgtacatgcagaagtgcacagtacctggagtgaaactgcttgtgttcgatttctgataccattcataactggctgtgtgatctcaaataagaaaactgaagaaccagctgggcgcggtagctcacgcctgtaatcccagcactttgggaggctgaggcgggtggattacctgagaacctctaaaatgcagacctccagctctagatctgtgcacctgagtgaatggcagaagaattacttcgcaattacatctggcatatgtaccggaccgaaggcagatgcataccgtgcacagatattacgcattcagtatgcatgggcaaactctgagatttcccaggtctgtgctaccaaactgttcaaaaaatatgcagagaaatattctgcaattattgattctgacaatgttgaatctgggttgaataattatgcagaaaacattttaactttggcaggatctcaacaaacagatagtgacaagtggcagtctggattgtcaataaataatgttttcaaaatgagtagtgtacagaagatgatgcaagctggcaaaaaattcaaagactctctgttggaacctgctcttgcatcagtggtaatccataaggaggccactgtctttgatcttcctaaatttagtgtttgtggtagttctcaagagagtgactcattacctaactcagctcatgatcgagaccggacccaagacttcccggagagcaatcgtttgaaactccttcagaatgcccagccacctatggtgactaacactgctaggacttgtcctacattctcagcacctgtaggtgagtcagctactgcaaaattccatgtcacaccattgtttggaaatgtcaaaaaggaaaatcacagctctgcaaaagaaaacataggacttaatgtgttcttatctaaccagtcttgttttcctgctgcctgtgaaaatccacagaggaagtctttttatggttctggcaccattgatgcactttccaatccaatactgaataaggcttgtagtaaaacagaagataatggcccaaaggaggatagcagcctgcctacatttaaaactgcaaaagaacaattatgggtagatcagcaaaaaaagtaccaccaacctcagcgtgcatcagggtcttcatatggtggtgtaaaaaagtctctaggagctagtagatcccgagggatacttggaaagtttgttcctcctatacccaagcaagatgggggagagcagaatggaggaatgcaatgtaagccttatggggcaggacctacagaaccagcacatccagttgatgagcgtctgaagaacttggagccaaagatgattgaacttattatgaatgagattatggatcatggacctccagtaaattgggaagatattgcaggagtagaatttgctaaagccaccataaaggaaatagttgtgtggcccatgttgaggccagacatctttactggtttaaggggaccccctaaaggaattttgctctttggtcctcctgggactggtaaaactctaattggcaagtgcattgctagtcagtctggggcaacattctttagcatctctgcttcatccttaacttctaaatgggtaggtgagggggagaaaatggtccgtgcattgtttgctgttgcaaggtgtcagcaaccagctgtgatatttattgacgaaattgattccttgttatctcaacggggagatggtgagcatgaatcttctagaaggataaaaacagaatttttagttcaattagatggagcaacaacatcttctgaagatcgtatcctagtggtgggagcaacaaatcggccacaagaaattgatgaggctgcccggagaagattggtgaaaaggctttatattcccctcccagaagcttcagccaggaaacagatagtaattaatctaatgtccaaagagcagtgttgcctcagtgaagaagaaattgaacagattgtacagcagtctgatgcgttttcaggagcagacatgacacagctttgcagggaggcttctcttggtcctattcgcagtttacaaactgctgacattgctaccataacaccggatcaagttcgacccatagcttacattgattttgaaaatgcttttagaactgtgcgacctagtgtttctccaaaagatttagagctttatgaaaactggaacaaaacttttggttgtggaaagtaagtgggatacttggaatcaaggcatctctgtattacagtcttctttattttttagcatagaaagttggggatgtgttaattgtatttttaagaatatattctaaattctgtacttcaaataatagcacagattttacatctgattgacatagtgtatgttaatgtaagttttgctttccagtgattacctgatacgtaagcctatttgaacaaagtgagaatgaacttttgtttctaagaagtctttatcttgaagctatataacatgaaaagtgagctcaaattttttttagttgaagattacatataaagttgtgtctgattaatattcatcttttattgaagaaagtgccttctgatggccacataattcttaatgtcagctagtataatggtttacatttggacaaagtattgcttagtgttatttaagtagatttaagatctcaaagctaaagtgccaatttttactttcttcagccaatttgttacctcttttatggtttttaatttttatcaggactaacattttcagaaatagcaaggtgtgatctagtattagattcacagaactgaaaggttaattaagaatgttggttattttcacgggagcgtgtgatatttaacattaatattttatttgacactacagcctgtaatactgctctctttcaaaagcaagttttcagatttttataacagacccattttgttttatgaaacatgttcattacagaaacatgagaaaatagagataagtaaaaagaataaaagtcactattatcctaccactttgcgggacacactattaatatttaagcatagattcttccagatgttttgttttatacagcagtaggattgtgtaatgtattctctcttgtagcctattcttcaaagcgtatcttcactttccatgttaacataaatgtccttttatgattgtctaggattccatggatggatggaatataattgagtcatctggtagagcgcatataggacaggacgctaggttgtttatcttttgtttattgtaaaggaactatgtgggatgcatttggtgatctttttaaaaaatgtataaatttcttgagtaattcctggattaaagaatatgcactttttaaagcaaaaaaat

SEQ ID NO: 115880 - DNA, 170 bp, Homo sapiens
ggcctcaataatttggtagttttctacagttgcacagatttggccaacagagggcggcagagtccagtaccttgagagcacaaatgctgtgtaacctgtgtgacttccgtgcttagctggtgtgggtggtggagaccttagtgaactggagaggagatctcagatcttga

SEQ ID NO: 115881 - DNA, 302 bp, Homo sapiens
ttcttcacaagtgtttgaatttgcattctttgattgccaatcatgcttctatatatttgactattgtttgaatttctccttgtgcaaattgtccttgtgggccatgaatgaaaatagtttcaaggagagtcataatgaaaagctgatctctcaagaatcacccaaggtgtacatacacaaacatacacacataagctcattttccccctacattacaaaatctaccagggcaaggtctagctaccatactaatgccattagagaagaggctgattatgagggttcacctttcaaatggatat

SEQ ID NO: 115882 - DNA, 816 bp, Homo sapiens
ggcctcccaaagtgctaggattacaggcgtgagccaccgcacccagcctggaatcagttttaacagtgtataatctcattggcactccttggactgaagccacttagcattaaaatgtaccttgatctcctggtgacctccagtgacccacattgatgactctgatgggttatcattagttctccccaggaaatttgaatcatcaggatgtttctttggttacataatatatttaacccaggtactggctattatgaaatcaagaagcatatcttcccagaagtgtccttgtgtgtgttcatttgtggaagttggaggaatcaaatctctccctctctttagaggtgtgttttggaatgccctaagcaggctgctgtgacatcagcccttgaatttactctggttctcatcaggaacattaggaataattcctcatcttccatggaagaaggtggaacatgaagcaagcctgaaaacaaaagctttacattggctatgtgtgaaccacctttgctgttttataagttttgctagggggcctgggatagtagtgacacctgaccccttactgaacattttcatcgatgctctttggctctgtggttttatactgcccctttcagttgatgaaaaagacctagcttagctttaggtttctcaaatagaggaccacatctatattaaggaaccaatgtaactacataaagaactgtaagttcatgttcctcagaatcttatgtgtgtaaatactttatgatttttaattccttcttatattatcctcattattgttaacaggatttaatgtggcatgct

SEQ ID NO: 115883 - DNA, 337 bp, Homo sapiens
ttataatacaaattacaggagggtaattatctatttgggctgactgttcctcagctttctcatgtgaggccgatggcctcctggtgaaaatgagtgaggttcctggcagtattctggaaccagtcaacacaaagggtctgaggagtgggttgaagcccatggtctcagccaagatggatctcagagcttgtggatgtggggagagaaagctgccctccagccgcagcttctccaatagtcttctgtcatcacccagcactgctgcgaggatccacaaatcccatcacttatgtgagataacaacatggcagaagacagaaaatgaatctaagacatc

SEQ ID NO: 115884 - DNA, 255 bp, Homo sapiens
tcactccatctccttttccagggatatttgcatctttagtagtagtcttcattggtggtccttcagtggagtgtcacaaagagaagggaaaacactcaggtactatgaggggaaaggttggggactgttgagagatcacaaggacacctctcactcctacccccaaagctaccttaacctattcctgtcaagacagaaggttggccgggtgcagtggctcacacctgtaatcccggcactttgggaggccaaggc

SEQ ID NO: 115885 - DNA, 433 bp, Homo sapiens
cccagctaatttttgtacttttagtagagatggggtttcaccatgttggtcaggctggtctcaaactcctgacctcaggtgatctgtccacctcagcctccgaaagtgctgggattacaggtgtgagccaccacgcccggctgaaaacgtttttgaagctgctgtaagtctttgggctaattgttcttagatttgttatagttattatacagcatttatgtacttgtactgtggtgatcactgctaaaagatgatccagagagagaattatacattgtgcatattttgagatttgcacttacatttttatgattaaacatttgcccttttagccaagcgtggtggcacaatagtcctagctgctctggaaggctgaagcaggaggattgtttgagcccaggagttcaagaccagtctgggcaacatagcaaga

SEQ ID NO: 115886 - DNA, 138 bp, Homo sapiens
tcctgagtcatcgtggggtagcagtgagtgtggacccctcacgcgctctggctcagggcctgctctccagcctccctattctctcaaccctgtctttcagactcagctcattcctggtcttctccttgcccttgtctt

SEQ ID NO: 115887 - DNA, 431 bp, Homo sapiens
actttgtatcctagcccagagctgcatctaccaagataaaaagttgcatctttctaattaccacaaaggcaccatgtgggctaaccacagccttgagatgaacttgattgtgaacttattgcatataaattgtgtgtggtataaccaaaatagaaatgtctattaaagtgttagatgaacaggtcttgagccctagcgaaagatctgggctagagatacagatgttgaagtcatctccttgttgaaaccatgagtagatgacatcttctgggaaaatcatgaaaagagaatagggttggtgttcaagtgataaaacacagtgcagttcacatcttcacttgttattttatggacatttgctggaaacaaagcaccttagtcaacacaactgtttgaattatctcattggactgataggatgattcatgatt

SEQ ID NO: 115888 - DNA, 320 bp, Homo sapiens
ctaaaatacattaaaaagcaaaggaactagaatatcctaagcaatttgaaaacaatgtagttggaggaatcacactaccagatattaagacacataagtacagtaatcgggactgtgatattggtactgattgtgtggttttggtagtgatagacacatagctcagtgatagacgcagaatagagtacagaaatagacctacacaagtatgaaaaactaacgtctgacaaaggtacataagcaattcaatagatgaattgtgttagaaaaattgaatttcgaacaaagggtgttggaacaattgaatagtcatagctaag

SEQ ID NO: 115889 - DNA, 405 bp, Homo sapiens
gaagaccagtgctgctcaccgtgaggccgccacgtcactaaaaaacccgtgccggcgtggccaggtctgcacgcaccggacacctgcaggaggcgctgcgcatggcggataatttccccagtgcaccctggagtggaacgtggcgtgagagcggcgttggggctgcccaaagcaggtgaagcctcacacaagcgtggggggctccgcggggacctggaaggaacccaccagatgacgtcagcgggacccaacagtccaaccacctacaacacagggctgggctctgccaaggaaagcaggcggcaagagctggtctgctgctgagagtgggcccgggcccagggagagccagcggtgccctccctccgtggcgtctgcacctgagtcccagttcccgcagggccc

SEQ ID NO: 115890 - DNA, 1287 bp, Homo sapiens
atgtctggagacactttcgattgtcacaacttgtggttgtgtggggatgttttggtgtgattactggcatctggtgaatagaagtcaaggatgctgctaaccatcatacagtgcacaggtcagtcccccacaagtaagaattgcctaatcctaaatgtcaattgcatcatggttacaaaatcctggattaaacacaaggacatacatgaagtttttaaaatagtatataacacatagtaagcacttagtgggtgctaaccatgatcatcattcattatgaagtttagttgcattggtaactaatcctcaaatagcattttcgaatggttactcttgataaagaaactatacttacttattaaatcggaatgtccccaccaagacttcaacactattcgctctgctataatcccctctctccatccatactcatttctaaaaacaaaaacaaaaacaaaaaaaaaacaagctctttagtctagacacatggttgttgctatctctagtgctatacttttaatatttaacttctggatcagcctcctactagcttatccacattgcttcccttctttgaggtcctactcaaggcttatctccaaataacccttcctaactcacctagctttagcattccgtcattacaccactcttccgactcccccattgtcaggcattcactgaaactagtacccaaatgatgtaatttctctttcatgtaggtttgctttatctcaaaaataagaaatgtctttcattaatgctgtgcccacatttagaaatcagtccaaattgctactcagccagtcattgaacttttgttattgccacttggtaccaaaataaaatttaaaaacgttttccaccaagtggtttcagacctgggttccgcagattataagaaatggaagcagtagcatacatttcaatatatgtaatagatgttgtaaattatttcatccataagactcttcataaatacatgtaatgaagcttttaaccaaaccatggcatgtcttacccttatttcctgcaactacatcaattagcgtgtggtgctaaagcataataaaccacgacaaaagtaatccttattaaaacacaattcttttactctgggtaccaggccaacaattcaagaggtcaattaagattcttcctaaagagattctttaacttgggagtttacgaagccagtaaaatcatttgtacagaatgctgagaccacatgctagaatgagaaatagatcttggttattttacacagctgtatccaaaaaaaaaaaa

SEQ ID NO: 115891 - DNA, 232 bp, Homo sapiens
ggctggaaggttggttaatttggtgcatgatgactctcaaaagtaacagggacctgtaatcccagcactttgggaggccgaggccggcagatcacgaggtcaggagatcgagaccatcctggctaacacggtgaaaccccgtctctactaaaactacaaaaaaaaaattagccgggcgtggtggagggcgctactcgggaggctgaggcaggagaatcgcttgaacccggga

SEQ ID NO: 115892 - DNA, 655 bp, Homo sapiens
tcccagctacttggaaggctgaggcaggagaatcgcttgaactcgggaggcggaggctgcagtgagccgagatcgcgccgctgcactccagcctgagcaacaagagcgaaactccgtctcaaaaaaaacacaaataattaaattaaaaaaataataataatctcccagccgggcgtggtggctggcgcctgtgatcccagcactttgggaggctgaggcaggcacattgcttgagctcaggaggttacagtgagccaagatcacgccactgcactccagcctaggcaacaaagtgaaaccctgtctcaaaacataattatcatctcccttgcatgggggcaggccttgctctggctgccctagtcaggtaccacggctggttctggggtgtaactgcctggctttgagtccacagcatagactttcctgtctccttgggagcactgattcttccatggcagcccaatgccatggggcctcggtctcaggccagtaaccagctcctgagcttctcgggagacagagctggctgtctcacacctcacctcacctcacgacgaggtggggtgagcggggcatccgaccatcatccacccatccatcctgatttattcagtgcttctgtggtcagcacaacatcccgaaaatgtgcccg

SEQ ID NO: 115893 - DNA, 325 bp, Homo sapiens
tgaattttttgtagagacaggttcttgctacattgcccaggctgatcttgaactcgttgcttcaagcaatcctcttgcctcaacttcccaaagtgctgggattacaaacgtgagtcaccacttggagccccactgagttcttgattttgaaatctgtggtaatgtaatctgcatcttgataccgaagttttcctcatataaaacctaatttcagctatttaggaggctgaggcaagaggatcacttgagcccaggagtttgagtccaacctgaacaacatagcaagaccccaactctaaaaaacccccaaacctgtaaataaaac

SEQ ID NO: 115894 - DNA, 592 bp, Homo sapiens
cgttccagcctgggtaacagaatgagaccctgtctcaaaaaaaagcaataaaggtaatattacaactgataccacagaaatacaaagtttatcagagaccactatgaacatctctatacaattctgattttttattatgtatatgtgacttgttttttcctttctgaaaataataggttattctttgattccagtgttctgaaatttcatagtgatgtatcttcaaatgggtctgttttctatccattttgccggatattcaacaagccccttcaacttactaacatgtattttttagtttagggagacattctcgtatttttaacttgattttctccgcttctttatttgtttctctttctggagctcttaatgtttggatgttagaccttttaaatgaatctttttcttttctttcctattttgcatctgtcttctttctctgctttttgggggagtttcccaatttccagcctgtcttttgactttttaaaatttctactagcatttgtaattcccttccataagctcctttttattctctgaattttttattaacatcatgtttttgttcatgagctccatatctact

SEQ ID NO: 115895 - DNA, 331 bp, Homo sapiens
tccgtgtatgttgctaaacttctttttggtggagttatgttttctgtctctaccatcttgtgtgataatgagctacaaaaccagggatactgaggagagcagagtgccttaggagggcctagagttgataagcggttggggcagatgtaatctgtacagccagagaccttcatagcccatggaaggagccagtactgaacacttactgtgcttccttgattccagaatgattctgttgtaaggtggatttaagaacatgttttaggacaaaaaggaaacatttctacattaaatgtagaaccattgaattatgaaaacaatgtatgttaga

SEQ ID NO: 115896 - DNA, 254 bp, Homo sapiens
tggaagacatctgttgagaggaaagtgctcttctgtgggtctggcagcttttctgtaagtcttctattctgatgcaggagcgtgtgagcagtgggtgggaggagatgctttggtacttggaatgctgaggtccggattaagtggtattgtaatagctagttagaggcagaataaaaagctgggaatcaaagcatttaaaaatgcatccttccattatttgctctcaagttaaaccatattcattctaggggaaa

SEQ ID NO: 115897 - DNA, 598 bp, Homo sapiens
cccttatcttatcatgttgaaaggttgtacaaatctgccgcttccggagaataaagaattaacttccagcatgctggagcttagccatctagtaatagtatcacagctgatgaagatcagggtagacaaggagatgcaatggcagatcctcttccaggaagaacctgctgtctggctacaggacagcgatcgacatacagcctccagctatcggcatgttcagggtcagcctctgctgcagacagctatctcaccgaggtcacagccttcctggagccacctgcatatggtgactgagtgaggcaggggtacaaaggcccagacttttggccaacacaggacaaggcaggtaaccctgctgcagagatcccctgggttgaccgaggcgttgccagccctgcactgtaggctgccatctcccccagcagtcctgcttcctcccactttctttcacagggggtgatccctaataaatatattgcagcccaattccaactcaacctctgcttcctgagaacctaatcctctgccttgtactacagctgagacatacagattccgggttctctgtgcccaggtttgaattccagtcccagca

SEQ ID NO: 115898 - DNA, 150 bp, Homo sapiens
tcaagaaaaagccacgtacaaatatggaaaaagattaggagataacaggaaaagaacagtagttagggtcacagaattatgaacagactgctaggaaatttcctcctataacatttttaaattggtttaatgaaaactttcaatgagtca

SEQ ID NO: 115899 - DNA, 672 bp, Homo sapiens
cagaaaaggaaagatgtccttgaagtcaagagaaaccacatgagcaaaggtctagagattggaaggcgcatggcacactggagggtaggggagtctgcaaagaccagtttagctagagcacaggagaagatgcagatacagttggatttgtaggatgggaccagatggtagagaccttgaaagccgagcttagatatttgaacttagccctacagacaatatatagactatggagattttcaaaacaagacctatgtgttaagacgtcacttttgatcactatgatgctcatatttagacttttacagtaaaatacttcttcattttctctcacttatctttaagccaaccaaacgcaccagtcaccttcctcctcatgaaacactcttccctgatcaatggtgtgctgtgataaatagaatcatgtattcatatgaaaggatagacaaccaagaatatttaaggattgccaaaggactccctaccaaaaaaagctctcataccagcctaccagaatatgtctgaatttcccacccactggcaattcctttgagtgaaagtccccagtggtttgttatgatacaggtgatctccggaaaggcacacagtgagcatcactggctgatagcagccgtgtgtttctcagattagtacccccagaccctaaaagaa

SEQ ID NO: 115900 - DNA, 840 bp, Homo sapiens
gtattgaaacaggaattaaaagaaattaaagaatgtgtaagcagaaactcagttgtatgtaagaaaacccaattctccctgaaaaagagaaagagctggagtcctttaaaatactaactgcctgtttttctgtggctaatgagccttacctctcctcccttctcaggcattttgaagaccctgattccctagcagtgtagctgcaaggtcactagaaagataaactcaagtcgcaaaacatgtttttccttgaaaaggaagaaatgatgtaatacatgtttcaattgaataactgtctttgtttctcacttctgtagtatgcttcaccctgcacagatgtcccctctcccaccccacaaaatgcttaaaaggtaactgaactctgttctgggctcagtcctttggatgttaattcgacttggccggtgcacctaaataataaatatcctcctgaacctaaataataaatatcctcctgaacagagtcggtctctctgattccttaaaaaatcccagaacagtatggcacttaaatgtgcaatggtatttattttaaatatcagtctgttgttaataaattgaataactaataagacaagcatcacttttaaaactgtattaccttatttgttgaatttagatggtaattttcaaactaggcaagataaaattttttacttgaaaagttttgaaaaaaacttctttggcatgaatattcaatacaaactgtagtctttatttgccaacatgcctttataatagagaacatccagcaatatgaagctaaacccagcccatgctttttagggctcactcacaatggcagcttcctagagggtg

SEQ ID NO: 115901 - DNA, 346 bp, Homo sapiens
gggtcacacctgaagctcatgttcttcctgatgagtacagtactggggcttacccaaggcccatggccactacttcctggctgctgctgatgtttattcaaggttcaaggtcaccttactcagcaggtggccaatcctgctgggactgggtccatcccatcagggcagcagattctcatctagcctagatgggtctagaaatgccattgggaagcaaaggcctggaatcaggggcttcagaaatctgcctggtactttattttacagtggctgaactggtatccagcttgccagaccaagtcctctgtaatattccttctcccttcctcaagcagaagtctttccc

SEQ ID NO: 115902 - DNA, 817 bp, Homo sapiens
gatgaagctttctctaaacttcggtattgtagttctccaaactgtttgtcttcttgctcatgctctcaagtttttaattctaactgtttctagtagattgtaaacgcctttggaatagtgtcagtatgtaatactttgttggttatccaaacaatacaggacagtcagagttgattagttgatgtgaaatagatatgtgtcccaattttgtgggtttctttttcttttcttttcttttctttttttttttttttaagacagagtcttactctgttgcccaggctgaaattcgcaccactgtgcactccagccgtgggggacagagcaaggactcgtgtctcaaaaaaaaacaaaaaaagtgtgatttcgtaaaccttgaaacaatatgtcaatgtgattggcacaggataatgtggccatttccctttgtgccgtggagtgcctttttccctccaattgtgccagttaacgcttctcaagggccacgcctttctcgtgaaattaaccattagttaccattggcaaccttgggggtccgcgggctcctctttctcccccgcgagtcttcccctctctcattcttctcgcgtcaccatctccctgtgtgcccttggtgttcacactctctttgtccattaacctggtgaaatactcctaagagcgctccatctaaagggggaccagcgcgggtcccccccactattcgtcatatccttccacaatttctccctatattttccacgaggttctcttatagacaaccctccgcggggcaatctgtttaacggcacctctttgtgtgcgcaccacatcgcgc

SEQ ID NO: 115903 - DNA, 270 bp, Homo sapiens
acactaagttaattttgcgaggaatatcttaccaagattcctagtttctttcactttttttttgagacggagtctcgctgtcgcccaagctggagtgcagtggcgcaatctcggctcactgcaacctccgcctcccgggttcaagcggttctcctgcctcagcctcctgaatagctgggactacaggcaagcgccaccatgcccagctaatttttgtatttttagtagagatggggtttcaccatgttggccaggatggtctcgatctca

SEQ ID NO: 115904 - DNA, 602 bp, Homo sapiens
agagccaaagggactctactgtgtagccccaatcaccttcttttacagttaagagcctggaacccagagaggttgagtgacttggccaagaccccctggaggcagaggagagcagaaccaatgtttcagactcccacatgacttgcgcatcagtgtcttttttttgacaatctgttgctataagaaattactcgtttggataattttcacactagaaaaccctgtgacccaaggctagcattgagaagctaaagctggccactgacatactgtgattttaaggacagtctccttcgaaattatctgcctttcaaaatctttgccattggagacactggttggggttatgttagtcttccttaaggagggctctactaaaatgccagactaggccgggcatggtggctcatgcctgtaatcccagcactttgggagtccaaggctggtctcgaactcctgacctcagatgatcccccagcctcggccttccaaagtgttgggattataggcgtgagccactgcgcctggcctgtttttgttttttttttgaaatggagtcttgctctgcactccagcctggtgagagagcgagactcagtctc

SEQ ID NO: 115905 - DNA, 327 bp, Homo sapiens
tggaagacccaaagctgctcgtgtgtgtgcgtctgtatgtgtgtgtggttaacaccataaaagtctagctttctaagttaacagctgattgggatagtgaaattatctttgctgaaatcatagttgaggtaataggtcaatgtatcaatccttacctataattaacggaggctttctagagagaacgtcttaacccaaaagagtgactctaggccaggtgcaatggctcacacccgcaatcccagcactttgggaggccaaggcaggagcgttgcttgaggccaggagttcaagactggcctgggctacagagtgagaccctgcctc

SEQ ID NO: 115906 - DNA, 588 bp, Homo sapiens
gaagcacaacctagaggtggtgaaacatcctgcaaaagtacaaggaggccaatgcctttccagaagcttggcagtggtgcacttcaggggaatgactagccacaggacacaggaggctgtataaaggtatctggaaagttgtttttcaaaaaggaatctatgggacgataaatgaaaagataactgatccaaatggaaagtgagctggcaatagtacaaacatgaataaaaggaaactcatgaaagatgaggaataggtgcaatgaaacctaaatgtaaagtcaccaaaattaaaatatgttatcagcaaagagcagagagtccatgctgcagaaaattgaatgtgtgagggcaaacttgagacatacttccagaatttgatgaattggggcaaggaggtaaaaaggattaaagaagaagagataacagatacagaggtgagaaaacagataacaaacacttcagaggaagataaatgaagacgtggggtggcatcactgatcctttataattgagacatgtttcaagagaatagaatgttcatattcaaaatcaattaaaggaactaaaccacacacacaagagaaa

SEQ ID NO: 115907 - DNA, 428 bp, Homo sapiens
cccccatcacacccagctatttttttttttttttttttttcagatatagtcttgccgtgttgcccagactggagtgcagtggtatgatctcggctcactgcaccctcctcctcctgggttccagcagttctcctgcctcagcctcctgagtagctgggattacagttgtgtgccaccacgcctgactaattttttttgtatttttagtagagacggggtttcaccacgttggccaggctggtcttgaactcctgacctcaattaatccacccaccttggcctcccaaaatgctgggattacaggtgtgagccactgtgcctggccttgttaacaatttttaagtggtacgtgaaatacctcaacattccctatgacagcatatggaaaaaagcgctgggctagtggcagattctgaccttaggttttc

SEQ ID NO: 115908 - DNA, 438 bp, Homo sapiens
gcaatgcattttttagaactctttcatggtaacttttacttatccatgcaggtcctaccttaataacattttctcaaggaggcatccatttgtaggtggttagatctgtgctggacatcttgtactttcatgtgaaattcttgccattgctgaatggattagatgagcataattatttactttaatatttctctctggctggagctttttcgtggagggattatgtttgtttattgttatatgcataatacgtggccttagtaggcatgtagttacctgtcaaatgaaaaggatatttgagggctttatttgctcagtattgaccaagctcaaagtctacattgatgaataacattttttgatcataaataagaatgagagattttgaaatatattttatttaaggaaattatactttaagagactggctctcactgt

SEQ ID NO: 115909 - DNA, 374 bp, Homo sapiens
ctcctggctctagggatcctcctgcctcagcctcctgaatagctgggactacaggcatgtgccagcacacccagttaatttttgtatttttggtagagacgaggtttcaccatgctgcccaggctggtctcgaactccggagctcaagcaatcgcacctgcctccatcttccaaagtgttgagatcacaggcactggccaccgtgcctggcctgtttttgtttgtttgtctaagacagggtcctgctctattgccaggctggggtgcagtggcatgatcacagctcactctagtgtcaatctgggctcaagcgatcctcccacctaagcctctcgagtagcttaaactacaggtgtgcaccactacatccagct

SEQ ID NO: 115910 - DNA, 337 bp, Homo sapiens
tgtaatgtatttgaaaatatgtgttcactgacaaatacactgaactttttcccctgaattattgtataatattcagtaatcgtttatgaaatgtgtaacatttttcaaggggatttacatatcaacttttcctagtggaatcaacaacagtagcatgaaatgtatctactccatttactcttatccagtgctcctactttctttttccctttaatttttatatatggtaaaaatttcattgaagagagattttagatgacaggactgtaattttaaacccaatagaagaggtgtaagcaatttgagcttagctgaagcataatcttaggttgtcaag

SEQ ID NO: 115911 - DNA, 368 bp, Homo sapiens
agtttgctagggttgttgtaacaaagtaccacaaacttgcttaaacagaaatccactctctcgcagttctggagagcagaaatctgaggtgaaggtgtggggcagggttggttccttctggaagccaaagccacgaggcaggatctgtcccacgcctctctgctaactgctggcagtggctgctcatctttggtgttccctgttttgtagaagcttcaccctgtccctacctgcgttgtcacgaggcgttcctcctgtatctgtcttcacatgaccgtcctcttataaagacatctgtcacattagattaggggcccactccactccagtatgaccctatcttaactgattacaactgcaatggccct

SEQ ID NO: 115912 - DNA, 388 bp, Homo sapiens
accctgggtgcatgcatgtgacaaaaaaatgacttgcaaacaaattggcaatagcccaccaccatttgctgaaaaggaggtgacacagggttggtgtgtcctcaggcccagcctcaggacaaggctgtgtctccagttcctacaccaccgagggttggagtgggtgaggtgcctgcaatgggtgtaccccagaattaccagctgggccttctggggtggtcatgggcttagagcatgacttaagcccttcttgacaggacgaaaaagaggcccagagaaggaagacatgtccccagggccacacaacagaattcatcactggcttcacacacgatgggcctctggtgtcacctccatatcgtatactcagagtgtgtacacacacacc

SEQ ID NO: 115913 - DNA, 1063 bp, Homo sapiens
caaaactgtctgtgtagaatcaaactagatgacagagatgattttgataaatgaaaacacaccaaatatgtcttcatctgcatgaaagtgaacccctgcaatgcagagcctgcacccgggaagcagtaattctttgagtttttgctaaggagggctctgtacagaataatgtggcaactagaacaggttaccaaagcaccaagcttgcagtggcacttcacagacgcttgctgaatgaacataaacaagtgaatgtgacacttgaaaggcagctctacatcagaaagttaagagttgtgggttctagttccaagcatgtcacaaaagaactgggcaaggaaatattaccgtccctttctggacttctaggtccttatctgtaaaacaaagtgcctgagctaagtggcttctggtatccctccaaactcacaatgttttgattctctgatgtgcattaagagttattttcccatgacattgtagaatcaaagatgacatcatttcaatttaatgagagagtcagtagatctcccttaattatcaaaagaatttagcaatcttgaaaaacaaaacaaaacaaaacaaaaacacacaaaaaaacacaaccttgctgtgtttcctgcttgcgctctgtctcaaaatgtgtagagctgaacagaactactttggcatcttcaggccaaaagccactcaaaatagcctttggctggctgatatttttcagtcataagtaagattttttgacccctgatatgaacataactcaagtgtgggctgatgactagcagtgcagcgggagggtggaggatattgcgcttcaagaaattctgggggcatttcatttcagatgctctcaaagcaccctcaattataattttttttcttagtttgctgttttgcaaagactgttacttacctcgggtttcaaccaggttagggcaattttaaatgagtatttgttgcttcaataacacatttacagcttcagaaagcaagcagtgttttgcttcataggacctgatagccatgcatcttgagagtgaggaaaagttacttgccaaca

SEQ ID NO: 115914 - DNA, 704 bp, Homo sapiens
tgtgtcttccacatttctacagtgagtgtgtcttactttgagaatctgcttcacaaaaacagaaccaaaaccaaacaaaataaccactacaatggtttgttaaaagattctaggtctagagtaggaaatgaaatggtagtattttcccttgtaatgtaattttgatattggcttattctctatgttaatagtcccagaacaccttgaatgaacgggtggctgggtccttagtacattgacaaaaatacatactgttaatttctctcagccttccctaaagagatctacagtctttcaccagtgtaagtgtgcatttggggaaaaggaaataatactatctttcagggacactggctctgagctggcactaattccaggagacgcaaaacattactataggccactagtcaaagtggaggcttgtaatggtcaggaaatcagtggagttttagctcaggttcatcttacattgagccctgtgtgttcctgaaatcatccagtggtcatttccccagttcctgaatgcatatttagagtaggcacactcagcatctggcagaatccatacattgctatcctgaactgtggagtggggtaatgttatggtgggaaagggcaagtggaagctaatagaacagattcctcacaggaagatagtatactaaaaacaatactgcatctctggagatattttgaaggaatca

SEQ ID NO: 115915 - DNA, 416 bp, Homo sapiens
aaagtccatatgttgacgtccttgccccaaggcgatggttttagagaggtggggcctttgggagatgaggtcatgagggctgcttccctcatgagcgggattaatgccctcagaaaagtggctggctgggcacagtggctcacatctgtgatctcagcactttgggaggctgaggagggaggattgcttgagtccaggagtttgagaccagcctaagcaacatggcaaaaccctgactctacaaaaactacaaaaacttagccggttgtggtagcatgtgtctgtagtcccagctacttgggaggctgaggtaggaggattgcttgagcccagaaagttgaggctgcagtgagctgagatcacaccactccactccagcctgggcgacagattgagaacctgtctcaaagaaaaaa

SEQ ID NO: 115916 - DNA, 378 bp, Homo sapiens
gaatgttctggagtacaagaggatgacatatgaaacaacccttctctctgcccattctcacctgaactttccttaacttttccccatccggtcacccaacaaaagggtggaattgccaactgctttgtgacactgggcaagcaaataggcaggatggcagaagtgaaggtgacttgagaggacagtttcaacaaggcgacgtctgccgttgtatcttggtacttgggatggatgacgattttggacacgtagtacttcacacgtttccttgagtcacctactgtaatcgatcctagccacacagtatatgaaaaagtagtccaggtcctatggggaaaagaaaggaggcctgcttatggcctgcagctgggtcagaac

SEQ ID NO: 115917 - DNA, 402 bp, Homo sapiens
ttgtccgagctgggaagaggcagagtccagattcgatcccaggcccctaattcttagccactcctatgtgctatcctcagagggctcctggttgctttcagagctgtaaacaagggaggcaggggggtccttaaacccagggaaggcgcctaacctgcttaggtgggatgggaagttgtcagggaaggcttcctggaggaggtggctgttaacctggattttgacaggttataagaaatagaaaatggctttgtgtagtttcttcattccacaaacattgagcaaggtctctaggctatggaaacccagagatgtgtcagacccactcccggcccttgctctcagcagtggtgaaatggaattaattacagagactcctgtagctgcagtgtaaggattgtt

SEQ ID NO: 115918 - DNA, 723 bp, Homo sapiens
atgccaaagagaagccatcagtccttcctttaagtgaaaatttgaaagctcttggcttaataaggagaggaaaaaagtcatatactgaggttgctaagatctacggtaagaacaaatcttctatccaggtaattgtgaaggaggaaaaagaaattcgtgctagtgttggtgttgcaactcaaactgtaaaagttacagctacagtgcaagatgggtgtttcgttaagacggaaaagacattaaatgggtgggtggaagacatgaatagaaaacatgttttgataaccaccagttgcaccagaaagcactgagcatctgcgaagacttcagcaagcaagaaatgagttgacaccacgccgcaaagggctggttacactgattcagaaatacagaaggtcagtagcagcctatggctacatcacaatgcttacatcattcacctcttgtcatctcatcacagaggcatcacagcatctcccatgacaagaaaggaatgtggatacggagagacttggcaaccaccggcaggcacagcagcaccagctaaattgcagctcaccaacaggcagcagttacatccctagttgtgctggtgtgggtctggagccaatgagtaagccaagagcagaccctcacaccctgcaccctgccccacaaggagctacccaagagtccacaatcatggccacaccttcctgctcacagcaccaattgtttataaga

SEQ ID NO: 115919 - DNA, 351 bp, Homo sapiens
ccacagaggagctccagagagcagcctgcttgaggctggtcgcggaagactgacggtggggctagtgaggctgctgtattttggctgccgccgccgctgctgccactgggcagataccgcagtgaggggtctgaccgcgctgagtgctctcgggaatctgggctctggctaggaatgagaagttaagagagggagggctgagaggtgggcaggactcaccaaggagctgcaaacccaaacgagaaatctagggagcaaaaggagaggaaagagtgagcttgagccaagacatcatgccaagtggaactggaggaaatgtcatcattggtaaaggaggactcggagaagaaa

SEQ ID NO: 115920 - DNA, 178 bp, Homo sapiens
atcgtgagactatttaaggaatcttaattgctgtcgagagcctgatgtcctctacccgagggggtcactcaggttgtcttttgaatggatttgtacggtggggaatttcagaagctgaggaagtagagagaaaaatagtaatgggagagacagcctcagcttctgttgggagtaggat

SEQ ID NO: 115921 - DNA, 793 bp, Homo sapiens
gactgttctcacccacatagttacagacactatgaaatagaagagcagtctggagtcattgcaaagcaaaatacctaccatcagttctctcttcctatttcttttttttttctttggagacagagtcttgctctgtcaccaggctcgagtgcagtggcgcgatttcggctcagtgcaacctctgcctcccgtgttcaaggattctcctgcctcagcctcctgagtagctggggctacaggagcgtgccacaacgcccagctgatttttgtatttttagtagagacggggtttcaccatgttgaccaggatggtcccgatctctttacctcgtgatctgctcgccttggcctcccaaagtgctgggattacaggtgtgagccaccgtgcccggccctctcttcccatttctactccagcttcccatcttagtaaaaaaaatctgtgagcaacaccctgtagcgggaaaaggtaacctgtcttgatgggagtccataggaggctgcaggctgcttccctacagagactgatatcaaggtagctgcagaatttagattctaatcctagtgtgattggaggtggggtagattccagggaggtcagaaagtgatcaaatacaaaattgtgctcctttggaggaggtcataggaactttgaattatgacaatggctagtaattgggtagaattggagcaggctggtgatggcagttttgtgtgggtggtaggacctaggaatcaaacttgagggcaaattgtggagcacatatgacaaacgatgtagagcctttcctat

SEQ ID NO: 115922 - DNA, 295 bp, Homo sapiens
ccactattctgttttcttttttaaatttttatgatttttttttccctttaagctctgttggactcaatcctttctatctctgtgggctttgctgtacatttgggttacttccactttttgactgttatgaataatgctgctatagaacattcacatgcaagcatttgtgtgaacatgttttcagttctcttggatgtgtacctgggagtagaattgctggatcatatggtaactctgtttaaccttttaaggaactgtcagactgttttccaaaatggctgccccattttacgtt

SEQ ID NO: 115923 - DNA, 427 bp, Homo sapiens
gctctaactggtgaccctcaccttaggagggagggatatagtttgaaatgctgtctccacctgccccaccttccgatgactccttaagggagtcatgtgatattctaccctcatttccatttgagaatctaaaccagtggttttcagccttaattatacattgtaataacctggaattcgaaaaaacagcattaggacctagaacatagggcccaatcccagaaggtcccgatttaattgatctaagtcatcaggactttttaaaagctccccagataagagaatttagaaacaggcccacacatatggtcatctgatatgtgacaaaggtgacactgcagtgtcctgtcttgtcttttctcttttcttttgagacagggtctcactttgtcacccaggttggaatgcagtggcacaatcttggctc

SEQ ID NO: 115924 - DNA, 125 bp, Homo sapiens
atctttctttcaaaaaaagttatgaaaagatgcttttgcattgcaccctatctgctggagcttccaattagaattgagccagtggcattttccggtggtaccggtgcccttttcccttctcagtt

SEQ ID NO: 115925 - DNA, 359 bp, Homo sapiens
tccttctaccctgggtcctccttctcccagcaataaagaattaggtcattcaaagcatctcctctccctaagagtgtggatctcacccaccacatgctgtccttgatctggggcctgacaaagattctctccatgaccacacgttaggctcttctgagatttttttcaactaggggtcaacttttgagcttctgtgtttgtctctgtccaattgtagcacgaatccagtttagacagaatcctccatcctcaatatctgatcacccttgatatctgattgggttcctcatctgtcttacgctgttcctgctgctatagcaaaataccttagaatgggtaatttatgtactgctcactat

SEQ ID NO: 115926 - DNA, 478 bp, Homo sapiens
cctcggctgccaggcagggaagggccccctgtccagtggacacgtgacccacgtgaccttacctatcactggagatgactcacactctttaccctgccccttttgctttgtatccaataaataacagcacagccagacattcggggccactactggtctccgtgcattggtggcagtggtcccccgggcccagctgtcttttatctctttgtcttgcgtctttatttctacactctctcatcgccgcacacagggagagacccaccgaccctgtggggctggtccctacaccctggaagaagggcagatgaactcagagacagcgcacagggtcacataaaatgagccatcccaaaacaagcccgtctctttcctaacagttataatgttgttaggacggggaaatgtgcagagaggagcagagccagcatcttcctgattttacaggcaaggaaactgaggctcagccagtaaatgg

SEQ ID NO: 115927 - DNA, 328 bp, Homo sapiens
ctggctctgaacttaggcctggctctgaacttaggcagagatgagagaaacaccctaggaacagccgagcagcatgacagcgggagactggacgctgaccccgaggagccaccacaccaaccacagctgctcgtgcccagacaactgcatgtgacagaaggaaacacatgttggtgatttgggtttctgtgaccacaaatgaacctaagtcctaactgatatatcagctgccaactagacatctccgtttgttcatctcaagcactctcagttcagtttgtcccccagctcatcttcccccattgcctcccctaaattccctgccccc

SEQ ID NO: 115928 - DNA, 1827 bp, Homo sapiens
cactcagccaactgctcgctcactcacctccctcctcggcaccatgagcacctgcagccgccagttcacctcctccagctccatgaagggctcctgcggcatcgggggcggcatcgggggcggctccagccacatctcctccgtcctggccggagggtcgtgccgcgcccccagcacctacaggggtggcctgtctgtctcctcctcctgcttctcctctgggggagcctacaggctggggggcggctatggcggtggcttcagcagcagcagcagcttcggtagtggctttggaggaggatatggtggtggccttggtgctggcttcggtggtggcttgggtggtggctttgctggtggtgatggccttctggtgggcagtgagaaggtgaccatgcagaacctcaacgacagcctggtctcctacctggacaaggtgcgtgccctggaggaggccaacgctgacctggaggtgaagatccatgactggtaccagtggcagcggcctgctgagatcaaagactacagtccctacttcaagaccatcgaggatctgaggaacaagatcctcacagccacagtggacaatgccaatgtccttctgcagattgacaacgcccgtctggccgcagatgacttccgcaccaagcgagtttgcagtggtatgagacagagttgaacctgcgcatgagtgtgggggccgacatcaatggcatgcgccaggtgctggggtgctggacgaactgaccctggccagagctgacctggagatgcagattgagagcctgaaggaggagctggcctaactgaagaagaaccatgaggaggagatgaatgccctgagaggccaggtgggtggagatgtcaatgtggagatggacgatgcacctggtgtggacctgagccacattctgaacgagatgcgtgaccagtacgagaagatggcagagaagaaccacaaggacgcagaggaacggttcttcactaagacagagaagctgaaccacgaggtggccaccaacagcgagctggtgcagagcggcaagagcgagatttcggagctctggcacaccatgcagaacctggagattgagctgcagtcccagctcagcatgttaggaatggtgccaggcccggtggtgcacccagaactggcagggagagaatggccacactcactaatccttgattccctttccctccctcacagaaagcatccctggagaacagcctggaggagaccaaaggccgctactgtgtgcagctggcccaaatccaggagatgattggcagtgtggaggagcagctggcccagctctgctgcgagatggagcagcagaaccaggagtacaagatcctgctggacgtgaagatgcggctggaacaggagatcgccacctaccgctgcctgctggagggcgaggatgcccaatgagtcttggccctccccttaatccgccccaccatggcactctcacggccccaccatgtatctaatgaccctgcccttttctgtcttcacagcctctcctcctcccagttctcctctggatcgcagtcatccagagaccgtgacctcctccagccgccaaatccacaccaagatcatggatgtgcacgatggcaaggtggtgtccacccacgagcaggtccttcgcaccaagaactgaggctgcccagccccgctcaggcccaggaggccccctgtgtggacacggatcccactagaagatcccctctcctgccgcctaagcacttcacacctggaccctgcttcaccctcaccccctcctggcaatcaatacagcttcattatctgagttgcat

SEQ ID NO: 115929 - DNA, 1855 bp, Homo sapiens
cactcagccaactgctcgctcactcacctccctcctcggcaccatgagcacctgcagccgccagttcacctcctccagctccatgaagggctcctgcggcatcgggggcggcatcgggggcggctccagccacatctcctccgtcctggccggagggtcgtgccgcgcccccagcacctacaggggtggcctgtctgtctcctcctcctgcttctcctctgggggagcctacaggctggggggcggctatggcggtggcttcagcagcagcagcagcttcggtagtggctttggaggaggatatggtggtggccttggtgctggcttcggtggtggcttgggtggtggctttgctggtggtgatggccttctggtgggcagtgagaaggtgaccatgcagaacctcaacgacagcctggtctcctacctggacaaggtgcgtgccctggaggaggccaacgctgacctggaggtgaagatccatgactggtaccagtggcagcggcctgctgagatcaaagactacagtccctacttcaagaccatcgaggatctgaggaacaagatcctcacagccacagtggacaatgccaatgtccttctgcagattgacaacgcccgtctggccgcagatgacttccgcaccaagcgagtttgcagtggtgggccagaacatccagtgtccccaaagtatgagacagagttgaacctgcgcatgagtgtgggggccgacatcaatggcatgcgccaggtgctggggtgctggacgaactgaccctggccagagctgacctggagatgcagattgagagcctgaaggaggagctggcctaactgaagaagaaccatgaggaggagatgaatgccctgagaggccaggtgggtggagatgtcaatgtggagatggacgatgcacctggtgtggacctgagccacattctgaacgagatgcgtgaccagtacgagaagatggcagagaagaaccacaaggacgcagaggaacggttcttcactaagacagagaagctgaaccacgaggtggccaccaacagcgagctggtgcagagcggcaagagcgagatttcggagctctggcacaccatgcagaacctggagattgagctgcagtcccagctcagcatgttaggaatggtgccaggcccggtggtgcacccagaactggcagggagagaatggccacactcactaatccttgattccctttccctccctcacagaaagcatccctggagaacagcctggaggagaccaaaggccgctactgtgtgcagctggcccaaatccaggagatgattggcagtgtggaggagcagctggcccagctctgctgcgagatggagcagcagaaccaggagtacaagatcctgctggacgtgaagatgcggctggaacaggagatcgccacctaccgctgcctgctggagggcgaggatgcccaatgagtcttggccctccccttaatccgccccaccatggcactctcacggccccaccatgtatctaatgaccctgcccttttctgtcttcacagcctctcctcctcccagttctcctctggatcgcagtcatccagagaccgtgacctcctccagccgccaaatccacaccaagatcatggatgtgcacgatggcaaggtggtgtccacccacgagcaggtccttcgcaccaagaactgaggctgcccagccccgctcaggcccaggaggccccctgtgtggacacggatcccactagaagatcccctctcctgccgcctaagcacttcacacctggaccctgcttcaccctcaccccctcctggcaatcaatacagcttcattatctgagttgcat

SEQ ID NO: 115930 - DNA, 532 bp, Homo sapiens
agcgtctggcttgagctcttgtgcgctgtggaccggccgacgctatgtgagtcgtcatcgcatgtgtggacgtgaagatgcggctggaacaggagatcgccacctaccgctgcctgctggagggcgaggatgcccaatgagtcttggccctccccttaatccgccccaccatggcactctcacggccccaccatgtatctaatgaccctgcccttttctgtcttcacagcctctcctcctcccagttctcctctggatcgcagtcatccagagaccgtgacctcctccagccgccaaatccacaccaagatcatggatgtgcacgatggcaaggtggtgtccacccacgagcaggtccttcgcaccaagaactgaggctgcccagccccgctcaggcccaggaggccccctgtgtggacacggatcccactagaagatcccctctcctgccgcctaagcacttcacacctggaccctgcttcaccctcaccccctcctggcaatcaatacagcttcattatctgagttgcat

SEQ ID NO: 115931 - DNA, 1731 bp, Homo sapiens
cactcagccaactgctcgctcactcacctccctcctcggcaccatgagcacctgcagccgccagttcacctcctccagctccatgaagggctcctgcggcatcgggggcggcatcgggggcggctccagccacatctcctccgtcctggccggagggtcgtgccgcgcccccagcacctacaggggtggcctgtctgtctcctcctcctgcttctcctctgggggagcctacaggctggggggcggctatggcggtggcttcagcagcagcagcagcttcggtagtggctttggaggaggatatggtggtggccttggtgctggcttcggtggtggcttgggtggtggctttgctggtggtgatggccttctggtgggcagtgagaaggtgaccatgcagaacctcaacgacagcctggtctcctacctggacaaggtgcgtgccctggaggaggccaacgctgacctggaggtgaagatccatgactggtaccagtggcagcggcctgctgagatcaaagactacagtccctacttcaagaccatcgaggatctgaggaacaagatcctcacagccacagtggacaatgccaatgtccttctgcagattgacaacgcccgtctggccgcagatgacttccgcaccaagcgagtttgcagtggtatgagacagagttgaacctgcgcatgagtgtgggggccgacatcaatggcatgcgccaggtgctggggtgctggacgaactgaccctggccagagctgacctggagatgcagattgagagcctgaaggaggagctggcctaactgaagaagaaccatgaggaggagatgaatgccctgagaggccaggtgggtggagatgtcaatgtggagatggacgatgcacctggtgtggacctgagccacattctgaacgagatgcgtgaccagtacgagaagatggcagagaagaaccacaaggacgcagaggaacggttcttcactaagacagagaagctgaaccacgaggtggccaccaacagcgagctggtgcagagcggcaagagcgagatttcggagctctggcacaccatgcagaacctggagattgagctgcagtcccagctcagcataaagcatccctggagaacagcctggaggagaccaaaggccgctactgtgtgcagctggcccaaatccaggagatgattggcagtgtggaggagcagctggcccagctctgctgcgagatggagcagcagaaccaggagtacaagatcctgctggacgtgaagatgcggctggaacaggagatcgccacctaccgctgcctgctggagggcgaggatgcccaatgagtcttggccctccccttaatccgccccaccatggcactctcacggccccaccatgtatctaatgaccctgcccttttctgtcttcacagcctctcctcctcccagttctcctctggatcgcagtcatccagagaccgtgacctcctccagccgccaaatccacaccaagatcatggatgtgcacgatggcaaggtggtgtccacccacgagcaggtccttcgcaccaagaactgaggctgcccagccccgctcaggcccaggaggccccctgtgtggacacggatcccactagaagatcccctctcctgccgcctaagcacttcacacctggaccctgcttcaccctcaccccctcctggcaatcaatacagcttcattatctgagttgcat

SEQ ID NO: 115932 - DNA, 224 bp, Homo sapiens
acctcaacgacagcctggtctcctacctggacaaggtgcgtgccctggaggaggccaacgctgacctggaggtgaagatccatgactggtaccagtggcagcggcctgctgagatcaaagactacagtccctacttcaagaccatcgaggatctgaggaacaaggtgggtgaatgggcagcagaaggtgccattccagctagctccttctgggaacaatagatg

SEQ ID NO: 115933 - DNA, 300 bp, Homo sapiens
gggacagtaggtatcttttgggttaataaacggacctgagaaattcttttccatttaaaaaaatgcagattgattttgtgccgagcagaccctgttttaaaaaatacatacgtgggaatttttttggtttattacatgtggaagaaatataaactactatcttttttgtcttcttgctgacagcatggctttggggaataaatatttgaaaataatcctaatacctttgttagttatagtctgtcattctaaataatgtatttcatccctttagcaaacttgaaacacaggcaagtgtaa

SEQ ID NO: 115934 - DNA, 317 bp, Homo sapiens
actcaaattcagacatcaaataccaattattatgtcacttcataagtgaagactcaagtcacatcagttacctcttcccttatctgtatttttacgagcactttgctcacacttccatgacagcaagaatcctatgacattataaataattttatatatttcttatttagatttaactttctggaatctatttttgtatcccagggatttgacacacagtgttcattaaaagcttgcgctcaatgtatatgagtgactaatctttgatttactaaatatggtcagctagaacagaattttccttttggttttcttga

SEQ ID NO: 115935 - DNA, 385 bp, Homo sapiens
cttcttgggttttgggactacaggcatgtaccacgacacccagctaatttttgtattttttgtagagatgggggtttgctttgttgcctaggctggtcacgaagctgttgtagttatcttagtgaaagatgatgagaacctaaaataagacaatgacaataggaataaagaggaaggtctggatagaagaaatagtaaagagaatcttgatgggagcaaagtagttgagacttagcaactgaatatggagggaggatagaaaagaggaaggacccttatgatgagtctttgtttcatattttgggtaatggggtagttgatggggaatataaaaaagaagaggaagattaagggaatgattataaattaaattaaggttgtatta

SEQ ID NO: 115936 - DNA, 686 bp, Homo sapiens
gggaaaaagagaaggaggaacagattggagctgcagaggataagcgaggacagagggacagagatgaggctggagttacagggacaggtggacaggcagaaagacagcaaagggagggacagacagacaggaacagaaggacatggaggctgagggagaggggagaaagagcaagatagacagggagacacagagaaagagaataagagagaccaaggggataatgcaggtttatcaacagagacagggacggagaggagcagatggagaatgaaagagtggtattcaggaaagtaggcagaaatgccacagcctaaggcccacaggaaaagaaactgaggtacagagaagccagacaaagaccaatggtgtgtagagagatggtgagtgctgggtttgttggctcacgcctgcaatcccagcactttgggaggccgaggtgggaggattgcttgaggccaggagtttgaggccagcctgggcaacatagagcgactccatctctacgaaaataaaaaaattagctgggcatcgtggtatgtgcctgtaaagtctcagctactggggaggctgaggagggaggatcccttgagcacaggaggtcaaggctgcagtgagctgtgatcatgccactgcactccagcctgggcgacagagtgagaccctgtctcaaccaaaaaaaaaaa

SEQ ID NO: 115937 - DNA, 371 bp, Homo sapiens
caattagctattatggaattttgagaaatacatgacaagagagaagccctcataatttcactgcctatgtgcaacctctgttagcaatttgctgttttgaaaaggagtagcacttctatataggggctgtaagagtcagacccatttcaagaaacggggttttattgagccaggaccagcccagcacagtggctcacacctataatcccagacctttgggagaccaaggcacgaggattgtttgagcccagaagttcaagaccagcctgggcaatatagagagatcccatctcttaaaaaaaaatgttttaaaaattagccagacatggtggcacacaagtagtctcagctacttgggaggctgaggcagg

SEQ ID NO: 115938 - DNA, 273 bp, Homo sapiens
ccatctgtacgatggagggtgtggacgaatcctctggctctaagtcctttggctgaagtgatagctgttagaaggggagattttatgatgctgtgatacgtaaggccaagatcttgggagggtctgattctatagacgccaagatgccctgaaccttcagaccacattctctgcagtggcccagtgacattcattcagcagttgccgatcgcatgtggtactcctctaggctctggggatacagcagggaacacagataaattccttttctca

SEQ ID NO: 115939 - DNA, 583 bp, Homo sapiens
agagaaaaatccaactaacaaaattattaggaccaacatcactaagaatgctggttgatatcttatgcatgctctttgattatagatatagttttggttaataaatatataaaatgggtagctatgctcaaaagcaacaccttcattttggtgctagttgtcttctaaacaaactaatattattcgagctaaagagaaaaaaaaaaacaaaaacaggaaacatgaaaagcagtggcattaaaccagctcactttgagttttctggacattccattttgcatacatctctctttccattttcatttatataggagttatgccaaaaacactagtttaccaaatgatgtgatctatttctttctcatcacaaaaccatctaaacattcatttcagtaaaatatctctcaggcatttaacttaagtgttaaactggtactttctcagagttcaatttgaggtggataagaccatagtaattcaatacagcaagtgtcactgtaagggaagccctcaggtggtctccctaattatttcatactaattagctcagatagtaaaaggttctgttttattaccttgatgc

SEQ ID NO: 115940 - DNA, 1547 bp, Homo sapiens
acttttctcagtgtcattcctagttctgatattttacttcagttcttttgatcacatcccatcatctccctgaaatatctctatgacaatttcttaagtgaagaatgcaaaatctactctttctcaccacgtgggacatgagtctccaaaatctacttcttccctggccagatccttatgagctatatggttcttcttcctctaaatattaatgtaaaaagatgcttactttggcaaatttgtatctctgtaatatactaagtacaaggaaggcatcaactacacattaattatgattgacacctcgtaaaatggtctgatcctctcaaaatgatcacaggggaaatgggatgtctgcaggcagtgagggacgtacctctcaactctgcctacagttgttgctgattagatcaaagctgggtcaattagagttcctgtccagggaatttggaattgggatgggaagcggcagaaccttctccttttattttactggaaagtgaggctaggaaaagaaaggaacttgcccaaggtcctacagtagggagtggcagaacttcctctctagctgcctcaatcacagcatttacctcattgtgctgtggtctgtcatggtttaaccattcactagtgtatgttaaccctaacctgatagcaaggctatcaggttatgtatgtgtatgtaggattgacatacactagttagactaagaaaagaaaggagcttgcccaagttcctttctgggagcagaaagttgagaaattgagagagaacttgagagagttctgagggctctgggcatagccagtcaacttgaaaagagtaggaagtcaccttctgccattctgtgaatcaacctgcagagtgtgtctaaaaaatgaagaagtagactgagagaaaagcagaaacaagagaaaatgagagcagattgtctgaattcttgttggttttccagttcacagttctcattcttctggaatccttgctggctctttgtcttgaagccctggtgaagactccttctttatgtgtattaggattatccaaccaatgtatttggcccattgttttgctgaagccaccttgagttgatttctgttccttgcaaccacaagaatcctaacttacgagtagcaaaactatgattagagttataaacaatccttacatgcgtttaacactgtgcacatttacaaactgcttagtattattaatgtctgctacaagcaagcactacagtaatgctgttgaagcagtcatccaacaactaataattgggtagcagctggaggttaaaaagcaagccaggaagagggagtggatttactgaaatgaaaactaatgtgaaaagtcatcaaatcacttcagataattccatttacaagagtccatcatggtcaaatggttgtagatcagtaagacagtaagaggaaattctttctattaggaaagaataaaaccgtgaaacagatggattgctgttttaaagattaaaattacaagagcacacacaactggctatgcttaggtggttcagaaaaaaaaa

SEQ ID NO: 115941 - DNA, 312 bp, Homo sapiens
ctcagagacacagtccctctgacagcacctggtccacccctctactctggcagcccggtggtgattattttgtttttcctccaccacataacctgctggaaggcagggactccacttcagaaatcttggaaaaccctgtggcccacaagggtttgagctcatattcccatctggtgaggtgcagaaggcacagagctgtgccaggacatctcgttccaacccagccccactcctaatagtaataaaagtagctacatgtttactgtgcagctacttggtgccagacacctaccttatccctatcaataatct

SEQ ID NO: 115942 - DNA, 490 bp, Homo sapiens
ctaaaccaccaagtctcagggctcttttcagtattttcccactcaaagtagactttattccttccaggtatgatacctatacggtgttgcctttgatgggccagtaccttgactctgctgtacactacttccagtgcaaaattccccagttctctctgctagtgtgggctctggatccagctctgttggcttaaggtattcatgcagtcataatgcctcctagacttggctaggaatgggtgtttgctgaattttttctctcattgtgattttgtagtactttttgaggatgtaaagggattaaaatatagatagccacttttatcccacagagatgtgggagccctacactcaattataacaaaactgttttgtggttaatttcagaattccattaaaatagtttttgtttctgacctcagtaaactataatatatgactcataccaaagatatttattaattgaggtttgaaaaaatattttaaatat

SEQ ID NO: 115943 - DNA, 149 bp, Homo sapiens
ttatttacctgtgggtggcctctccgtggcaaaagctctttgctctgaatttcgaagaccacaaagactcacttgggtgtgtgcatcagtctaggccacagagggctcactgggtgttgatggcctagtttcaccttccccagctcctg

SEQ ID NO: 115944 - DNA, 130 bp, Homo sapiens
agaaataataataatgaattggctcccccagcattctgccatggtagctgatgcatttagatgcaggtgtgtgtgtgtgtgtgtgtgtgtgtgtgtgtgtgtgtgtgtgtgatgtttaatgtgtttcaat

SEQ ID NO: 115945 - DNA, 304 bp, Homo sapiens
agggcagcttattaattgaggccacctgaagaagtttttcccattgaagttttggcaagcctgtttgttactctttgtgctggcctatcagacacttcctgtctatataaccttagggatgcctttagcaggtcattcatccctgggtgacagagtgagaccccatctcaaaacaaaagcaagcaaacaaatcccaaacccaaattctatttggcccttcacagtaccatgtggttgactcctgtcagtttcctcagcctcaaattaacccagtagctgccctggcctccttgctgtaccttga

SEQ ID NO: 115946 - DNA, 598 bp, Homo sapiens
gggagatcgtgcgaactccaaatgacagtggccctggccaggaattgatattttttctcatcaatgttgtaacaagacaatgttattcaaggacctgctgtatatatctattattttcaaagacgtattttatatatatgcatttttccctgtaatcctgaagagaattcagaggtatagttacatggctagtaaccaacagacccaactttgaacctatttctgactccaaagccatgttctttctattacatgggaactcataaaccaggagagacagagccaaaattaccttaaataagaagcccatagtgaaaaatgttaagctagagttgtagtctctaaactttttttgattgtatacctctcttggtaaaatactcttgtgcaactcccactataggaatatttgtttttttatatatttatgttatatacttgtattattgtgctaacattatattataaaacacatataacatttacattaaatttatatgtgaatgcaatttacatataaatttcttactatactcccccaaatcatcttgcacatatctttgaaaacccctgaactagagaatagaggaaggaagct

SEQ ID NO: 115947 - DNA, 189 bp, Homo sapiens
agcaccggcccgaattaagagaaagaggaaggctaaacaggatttgtgttgtattgccaagggtttgggctctaatttttgtctttcttttctttctttctttctttctttctttctttctttctttctttctttctttctttcttccttccttttccttccttctttccttctttctttcttttcttt

SEQ ID NO: 115948 - DNA, 371 bp, Homo sapiens
ggaagctctgcttgttcacaggtacagagcttttgcagaaccgactctgtacctggcagccttgaaggggcttggattcaaagcatattcttgagccacgccatctttaatcaaactgcaggtggaatttgtagctgttagaatagctcctattcctttcatttctttttctgtttttttactcttccatctcagcctaaaaagaaaaacacgttaatttgagccataggaatttagaatttgttttttcttttgcttagatatgtttgactaaagcttcctttttcacaggtttattttttccaacattttattatgaaaaaaatatatacagaaaagttgaaagaattttacagcgcgcacccacatat

SEQ ID NO: 115949 - DNA, 307 bp, Homo sapiens
gggcacacaggcatgcatgcttcgaaagccccaaattcttcctcctcctcctcttcttcatctccttctcccaacaaacacagatgtttttcaggcatgtggagagccaggaagctcagacttggtgcccatccacgtcatcagacaagtcacccctttcctggccctcaattacccataggtcaaatagggacaagaactgccatcccagcaaccacatcagaacttcccatgctcttctagaagcttctgagctttcacagatgccattccctgcacccccacccctttgccctccttccccagg

SEQ ID NO: 115950 - DNA, 650 bp, Homo sapiens
gtccctgcttcgtttttagacacagcctatcagtcagctaatttggctatgcatataaatactttagtataaaatgctgccccctgctacctgcaggctgacatgttgctcatcaaaggcaggatccttctaatgagggattagttggatgcctaaatgtgggaccacctactctgttcattgtcttaattagctagatgtttgttggagcgcatgcaaattattttctgtaagcagacagatttattatcatatttacggagtgacatccagggtttgtgagacatccattaaatttttttttttttttaatgtttgagatggggtctcactgtgttgctcaggtgttggtctcaaactcctgggttcaagtgatcctcccaccttagcctcccaaagtactgagattactggtgtgagccactgtgcccagatgctattagcaagtatgaacaaattagatattttcagtctactcttctgtggtaatgatgataaaacttcttaactttcagtcctaaaccagcagtggctaaaacttgatttttaaaatttttttcagagtttggtccagatgaagtttctttcaccttgcgaacctttagaacgctgggctgcatcatgtgtgttgtaactttaaagttagaata

SEQ ID NO: 115951 - DNA, 289 bp, Homo sapiens
cacttcgaatgttaaccagtagtagcagtcatatttttgtggattacctgggaaccaaaccatcatcattgatataatttctattaccagttttaaacagttaaatgacaaagaatcccattttaatcaagacattacagtagagcacagacccaacctggttgggtacttagtagggagaaatagaggctagaaattaataattatgcccaataccagtgaacagctgttttcgcactgtgaccagtttagtacaaataaaaatgtttatagactgcatcttttctcc

SEQ ID NO: 115952 - DNA, 834 bp, Homo sapiens
gaatttactgggaccactggtattttcatactcccatttaaagaggtagcaaagtagggaataaaggaacagaagtccagaaataaactggtttaggaaacgtacaaaaaggagatttcaattatgtgccaattttgtggttacttgcttacacatttctaactagttgagttccttcctagcttcaggcagattagtctggaaatgaaatttgcccctgtttatatgtacctgtcttttatttgcctctgtcttttttattgcaactcaatagacacacaccattgctttgtctctgattatttggcatttgaatcgtcaatgagggaagcttttacagaacttttgatactaataaaaggtgagtcaaatgttttaaaaaagatgcagaatcatcatttatgtcagagctactgactcacacttaaattgcagtgttagcactgaaaaagaaatgtatatggatgggaatatagattgcaggccaattaggacccctcttttgaagttggaattaagggatagctactgttctcttctatctttgagggttaggagaactttattcagtgttgaataactgtattcctcctgtttattaatgtttgttgtgggggtcttctattcagcacccatctctgcctgtcctgctcccccgcccccagaggaggatataataagaggcatgggacaggggcttataataataagacatgggaggggttgattacccagtgtcttcaagtaacttttacgagagatttgaaatagccagcgatcaatgcaaaatagcaatggccttggcagaatttgcacatacatactcaatgttta

SEQ ID NO: 115953 - DNA, 420 bp, Homo sapiens
acgcagggcaacacacaaagagaagctgtaatagcagagccattcactcaatcattcatttcactcattcatttaatgcctaacatatgaagggtactttgtggagctttgagagacacaaaaatgactaagacaggacccctgccctcaaagagcccagctgttccaaatattctcattttggtatgctccaatttttaatgtaattttaattattgttgtcacaccttagctaatattttcatactcaacatgtacttccagaaattgcagcaactataccatctataaaagagggtaatcttggcagggagcggcggctcacacctgcaatcccagcactttgggaggctgagatgggtggatcacgaggtcaggagatcgagaccatcctgcccaacatggtgaaactccgtctct

SEQ ID NO: 115954 - DNA, 215 bp, Homo sapiens
tgagattacatactcatttaagaagaagtgccttaggagagggcactggtgcatcgtaggcacttaatagcagtgttagcctttgttattattattgtcagtgggcctataactgacttcacgggtgcatttattgttggctgagccagaggtgagctgtgcaggatagttggtgagagcatgtcaaatggaaggcgggaaatgactgagtggaa

SEQ ID NO: 115955 - DNA, 555 bp, Homo sapiens
ccatagcctcatatgttctaatttttagtagcctctggaataaaccagagtacttacactgttaaaaaataagaccttttctgtaacaaatttattgttataaattttacagttctattatttatcatcagtcagtttcaaaccattgggacttaggaacacagaataaataaataacactaatcagaactattaatataatcaaaatgtacttagataattgtttgctttatgtctggctcacgtgatggagataaccttcttgagagcaggactgtgtctgtcctattcatcccatatccccagtgcctacacaagtgcctgccacataaatcattcatatttgttgaagaaataaaattgaccaaaacagctaatttgcaccaagacattccagataaattctttccacaacaacaaactcatactagggttgagtggaagcaaacatggctgtaacaagtctattcacttaacttttttgagcctcagtttccttttatataaaataaggatgataacacttacctagtagagttagcagatgcttaaatg

SEQ ID NO: 115956 - DNA, 177 bp, Homo sapiens
actacccctctacccaccagtcaacaacttccacatctgaaatctcagcacccatctccggactctcttgacctcaggcacatattccaatctgtctcagaacacctctatgtctcacaggcacctcatacaaaacatatcactctaacctccccagaccgcctcttcctttattcc

SEQ ID NO: 115957 - DNA, 365 bp, Homo sapiens
gctgaggcactctacaggatctcgatcacgtgctcttgtggaggggtactcagggcaacagggacgtccatgcaagtttgcctggccaaggcgtgactcagctacccgcccccttcttctgctgagaccatttgatttcgccagtgcttagggacaatgatgtcacaacacccccttggcctggctcacagcatcttctgcttatctggtggcctttgctttttctcgttagcccacgacagttcaaacagtggcccctggcagcaatgccatggtaagcacggtcacagatgcaggccccaaaaccgcatggcaggtctcagtgacgaggcagtggcccagatctgcaggaattggcaggtggt

SEQ ID NO: 115958 - DNA, 340 bp, Homo sapiens
tttttttttgagacagggtcttgatatgttgcccaggttggtctcaaactcgtgggctcaagcgattcacccaccttagactcacgaggtggtgggattacaggtatgagccactgctctctcttggcctgagagagcatttttcattcctgaaatgaacgtgacagcagcttccctgggacactgtttcctttgctagtggtctggttgatgtaatgtgaccacctgattttgatttggcacatgtccccactcttgcctctagggcctcccctggtcatggaggaaagaacatcttcctggatagaggagtgttgttctcttaaaattttgtattatg

SEQ ID NO: 115959 - DNA, 622 bp, Homo sapiens
caaatattggctgggtatctactatatgcacttcattgaactagatgtggggaaaggatacaaaaaataagatatagttctttttgtgctccggaatcttatgatttaaaacatatccccaaataggcataatgtaatttgagcaccttaagtagtatgaaagtactatagataattactagcaccttaagtagtatgaaaatgctatagataattactatgaaaatataggcgaggccaaaattacttctatgtgaaaaaagtctatcaaaaataaatcttcatggagatgctagaaatctgattaatcttgaagactaagtaagattcacacagcatataatgggaggttggcatttgcactgaccaggtaaaaatacttatagaaaaaccatagaactgagattacagatgttttatgcagtgattagccgttttatgcagtgggtaagagctaatcttctgggagtagactgcctgtgttcaaattccagctcccctgctccctagttgagtaacttgactagttacttacacatttcagttccctaacctgtaaaatggagaaaatactacttgtacctcatgaagattccgtgagaacaaaataagaaaagctcat

SEQ ID NO: 115960 - DNA, 256 bp, Homo sapiens
ccaagtcctggcccctggctctgtctggatcctgatggaaggcacgcttcagccagcctgccctgacacagagtttgcaagcacagctcattctctgtttggtctagttccctaaatgaggtgtaggtcaagtgcacacaacaggctttgaccaggtgtgttcccacgacattaaggcttctcttcctggggctggaagtggcttggagaatgaggcctgaagccttcttatacctgcccagccctgtccctcctt

SEQ ID NO: 115961 - DNA, 550 bp, Homo sapiens
tttcctcctcatcttcgtccttgtcctcctcatacttctcatcctcatctttgtcctcatcatcctcctgtcctctgcctcctcctcctctttgcgtttctggtctttgtagtctatttttttttcctcttattttcaatctggtatttgggctctgattttgagaaggtttcctccattttattttccagtcttccttgggagttttcatttctactctcatattttaatttccatgagctcttttttatgctcggaaggttccttttaaagcaaggtagtaccgtgttcttgtgtccggaccatatagcttctctgaagggtctcttcttcatgcatactccttgtttcctccaagccctcccttcaccacgtgttggttggagtctctatttgctcggtgagaggctttcctcggatatcgggaatcttggtgttctgctcatatttagggtggggagcccaaagatgtgactagagtgtggtttgtggactgtgagttgacagtacgtatgtgttcctatctttaaaatttatttattatgaagag

SEQ ID NO: 115962 - DNA, 427 bp, Homo sapiens
tagaattgctttcttccttccccacctctttttctctattccaaatctaatagagctttctcctcaaacttcctctaatcacaagggggagtaataactagatgctaggtgtacttaacattgtgaactaaagatttacagtggataggtttgtaaagctataaactctagattcccataaaaggcaagctatgagcttacctcctccccctttctttcttcgtctcttgccatccctactctaccctctcctctctttcccccttttccttttccttttttttttcccaaattttaattttttctgtgggccaaaaatattttgcaaaaataaaagcaacaatgaatatcctagttcaaaccttaaacatttgaaaatccaaggaaagaaaatccttaggcataactgaaaattgttgatcgctac

SEQ ID NO: 115963 - DNA, 321 bp, Homo sapiens
ataaaagaaagaaaatatcagatttcacccatgtaaccaagagtcacaatctatatttgcaggctgtgcttcagttaatagcagccacacaatacttgcaatttaaagactttttgccaaaaatgaatcccaacttgcattagcaattttccattacttacaaactgtgggcttttctcttgtgactccattttactgcacatgggttttccagggctccagaggtaacaagggggtatggcaccgtgaggtatagtgcaagctaaaatgacagttaagtcattttaaaaatatttgtatgtagttgatcatttataaggt

SEQ ID NO: 115964 - DNA, 610 bp, Homo sapiens
tggagccactaggatctcgttcaaggctggtccacctcacacgaatcctaccccatgggcgctgggaagacagggttttgaacatgttgcagactggtctcaaactcccaaactcctgagctcaagcaatcccagctcaagcttggtggctctaaacagttctgttcaagggagctcttctcagccaggccttcatctttcttccatgttggatgcttcctgaccttgaaaattggactccaagttctttagcttttggactgggacttacaccagtggtttgccaggagctctcgccgtcggccacaaactgaaggctgcactgttggcttccctacttttgaggttttgggactcggactggcttcctcgctcctcagcttgcaaacagccggttgtacgactttactttgtgattgtgtgagtcaatagtccttaataaactccctttcctatatacatctatcctattagtctgtccctctagagaaccctgactgatacagaaagggtgaggggtggtatggagcctgaactcaggcctccctggctccaaagctctccactgctctgccctccccacctctctctgggtttaagctcctggagg

SEQ ID NO: 115965 - DNA, 694 bp, Homo sapiens
gcagttcctgggaccaagtgttcgccgccttttggcagcggtacccgaatccctattagtctcttaggggcaagcttctgagggtcaccttcaccctgacacctgtggcaaacgtatcttgacggaagacatagtacaccgggaggtgacccctgaccagaaactgctgtcccggcgactcatgaccaagaccgacaggatgccccgctgggccgagcgactgtttcctgccaatgtggctcactcggtgtacatacatattggaggactctgttgtggacccacagaatcagaccatgaccaccttcacctggaacatcaaccacgcccggccgatggtggtggaggaacgatgtgtttactgtgtgaactctgacaacagtggctggaccgaaatccgccgggaagcgtgggtctcctctagcttatgcggtgtctccagagctgtctgggaatttggtcttgcccagttcaaaagcaacgtgaccaagactttgaagggttttgaatatatcttggcgaagctgcaaggcgaggctgcttccaaaacacttattaagacagccagggaagccaaggagaaggcaaaggagacggccctggcagctacagagaaggccaaggacctcgccagcaaggcggccaccaagaagcagcagcagtagcagcagtttgtgtagccagcccatcacca

SEQ ID NO: 115966 - DNA, 846 bp, Homo sapiens
tgcctagctttgcccaggcagcttcagaggacagttggatatttgtaatattggaggcacggtcaagaggaacatgggctattttaggctaaagtcattttacctttaaaattcaagtagaggcaataaataagatttgtgtggtagggagaagagtgtatttcttattggtggtacaccctgtttgctgaagtctagcaaaactagttgattattcaactcatccctgaactttctatagataaaatcaagatggacaagattaaagagagaaaaaggactcaatggagttgtgaaggaagaagctgttggactttgagatgggcatttgtggagcctctgtagaggctgataatctctcccatcacccaaaccagctctttttcccagttactccatatctgtcagtgcttgcacctgtcccctaggtgagaaatttgagatgattctttatcgatttccgctatcatcttaaatatgaaataaatcaaggcctataattctgttccatttgtaatgtctctcaaattttccttcatctccacttctactgctgtcatcctttcccagtcttcagcatacgtcagcaattctggagtagcttcagactgcacgttctccttctccaatttctcccctactgtttccagcttactgtttcccaaatgccacttaactgtttctctcagagaacctgaagctactgcaaataaccacagactatgagccttttcaaaactggggctttatcatactcacttttgtagctccagtgtttaggaaagtggctgacacctaacccaattttagccttgcaacaactccatgaagtttttgaatgggaaa

SEQ ID NO: 115967 - DNA, 179 bp, Homo sapiens
gccaccacattgtctccagggtacccactaccctgattgctaacagcacacattagttttaccagtctttcaaatctttataaatgaaatgttcagctgggtatggtggcccatgcctttaatcccagcactttgggaggcccaggtgggaagatcacttgatgctaggcatttgagac

SEQ ID NO: 115968 - DNA, 444 bp, Homo sapiens
tcagcaccattgtggtatggggtgccgagctcgtagtgcgccagtcgtggtcgtggcgtgttgtggtggggggtacaggaggaggagatccctgagatgggtctggacagattgcccaggtaaggatgctcctcatcccagctcctccctgctccatgggggcctcgacactggggtagggggagcttcctgcctcctggcctgtctcccactagactggggacagtcatgatgatgaggataacgacagtcaccatgcattggggattctattatggatcaaacgcttgttagtatatttaattgtcacgaccaccgtgttttatagaagaggaaaccgaggcccacagagtttcagaagctcggccgaagtcatacagctcatagacgacagacccagtcctcaaaccctgatagattctgactccagagcacctactctca

SEQ ID NO: 115969 - DNA, 363 bp, Homo sapiens
agacattgcaggcacttatgtattcatgtgtgctcatccagggagtacagacttcaacatcaagacctagttggaatcctagctcagggagatcttgagcagatgactgagtcttttagggcccatttgtaaagttgagggataagcttaaattttctgggatgttacacatattcaaatgggcaatctagtcatccttgaaggcatctggcacaaaactctctgcacaagattctttccctagtatagctggagctaaaaatatacttattaatacatatttgattacattttaaattcttaattaaatacttaatatttgattacatatttattaataaatggattttgttccttcttctt

SEQ ID NO: 115970 - DNA, 467 bp, Homo sapiens
tctccctcatttccccccaaaaaagtacctaagagcccgtctaagacccttttttttggtcttgacttgaggtgagattttcttcaagacttctctgtagaagaaaatgaagagacttgcagaacctgaataaaatgtctgaatttctgtcttgttgattatagagttccccgaggctgggtgtggtggcccactcctggaatcccagcactttggggaggctgaggcaggaggatccctttagtccaggagtttgagaccagcctgggcaacatagtgagacctggtctctacaaaaactaaattagttgactgtggtagtgcatgcctgtggtcccagctactcagaaagctgagatgggaggatgtcttgagccttgggggtcaaggccacagtgagctgtgattgtgccactgtactgcagcctgggcatcagagcaagaccccatctcaaaacaaataagca

SEQ ID NO: 115971 - DNA, 332 bp, Homo sapiens
gctagaaactcagccagggcagatgctgtagtcttgaggcagaatttcttctcctccgggagaaatcaaccgatggtagatgttaaccaagtctgtagaatatctactcagcagcatctagtgctggagttaaatagctgggtgctatggtccagccaaggtgccgcctgaaacaccctcacatggtgggaagagcggtggttgaagaaggaaccctggagaccttgatgttgaagagagggcaagggaagagggctaaggacaagaaaagagccattggagagagaaagagatgaagtggaagacagtgagtgaggggctggcagaaggat

SEQ ID NO: 115972 - DNA, 185 bp, Homo sapiens
acacaaactctgtacacctccctctaaaaggcaaagcccaattccctttctcttgagtataggctgggctttgtgactcacttggttattaaccaacagaatatggcagaagtgacaatgtgtgactaggtcataaaaggcatcaccacttcctccttgctctctctctctctctctctctctct

SEQ ID NO: 115973 - DNA, 158 bp, Homo sapiens
tcctacgagcgcatctcataaattttggatcttgcatttatttaattcatctgaaagtatttcaacttctctgtcagctactgaaaatgagaagctggtttttaggaatatattgagaaacaggattgcaaattttggagacactggcacttaggttg

SEQ ID NO: 115974 - DNA, 237 bp, Homo sapiens
agcacctgtgtacacagttgagcaggccaaaaatcagccatttgttgaaataaatgactaagagtaacccctccaaccctgcttagaaaataggttagggcaggccgggcacggtggctcatgcctgtaatcccagcactttgggaggccgaggcgggcagatcacaaggtcaagagatcgagaccatcctgactaacatggtgaaaccccatctctactaaaaatacaaaaaaaaa

SEQ ID NO: 115975 - DNA, 469 bp, Homo sapiens
atagaactcttctatacagactactgagtcataagaaaacaaatctggcacctgaacctgttcaggccacagggagagattaatatttacaaagccccagtaacagcccttgctgataaaaccactgttatatcatctcttaatctttctgtgacatgtgaacaaagactaagatggaaattcacagagaagtccttggttgatctctttaagccaaccaccattaggatgttcctgaccatcattctccttttcctcactgccctcttttagcctgggtcttgctctgtctgatccagataaaatattttgagaaaaaactacccataattgatattcagacatttttgttaatggaagccctatttctgtgccagatgcagattcctggtatgaaccataggattactgctcagggataagtagtttctgcttctagttttaactacttctcaatgaaaagtcaaag

SEQ ID NO: 115976 - DNA, 376 bp, Homo sapiens
acgttgaaaattactcagcatatcaagcaccagaaaaaaaatctcatcttgaatgagataacacatgccaacacagtgataacacataaattagatttattcacaaggattttaaagccaccaccataaacatgttttaatgagcaattgcgaatatgctggaacaaatgaaacaatggaaagctttacaaagaaatagaagatgccaagagacaaatagaaattttggcactgaaaaatataattgaaactttaaaaaatacttgatggctcaatagggtaatggaggaaatagagaaaagaataagtgaacttgaaaataggacattaaaaatttactaatccaaagaccagagggaatatagactgaaaatga

SEQ ID NO: 115977 - DNA, 469 bp, Homo sapiens
ctcctgacctcgtgatccacccgccttgtgactcccaaagtgctgggattacagacgtgagccacctgtgcccggccaagtccaggagacaccttctctggacagtttgttctgggagagcctcaaggctacggcgtcatggagtacaaagccggcggatgttatgaaggggaggtctcccacggcatgcgggaaggacacgggtttctggtggaccgggatggacaagtgtaccagggctccttccatgacaacaagaggcacggccctgggcagatgctctttcatgcctgcggagcccggtgggaggagccggtctgagtcactgccaccacccggctccccctgttgagagtggactccgtgcgtgtgtcccccaggaacggtgacaagtacgacggcgactgggtccgggaccggcgtcagggacacggggtgctgcgctgcgccgacggctccacctacaagg

SEQ ID NO: 115978 - DNA, 229 bp, Homo sapiens
gaattcaaacagaataattatcttccctacggtgggaaaggttgaaattctcattcagtcacacacacgtatgtatgtattgtatatagatgaatgtttctatgtaactatatataatattttatccagattgtatcattgttatctgtgagagtgttagtttagcaagctactccagtattaccggaagccagaacttcagttttgttttcttactggattttatgta

SEQ ID NO: 115979 - DNA, 425 bp, Homo sapiens
atagatgtccttaaatccaattgtcttctcagttgaatcttagagaaatttttcttttgcaatttcgctttcctgttgaccacagtatccagtgcccttttctttataatcttttgagtgagtaaaaaaattttaagaaataaaggattctgtttagggaaacttttgaatagatttgatttgatgtgagtcagggctaataaaaagctatagaagaattttctttccaataagtaaaaatcctctgttttattaaggaaaaaatagctatgttttaggtaaataactctgaaataaactggtacaacaattgtaaaatagaacatatttaaatgtcaaggtgtcttttcttaagacttcaggaatttgtattgaacaaagtctcaagttaagtagcaataattatgatgcataaatgagactgg

SEQ ID NO: 115980 - DNA, 311 bp, Homo sapiens
caaaaaacaacaacaacaaaaaaaagtgagcaaagagtttttccagagaggaagcagcaagcataagggcctagaggtaaaacagcacctaatagatttaggaaagtaaaattggctcacatgactagagtacagaatgtgaagaaaaagtgaattatctggacagacaagactggagaagtaagcaaaaaccaggttatacaagactttataaaccacactgtgcattatcctaagaataatgaataaacatccaaaagttttagcctagggagggtgtgatcagatttgcactttaaaaaggacacatt

SEQ ID NO: 115981 - DNA, 738 bp, Homo sapiens
caaaaactcttatgcagagcaaaaatcattgaaaagtgtactgataccttacaatgcttcacagaaaatccatgaaatgtgcatcgcaaggcactgtctattactgtagcaacattgctttacaaatttccaggacaggtagcgaatatcttcacttgctgtagtgctattcctaataagatgcctggagcaggtagctggctgttgtaagggctaaggattctataaggctctgataggataaagcattcaaaggagcagatttaaggcctagtcaatatcggtctcctataattcaaactagggaaacatttggtgaactggagaactgatgtacctgttcatgaaggagaaaaacaactccaaagacatgctccaaaggacagctcacccttccatgagtgatggatcaccaatctctttgaacactaagaaggtgccctcttggggccgggcgcggtgactcacacctgtaatcccagcactttgggaggccgaggcaggtggatcacgagatcaggagatcgagaccatcctggctaacacggtgaaaccctgtctctactaaaaatacaaaaaattagctgggtgtggtggcggtcgcctgtagtcccagctactcaggaggctgaggcaggagaatggcgtgaacccgggagacggagcttgcagtgagctgagatcgtgccactgcactccagcctgggcaacagagcgagagtccatctcaaaaaaaaa

SEQ ID NO: 115982 - DNA, 377 bp, Homo sapiens
tcttgggatttcgtcccagcctgacaaccttggaacagaacaagaggacaggaggtgtcgttccaggtatgtgttagctgcaccagccactctttgtggcatctgctacccatcaaaggacgtggttgggctgggagccaagttaagttttctcattgtttggcagttgtgtccccagattttcttgcccatcttggagatcttagcacagccggggtgcttggggctcagctgccttgaaggggactcagtcccccacacaggtgattcccatgtcccatggtgggcactgagattggggtgaggggagcacacttgagggacccttcacttcctcacagcccttgcccctttcctcagggtgcgctgggaagaac

SEQ ID NO: 115983 - DNA, 614 bp, Homo sapiens
agtgagattctgtctctaaaaaaataaaataataacataataaaataaaaacaaaaaatggcagtgagcaattttcctttgaatgcagctgtttaaagtaacatataattaatttcaattattatagactaagattgttaaacaactgatcctgaaatgtcaaaaccgtacagtctatttttataatagcagtatagaacaaagattaattatgatttttactgttattctaatccatgggccaaatccagccctcagtgtatttttaatgcctcctttaagctaagactggtttttatgtttttaaaagacagtatgtagcccacaaaacctaaaatatttactacttggtccttcacagaaaaattttgccaaaacaataaaatgtaaaatttgctgttgttccaaacactactaccacaaaactgtcacttgccaacaactttgcgtgtaatttcagtaaatgcatacgctgcagatgaatccatgaggctcagagactgtcacacttacaggccccttctaaaagaggcaggaaaaagctgcaccttgtacatgggtcatgtaacctaaaaaccccagtccaaacgggctgtgccacttccaggctggac

SEQ ID NO: 115984 - DNA, 910 bp, Homo sapiens
gtgggttgaccgtggtcttgtgggttgaccgtggcttgtgggttgaccgtggcttgactgtggggaggggtgtttaagaccatgacaagctatttcaatgaattatataaagaaacatagttgctttcactgcctcaaataacaccgcagtaattctgtgatacacttcagaagagttagcactggagggaaaagagcctgtgcggcagcccttggtgactacatttccctccagcgcaatgcaggtagcaggacatcagcgctttgagaactagcataagctgctgcaggaatcatcgactggcaacaatgtgccttcccagagagcctggtcttggagaatccaggctatgaggcttgcaaatgctgcatgagttttatggctaccaggttgggagcaaggttttttaacggcttcctgaatgtcagatggcaactggttttttcttcaaacaatggcatattctttaagaaaatcaaattatcaatgaaatttgccatgtgaccacaggcaagttaactattcttgcatttttcagactaggtttccttatctctaaactagagaaaatgatacctacatgtcacaggggaactggaaggattaaaagacaaaatgtgtgtaaagcttccagcacaatgtctggcacaaaacggttgccccaaaaagttcaatactcttcctttccctgctccccctcccaacaaaacaggaaaaggcaacagccaagtaactaaacaacttcttaatattccaagtttctacccaatcatctcttcttcttttaaaaccacaggcttgaaatctttactgtttactgtcaacaacggcatatactgctgtacagtcagaattttagaatttagaaatcaaatataacccccttattcaacagatgctgccggggga

SEQ ID NO: 115985 - DNA, 371 bp, Homo sapiens
aaccccatatgcacctgaatacctgaaatcataagtctatcttgagcttaaaaccctgatttaatctattctattttaaataaatagtaaaagtacctcaattatcttaaactagatgtttctctgccacttaacatggtcaaacacaaaaccatattttaccatgaaggaaaaacaaaagcttctgtctaaatccttaattgttatagttaaggctactactggaaatgtgtaagaatctcagataatgtcaatttcttactgtgtgtgcttcccagatccagccatcgcagatgtattttactttttgtgttgtcagctagtcaccatctttttctaccaatacctatagtgaatacttaatcagaacc

SEQ ID NO: 115986 - DNA, 147 bp, Homo sapiens
  misc_feature (4)..(4): n is a, c, g, or t
ttgnagagatggggcctcgctatgctgccaggactggtcttgaactcctggtctcaagcagtccttctgctttggcctcccaaagtgttggggttacagccgtgagccactgcacccaacctactttatatttttcatgatactttt

SEQ ID NO: 115987 - DNA, 407 bp, Homo sapiens
agtaagtagcatttgaagtaggtcctgtgtccttttgacataacctcattattgtaatagtttactttctttcaggagcaagattttcctgggtttatcttgtagctgtcctttgcaagaatggaatcatccttccaaactgtttcttttttaaaaattattattatactttaagttctgcgatagatgtgcagaacatgcaggtttgttacataggtttacacgtgccatggtggtttgctgcacccatcaacctgtcatctatgttaggtctttctcctaattctttccccttcctagccccctacccccaaacaggccctgatgtgttatgttcccctccctgtgtctatgtgttctcattgttcaactcccacttatgagtgagaacatgcggtgccagactg

SEQ ID NO: 115988 - DNA, 483 bp, Homo sapiens
ttttttgaaacagttgatattgggtaatttggccatcatcatatactgtagaaaaaaattgtcaagtgaaagggagaataggtaagaaggaagaaaggggaggaatttagtgaatatgaattattttcctttagatatattagtcttgtagatcgcaatgaattttttaaattactatttaagatattgttgagattccattacctccaatcagtcttgggacattagaacagtggtataattaagactgtatgtttaaattgagaaattttgcacaactttaacaagtagcagaactaattgttcactgatggctttaaagatgaaataattctgtgaatacatgaaactgtgagggactcttcgtggttgtctaggtttatttatatgcatactcattaataaaagtttttttttgtttgtctcttgaaaacaaaacagctttgttttaacaaaacagcaatggaacaaatttgaaaaccg

SEQ ID NO: 115989 - DNA, 364 bp, Homo sapiens
ataacctaattaatgacagaaaatgtcaggggaaagcaactaggaatcagaggaaaggggatggtaataaaaacataaacttacacaaaaggctaaaatgtcaggaggaaaagaggcttgtgtatcaatattttgcctgtcaggaaggttttcttcccaatcaaaagaacttccttttacataattacttgagaaacgtgccctcctaaaatgctatttttttaaaaaaaaaaaaagggcaggcaaggtggctcacacctgtaatctcagcacattgggaggccaaggcaggagaactgcttgaggccaggagttcaagaccaatccgggcaacacagggagaccttgtctttataaaaatttt

SEQ ID NO: 115990 - DNA, 442 bp, Homo sapiens
ttcactcacaaatacttagtacctactgtatcccaggaattgttttggaaccaagagatagagcactgagtgaggaaaaaacaaaacaggtcatttctttgccttcatggaacttacattctagttagtagagagagaacagtgaacaaataatttgtcagttggtgataattggagaaaaatataacagagtagggtgataaggtgcaccaagggagggaaagggagagaatgccgttttatataccataggtcagggaagtgtctgaaaaatatttgaataaagacctgaagaaagttagggaggaagagagcaatgtttacatctggggtaagagtattccttgtggagggaactgtgtgtattccagcaagagtaaggaggtcagcttaaccagcacagttaaaccagggaggagaatgtatgggaaacagggtgaga

SEQ ID NO: 115991 - DNA, 596 bp, Homo sapiens
agcagttaatgaagccaaagaagcacatgaaaggatatttctgaatacaggattctggccttaaaatacactgagtgcaatctgaagccacttcaaagaatcaccttgttttcttgctgacattgcagtggggacgatgagacccaaggacattcagccaagagggaaatatctgctagaccaggtggatatctatcaagttctctttctttcctgcagagttaactagacatccgtgctcctggatctcaggacttcgggcttggactgaattacactacggattttcctggttctccagcttgaagacagcagattgtgggacttcttgacctccataattgtgatccaagggaggtcttacttctcaataggagacaagtgacttgatttcaacacggatgggagaaattgggaggtgaaattgggagaaacatggaaatactggggaagcatgaacatctggccttttctttttcttcctgtaagtccattggagatgcaagattttaaggagcaggaggatggggggggaaggacaccctcttgcatgttgcaggtgatgagattgaagttcctaaagtttaagtaatgaa

SEQ ID NO: 115992 - DNA, 473 bp, Homo sapiens
aggaagttgctggactcttgagtgaccacaaggtcagatctatcctggagcattttattgccctaaaatcacccttgagttgcaaaggtgagttgcattgggaggctccaggaggcggccagcactctgaaaagagccccaacacaggagacaggtggacctggattcacacctgggctcacaatcttgtcactctgagccaggagacaggtggacctgggttcacacccgggctcacaatcttgtcactctgagccaggagacaggtggacctgggttcacacccaggctcacaatcttgtcactctgagccaggagacaggtggacctgggttcacacctgggctgtctatcttgtcaccctgggcatgtcatctgtctcttagaggtttttcccttctctgatcttgggacagtttccgcccttaggatgggtgaggacacaggtggactctctggcccaggttctgctc

SEQ ID NO: 115993 - DNA, 362 bp, Homo sapiens
atggggagaaatggatggattcaagacacatttggaaagtataatcaataggtctcttggggagttgtggtgaggaggtaagggtgaggacagggtggaaatgacttccaggtctctggctttggtccttgggtgaataaatggtagtttctgagataggaaatgtgggaagagggacaggtttgcaggaggaggaggtgccatgctctttaaaacaaccagcaatccgtgaactaacagagagaactcactcactaacacaggggacaacatgaagcaattcatgagggatccttccccatgatccaaacatctctcattaggtcccacctccttcataattgaggatcacttggaggcca

SEQ ID NO: 115994 - DNA, 516 bp, Homo sapiens
cttgcatattgtgggggctcagtcaatatttgttgcatcgtaaatagtgggtttgtgagttttccatttctcaactacaactctctgaagattccaataggagggagaaacagggtagtcagagagataataaacaaaatcagccaacgttgataaattcagagtatggaggaccaggtaggatgtgtcatcatacctaagaacgctgcctctgcttaaaaattattgttagctctagaaacaatgacatatctatttgtgtagccctttgcagtaaacacatatacattaattcattagattcccctaaaagattctattaaaatggtgtttaactttttagtgctgataatgtaagatcttctttgtaggattgcctctattttgttgttgttgttgaaggccagggagggtccctcctaggctggctccagtttttcttctttccaccctttgatgataacgtgatcttcaggctggtgctggtttaccagaaattctaggggtggtacctgt

SEQ ID NO: 115995 - DNA, 243 bp, Homo sapiens
aaaaaacaaaaaacaaaacaaacccatgtccttacttgtaagtctctttcccacacttccagtcagcatgcgattgcaacagcataggtaagatggattctagtccctaaaattcaatactctcctgaaccttctcctacagacgagactctgcaattcagaggcctcttctcagtctgttcactaggtcattcagagtatgccactaatgtaggaagaaagtattttgattgacagcatcat

SEQ ID NO: 115996 - DNA, 2096 bp, Homo sapiens
  misc_feature (3)..(4): n is a, c, g, or t
  misc_feature (6)..(8): n is a, c, g, or t
  misc_feature (883)..(883): n is a, c, g, or t
ggnncnnngtccgaggcttcctcgctgccagctgagtcgtgggcacctgagggactacctaccactgctcccggctgtgccatcgccaccagctcccagcctcctgctcagacccgggacagcccctccatggcccccgagatggaccagttctacaggtccaccatggccatctacaagagcatcatggagcagtttaaccccgccctggagaacctggtgtacctgggcaacaactacctgcgtgccttccacgctctgtccgaggcggccgaggtctacttcagtgccatccagaagattggggagcgtgccctgcagagccccacctcacagattctgggggagatcttggtgcagatgtctgacacccagcggcacttgaactctgacctggaggtggtggtgcagacattccatggaggcctgctgcagcacatggagaagaacaccaagctggacatgcagttcatcaaagacagccgccagcactatgagctcgagtaccgccaccgagcggccaacctggagaagtgcatgtctgagctgtggcgcatggagcgcaagagagacaagaacgtgcgggagatgaaggagagtgtgaaccggctgcacgcacagatgcaggccttcgtgtctgagagtcagcgggcggctgaattggaagagaagcggcgctatcgcttcctagcagagaagcacctgctactttccaacaccttcctgcagttcttcggccgggcccgggggatgctccagaaccgcgtgctgctgtggaaggagcagtctgaggccagccgcagcccgtcgcgcgcccactcccccggcctgctgggccccgcgctggggccgccctacccctcgggccgcctgacgcccaccngcctggacatgcccccgaggcccctgggagagttcagctccccccgcagccggcacggctccggctcctacggcaccgagcccgacgcgaggcccgcgtcccagctagagccagaccgtcgctccctgccccgcacgccgtcggcctcctcgctctacagcggcagcgcccaaagctcgcgctccaactcctttggcgagcgcccgggcggcggcgggggcgccaggagagtccgcgccctggtctcccactcggagggcgccaaccacacgctgctgcgcttctccgctggggacgtggtggaggtgttggtgcccgaggcccagaacggctggctctacggcaagctggagggctcgtccgcgagcggttggttccccgaggcgtacgtgaaggctctggaggaggggcccgtgaatcccatgacccccgtgacccccatgacctccatgacctccatgtcccccatgacacccatgaaccccgggaacgagctgccttccaggtcctacccactccggggcagccacagcctcgatgacctcctggaccggccgggcaactccaccccaagccgggtgccaagccgtgcccccagccctgcacctccacccttgcccagcagccgccgcagcagcatgggcagcacagcagttgccactgacgtcaagaaactgatgtcctcagagcagtacccaccacaggagctcttcccgaggggcacaaatccttttgccactgtcaagcttcgtcccaccatcaccaatgaccgctcagcacccctcatccgctgaggcggggtccgaggtcgtaccccacagtgcacctgcccaggggctgttcagagctggcaatggcagcgacagcagcaacagcagcagatccaagaagcgggtccctgagacggggggtggctgccctccccagaccaccccggcagcctgagcagctccaaagcactggcttggggtccgagaccttcaaagtaaagcaggcggaatggggggacaggacaatttctccccctccaggggctccaggactctccctggggggcccacctcttgccccctaacctctttcccccttttctgcccccgtggggaggagccccttgtacctgctccgtgcccaacacatgccctctctgtacatcttttgtaaatgatgagaaataaaggaagtggacgcaaagtgatgcggcaaaaggact

SEQ ID NO: 115997 - DNA, 2076 bp, Homo sapiens
gtaggggcttaaatgtgctcacctctttgcggtcaggctccgtggaaatcctgaaagcacttaaactgggctgttttgacacttgacgtggaggaggatttggggagtttcatacagtgaggttgccagaaagtgcggaggacagcagggctggcagctagcagagggaatggacaggcaccactgtcctgcaggggaaaacggggcagatggggctggctggagccaggcagtgccccctcggggcttcatgggcagggtagtgtacggtgcccactcctgctgcaggagagaagcagcgcaggatgaatgcgtgcatgggcagagcgggtggtggctgcccacaccagcccacggatggatgagtggtcctgtgcttaatggatggtggacaggcgaatgggtggaccaggggatgtgcgtctgggtaggtggaggtctgtgtgtgcaagtggatggccttaaatggcggggggggggtcactgactgggtggttagggacatgggaggatgcgcagatgtggtggacagacactgatgggtgattggagaggtgtgagtggtgagggggtgctggatggattcgtggctacacgggggatggagtatagacaggtgagtgggggataggtgatgtatggagggactcatagttaggcgcgaaggtccatagctgggcgggtgaccacagggacaggaacggaagggggtcagtggggagagagatgactgagaacgccaacgatagggacacctgctgctggagtggctgcttcacagacccacagcagaggacggtgtgctgcagatgccttggggacctgaggatagaaccttctagatggaggctgtcacaccctcctgggatgttctgggaccatcgttccatccttgactcacatagcctgttagggaaaaggatagcgtgtgttattatcagtaggcacttgcaggtgaaaacagaagtaaacatacggaattgattgtagtctgtcaattcgaggtgaagtagcttccagtgaccctgaggggaggatgtcttcttttggtcattgtccccaggcctggcttcttttggtcattgtcctctgcctctaccccacaggagcggttggttccccgaggcgtacgtgaaggctctggaggaggtggcaaggtgcagtcttgagtgggcccagcccccttcagcccctggagaaccaccggccctgagcccctctctctgccctgaaggtcactgcgtccatccctctgcctcctctcaggacctccctccggtcaacagtctcctttcatgcaggtgcggggaggaagctgtcggatgcctcctgcctaaggtgccccagctactggcaggacaagggattggacaggccccaacccctttccttccccctcctttctctggacttaggtcctacccactccggggcagccacagcctcgatgacctcctggaccggccgggcaactccaccccaagccgggtgccaagccgtgcccccagccctgcacctccacccttgcccagcagccgccgcagcagcatgggcagcacagcagttgccactgacgtcaaggggcacaaatccttttgccactgtcaagcttcgtcccaccatcaccaatgaccgctcagcacccctcatccgctgaggcggggtccgaggtcgtaccccacagtgcacctgcccaggggctgttcagagctggcaatggcagcgacagcagcaacagcagcagatccaagaagcgggtccctgagacggggggtggctgccctccccagaccaccccggcagcctgagcagctccaaagcactggcttggggtccgagaccttcaaagtaaagcaggcggaatggggggacaggacaatttctccccctccaggggctccaggactctccctggggggcccacctcttgccccctaacctctttcccccttttctgcccccgtggggaggagccccttgtacctgctccgtgcccaacacatgccctctctgtacatcttttgtaaatgatgagaaataaaggaagtggacgcaaagtgatgcggcaaaaggact

SEQ ID NO: 115998 - DNA, 2138 bp, Homo sapiens
  misc_feature (3)..(4): n is a, c, g, or t
  misc_feature (6)..(8): n is a, c, g, or t
  misc_feature (883)..(883): n is a, c, g, or t
ggnncnnngtccgaggcttcctcgctgccagctgagtcgtgggcacctgagggactacctaccactgctcccggctgtgccatcgccaccagctcccagcctcctgctcagacccgggacagcccctccatggcccccgagatggaccagttctacaggtccaccatggccatctacaagagcatcatggagcagtttaaccccgccctggagaacctggtgtacctgggcaacaactacctgcgtgccttccacgctctgtccgaggcggccgaggtctacttcagtgccatccagaagattggggagcgtgccctgcagagccccacctcacagattctgggggagatcttggtgcagatgtctgacacccagcggcacttgaactctgacctggaggtggtggtgcagacattccatggaggcctgctgcagcacatggagaagaacaccaagctggacatgcagttcatcaaagacagccgccagcactatgagctcgagtaccgccaccgagcggccaacctggagaagtgcatgtctgagctgtggcgcatggagcgcaagagagacaagaacgtgcgggagatgaaggagagtgtgaaccggctgcacgcacagatgcaggccttcgtgtctgagagtcagcgggcggctgaattggaagagaagcggcgctatcgcttcctagcagagaagcacctgctactttccaacaccttcctgcagttcttcggccgggcccgggggatgctccagaaccgcgtgctgctgtggaaggagcagtctgaggccagccgcagcccgtcgcgcgcccactcccccggcctgctgggccccgcgctggggccgccctacccctcgggccgcctgacgcccaccngcctggacatgcccccgaggcccctgggagagttcagctccccccgcagccggcacggctccggctcctacggcaccgagcccgacgcgaggcccgcgtcccagctagagccagaccgtcgctccctgccccgcacgccgtcggcctcctcgctctacagcggcagcgcccaaagctcgcgctccaactcctttggcgagcgcccgggcggcggcgggggcgccaggagagtccgcgccctggtctcccactcggagggcgccaaccacacgctgctgcgcttctccgctggggacgtggtggaggtgttggtgcccgaggcccagaacggctggctctacggcaagctggagggctcgtccgcgagcggttggttccccgaggcgtacgtgaaggctctggaggaggggcccgtgaatcccatgacccccgtgacccccatgacctccatgacctccatgtcccccatgacacccatgaaccccgggaacgagctgccttccaggtcctacccactccggggcagccacagcctcgatgacctcctggaccggccgggcaactccatagcaccctcggagtactgggatggccagtcccgctcccgcaccccaagccgggtgccaagccgtgcccccagccctgcacctccacccttgcccagcagccgccgcagcagcatgggcagcacagcagttgccactgacgtcaagaaactgatgtcctcagagcagtacccaccacaggagctcttcccgaggggcacaaatccttttgccactgtcaagcttcgtcccaccatcaccaatgaccgctcagcacccctcatccgctgaggcggggtccgaggtcgtaccccacagtgcacctgcccaggggctgttcagagctggcaatggcagcgacagcagcaacagcagcagatccaagaagcgggtccctgagacggggggtggctgccctccccagaccaccccggcagcctgagcagctccaaagcactggcttggggtccgagaccttcaaagtaaagcaggcggaatggggggacaggacaatttctccccctccaggggctccaggactctccctggggggcccacctcttgccccctaacctctttcccccttttctgcccccgtggggaggagccccttgtacctgctccgtgcccaacacatgccctctctgtacatcttttgtaaatgatgagaaataaaggaagtggacgcaaagtgatgcggcaaaaggact

SEQ ID NO: 115999 - DNA, 2091 bp, Homo sapiens
  misc_feature (3)..(4): n is a, c, g, or t
  misc_feature (6)..(8): n is a, c, g, or t
  misc_feature (883)..(883): n is a, c, g, or t
ggnncnnngtccgaggcttcctcgctgccagctgagtcgtgggcacctgagggactacctaccactgctcccggctgtgccatcgccaccagctcccagcctcctgctcagacccgggacagcccctccatggcccccgagatggaccagttctacaggtccaccatggccatctacaagagcatcatggagcagtttaaccccgccctggagaacctggtgtacctgggcaacaactacctgcgtgccttccacgctctgtccgaggcggccgaggtctacttcagtgccatccagaagattggggagcgtgccctgcagagccccacctcacagattctgggggagatcttggtgcagatgtctgacacccagcggcacttgaactctgacctggaggtggtggtgcagacattccatggaggcctgctgcagcacatggagaagaacaccaagctggacatgcagttcatcaaagacagccgccagcactatgagctcgagtaccgccaccgagcggccaacctggagaagtgcatgtctgagctgtggcgcatggagcgcaagagagacaagaacgtgcgggagatgaaggagagtgtgaaccggctgcacgcacagatgcaggccttcgtgtctgagagtcagcgggcggctgaattggaagagaagcggcgctatcgcttcctagcagagaagcacctgctactttccaacaccttcctgcagttcttcggccgggcccgggggatgctccagaaccgcgtgctgctgtggaaggagcagtctgaggccagccgcagcccgtcgcgcgcccactcccccggcctgctgggccccgcgctggggccgccctacccctcgggccgcctgacgcccaccngcctggacatgcccccgaggcccctgggagagttcagctccccccgcagccggcacggctccggctcctacggcaccgagcccgacgcgaggcccgcgtcccagctagagccagaccgtcgctccctgccccgcacgccgtcggcctcctcgctctacagcggcagcgcccaaagctcgcgctccaactcctttggcgagcgcccgggcggcggcgggggcgccaggagagtccgcgccctggtctcccactcggagggcgccaaccacacgctgctgcgcttctccgctggggacgtggtggaggtgttggtgcccgaggcccagaacggctggctctacggcaagctggagggctcgtccgcgagcggttggttccccgaggcgtacgtgaaggctctggaggaggggcccgtgaatcccatgacccccgtgacccccatgacctccatgacctccatgtcccccatgacacccatgaaccccgggaacgagctgccttccaggtcctacccactccggggcagccacagcctcgatgacctcctggaccggccgggcaactccatagcaccctcggagtactgggatggccagtcccgctcccgcaccccaagccgggtgccaagccgtgcccccagccctgcacctccacccttgcccagcagccgccgcagcagcatgggcagcacagcagttgccactgacgtcaaggggcacaaatccttttgccactgtcaagcttcgtcccaccatcaccaatgaccgctcagcacccctcatccgctgaggcggggtccgaggtcgtaccccacagtgcacctgcccaggggctgttcagagctggcaatggcagcgacagcagcaacagcagcagatccaagaagcgggtccctgagacggggggtggctgccctccccagaccaccccggcagcctgagcagctccaaagcactggcttggggtccgagaccttcaaagtaaagcaggcggaatggggggacaggacaatttctccccctccaggggctccaggactctccctggggggcccacctcttgccccctaacctctttcccccttttctgcccccgtggggaggagccccttgtacctgctccgtgcccaacacatgccctctctgtacatcttttgtaaatgatgagaaataaaggaagtggacgcaaagtgatgcggcaaaaggact

SEQ ID NO: 116000 - DNA, 276 bp, Homo sapiens
tcagtgatttaggggaagcctgatccaggacatgtaatttgcagggtgtactgagctgggggtaaagcacagaaggggaggaggggagaaggggatgggtaggtaaaaagagagaaatagggataaaggagagagataactagatagaggtgattaaatataccaatatttattcttccagaaactttaagcaaatattcatttattgcatgagacatcagtggtcataggatagaagagtatataactgattctcaaggagatacagaaaaacca

SEQ ID NO: 116001 - DNA, 685 bp, Homo sapiens
caaccttcgagactcagccaaatgtcatttctgtaaaatcttccctgagtcttccaagcagtaatttgccttctcctagagtttacctgccattttgtgcacatttgagttacagtagcatgttattttacaattgtgactctcctgggagtctgggagccatataaagtggtcaatagtgtttgctgactgagagttgaatgacattttctctctgtcttggtattactgtagatttcgatcattctttggttacatttctgcatatttctgtacccatgactttatcactttcttctcccatgctttatctccatcaattatcttcattacttttaaattttccacctttgcttcctactttgtgagatctctccctttactgactataacatagaagaatagaagtgtattttatgtgtcttaaggacaatactttagattccttgttctaagtttttaaactgaatgaatggaatattatttctctccctaagcaaaattccacaaaacaattatttcttatgtttatgtagccttaaattgttttgtactgtaaacctcagcataaaaactttcttcatttctaatttcattcaacaaatattgattgaatacctggtattagcacaagaaaaatgtgctaataagccttatgagaatttggagctgaagaaagacatat

SEQ ID NO: 116002 - DNA, 184 bp, Homo sapiens
tagtgtttatattagcatgggtttattggcaatgaaatctttcactttcctttttctggaaatgtttttgtcttcatttttgaagaatattttcaccaggtgtagaattccagatcatcagttgtttgctttcagaactttacgtttgccatttgtttgtcattatgctttcttcattctgtgg

SEQ ID NO: 116003 - DNA, 103 bp, Homo sapiens
tggaaatcaatgctacttttatgcaaatgaatatatgtttgtcttaacaaacatatgcaaagcctattttgaaattcctagtagaggtctctgaattctgaat

SEQ ID NO: 116004 - DNA, 343 bp, Homo sapiens
cccagatggtccctattggtcgcttaactcaggacaccgggagtggaaggcaaccggtacgcgctgggtctcagccgctgcaaaaacccggcatcgcagggcaagagttgttccagcgtcctccgctgactccaaaccagcgggtcttgaccaagggattccaagagagaggattaggcccggctaagcacctgggagcagctgtggaaaaaggagagacaatcatcaggcacgatgccaaaaatgaactgtgacctgaaaaagagaagaaaggaaaattgtgcaggatgctacgttttgttttttaaaagtgggggttgaggcaataaaatacggaatattt

SEQ ID NO: 116005 - DNA, 900 bp, Homo sapiens
gggaagccctgggataaataaattttacagatttctttactacaggacttttcagagcctttaatagactaaatgttcattgtgacaaaataagaaagacgtaccagtttaaacgttcccagttttacttcatattccaaccatcccccaccgtaccctgttgccctgttaacagctccctaaactctttgccttgcagaaaactggggggtggtgggcagcctttgaaatgatcctagcagaaggtcttgggggccttgttcaaggaatggatacagagatgccgccattgacaaactgcatatattcggggctgatcaaaagccaggaacaaaaaggagaggaaatccaagacggctcccagagttgcattcctgggaggacagagaggtctagggaagtggaaaagcaggaggatatagttaggaggaagaacagtgaatccaggttcatctatgttgtttcaggtgttggggccatgtctaggtggcagtgtgctgcagacagtgggaaaagtggaatcttggctgcagaaagtaccagaatggaagcaatatgtgaggacagtgtttaaagaggagcagttgggccgggcgtggtggctcacgcctgtaatcccagcgctttgggaggccgaggcgggtggatcacctgaggtcaggagttcaagaccagcctgaccaacatggtgaaacctcgtctctactaaaaatacaaaattagccgggcgtggtggcacatgcctgtaatctcagctactcgggaggccgaggcaggagaatcacttgaacccgggacaagtggcatcacactccagcctgggcaacagagcaagactctgtctcaaaacaaacaaacaacaacaacaaaaaaattgggaggctgaggctggtggatcac

SEQ ID NO: 116006 - DNA, 456 bp, Homo sapiens
ataaagaaataaatatagtcaagataagctataatcttgtcactcaactaaaactatgaaacttttggtgtatagacttttattacttttatttttttgagacagagtctcggtctgtcacccaggctggagtgcagtggcaagatctcggctcattacaaaccctgcctctcaggttcaagctattctcatgcctcagcctcctgagtagctgggattacaggtttgtgccaccacacccagctaatttttgtattttttagtagagatggggtttcttcatgttggccaggctgtctcaaatgcctggcctcaaatgatctgcctgccccggcctcccaaagtgctaggattacaggcgtgagccaccgcacctggcctttgtatagatttttaaatgctagacttctttgatattattgagcatatattttatctaattatgacacctgtttt

SEQ ID NO: 116007 - DNA, 639 bp, Homo sapiens
caagtgggaccgtcatagaaagctctcctataggtattgagaaatcgagataccacgtaagtttcaagaagcagttttttttttctttttggtcaaaactaatgacaaattctgtccccttgtttgtatattttaacttagtgagacaggaaacatttattctatagaagacttttaaaatgtagtttaaacaagttgacacatgcttactggttaatgaaatgtgcatcaacccactccaaacaccactaatttgacatgaactaacaattaacttttcttactcactgtcaaaagtatatcattctgccttaacttaacgctttaccttctaaataaaatttaatcttttaaataagtttttctgctatgttttccttgcatatgtcttaaatttcttctttcgtctttgctcactgaagagcattttctcccacattctagtgactaccagggtttgtaagcctagagcaccatccttcattctatctagcagcagttgagaataataacagccatatttctatatatggagctcctccaaaggcctagcctgcattaagcttgttaattcttaccacagcctaggtattacttttgttttacaagtgagcaaactgaggctagaaaagaggaaat

SEQ ID NO: 116008 - DNA, 352 bp, Homo sapiens
ctacgtttcttttatattcctgttccaaaggcacaataacaccatcatcttcatctaggtaaccatagtactcaaaatcgattgccttcatgagctcagcacgtgtctttctgggaggaggaagagctataagaaacagaaatggagctgagtttccaagtcataatcacactccagcgaagctgtctcctgatgcaacgctatacacacacgtggcacgtatgttcatgaaaataccaggtgggcgtagtggctcactcctgtaatcccagcgctttgggaggccgaggtgggcagatcatgacatcaagcgtttgagaccggccgggagcagtgggatgttatcccagca

SEQ ID NO: 116009 - DNA, 467 bp, Homo sapiens
cggcacgagggctatcagaagggtcttaaaaaacaaaaaacagaagcacatcggccgtgctatttttctgcggcagggtctctgccagctcacctggctcacagtgtaagtccacagtccctagctgaggactgaggacgcattcacagcttcctcagacccatccccgctcctctgtgtccagtttgagcgctggtcttctggccaggtgtagagtgaggctgggcagaggggtgttgctgatgtctgcaccgccatgctcccagccacagtttccacctgggagcctggggatgggactgtctattgattgcacactgtggataggtggtcagttctaggagcagtggatgccttcgcttttacaaagtttcagttaagaaaaatgaataagtcctagagatctattgtacagtgtaggacctacaattaatacaactgtaatgtataattaaaattttgctaag

SEQ ID NO: 116010 - DNA, 594 bp, Homo sapiens
cggaccccggttgttttaccacttatttggaaaaactaattttattaaaagaatgggtcaagggtgtggcccatgcctgtagtcccagcactttgggaggccgaggcgggtggatcatctgaggtcaggagctcgagaccagcctgaccaacatggtgaaaccctgtctacgaaaaatacaaaattagccatgcgtggtggcgcatgcctgtaatcccagctactccggaggttgaggcaggagaatcgcttgaacctgggaggcggaggttgtggtgagtcgagatcgcgtcattgcactccagcttgggcaacaatagcgaaactccatctcaaaaaaaaaaaaaaaaaaaagatgcctgtccctggcgctcactgtctagtgcagaagacagacatgaaatatagatatgccaaattgggattcatgctatgaaggaaatcagaagagtgcaaggagaaagaaaaatgaatagaaggtctagcttaaattgaggaatcagggaacttctctccaaagaggagacatttcagctgaggcctgcaggagatgcaagtcttagggaggcagtgactgtgggcatagaacattct

SEQ ID NO: 116011 - DNA, 541 bp, Homo sapiens
gccagtgtgccacacaaacggtgatgggctctatcctgtacgcaaaggtgacagctgcctggtgttttgttttgtttcctttttaaaagatattcctgacaggaatgtggatattgggagaagaaaggcaggagacagggactcgatgcagtaatctaaaagaaaaaccagcacctgaagcaagacagcagtgaagctgagaagagactcaagagatactttaagagctatccttggtactaaaaatgggagaggaagggaggaggaggggaatgagaaggagaaggaggaagagaaggaagaggtctgccaaaactggcagtgattaggaacaacggtttggaggttccgcagttggaagtcctggattcagatgcaggctctgccatctagcagcttagctttggataagttatgttaccttcttcagctctctgaactttgatgtcctctattttaccgggaaaaataaaaatatctaccctcgcggttgttatgagaactgaatgtggtaattcttttaaagtacaaaccagtacct

SEQ ID NO: 116012 - DNA, 331 bp, Homo sapiens
tctcccaaactttaatcctgcagcttcagcccactgctagatatttccattgatgacctgtcatctgaaacctagcattcatcatgtgctgtgttgtataattgtatgtctgtgttattgtattactttcccaagtaaagtttttgtgtaaggacttaacactgctttgaatcccctgtacctattatactgctgtgtacaaagtaggagttcaaatacatgtgatcacaatagtcttcatgactaaagtagctcttcgcttttttggtaaccgcagaagcctagaaatcatccagagttaggatacagtatggagagctctatagaacca

SEQ ID NO: 116013 - DNA, 514 bp, Homo sapiens
tcaaaaaaaaagcagtcagtagtaactgcccttgaggagctgagagtctagtgagggagtcagattccatttcttaagacagatttattgaggtataattgacataaaataaactatttgtttatacaattatgtaagtttggacgtatgactacacccatgaagctatgttttgtttaagttttcattgttttttgttttaattgagttttgaaagctttatatattttggatataaatcctttatcagatatttctagcatgtcttttcattctcttcacagtgacttttgaagcacagaagttttaagttttgaagtaagcttattaatgtgttgttttctttcttcctgttttggttgctatagctttataataagtcttaaaatcaggtagtatgggtccttcaacttttttctccttcagagtcattttgccaagttttagaatcagtatttcaatgtttaccaaaacagcttgctgaattttgagaatgctttgaatctgtagatct

SEQ ID NO: 116014 - DNA, 519 bp, Homo sapiens
  misc_feature (18)..(18): n is a, c, g, or t
  misc_feature (21)..(21): n is a, c, g, or t
tacggtgggggggacggngtntcgctctgtcacccaggtggagaaaaaaataaaaattaaaaattaaaataaaggatatatgcatacaattggcatgctaacaaaaaaaaatggtgaggtagggatacaactgttgaagccaggtccttgaatggatgagtggatgggatctaatacacctaaagataatttccaactacagcaaagaccacaatctatatgacttagcagttgccttttcgcgttatgcatatgtggaggaacagacttcaagcaggcttgaggcctcctaggaagatgagattcctgagaagttgatcatcaattcacccaatcttgccattcatactgaggaccgtcctgaggctgtgggcagtttctcacatccctggaacaggcaatgtcaccagtaaaatagggaggaatcaagaggacctcaggacccatataaccacaagaatggctagacctgatgggatccagatgcaatcagcatatcactggcaacagggcagcttt

SEQ ID NO: 116015 - DNA, 259 bp, Homo sapiens
ccactaggccacggcgtatgcctccgaggacggggtcctgaccgaggccatgatggacacccgcgtgcaagatgctgtccagcagcaccagcagatgatgcgctggctgaagagggggaggcctgggcccgaggacgagcaaccctcatcctgagtccatggggagaccacacctcacggagcctggccgcggacccctcccacccctgcctttgcggccccgcacatttaggaaatactccccgtaataaagtcccac

SEQ ID NO: 116016 - DNA, 711 bp, Homo sapiens
tcagttaggatgtctccagatacaaaccttgagaaatgtagtatgcacatatatacatgtaaatgtctttctttgttcttattcatttgtttagcacatgtttattgaatgcctactatgtgccagacactgatttaggcattagtggcaatgtagcaaacacaacaaagttcttcctttcatggactttacattaagaggaaatcactaaaatattgatagtaatagtcactcatggctctaagtgctttacaaatattaactcatttaatctttataatgatcttacagagtaacattattctcagttttgcaaatggggaaactgttataccagagtttaagtaacttgaccaaggttgtccagcttatgtgccagagccaaactcgtgtgactggccagtgtgaatgactagatgagctctcaccagattctttgaaatagtgtttttggggaggaactcatagagaaaagagttagtgaatggtcacctattgcagttttgaacagtaggcaggagtctcttcagcagggctaggtatcagtctccaaaagatagactaacttttgggctgtgaaacttttaagtagcatgcttagggaatattgttttgagtttttaagcatgcataatgagagtttctatctagctgcaatatgatatagcagaactctggcttccagacaaggtagagccgaggggtaccgag

SEQ ID NO: 116017 - DNA, 227 bp, Homo sapiens
tcggctctacctgtcgtggtttcgctggatagtaggtaggatacagtagggctaggtatcagtctccaaaagatagactaacttttgggctgtgaaacttttaagtagcatgcttagggaatattgttttgagtttttaagcatgcataatgagagtttctatctagctgcaatatgatatagcagaactctggcttccagacaaggtagagccgaggggtaccgag

SEQ ID NO: 116018 - DNA, 635 bp, Homo sapiens
tttaaggagtaacaatgcatcgaacgtgggtttttgcatgtttgcttgtctcatggagacagcttgttaccaactatatttggtaacaagcactactgttgactcatgatttccttaatgccttagtatctatcatgtatatgtttactttgacatcagggcatggaaagttctattcaacaattcctgggtctaatttcagtagttccattctctgtgacctcacaatgggagccagcagccttccatcttgtgatggtgacttgctcttctaggtggagtgggaggagcaccgactatgtgctgggacagggctggcttcaaggtctgcttcagccccttgctggctgcatgactctggcaaatcacttactggcatttgttgtaatgcacatactggcattcattgtagaatttctattctggtggtgatagtcaattggttctttatgcaaacggaggtgatatcaacactgaaaattctgagtgaattgttaaactctggtgaattgctctgtgagtggttaggcaaaattgaagaggactgctctgctggacaggcccaatttattaggccccgctctaaatatgacttttatccccatactttttaaataattagcttttgaactatt

SEQ ID NO: 116019 - DNA, 540 bp, Homo sapiens
acctaggaactcttaacctggtgtctgataactggtataaggcataacgatggggctcatggatacataatcctttcaaaattgtaggcaaaattttccatgttgagtgcatatgtacatttttgctgggaaagcatccattactctcagagcagttctatgattccaataaaggtctagacccatatgttgggagttaaagagatcagagaccagttaggtggctgtcactgtaatcaaggaaataaatgaccagggcctaaacaaacaaaaacaaacaaaaaaaaataaggacagaaaaagaacataagaacataggaagcacattttggagaagagagagttggaaagaagcaggtaagaaatactggctttgacaggctgatttgaaattctttgagatctgccattgcaataggcagtgggcccttgtttatatccctctgcagtcttttagaaacagctggactgggacaacatggtttggattttggagaatacacatagcaaatgaaaccatgaagttcggcatgcaaaaat

SEQ ID NO: 116020 - DNA, 187 bp, Homo sapiens
aattcttgaggaacaggaggagggcttttataccaaaaaatggattgttctggaaggcttttctttgtcactgcccggtcgccgtgactgtggaccatgggaccctttcagccccgaggcctttcggcaagccttcctgagtggcctctgcatcattgcttgctgagcggatggtactgcacggttg

SEQ ID NO: 116021 - DNA, 624 bp, Homo sapiens
ggcattccacaggaaaacacccatagtccaggggttttaaaggcatttctaactataaacatcttagaaagttaaatacctacatgcatcccacatatatgtgtctgttgaaaactggcgaaggcaagtgttaatatcctcacatacagttaaaagtgtaattttatacaccagagccagattctgggccccatcccagctgaagttgttaagtgagaaatctctgagctgcaaactgcccttctgttttttattcctagaaacagaggttagatcagggaaaaggaaaagttaaggcattctatttcgcttgttgtgctatcaaatagacaccacaaacatttgaccatcgtggtcaggagatgttttccaagtcttttcacttggttttaggtttctcaagatattgtcttacattgagtaatttttcttaaatgctatgttgcaagtaagaaatcttaaagaaaaattttctcttagtatttttagtagagtaaatctggaatgatttttaaacagatttgagtctagtgcttctaaatcacacccgttacaatgtgcttatgcagtaaacaaacagtagagaaaagtgctgcagagtcgcttctgttacatagggtaaga

SEQ ID NO: 116022 - DNA, 249 bp, Homo sapiens
gtgctgaggaggaaccccggacgccaccatttcacatgaagaggcaggcgacatgcgagtgctggagaggaaccccggacgccaccatttcacatggaagaggcaggcgacatgcgagtgctggagaggaaccccggacgccaccatttcacatggaagaggcaggcgacatgcgagtgctgaggaggaaccctggacgccaccatttcacatggaagaggcaggcgacatgcgagtgctgaggaggaa

SEQ ID NO: 116023 - DNA, 781 bp, Homo sapiens
taactcaaggtggattaaagattttaatgtaagacctaaaaccataaaaaccataaaagaaaacctattcaaaaccattcaggacataggaatgggcaaagacttcgtgactataacaccaaaagcaatggcaacaaaagccaaaattgacaaatgggatctaattacactgaagagcttctgcagagcaaaagaaactgtcatcagagtgaacaggcagcctacagaatgcgagaaaatttttgcaatctatccatctggcaaaaggctaatatccagaatctacaaagaacttaaacaaatttacaagaaaaaaacaaccccatcaaaaagtgggcaaacttctcaaatgaagacatttacacagccactttatgcagacacttctactgttcagatctctgtaaacatccttgtcagcagagatagcaacagaaagatagtctctgcctcacttctgcctacacatttcaaacacatccaattagtagaaatgtaatatcatctagaaccttagctgaaagaagtatgttttagttttccagtatctgcagtatagaagggcatataggaggaagtgcaaatcctgtaatcccagcactttggtactgagtaccaagtgaccaaatcctgcacactgtgtatctctacccttttttcccagatataggtaccacaaaatgtcactgaatatggtttcactaaatatggtttaagaagcattatggtagaagggaggaagctattagagtctttcaagtagataatgtgaactttcttg

SEQ ID NO: 116024 - DNA, 384 bp, Homo sapiens
aaatatgtgaagaaatggccttttcttctaatgcagcaagtttgctactttgtaccaaataatttttttgcttggttttgagataactttatgattttattttgaaacaagcaataaattttagtaggggaaatgtgtacattcttattaaacaactttttactggttttatgtaactattctagttattagaactgaaattccaagggcttagggataggttggaaaataagtttcattttatgctagtttattttaggaagctactaggcaaatagccacttatcacttaatatcaaaataattttttttttaagacagagtctcactctgtcacttaaactggagtgcaatggcacaatcatggttcattacagtctttac

SEQ ID NO: 116025 - DNA, 567 bp, Homo sapiens
gcctgtccctgccttaagtgcctactggatcccgggagcctgggctggggcctgggcactgcttcctccttggcccctcaggcccttggaagcagagagagaacctcttgcagatcccaggctcgtccccagcacagcagacaccaggaaggtggccagagcctcactgagccgaaccgacggccgcccacccacccaggctggagccatggataaattccgcatgctcttccagcacttccagtcaagctcggagtcggtgatgaatggcatctgcctgctgctggctgcggtcaccgtcaagctgtactcctcctttgacttcaactgtccctgcctggtgcactacaatgcactctacggcctgggcctgctgctgacgcccccgctcgccctgtttctctgcggcctcctcgccaaccggcagtctgtggtgatggtcgaggagtggcgccggcccgcagggcaccggaggaaggacccaggcatcatcaggtacatgtgctcctctgtgctgcagagggcgctggccgcccccctggtctggatcctgctggccctccttga

SEQ ID NO: 116026 - DNA, 313 bp, Homo sapiens
ttggcccctgcgtgatactattctgacccattcttcaaggtacagcttcaatctgaacctttgtaataccatcctggctcagttttcaccccttggagttcacagccttgtactgcccatttgaaaatcacccatgtactgacggcctcctaacgtctctaggcttatgttcctgattatttttgcttgctgcacaatatctttcatcttctcaaatagattctgaatctctgaagcacaggaaccatttgcaacacttgtaaaaatgaaagtaattcaataaatatttattacatgaaacattaaatgagct

SEQ ID NO: 116027 - DNA, 408 bp, Homo sapiens
tggttacatgaggcaggtgtgagggacccgagcactcctgaggagggaagaacactcctcttggccatgagtgtccatcccaaagctgccctgcagcctagcccagtgcagattgaatcagaaagccaaagccccttccacccgcttctctcaggcaagctgcctgcaagagagaaaagtgtattagtgcaggagcttgtgtctgctgaggatggcacctggccctctcctctcaccacgtccgggtcctcctgaggaccggtcccctgtccccggtccccagccagctcagcctgaccaggcttttagaggctccgcaccccagcatcggccagtgctgacccttgtacggctgtttgggtccccgatcactctcataacagccctgcccttgtcctataccctcta

SEQ ID NO: 116028 - DNA, 928 bp, Homo sapiens
aagaataaaactggattcctatatctcaccatatataaaaattaactcaagattgattaaatactcaaatgtaaaaacctataaaattcctagaagaaaacctaggaaaactttactgaatatcagccttgacaaagaatttatgactaagtcatcagaagcaaatgaaacaaaaataataataggcaaatgggacctaagtaaactaaaaatcttctgcacagcaaaggaaataatcaacagagtaaacaggcaacctacagaacaggagaaaatattcacaaattatgtatctaacgaagtactaatatccagaatctacatggaacccaataaataaataaataaacacattatgtcattacaaagtaggcaaatgacataaacagacatttatcaaaagaagacatgcaggttgccaacaaacattaaaaaatactcaagatcactgatgatcatagaaatgtaaatcaatattgaagtgtgtattagtctgttctcatgctgctatgaagaaatacccgagactgggtaatttataaggaaaagaactttaatggactaacagttccatacggctggggaacattcaggaaacttacaatcatggtggaaggggaagcaatcaagtccttcttcacatggcagcaggaaggagaagaatgagagccgagcaaatgtggaatccccttataaaaccatcagatcttgtgagactcactcactatcacaagaacagcatggagggtaaccgccctcatgattcaattacctcccaccaggtgcctcccatgacacatggggattatgagaactaaaattcaaaatgagatctgggtggggacacagccaaaccacatcaaaaagtgattcatttgacatggtcttccctatcttctctcatttagggtaacattatttccttgaa

SEQ ID NO: 116029 - DNA, 374 bp, Homo sapiens
cttcatatagtttgacaccatgagcaagatacttagaaatggatctgaattcagtcctagcttggccacttcctagctgtgtggctttgggcaaattacttaatctccattttctcattggtaaacttgaagtaaataccacttccgtatggaattgttgggactatccaataagataaagtacgtgaaggccttttgtagactctaaagagacagacgaacaggaagagagtcaacattgatagggtctacaattgcagcaggcagctgtgaaagggactgttttctctagctacatgtgaacttgaaaatttcaggtagatggtgcctaaggaagggtgaggtggaagcaaggaaaagttcaggggtgcttg

SEQ ID NO: 116030 - DNA, 238 bp, Homo sapiens
cctcagatcaggcctggaggaaagacttctcatgtggcggctaagtctcctagaggagactccatagacattgtcatctaatgacaatctgtagtgccatgagtttggactctcatttttactattatgttgaaatggcaacatgttttactgttatgaatccttaaagacagtttctttattaatttcagtcacctggaaggaatcggtctttagagagaggtaaggtaacatcatt

SEQ ID NO: 116031 - DNA, 579 bp, Homo sapiens
  misc_feature (207)..(207): n is a, c, g, or t
  misc_feature (245)..(245): n is a, c, g, or t
  misc_feature (378)..(378): n is a, c, g, or t
  misc_feature (385)..(385): n is a, c, g, or t
  misc_feature (390)..(390): n is a, c, g, or t
  misc_feature (434)..(434): n is a, c, g, or t
agcgggctgcgtccgcgccttctcttttccggtcctctccgccggccggggctcggctgagctccagatttccccacccgcggccgccgccaggggacaggagccgaggcgcggcagggcaccagcggcgggaggcaaggttggggaggcgagggcggtccgcgtgcgggggcgggagggggctgggggattcgagggacgcggcanccccgcccccgccccctcctcttctccgctccaagccngagaagctggggagcatggaccagaccccgcagcgctggcaccatgacgctcgcccgcttcgtgctagccctgatgttaggggcgctccccgaagtggtcggctttgattctgtcctcaatgattccctccancacagcnaccgncattcgccccctgcgggtccgcactacccctattaccttcccanccagcagcggcccccgaacgacgcgtccgccgccgcctctcccgcgcttcccgcgccccccgcgggcgctcctgaccagcgcccgcacgccctccaggccgggcacacgccccggcgacccctggggctgcccgcgggagccatg

SEQ ID NO: 116032 - DNA, 542 bp, Homo sapiens
tatgatcttggctcactgcaacctctgccaccctggttcatgcagctctgcctcagccttccgagtagctgggactacaggcgtcgccatcatgcccggctaatttttgtatttttagtagaaacggggtttcaccatgttggccagactggtctcgaactcctgacccctggtgatctgcccaccttggcctcccaaagtgctggaattataggcatgagccaccatacctgggccaagatatttcttttaaagctaaatgacatgtaatgttttgctttctctgaggatctggtatattttgtcttcttgattaataagaactaagaactaactatctacattatttatgtggtcatttcccacccattttctaatccagaaaggatttaaggcccaagggtttgcaacctaatagaccatgtctcccctttcactttgcacaccaggaaattaaaagccaagtgtgtatcatttatatatatatgtggtctatatatctgcacttttttaaagagatgaggtcccttaaattccaaagg

SEQ ID NO: 116033 - DNA, 842 bp, Homo sapiens
tgcgccggccaggtgagtgggcggcctcaccgggaaccgctcgcagcttttgggttgcttcatcgaaaaagtagttcttgtatggtgctgggaataccggtgtcctggctggggctcggtgctgacaggaacgggacggtgctctggctaattacttatggaagtcggccttgcgcttgcggaggggtgtcggcaccgtcactttggttctggcagtggcgggggtgtggtgctgctagttgtgttcctccgcaccgaatttatgagtgtgcccctggagcccctgccgcggacaaaatcggcaccataactttgggatagggaggctagaaggaggcgggtgttactagtagtgttcctccgccctggacgtgtgcgtgtgcgcttgtgcggccgcggggtgggctcacctgccgcctgttaatgctcctagcgcttggcccctcccgggccgcagtactcctcgtgtgacacggacatcattaagccagctgagaatcgtgcggttacagctgctgcagtttctttgcagagtaagaggctctttttgaagtttccctgatggtgaggctttacccctggaagtgtcttaggaagaagaccactgttaaagatgtcctattctagcttgacagccctgtggggaagactaatccctttctagaagcactgggttctctggactttgcacactccaggagaagaacccagaaaattgatcagttctaaaaaaagcatgcccatttgttggtgacttccagggattggtgggccttggacttcttctcagaaggaatgggattgcctggacctggtcagaggggctttgtacggggtgtgca

SEQ ID NO: 116034 - DNA, 223 bp, Homo sapiens
ctttgcttatgtcattaggcaaggctggcacttcacatatttttatgtagatggttctcccaaggtctgctagaacttcagccactttccatgacacccatttgactgttgaaaagttagggctcacagattttcagattgctgtgagaatgtcaatgcagaattcacagggacagcctttctatttgaaaatttaaattgcaaggaaattttttaaaggaag

SEQ ID NO: 116035 - DNA, 491 bp, Homo sapiens
gtaaaacggggaggaaatggataccagagaaaggaggtaatgagccacctatggcaacactgacagaaggcagataggggagggggatgctgcttacacccccagggttcagcccgggtccttctgatttccttaggaaaagtaggcttactctccctaaggacattcctgtgcccacccgaccctgcttttgcaggctgatcctgaactccctaaaccagaaattgatgaaaagtaaagagtgaagaagaaaaaagtgaaggaagaaaaactccaaaagtacacaaagaatcagggtgagcaatgaggttgagagtgaactgaaatgcaggatatcccaggtggaaaggtggctgcccaaatggcctcttgtgccttcgtacaagaagagtcacctaccagagaaaagcatcagacccttaggccagggtttgtactgggtccacacagaggccagtggagccaagagactgcgctgctccacactgccc

SEQ ID NO: 116036 - DNA, 786 bp, Homo sapiens
ctggagttcgctcctcattgcccaggctggagtgcagtggtgagatctcagctcaccacaacttccgtctcccagggtgtcaagtgattctcctgcttcagccttccgaagtagctaaacttacacattgtatgccaccatactcggctaatttttgtatttgtagtagaaacaggatttcaccatgttggccaggctggtctcgaactcctgacctcaagtgatctgcccaccttggcctcccaaagtgctgggattacaggcatgggccaccgtgcccagcctattacatgttttaaggtcataaaactgctacttctggaatatttcttaaacttgcttgatttgtctaaattgagctaaagctgtaaggtctggctgctgggctccctgaaaccttgcacatatcttactgtatgactgtatttcgttttgagtctctggattctggggtttggacagatgaccatagtgaggcctgcagaaatatgcatgtcctcagtgtttggactgccagctgcaaggcagagccaaacccaatatggccccatcatccctggctcagctgtgctacctggccatgctggaaggggtttgatcttccaggaatttgcttcacagctctttcctgtcccaagatctatgcctgatgtgtaaattcaggacccaaaagggcacaaaaaagcaataactactaaatataaggaaaacaactctgtatacagcatgtataaagaaaagcaagatatatttggggagataaaagttgtaaaggcattaagatgt

SEQ ID NO: 116037 - DNA, 745 bp, Homo sapiens
ttccgaggtcgctcagcacagcgcttccaaagttatttacctggtagcgagtgtcagacttccttcatttttctggctgaatcctattcccatgggtggatggaccgcattttgtcctccattcatctgctgggggcaactgtgctgtttccacctttcagccattgtgagtaacgctggtctctggagtgacagggatggccctgccccactgacccaggcgttcaccccagagaagcgtgcaggcaggtacaagaggccgagtgcggtcaacttgaagggacaggaagcctgcaggcagtgaccactctctaggctgtgctcagaggagaggccaaggggacacaggcaccagggccgtgggacacacctgggctaccccagctcctatcaggacttgatgtggcgtatggagcactgaccgtccatgtggcaggactcagaggacgcgggcaacacagtgcccaggacagagaggccacagaggagcaaacgggcaggccgaggacagtcaagaccaagggaaacggctaattaattaggctcagcctcttgaaaggcacttaaaatactaacgacttgctaaaaaagggcaggacttgaaagcaaagccaaggtccaaagtgcccaccagcgtgaggggtctgctgcctccctgcggggaagccctggcagagccccttgctttgctgctcacagagtccaggacatgagagccgagcccatgcaccagtgactcacgccc

SEQ ID NO: 116038 - DNA, 341 bp, Homo sapiens
cacctaggaaggcatactatcatgagatggtggtagcactctccaggagttcgtgcttacagcagagtccacacaagtcattaggcaaaccacctgctacccaagttcaaagctatgctttccagatttgagctgtgtgattttagggaagtttaaataaaataataaacataaaacatccagggcctgacataaattcagcatgtaataaatattagctactttttatcttgtttaatttcaactgattttttttttttttaagacagaatctcattctgtcacccaggctggagtgcagtgggacaatcagagctcactgcaatgtcagtctcctggga

SEQ ID NO: 116039 - DNA, 333 bp, Homo sapiens
cggggcggttgccgttggggccgagcagcgcagaggttctaggcgggtgggcgtccagggtccgaggttgggagactgagggggtccccctaactcgccagtgggagaggggcgggaaggctgggggcgcttcgaagcgtcgggtccgaatcccgcgactaagcctcctcctttatccccgcgctcgcccctgagcctaggacttgcgccctctttcctgccactccccccgtgcgcccggtgtcccagccccggcgcccgccccatagcccccttctcccagagctggcgccgtctcacgcccgctgcgaacccccggctctgtctccaagc

SEQ ID NO: 116040 - DNA, 258 bp, Homo sapiens
cctggccaggtgctctgaggagctcagtttcaggatgagggcctggccagaagtggtactgagttgctgtgtccctctggggtctgggcccccatgatgtctcttgacaggtgttcctgtccccattccctcagcctggccctcttagcaaagtcctggtgctgctggtctgcatgagccccctgatttagccttgcactttaccatggtggccatggatgagtcttcccacctcttgccctatttcctcactagtag

SEQ ID NO: 116041 - DNA, 448 bp, Homo sapiens
gtttttttttttttaaattgagcgggtctctcatggcactggttttctaagttactctgggaggtgaggcatctgcctgtaggatattgggtagggtgatattggtcaagatttgattcatactggagcaaatgttgaattcaaaacagtaaaaatgaagagcaggtgtggtggctcatgcctgtaatcccaggactttgggaggttgaggcaggaggattgctttgagcccaggaatttgagaccagcctgggcaacatggtgaaaccctgtctctacaaaaaaatacaaaaattagctgggcacagtggcacttatacctgtagtcccaagttcctcagcaggctgaggtgggaggattgtttgagtctgggaggcagaggctatagtgagccatgatcgtaccaccgctctccagcccgggcgacaaagcaagaccgtgtctcaa

SEQ ID NO: 116042 - DNA, 647 bp, Homo sapiens
acctttgcagggcagcctggggctggggctgtggccacctgtgtcctcggaccccaggtgagtgggtgaccaggccccttgttccagggccacgccatctcctgcctgagactcctccagggtgggaggaggccccggccggagctggcgcttcctgaccgtggccgtcgggctcccaggacagtcccagacctgcaggcggggccctggtcagtgtctcctgagggtggcccggtttcacccagtgaagacccagaacctttgagcgtgcagcattgcgcccggtcccgaggcaccagctccctcagcttcccgagctaacgggtcctgcgagtggagacgtcacaaagccctgcatagggctgcattcagaaaggccccggtgttcagcagggcacggtggctcacgcctgtcattccagcactttgggtggccgaggcaggcagatcacctgaggtcaggagttcgagaccagcctgggaaacatggtgaaaccccatctctactaaaacacaaaaatcagccgggcatggtaggcgcctgtagtcccagctattcgggaggctgaggcaggaaaattgcttgaacctgggaggcggagatcacaccattgcactccagcctgggcgacaagagcgaaactctg

SEQ ID NO: 116043 - DNA, 493 bp, Homo sapiens
tttctccagggtttatacgtggaagaaaagatctatgaccaaacaaaaacatcatggggtgtcctagacctgcatgaagatggtttggaagagcttcaaaatgctaagatagacctaaggactttttcagaactactaacagagaatggaagccgcaagctgacaaatgtcagctcagtacagtaaagaaccttcttagagcactgtccaaagatgaattggactgcatcatgagatggtgagttcctcttgctggaagtatgcaagcagagaccagagagaggtgtagttgtataaaaggccttaagccatagaccatgtggttatactaatgtaccagattggtgcaattctggaaggaaacatgccagtgaaccaaacagaatattccaagaaaaagttcgcaggttttaggagcactataaataaataattgccgaatccaaattaacacttcctttctcttaaatggcctgtaacattttcagtcatt

SEQ ID NO: 116044 - DNA, 492 bp, Homo sapiens
tataagtaaaaaccaaataaataaaaaaccttttcattccttcctttctttcctcctctcaaaaatatgtcattcatgcaagatgagggcatagtaaaaatataaataaacaaaagaaagaaatatgtcttgactctatccactccatctccagtcagctctaacccagccatttttcatggagactaatgcaatactctacccctataatcaacttcttctaccctcaaccctttacaatctttccctcagcagccagagtgctattttgaaaagcgtctataagattgtgtatctcccctatttaaaaatctttgatagcatcccattccacgtagaatcaaaaccaaacttaatacaaggcctaagaaatcctacattatccaggctttgcctccttttctagtttctgcttaacaaccatgcgcctcttggtcaccaagtctgttggcctctttttagtttttaaaacacataaaacatgttcacact

SEQ ID NO: 116045 - DNA, 676 bp, Homo sapiens
gataattggaatggcaggaaagaatcttatgccctgatattaaaatcaagctactatttttatcttctaggtagctactgggaataatttcacaagttgtttcaaagataaaataagctaacagatacagaagcactttgcaaaactacacttttgacttacctttttatgggctctgtttagtttctttcccttgttattcagatagtttctataaagtttattgtagaaattgtaaagtttttatcatttaggttacattaagttatttgggcttgcatttgtctgcttgatttcatttttgtttccattctttccatcttttgtttctgtagtcgctaacttatttgttaacatcagccaaaaaagaaattgaactaatgtcagaagagctgaggggtctgaaatcagagaagcagcttctttctcaggagggaaatgatttaaagttagaaaacggttcacttttatccaagcttgtagaattggaggccaaaatagctttacttcagggagaccagcagaaactgtggtcagtgaatgaaactcttaatttagaaaaggagaaattcttagaagaaaagcaagatgccgaaaagtattatgagcaggaacatctcaataaagaagctttggctgttgagagagagaaattgcttaaagaaatcaatgttgt

SEQ ID NO: 116046 - DNA, 222 bp, Homo sapiens
cgattgaaagttccagaactgcgttaaaattgtagttctaacatttactagcttatcttaggtaagtagcctctctggttatacccagtagaactaacacaatgccttgtgcattgtaggtgttcaatgtgtatatatctagttgaactcacttatttttatttttattttttgcatagcctattctcatacattgactaatatgccttttttttttttttt

SEQ ID NO: 116047 - DNA, 644 bp, Homo sapiens
ggctgagggaaaacccaacggctggtccctgcatccgctaggaccagcgccatccaaaggcttgttccatcacatggcactcaaatttacagatttttcagaagggcaattaaatgtcacctttgatggagaagtggcaagaacatattgtcaaaaagcaaatggaatggggaagtttttgtgacgatctttggaaaatacaattcgcgacagcctgtgaaaccttgactagatttgcttccttggtcaatcttccagtcttttagaaaacagaaaactgcatgtgccaacatgcaccccacccctatgctcccagcaacatgtatacaggaggtgagtttccactggagcaggcaagtcactcctttcccaggatcacttgggaaaacagcgtgcacagaaacccaacaaagaaccctctgcgacccacataggcagaacagctagtcaagcccctgtgatatcggatggcttacttcactcgtctgtgcctccactctctcttccatcaaatgggggtaaggtactgacagcgtagtgataaaaaattacaaaaagttgctttgaaaagtgtctgacaattggtaaatatacaaggcattttaataagaccctaaatatcatcagtgccttacattctgatg

SEQ ID NO: 116048 - DNA, 873 bp, Homo sapiens
gaagcattgagacagggggaggtttcaggtaagagttacgggaacgtacaggagcaaagactggccttcttgggaaatgtccaaggctttaggcagattttaattggaacaggagcaattcctttttctgccgtgataagtatcgtacgtttctttttgtctggcagcaacttccatagtaccatcagatactctctactatctactaatttaatctgtcatactctgtgccaccatacgttgctgcttatatttagaatcagctgtctccaaatcccaggcatatttcaagccctactaagccagagaatgtgtgttatgaccccgttgttatataaaacacatacacacatatattttaagaacccaccctgaaaaatatggcctttgcttaaaaaaataggaaaagaagacagtttacactgctgtgtagcaaagaccatattttctcgtatttaggaacaaagacatgtcaggctttattgagcacatcactaactatataactagcgttaaacactctatttgcaactgttgctgtgtattttgtgtgtgattatcacccctagatctgcatcctataaaaagatatttctgtttgcttaattataaagctctttatgaacaggctcatctgtaaatagcttggtgcagctgaaatagaaatataattataatgaaggcagatgtttgtgagatactggctcatgaaacttgttcagaatctacaaaggagaaacgttgtgagcctgtgtttactggtgggccaaagctgggagcaaggagtgtttacttccatacttattttagagtcctcttatttcctctccacctttgccttcctaggtctctgtaatttggaataggcgtggc

SEQ ID NO: 116049 - DNA, 476 bp, Homo sapiens
acattccttctcctggctcagaacctccccaactgagcaccttggacccctcggccctgcccgtaagagaaaaaccccctttgactgtaattttccactacctgcccaaatcctataaaatggccccacccctatctcccttcgctgactcttcggactcaacctgcctgcacccaggtgattaaaaagctttattgctcacacaaagcctgtttggtggtcttttcacacggatgcgcatgaaaattaccaaagttcgcacagcaaccagaagaaaggtggagcaggaaagtctgtttatacaaagagctgaaagtttcaaccttaggccacaaaagttgacatggatcggaaggaacttttataagaagctctaaacagttaatttgataactaaaactcttaagacaatcttccaatacaaacatgagtattcaatcacaaagattaacatgaaattcaaaagggagttttga

SEQ ID NO: 116050 - DNA, 439 bp, Homo sapiens
tcctattctctcctctatcacatgttaaatacatgttaaagatacatgttaaaaaactgtttgttaaccaaataactacagcccttttaagtaaagaaatatacagatttagacacattacatacacagaagtacatctggttttgttgcaggatatacctgcatctcaggattttaaaatctgcaatacatcaaccagttttaattctttttacagaaataaatggaggtgacctaactagtagcatatttaaaatgctgtttaagagtcaggtgcagtggtacacacctgtagtctcaactgtttgggaggctgagatgggaggattgcctgagccaggagttagaagctatggtgtgctatgatagagtctgtgaatagccactgcactccagcctgggcaacacagtgagaccctgcctctaaaaaaagtactat

SEQ ID NO: 116051 - DNA, 376 bp, Homo sapiens
attattagtggaggcacgggggaaggagagtgcagtgcgggaggcaggaagggaggaagagtcacatctgttcttagctcagcctccacccaagtccatccagttctctgtctctctctctctggagccttggctccacggctgctgctgtcaccctggcctctggggatgccctgctctcctccctgactaggctggcttccatgacatcagatcactactcctttttactgcatccgagaccagattgggatttttgaaaaggaatttgagcaggaaaattaaaagcaaaaaaaggactcatccgagtgtaggatgggaaaaattcacagagtatagattttttaaaaatattcaaattcagcaaagttcagtc

SEQ ID NO: 116052 - DNA, 332 bp, Homo sapiens
ctgtcaggtggcaggcctgcaagccaggtcacttgctatggtttgaatatctcctccaaaactcatgttgaaatgtaataatcattgtgacggtattaagaggtgggaccattaagaggtgattaggccatgaaggctcagtcttcacgaatggattaacaccgttatctggggagtgggcctagattcaactacagaagaggagacagcaatgtggccaaggaagcagtgatttagagcaaggcagccacaggccaaggaataccagcagccaccagaagctgaaggaggccaggaactaactctgccctggagcctctgaagaaagcagt

SEQ ID NO: 116053 - DNA, 398 bp, Homo sapiens
ctataaaatggagataacattacctgcctcaaaaaatcattctgaatgttaaataagataatgaatataaagtacatagtgtatataaagtgcttatattagtacctgacatacaagaccttgtattccaaaagtattttcttcttactcatgttacaaaatgtcaatgagagatttagtgagtataaggtttggtgttctccctctctgatgtgctaaaatttgatgtttgtatcttccctttctggtctacttttgcacttctttctagttagcacttaccactctttgtacattataggcatactgaccaagattcagttgatgaagttgaatggcataaaggggttaactctcctgaagtgaattttttttttatttcttctaacaaaaaaaaa

SEQ ID NO: 116054 - DNA, 499 bp, Homo sapiens
caggtggggcgaaaggcgtcgcagagcccgggccgcgggtgccaggaggatggggccacagcagcccctcgggcctcctttcttggattttctcagtctgttgctgcttggaacagggaagctccgcgtcctcgttctggggtgcacccagtcctttcgtgggatagagccttcgcgtaatccgtctgcgactcctcccttcccattttggctgctggctgacctgaaagccacgcccaacctgtccccatagcccagcgtgtaccggcagtggctccgccgccttggatgtcaccgtgcagtcgcacagccaggagtcaagctacagggatgtagctctccgcccgctgcgtcttgctgttctaacagaggctgtatgaaaacttggtaatcctagaaactgctcagatggacctcgcataaaagaagcctcacaaggttccgttggaaggggaagtttcccatgattgtatctgcagacggattcctaactgcgtaa

SEQ ID NO: 116055 - DNA, 404 bp, Homo sapiens
tctcggtaaatgttagctattattcttattatctgtaaaatgacagataataaagcaatgtttataaatgctgttaactctgcaggtcataatgacacttgtgaggaggtaaaaggagcaggtgaactggaggatatgtctgtctggaaagcagcatgttcccgacaatgttcatgtctgaaattgagcagtaattagtgagtgagctgaaatgagttggaaacagttaaaagcccttcttttctgttccctttatttatttctccagtgtagtagcttcatccacacggaagtgtcgtgactattactacctaggcaaattcactgttgaataccagctgactttgtactgaaaatcactttgggaactgaagtaagtactgagaagaataaatcttaaaaac

SEQ ID NO: 116056 - DNA, 2933 bp, Homo sapiens
tgcagaagctctttaatttgattaagtctcatttgtcaatttttgtttttgttgcatatgcctttgaggtctagtcataaattctttgcctaggaaatgtccataagattttttcctaggttttcttctagaatgtttaaagtttgaagtcttacatttaagtctgtaatccatctagaggtaatttttgtatatggtgagaggtaggggcccagcgtcattcttctgcatataggtagccagtttttccaacactatttattgaataggatgtcctttccttattgtttatttttgttgattttgtcaaaaatcagttggttgcaggtatatggctttatttctgggttctctgttctgttccattgatctctgtgcctatttttgtaccagtataccatgctgtttttgttactgtagtcttgtagtatagtttgaagtcaggtaatgtgatgcctccagctttgtatttttgcctaggattgctttggctattcggctattttttggttccatatgaattttaggatttttttttctaattctgtgaaaaatgatgttgataatttgataggaattgtgttgtatctgtagattgctttcttccaacccattagctgggatgtttttccatttttttgtgtcatctatgatttctttcatcagtgttttatagttctctctgtagagctctttcacctccttggctggatacattctttggtattttattttgtgtatgggggactattgtaactgagatcaccacgttcctgatatggttctcagcctgaacctgaacattgttggtgcatagaaatgctactgatttttaggccaggcacagtggctcacgcctgtaatcccagcactttgggaggccgaggtgggcagatcacctgaggtcaggagtttgagaccagcctgaccaacatggtgaaaccccgtctcaattaaaaatacaaaaattagccaggtgtggtaacacctgcctgtaatcccagctacttgggaggctgaggcaggagaattgcttgaacctgggaggcggaggttgcagtgagctgcgatcacaccactgcactccagcctgggtgatagtgagactccgtctcaaataaaaagaaatgctactgatttttgtacactgattttgtatcttgagtgtagaaagtcaaaagttttttttttgttaaggagtaaattatgtgttagaaataatagttttttctaaagactaactttttttaagccttttcgctttgtgctaataactttttgttaagccctatcatatgtagctgttagatataagggaatgagtacattctatgtccttgtactttaaccaagatatttgtgctggacgtgctcacaggcatgtcccagcttgcagcccatgccccttccttatttggaaatgttattacttttctaagtcctttcataagcaacttcctcttttcctttgtctttccactgcttttacctatttagaaaagttttaagttattagccagtcgggttttagtttagactgtgaggtttggctccagccaatggagacaggacacggtagcagggacaagctgcgtaaggaataaaaattgcttctctccattattcaggtgtgctctcgccattgttccatctgcgaggagcaccctttctgcagaaagtaaaattggcttgctaaaaaaactttttgtctaaatgctgatttttccttgcagtaccgaggaacaagcattctgtttctaaacaagcattttacttataacattgagactttactgaagttgtttatcaagtctaggagtcttttggaggaatcttcagggttttctaggtatagaatcatatcatggatgaacaaagataatttgacttcctctttttttttttttcatttggatcccttttatttctttctcttgcctaattgctctgactaggacttccagtactctattgaataggaggggtgagagtggacatccttgtcttgttccagtttttagggggattgcttccaatttttgcctgttcaatatcatgttgccggctgagctctttacctactgtgtgacttgggagagctgctaaaccagctggagcctcagtttccccccatgtaaaatgggtacagcaaggaatatctgccttgcagggtcaaagtgaggattaagtgagatagcatgggtaaagcccctagcacacaacaggggggctcctcggccccagaggatgtcaggaacatgtcagtgtcccagagccatcaggaacatgtcagtgtcccagagccatcaggaacatgtcagagcatgtggggacatgtcagaaagtgtctcagagcatgccaggcagcccagcattctagggcacagatcaggtatcagtggcccaggcatctcatgcaaacgggtgtggcagtggggaccctgagagctgggactctgtaaaagggacaagagcgtagttctgtgagaacctgggtgcagagttctgagaccttctaatttttcaagaaaaccaggtcattcaaatttttatgtgaaactgtctggtatttaaaagcagccaactaatctcaagtataaacagacaggcacgcctaatgtgcaagtcacactctgctctccctcctccctcccccctccttggtcctcagggagtgctgaggcttctggggtctctctgaccagggtggagccactggccaccagggctctggagcacttgggatttggctcgtccaaaccaaaacctgctgcaagtgcaaagttcacacctgatttttaagacttagaataaggaggtggggaatgtgaaatatctcatttaatagttttagattggtttcatgttgaagtgataatattctggatatattgggtaaaataaaattatattattcaccggcaaaaaaaaaa

SEQ ID NO: 116057 - DNA, 117 bp, Homo sapiens
ccttttaaatgacgtgaaaaaatcagaggtgaaaattgtacatttggaatgtatttatgtaaattttgttgaaatttagtgtaaacaaagattttctcagtggtctagaaaataaaa

SEQ ID NO: 116058 - DNA, 421 bp, Homo sapiens
aaacttccggccaactgctggctgctgctggtagcaaggaacagaggcgacagggcaggatgggtggacctgataagccagatggcgtggagctgtcccaagcagatgctctgggattattctgccttccaagagaccaccttgagtcccagaggctgtgggctaggggccagcaggcagggtctttagctggacctgtggactccagaccaggataagaaccagccctctgggtttattcctcatcccagggacctgtgtagggggcccccaggcatacgcccctacctcaggggactacgtgggtatcttgtagagccggttcccaaggttacgcccccatccccaccccagcctacagggctggccccagggtaatgcccctatccttggggcctgcatggataccctgcagggctag

SEQ ID NO: 116059 - DNA, 760 bp, Homo sapiens
gggaatcgttgctaaaacagctttttctgacattgacctcaacactgagaatgaaatagagagctgttattatctgaactatgcaaatgtgagagtaagtgagtgtgaagttcatcgaaaaggctcgttagggacaaataaaatcctgagtctggtgtttccatggattctctctcccaggtaatggagcagtgacggtttgtttcttgttctatgtagatacttcagtttgttaatggacgccctgtgttttattataaggagagtttatggaatctgcatgtctaagagaatactacaaaatgacacattctttcaaatagtgccttgtctttcctcagccttaattcagatattatagaccatggatgcctgtcaccactaggccttttactcatattactgagtttaattcttctatcagcattaattaagcacccatattaatagagtagagaataaatgagctttagtctatcttttcctttcctattcaggacagggctgggataagcaggtagatctgtaatagttggtggcaggggacaggaggtggcaggggaaagggggaagcggacatgggtgtgcaggtctaaccgcaagtgttcaaggcataatatcgaaagggtaagacagtccacagcagtcagcatcatggagtatgcagtaattaggcacaacgtaatgaggagaaaccaaaaagtagacaacttacaaagcttttgtgtgcctttgtcttcctcatctgtaaaatgtgtat

SEQ ID NO: 116060 - DNA, 606 bp, Homo sapiens
tattattgagtagaggtggttgctgtccactgtcacaacttgtatttagcattgcactggagatcctagccaatgcagtaagacaggaaaaggaaatgaaagggatgatgatggaaaaaaacaagacaaaaaacaaagcctcagtgggcatcctgacattcactcctgccttagatagactcaagacccctagtcataggtaataccagaccccctaggtcttcacccatgcacacactttctcagataaaccctatccccagaaaattactatggagcacagcagaaaatactgagagaggagaaacaaggatggaaagcaaggacaggaatgttcctttagcaaaagtcctttcacatatgaggtagaggtggtgatggatagtctcagtgcagtgaacaacctataccactatatggggccatttaacttgccctatagacagaagaagaaggggagtggtaagagcattttgggcaaagaatacaatgtgagcaagagcactaagacagtaaattcaggaagtgaaaggacactgaaggcttgagctctagagcagtgataatgaggttgaggtggaaagacctgatttaagagctatcagg

SEQ ID NO: 116061 - DNA, 290 bp, Homo sapiens
tttttctttaccatgcatctgtggggttttctaacctgctctatacatcttctgtgatttcactgtccacttgaatgacccacatgacaccatagctactcaattatttgcccgtcttctctctaatgagcttccctgtgccagttaagccatttacttcacagtctcgctttggacttgtcactcttaactgtttcacttccacaatattaatttagatatcctattcgtagaccataccgtctcctggtttgcttgtgcaactccttaaattataactattctttgac

SEQ ID NO: 116062 - DNA, 411 bp, Homo sapiens
tcttctgtcattgttgtgtgattctgctgcatcctgaggtcttctgatggccggactggatgggccctcagtgctgcactcccatctcaggccctgccccaccaccactaaccccagctctaattttgaagggtggcaacattcatcccaagttgcctcagtttacttcagttacgtggtggcctgtcagtggggtttccaatggttcctccgtcgccgtgtgtatcacaatagccagcagaggctgctcagctcatctgtgcccaccccctgactgccaggacagcctcctgccaccttgtcactttactcagtctgctgcagttgcagctgcagtcacaccccagactcgaaccccagcatccagggcctcccctggtctggccttgctctgcctttccggcttgcccc

SEQ ID NO: 116063 - DNA, 444 bp, Homo sapiens
aagtgagagtaattctctccttgaacccacaatattttctttttatcacaacctttaaacatacccagagattaattgtgcatgccaggattctaagaaatgagagatttagtctctatttgtagattcaacctcgcttttacattatgtgaagtttgttcactgagaacttgaaaccagaccaaataaactgggcagcttgaaaaacagacaaacaaacaaacaaaagctgaacatagatgatcaaggtaaaaacttgagtgtcaatatctttatcactcactggttaatgttcttggctagattaccttctttttccactcttgtacaattccaattaaaatttttattttgacatcaaaacctggcttcctgagtgtcttgaataaatacagattgataagcactttggccaattatatctgagaattcttctctactcat

SEQ ID NO: 116064 - DNA, 832 bp, Homo sapiens
caatactagtcttttttgttagatatgtggttagcaaatattttctcttggcctgtagcttctttcttcatcttcttcacatcatgtttctcatccaaaagtttttaattttcataaagtccagtttatcactttttccttttatggattatgcttttggtgtcaaatctaagaactccagatcctgaagattttcccttatacttaaaaaattatagtttcacattttaagtccatgatccattttaagtttatttttgtacaaagtttgagatttgggttgaggtttttttagggggtgctgagttgggcaccatggatgttcagttgtttcagcaccatttattttaaaggctatcctttttctattgatttgcttttgtatctttgtcaaaaagggaacaaagaaaagatgagacaaatagatgtagaatttaaactaattatattaataattgcattaaatgtcagtgctctaagcagcccaattaaaaggcagagattatcagagtggatgaaaaacaaaacccaactctatgctatctaaaagaaatctattgtaaatataaagacacgaatatgttaaaaggatgaatgaaaagattaggtcctggatggaactgaggttaactgaggataattttaagatttgtactatgggtgattaggtggttgataacacaattaaccaaagtaggtattgaaagaccatctcatagctggttggtgatgaaggaaatgagttcatgttaatgtttgaacctattatatttgagatgtttgccacatattcatgtggatatctttggtgtccagttggaaatatggatct

SEQ ID NO: 116065 - DNA, 308 bp, Homo sapiens
gaaacaggatgcttgaatctaatagtgtagtaactctggaaatcaggttctccctctttctcagggtttgctgatttctgattttacttttgttgtttgattgtggtaggctttgtctgtgtcagggggtctgcctgatgtgtaagcttaagtttttctcaggtcttttttgagcctgcacctttcattgggtgtgtgtggtaaccttctacattcccctgatatgtggttacttttgaatgtcctagactttaaatatctgtcttctgaaagtgggaaaagagaaaaatgaagaagaaaataaaagc

SEQ ID NO: 116066 - DNA, 654 bp, Homo sapiens
gatttgtttactgttgtgttgtttgagttcctcatattctatatattagtcccttgttggatgaatagtttgcaagtattttctcccattcaacaggctgtctcttcactctgttgtttcctttgctgtgcagaagctttttagcttaatatagtcccacttaactatttttgtttttgttgcctatactttttaggccttagctataaaagctttgcttagaccagtgtcctgaagtgattcccttatgttttcttctagtagttttaactagttttaggtcttaaatttaagtctttaatccatctcgagtttatttttatatgcagtgagagagaggggtctggtttattcttctgcatgtagagagagctccaattttcccagcaccattcattgaagaggggtgtccattccccattgtgtatttttgacatctttctcaaaactccattggctgtaactacgtggatttatttctaggttctccattctattacattgatctatttttataccaatacagtgccattttggctaaattagccttattttgaagtcagttactgtgatgcctcatctctactaagggtacagaaggttacctgggtgtggtggcacgcgcctggctactcgggaggctgaggcgggaga

SEQ ID NO: 116067 - DNA, 175 bp, Homo sapiens
gcatgtgactgtgtgtgggggtgggtgggtgtcaatgtatgtgtgtgttgtatgtgattgtgagcatgtgactgtgtgtgggggtgggtgggtgtcaatgtatgtgtgtgttttatgtgattgcatgtgactgtgcgtggggatatgagagtgtatgagaatgcatgtgtgtgtt

SEQ ID NO: 116068 - DNA, 791 bp, Homo sapiens
aaaattagcacaaatatattcattttcaaccaatattatgggctataacatgtttcagggtcctagggaaatacattaggtaaacaaaacagacgagcccttcccctcatagagcttccattctagttttggagattaacattaaacaaagaaaataacttaatttcagatactgataaagtgccatgaagacaaaaaaacagagtaaaataatagtggttggtggagttgggactcctttaggttagaggaaggcctttctgaggaattgaatgatgtgtgagctgtatctaagtgatcgaaaggagccagccatgtggagaaggcacaggacgagtgtcttaggcagtaggagcaggaattctaaaggtcaagagatggggaacaaactggtcaaaattaaagaataagaagaaagcaaggcaggcacactggagcatgcctgtaatcccagttacttgggaggcagaggtgggaggatcacttaagcccaggagtcaagaccagtctgggcaacatagcaagatcccatgtcagaggaaaaaaatgtgtataaaagaaagcaggccaggcgcggtggctcacgcctgtaattccagcagcttgggaggccggggcaggcaggtcacctgaggtcaggagttggagaccagcctgaccaacatggagaaaccccatctctaatacaaagttagccaggcatgttggtgcatgcctgtaatcccagctactcgggaagctgaggcaggagaatcgcttgaacccaggaggcagaggttgcagtgagccta

SEQ ID NO: 116069 - DNA, 150 bp, Homo sapiens
ttcgtgctgctgataaagacaaaaccaagtctgggtaatttacaaaaagatagaggtttattggacttacagtttcacatggctagggagacttcacaatcatgatggagggtgaaaagcatgtctcacatggcagcagacaaaaaagga

SEQ ID NO: 116070 - DNA, 822 bp, Homo sapiens
gtgccgtgacatgatcacagctcactgcagcctcaaactcccaggtccaagcaatccttccacctcagcctcccaagcagttgtgactacgggcacatgccactacatctagctaatttttttttatttcttgtagagatggggtttcactatgttgctgagcctggtcccaaacttctggcctcaagaaatcctcccatcacgtcagcctcccaaagtgctgggattacagggtgagccaccgcactcagccaacataatttatttttagagtcccttttaaactccaggtcttcagagtccacttttaatatatatgaaattcctacatattcttagaattttattctgttgcaagggtctttgtctcatcatgagccagtactacagttttaattagagataccttgtggtatgtttcaatatgtgggagtcttgacagagcaagactcgaaaagctcaaaaaaaaacacaaacacaacccaacaaaaaaacatttttgggccgcttgggccctctaaaaacttttttaacccattctgtttggcgcccgcgggccccaatttgctcacggcgcgaccggtgcgccaaaggctgttcccaagagaaagaccccgggggcccataacgcacacggcgctggagactttctccccaatttaaaaaacagcgcccggggggggcaacacccgagatgcgtttctctttcaaccaaaatctcccaaagtgaggggtttccagagagggcccacacaccgggggagtgctttcacaacagcggagattccccaaaggaaagctgcccgaattttaaatttagcc

SEQ ID NO: 116071 - DNA, 234 bp, Homo sapiens
taggggttattaaggacactgcagagtaaaacaaacaagcctgattatcttacagggaggaggagttataattcacctgtttatttagaaacctgctaatactaatcactaagaatctctgtgtggtggctcaggcatgtattcccagcacattgggaggctttggaaggaggattgtttgaggccaggagtgtgagaccagcctgggcaacatagcgagaccccccgtgtctc

SEQ ID NO: 116072 - DNA, 109 bp, Homo sapiens
gtctagagagtgcgctcagggtttctgtctaagctaagcaaagtcaacataatgattgcttttagactctttgaaatcagaatttttatttttgtttgtttgtttattt

SEQ ID NO: 116073 - DNA, 313 bp, Homo sapiens
tcaatacttacggtgcttttgtggcctttcacagacacacgcccacggcagtgaaaaatttgtgtcccagctggggctaaacaaggcgatggtctgctccctggtttctgccctcatattgtgaacatgtggccttttcttggtctatttagtgccaagtttcttgcatatttgggctttttgttggtgattttattgtttatgatggcccccaggcacagcactgaagtggtctggtgttcctaagtgcaagaaagctgcgacatgccttatggagaaaaaaatgtgtgtgagagaagcttcgttcaggcat

SEQ ID NO: 116074 - DNA, 293 bp, Homo sapiens
tccaagaccaattgaatcactataggaatgctggggaaaggaggcacccattggaatattttgaaagttctgcattcaggtgattctgacgtgcagccaagacagagaaacattcctttaagaggattattttgtaccttctgtttcctctaatcctcctactctcccttctcctttcaactcccagctgatgaacttgtctcatgcttcactgaggaaattgaagctgtctgaaggaaacttccctacccacccatggtcaaaaccattgaagtatctctgtctggagccat

SEQ ID NO: 116075 - DNA, 382 bp, Homo sapiens
aggccagtgctaacatcttgagagaatgagagggagtgttccggaagttggaagctgaaagtgacccacagggatcagcgtggagtctgagcagacaggactagcctctgtggaatagaggctcacacaagggaggacagaaggatttgaaagcagcactggagagcatgatgttgatagttcgcatctcttccttcccaggaattacgtgccttatttatacttcttgtcatattacattggctcagagcatcaaaacagtgttcgttaatcacagtgctcttgttccagatcgtgatgggggctgctctggttacccatttttgactgagtgtgaattgacagcttctccattatattgatgaagcatccgtttacatag

SEQ ID NO: 116076 - DNA, 616 bp, Homo sapiens
tgcagccgccagggctggaccgtgtggtgcgcaggtgagaagccgggagggcctggacaaccccgaccgcgagccggacccctgctctgaccgcaggaagcagtaccttgaagagaaattggagagggagtcaattcctaggatagcagagagatggacaacagacagaatagatggagtttcaccgattccggacacaataggttctacgtccatgaattcaaccaactgcaaatagaaaacatttgaaaaaataaaaataaaaaacagcaacaaggaaaaataatacaatttaaaaaaccaatacagtgtaacaactatttacctggcacttacattgtggccgggcgcagtggctcacctgtaatcccagcactttgggaggccgagatgggcggatcacagggtcaggagttcgagaacagcctgaccaacatggagaaaccccatctctactaaaaatacaaaaattttagccgggcgtggtggcgtgcacctgtaatcccagctactccggaagctgaggcgggagaatcgcttgaacccgggaggcagaggttgcggtgagccgagatcacgccattgcactccagcctgggcaacaagagcaaaactc

SEQ ID NO: 116077 - DNA, 752 bp, Homo sapiens
tagtagagaccgggtttcgccgtgttagccaggatggtctcgatctcctgacctcgtgatccacccgccttggcctcccaaagtgctgggattacaggcgtgagtaaccgcacccggcagtagtacctactttttaaagtgtaagcaaggaaagttggcccgcacctgtagtcccatctacctgggaggctgaggtggaagaattgcttgagcccagttggtcgaggctgcaatgagccttgatcacgccactgcactccagcctgggcaacagaacaagaccctgtctcaaacaaaaaagtgtatgtaagaataaaaattaatagattaggcacaggatgggtgtttaattctcggcaatcaccactaagttttcatactgaggcttattcattccatgggcaaaacattgcgctatgtgtggtgcctggggtgggctccaaattccagtcctctcctcgcttgcgatagctgtgtgatccattcctaagtttccttatttgtccacagagcgtacacagggtttttatgaaaactagatcagataatcagacacagttaaaatagcacgcgctcagtaaaattacatattagtggaagagacaagccttgaataaatcgcctttcggggagtatgaccccctccccgaaacccactcaggcgctgctcgctcgcacgcccactgagctcggagcggagcccgagccctttcccagcacacagggttcatttccagactgaaagacatccc

SEQ ID NO: 116078 - DNA, 298 bp, Homo sapiens
ctggacgccaccatttcacatgaagaggcaggcgacatgcgagtgctgaggaggaacactggacgccaccatttcacatgaagaggcaggcgacatgcgagtgctgaggaggaaccctggacgccaccatttcacatggaagaggcaggcgacatgcgagtgttgtggaggaaccctggacgccaccatttcacatgaagaggcaggcgacatgcgagtgctgaggaggagccccggaccgcaccatttcacatgaagaggcaggcgacatgcgagtgctgaagaggaactccggacg

SEQ ID NO: 116079 - DNA, 303 bp, Homo sapiens
gctgagggaggactgaggcgggcctcacctcagacagagggcctcaaataatccagtgctgcctctgctgccgggcctgggccaccccgcaggggaagacttccaggctgggtcgccactacctcaccccgccgacccccgccgctttagccacggggaactctggggacagagcttaatgtggccagggcagggctggttagaagaggtcagggcccacgctgtggcaggaatcaaggtcaggaccccgagagggaactgagggcagcctaaccaccaccctcaccaccattcccgtccccc

SEQ ID NO: 116080 - DNA, 537 bp, Homo sapiens
aaaagcaaacaaaaaaacatttgtctcataatttctatgggtcaggaatttgggagtagcccagctagctggttctagcttagatctctcataagattacaatcaaagcatcctccaagtcatctgaagacttggctggggttgtaggttctgcttccacaatggcttacttacatggctgatggcagaaagctctagttactcatcacatggagctttccatagagcaccttgaatgtcatcaagacatagccggtggctttccccagagagtgatcacagagagaacaaaacagtcacttagcctcaggagtcagaattcctcatttctactacattatattcatcagagatactttacgtagtatacccacattcaagaaaaggggaatgaaaggagcaaagaatttgtggacatccttcaaaactaccacatcagttgtaattttgctgtctagtctgtgattattcacatgtatatgttatgtattatgatctatcagggtgatgtcagcagtcaaagtggattggagcact

SEQ ID NO: 116081 - DNA, 499 bp, Homo sapiens
ccaaacatccaactagccagatacaatgactcatgctgagcccccaaaatgggaccattcctccaggagaccaaactgtcacctgcctttcctgcctacaggtccctagctggcaccactgcccatctagtctcccttcaaggaagggcctgctgtccaaatgtgcactgtgtagtcagcacacagcctgtagctattggctccttcagggtcaacctcagctgcagagccccctctcccaaggttgtgcccttcctggggtactttgctctggggactgagagagatggggttatgacagccattccagcacaacacacaaaaattctgacaagccaggcctgatcagacccacatcacaggtgaatagttcccacctctgctcttttcctgtcacaggtgttgatccctcgtcaacatctcagagctcccaacctgaggcatgtgcacaaacgctcacaagatgccaccttgtcccacaattcctcgctacacttgc

SEQ ID NO: 116082 - DNA, 570 bp, Homo sapiens
cctgggcaacagagtgagactctgtctcaaaaatataaaataaaataaaataaaataaagtaaagtaaaataaaataaaatataaaataaaataataaaatataaaaaatatacccttggccaaaaggaggggtccatttcattggttggggaatttagaattttatttttggtttacagtatctctttttttttcttttgttacaaatggggttcttactctgttacccaggctggattataggcatgagtcaccgtgccaagctatatacatatttttatgccagtaccacagtcttgattactctagctttatggtaaattttgaaattttgaaatcatgtaagtccttgaactttgttctttcattaaatcatattggcttttcttggtcctttggatttaaaagataaattttaggttcatcatatcaatttcttttaaagcaaaccctaatggtatttagatagaaattatattgaatctatggatcaattttgggaaaactgacaccttgatgatactgtattttcctatttgcaaacatgggacatatctccatttatttag

SEQ ID NO: 116083 - DNA, 477 bp, Homo sapiens
gtgccttggcatgttatagttgtagtgaaacaacagctagctcttgcttttggccgccctctttctggagagatgcgagaccatagcgtttggatcaatgtagggtgtttagaaaactacagatctgttctcagaatctggtctgttgctaggtcaggtttttcctgtcttccctggggctctctcaggccatccaggggaattctccatacatcatgcaaatagaattttatcaggaagtcccatcagcagagtgtctttatttctgtacctccgtgtcccatactgggactttccttcctgtctctggccacctacctctctaaaccactaaccctatagttagttctttgttctgtgttctttgcacacaggagacctcttctttcctcttactccccagtagttcccatcatctctatcatagcagtaaaaacttgccaaagacgaatgagaaaactcagggtgttgcaatgt

SEQ ID NO: 116084 - DNA, 207 bp, Homo sapiens
tcgatcgagccggccggcatactggacttctattgagcctaaaatgggctctcttaagctctgctctccaatcatagtattccctcatgtagccacacaaagccattctgctgccttctgcattgtgctgtgtgttttcatgctgattgtctaattcaaccttcctaacttccattctaagtaagcacaattattatttctacttta

SEQ ID NO: 116085 - DNA, 379 bp, Homo sapiens
gaagtaattaaggctggaggcggtgcaaagtgtgtaggtggtgtcctaggctcagaaagacctgggctagaattccagtcttttccagctgtgtgattgtgagaaggttacttaactggttggatactcagccaccctgtctgtaaaatggggagaatacacttgcatatgaagttgccaggggtattgaacatacacagtgtggcatggtggctggatcatggcatgtttagaaaatgagggcttaaatcagattagtgttggactcagggatgtgggagctggtacaggatgcgaggattcctcattcccctctttggtaaccagttctgcaggctgcggtagcactcagctgtcttctgggcatttgtttctggac

SEQ ID NO: 116086 - DNA, 790 bp, Homo sapiens
gccgtctgcgcgccggtctccttcctggagtgcggctccgacgagctgtctgtgggccgcgcgggttacctgtgtgccgcgctggtgctcaagcagaaactcgtccaggagtcttcacagggaaaaaagccaattcagtattaaaatgctagccaagattgagggcgagtacacagaagtcgtctgcacattcaaagaagcaagacaagcttttgaaaataacaaaaaagtcagatgtgcctttcacttttcaccatgattgtgaggcctccgcagccacgtggaactgctgttggccagatgcttatctgagctcctaagaaacaccaattcttttaccatatgtgcgctcatcttcaaagccagcaatggataatttataccttgtcaagttcctctcattcttcaaatctctctgacttttctgtctctgactagttgttgtccagatttataagggtcctgtgattaggtcaggccacactgtgattatctcccttttttcaaaagtcaatttgtattacaatattaacctagtcatgggagtctaattaatccttttgcagagtccttgggtaatattacacggaaagtacacccagagtccccagcacttttggtgggccaaaattctcttttagacttattagcaatattttattaatccaggaggtttccactttcacaataattttttcccctaaatccttaattgtgttccacattaccttatttgtcaccgctacactttgaggcagtttgtggctttcaagggaaccagagctaatga

SEQ ID NO: 116087 - DNA, 174 bp, Homo sapiens
tagcattttgtttcttaacctactctccttagtcctgataatgaatggtgaatgttcatctcactgcagatatgcagactgtatttgtattggccgaagagaacccaggaagagcacagttaatcctctcttgtaattaactatttttacttgctaaagatgcagaaaaaaagg

SEQ ID NO: 116088 - DNA, 461 bp, Homo sapiens
tcctggtggatgagtagtatggttgtgggcttgggagacagccagccttgaacttaggagctggcactggcctgagagtcattatctgtctctagtccttggccccagagtgccctacatcttcacctattttcttggggtaccaaaaactccattcctgaaaatgttttttgaaaatgtgttataacctataaagtcattattcttaatgatgctgagattgtctcaagttttgccagtggggatcccttcaatttggctcattgtccttttgacacaatatccgttagtctagatagctttcttgatttctggcacaagatatagcaggttcaccttgcacttgcactttttttagaaaccaaaatatgagcacaaagtgtgctcattgctactgagatgttgttgtttctaaggaaggtgcgtgttttttgagaattattctgctgttgatagcgtag

SEQ ID NO: 116089 - DNA, 423 bp, Homo sapiens
ttcaggctagaccctgtaactgctctgtatgtagtccgtaagctttgtttgaagtctgattatttttgaacaaagttttaaacatattgttcattaatctgaaattgctagttacatttagaatctttgttaatgtttagcatctgcttacagaggcttggaatgtaactgtaactgttttcaagccaatgaacagttcttcaaacatacctgcagtgtttagtgggtgtctaagtctttgtgatgggtttgttcctaggtaatctctcaaggattttggagtccctggagctgggtgactgtctcagagtctgtacccacatctcccacaaaggtcaagaatgaatgcccaggttgttgtgggataatgatgaaaaaaatacatagggacaacttggttgctgccaggcatttcttttctat

SEQ ID NO: 116090 - DNA, 336 bp, Homo sapiens
cacccacactctgataagtagcagaggtgctgctgagacccagatcccagggtcccagggtctgggtcccagcaggatctctgctacttatcagagtgtctgccggttccaaaagacagtggagggaggggatgggggcgcacatctttctcagaaagtcattgttctttgctagatgggcaggacccctgcctgcttcacagtggccagtcttagtgcatgcagtggcagagggtcagatgtggggccaaagggctgtgagcagcgcagatgaataaggaagacataacccagacattcctacttctagtgggaaagtcatatggggaaccagcc

SEQ ID NO: 116091 - DNA, 569 bp, Homo sapiens
atcatccaaaaacagaaccagtaggcatgtgcatgtgcatgtgtgtgtgtgtaaagtgggggagttaaaaagaattggctcacataactatggagtctgagaagtctcaagatccgtagttggcaagctggagacacaggagagtagatggtgtagttccagtctgagggcaagaaatgactgcttgacctagctcaagtagtaccagtcaggccagaggagccccctcctttttgtcctattccggtcttcaactgattgattggacaaggcccacccacattagagaaggcaatctgccttcttcagtttaccaattcaaactttaatctcatccagaaataccctcagggacactcccagaatagtgtttggccgaaagtctgcaccccatggcccagtgaagttaacacataaaagtaaccatcacataaccctagactactgctctcccacaccatccacatctacgtgacacaaaatccagttggtttcaccttctaaatatttctcttgtctgtcatgtctgcactccagcctgggcaacacagtgagactctgtctcaaaa

SEQ ID NO: 116092 - DNA, 251 bp, Homo sapiens
ttcatcaacgtataccaagaatggcacacagtgaatctcccattttccaatcaacattaaaaactctaatagcaaacacgggagggtgttgtctgtactttctacagttatgcaaaagaatcctatggtactcatatatatcctatggtaattatagagatgtaggttaccatccgcagttcctggctcattaacccttgttgcagtcttttacatgttggggcattttagcctcaggaaactatctgatc

SEQ ID NO: 116093 - DNA, 208 bp, Homo sapiens
cacacaccagccagcccgcccgaaagctgggaccagagcgggtgtcgtggctcccaatctgggcctccatctgcctcacttccctgcctccagatgagcagccacggctgtgtgcggccccgtcctgacagcccctcactttggtcttactgggttcaaggtcctccaagcactcctgagtcaaaggcctggcctggcctctctgact

SEQ ID NO: 116094 - DNA, 743 bp, Homo sapiens
ggatgatgttatgaggtgcttctgagtctgcaattccatttttcccaatccccacctctttccagcttcaatgaggcctcctgggagccagtagtagttaggtggtcaaaaagaaggacagagacaagaaaagttgagctcaaatcccactctaccacttaatagctgagtgaccatgagcaaatcccttaatctttttgagcttccatttcttcacctacaaagtggagttttctactaattcttttcataaggaataagagaggtattatatgtaaagtgctttgaacactgcctggcagagactaagtgtgcaacaaatattagttgttattattacaactcaaactacgagaaaattagaggactcagaagtgtattggaaaggacgtcatgatgatttaataccaactctggctacaagagggtaaacacacagtggtggagataacgttaggcaaagggcaaaggacttactctgacagctccattagcatgcagggctgcatgatcaatgccaagcataaaacatcatggggatttaaggccggacgcggtggctcacgcctataatcccagcactttgggaggctgaggcgggcgaatcacgaggtcaggagatggagaccatcctggctaacacagtgaaaccccgtctctactaaaaatacaaaaaattagccgggcgtggtggcgggcgtctgtagtcccagctactggggaggctgaggcaggagaatggc

SEQ ID NO: 116095 - DNA, 224 bp, Homo sapiens
tagaggatttcgctcctagccgcgccagtggagcaggtgtttggagggacaggccaggagctcccagggggagttcctcacatgactccgacccggcagaatgctgggctggggctgctgggctggggctgctgggctgccgggagaacccacgctcccactgcagcagcaactaccctcccacccggtcaggcacccacaccccctgggccgaggctgaagga

SEQ ID NO: 116096 - DNA, 464 bp, Homo sapiens
acttgtaatacagcaaactgagttcaagcaaaacgcatttgaaatatgagactgactggcctaagcagtacatttcaaaaggatgggtaggatttttgtacttgggcagtcacagttctgaaagttggcctgtgatcagagagagtccgggctgcctctgctgaacctctggggaacactgagcaagcaagctgagatctgttcttccagggctcagaagctgctggacccatgcccggactggcagaggctgtaactctcttccactccttctctacctacagatcctccctgtcctctacgtgctctgagaagtcaagaggaggctttagagcttgttttgacttcactcctgccctgggactctgttctgtgcaaaggcacactcatttagagaagaaaaaaatatgaacatgctcttggctctgcctttgaaaaccagaaagctagttttgtttttgttt

SEQ ID NO: 116097 - DNA, 260 bp, Homo sapiens
taaaaaaaaaaaaggtatgatttcttaatttctattcttggcataaattttctttccagtgcaaccaaaacttacggaaccctcttcagcactgttattcagaacttggagttctattgctggataaaaaattcattcacaaataagctgtgcaattcgatcaccttgaagttttgacttcaaacttttctttgacaaaacaccaatgtttctcctataaccttcatctaagatacccagctcctaagtgttgcagccaa

SEQ ID NO: 116098 - DNA, 582 bp, Homo sapiens
ggtaaatattggctcgagaaaatgtgtttaaagtttacagaggcaatgatgcttctagaaggattccttattctgtcctaaatatcatagaacaagtgtaaaagctcacagtctgactctgccaagattcctcatttgtgagatttacttaacttcacagaacgaacaaaaatgctttccaaaagattatctgcaaatgatccaaaaatgcctttgtgagtacttttatttaatttttgagatcaccactcatagctatgatttggcaagtgtttgtcttttccaaatacctcatcatctttcacaggttgtgaaaaatgagtttgagaccgatcttatctgcgaattttgttacctttctttaatgttgagagcaactttttgtgagaacaactggctgagactctagatgagggttttttttttttcaaaaaagctaagagtagtaaaagaatagaatatttgttgatatcctattatgtggtaaacatgttgaacaagataatattcttgccctcaggtagtttatactgtattgaaggactggagcatataaaaaggaaattcagtataatcttatgt

SEQ ID NO: 116099 - DNA, 325 bp, Homo sapiens
aaactcctgacctcaggtgatccgcccacctcagcctcaaaaagtgctgggattacaggtgtgagccactgcacctggccctctttggagggctttttaaaacccagatggctgggcctaccctaagatctaattctgcaggtctggggccagggatggggcgggcctgaaaacattcatcccaggtgatgctgctggtctagggaccacactccggctccctttgagaaccagtgaatagatgatccctgtgaagagctgctggagtgatgatgaggggagggggtttgctgtttgtccctggccatcagtgtccacagcaggt

SEQ ID NO: 116100 - DNA, 319 bp, Homo sapiens
ttagacatgcttttttatgaataatgctattcacacttaatagactacagtatggtatatattataacttttatatgcactgggaaatacaaaaatttgtgtgacttgctttattgtgatattttctttattgtggtggtctggaaccgaacctgcaatagctccaaaataggcctgtatgtataattcaaataccctttttcatagctacttcggttagtggttttatttcttatccccttagatgagattattgttatgggttcctcccacatcctggttgattttaattatttatctattttggggtgctaaaata

SEQ ID NO: 116101 - DNA, 421 bp, Homo sapiens
gagcggaggcagcgagaccagttaagaggatacatctgggaggcaggacacacaggacttgatgatggagcacacatcgggaagacaggtgggggagggactttaaaatgacctctagatttcctactgagaccggaagcccagggagaagatttgggggcaagaggagaggaagtgaaaatttccatttagacacacccatactgagaggcgtattacccaccaaaggtggccctgggtgggccattgcctgtgaacatggagctcagaggggaccctgcggggagccacagctgggtgccctggtcataaagaagtagttacagccatggggattgtattagtctgttctcgcattgctataaagaaatacataagactgggtaaattgcaaagaaaagaggtttaactggctcacggt

SEQ ID NO: 116102 - DNA, 273 bp, Homo sapiens
atgcctaaaacagtgcagaatagccaccctggaaggtagaataaaacttctctctcctccatttgcctcctcactcagaggcaaaagatttgaggctgtaagaaaagtgacacatctttacactgaacatgcagtgctccatgaggcaatcttttctagatccacctaaaacaactacgaggagtctgggaagccaacgaacaaagggggcaagttacctgcctaggatgtggtccagccctcctacctccctactctgtttcacatcctcca

SEQ ID NO: 116103 - DNA, 271 bp, Homo sapiens
agcctcacttgggcggagcctgtctccattgctctggcagggctctcacacctggtcttgtgtttgccaggcccacccacactcatctcgcccctgtctttactgttgcctgtatgtgccagccacttgccagtcagatacccccgacagggaggagacagaccaggcctctggtgggggacacgggagtgagttgtgctaacatcctgtggacagcagaggtggccgtgtgcctggggtcgtagggagaaccctagggtggctggccggg

SEQ ID NO: 116104 - DNA, 237 bp, Homo sapiens
ggctgccgccggagctggacgtgggcggcggcggggcctgaggtctggggctcgggcggtgggcgctgctgtggccggcgcgcgtgggccccggcgaggcggcactgcaggagctttgcgggcagctggagcgctacctgggcgcggcggcccacggctgtggctgcgccaccgtgcgcgacgctctcttcgcggctaacggccgcgcggccgactgcgagagcccgcgcgagtttc

SEQ ID NO: 116105 - DNA, 109 bp, Homo sapiens
tgcatgtgctgctgctccatacgggtacgagccctgcctagtgtctgtctcctgtgtcacggacctgttcaacctcgtgctgctgccagcctttatcgcgactcagctg

SEQ ID NO: 116106 - DNA, 278 bp, Homo sapiens
taagaagcagaggacactctgtgtttagatttggttttgtttgtatatgtcatgattaagttctcctggcacgattttcttctaaagcatggtgctaaccttgaggaagcgtagtgaaatctagggagggctggaaagtcaataccgagctcctagggagggatcttcagagtgtggtgctcctgatcgtagaaaagtctggaaacactgcccctcccctacctgctgaccccccagtctcttcttccttcccttctcagacttctgcacccttccaa

SEQ ID NO: 116107 - DNA, 266 bp, Homo sapiens
gtttctcttgctcttcagtttcaaatttctttctgctcttacctacaaggaccctgtgactggattaggcaccatccaggcaatcaggattctgtccccttccctccttaactctttaaactctccttcagagtctcccctctgaaaatccttaactcaatcatatgtaagttaacagtcacaggttccagtgattaggatgtggacatattgtatggaggccaccattcaactctctacagcttatatccatcaatatattcagt

SEQ ID NO: 116108 - DNA, 682 bp, Homo sapiens
agaggggctgggctgtgggccatccccagctccttgtctcggtcatccgggcttgtaggaccccctgtcccgagccacagcccaggtgggtgcacttggggagcatggagagagacagccactccctgcaaagggcctcagatggagggagaggcaggttccacgtgcctggagcaagaatgcagcaggagaagcgggggaagatgagacccaggcccacgtctgctaggagcacctcggaggaggaattcccacctgaagaccccaccacaaggatgtcgcaaagctgaaacctgagctcgggtcataccaactaaatccgggttcccatcaccccacaacgcagccttcaagccccttcccccgtggaatgatgacacagcggtgggctcggctctgcactgcccaaccctgcccggcagtgaacaggcgagaccacccagctgggacccagggaagaggcaaagaggagacccctcagcagggtccgtttctcctgcctgggcttgtcctgcacccaggaccaatgtggccctacaggacagctagaaccctcccctcctcttctccccaagtgtccccagagcttcagaaaagtgtgtgcttaaaggacgattcaatgaaataattttctaaaaagagaataaatacatacatacataaagaagcaggagtgtaccag

SEQ ID NO: 116109 - DNA, 432 bp, Homo sapiens
ttaaattcatggaaaatcagaggcaagagtagccaaaataatactggaaatttcttacaaagctgtggtcatttgtagtatgatattgcctcgggaattgacagctaaaccaatggaacagaatagagagcccagaaaccaacctatgaatatatggaaacttagaaaagtgtgctacagaggtggactttcacattaatgggaaaagaacgaattatttaacaaattgtaccaggacagctgacaatgtatttatggaatatttttaaaattaggccatagaaatcaaaaattttaaacagaatatagacttgtattatttctgggtagagaaggagtttttaaaactccttaaggggtaagattggtaaatttgacttctttacaacttaggtttgacaaaagatggcaagataaagttgaaagataagc

SEQ ID NO: 116110 - DNA, 182 bp, Homo sapiens
ggtgtgtaatatatgtatgtgtacttcagtcctagcactgtagtaacgaactgccacacacagtgtggcttaaaacagaaatgtattctcatagttctcagaagtctgaaatcaaggtgttgacggggttggttccttctgcagcttagaggttgaatctgttctatgtctgtgcggttctg

SEQ ID NO: 116111 - DNA, 774 bp, Homo sapiens
cgaggccccggcaatacctcaggttctaggcctctgtctccttcgtcacagcatgcacttcccataattctttccttcacttcggagtcttaataccaaaggaagacacgccattttgagcagcctattaatttgaaagtgtcaagtgtaactagggaataaatgagactcctcaaaatgagagcttagtgaggcatgaggtagtgagcaaggtcaagcgcttagcttaaaacagctggattaattagggtaaagtctttgggcttgggatttgggggcctttctgactcatgcaatttttccagaaatgaatgggtcatatgttttgggaatctgatatttaatgactagttttggggttaaaaaagttcacagtaagtttatgttagcaataattgtccttggggagattttgcagagcaagggaaagagagatgttaggttctcctttccttcctagctttttgccctcatcaaacatttatagctggaggccctgtgaatttcaatatcaacatcatggttcaggtgctcaaggatttcatagtctgtgagaagacagacacacagataaacgcacactagctaacaagccatggagccctggggcaatttgtcagcctctccgggctctgtttcatttggaaggaccttgatggacaagttcagtgcttctcaaccttggctgttcattgaaagtacttagggaacttagaaagaacaccagtgccccagctggcctcatggctctggagtaaggcccaggcgttggta

SEQ ID NO: 116112 - DNA, 168 bp, Homo sapiens
aaacattgcaggtacaggaaagagagacagcagttgatggagctagggtcaagagaagagaggaggaagtgggatccagggcccttgggggagattaactttccagtggataaaagaaggaagagatggttgcagatgtaagtgggtctataggaagggtttcaggga

SEQ ID NO: 116113 - DNA, 662 bp, Homo sapiens
atggaataaaatgctaatatccccatctgacaactcagaaaactgaggttcaagcatgctcttcactaactcaggaaatctgcatgctatgatatacatgtcactttcacttatctaccttattcgtttcccaaaattatattttagtaacattgcactatattgccctgacattaaagacaaaaattcagaaatcatttaatggctattaattactaagcactagacacttcacatatgcaatggcatgtactcctcaatctgattaagtagctattaggttattcctctatttcaggtgaaaatagaggatcttagattaagacactgttcagtgtcatatgaataagtggcagacctggaatttgaatctataactctattattcacaagtctgtaaacttaacaccttattatacagtggtggtaaatttgtgatttaattaacatttcctattggtagcatgcttttatgttcttttccaggtcttcaaatatttcctattgagaattcataatttggccaggagcagcagctcacacctacaatcccaacgctttgggaggcctaagcaggaggatcccttgaggccaggaattcaagaccagcctggtcaacatagtgagactatctctataaaaattttaaaaatcagctaggc

SEQ ID NO: 116114 - DNA, 394 bp, Homo sapiens
ttattgctttttttttagttttttgatgagcattgttaggctgtttatttgaagtctttttttatactgtaagcatttactgctataaactttcttcatagtactgcttttgttgtatcccatagatttgggaatgttgtgttttcattttttccaagactctttaaaatgttattcctaattttttaaattaattcattggttgtacaggagcatgttgtttaattttcatatatttagtggttccaaagtttctcttgtttgtgcccttgtttgcaaacgtgaccttctacttacaaaatctaaagacaccaccaaataattgttagaaccaataaataaaattagtgaaggtgcagtatactaactcagtgtaaatagctcattagcattt

SEQ ID NO: 116115 - DNA, 425 bp, Homo sapiens
gacagaccgggaagtgctcccacaccatcatttctgagatggtataatcctcacagcatttctgggaggtggcatgtgctatccagatgagaaatggaagcgtgaaactttggtggtgagtcttgactaagatcacacaatgaaccgatgcaagaatgggacaggaatacagccttcctggcagcccatactggatcaaacagaaggtggcaaaagctcaactgattgcagtatttgcttaaagatagaaaaatgtttcatcaggaatacagcagatgcagaaaggagagttaacagaaattaaatttcaacccaatagtaaatcttaactgagaagtcactggagaaatctctaatgatgaacaaggatgttagcaatatctgtactctctcttatcaaactcacaaaccaaggagaatgaatt

SEQ ID NO: 116116 - DNA, 298 bp, Homo sapiens
ggaatgtgagttcccagccactggccaccttcccctgcaaactttacaaagagctgcttgcagagggtcagggagcaggcactctcccctcaccatcccttggcacctgtccagacaaggtgggtagtagctggattccaggggcaaccaaacatcctctgttctcgaagagccctgtcctcctgcacttcagtggtgagaggaaggttccggaagagaggccagtgcatagcttctgcccataccctccccacagaaacaattaagtagctcaggctgtggctgccaagttcctctg

SEQ ID NO: 116117 - DNA, 736 bp, Homo sapiens
gccacgtctggctgatttttttgtatttttagtggagatggggtttcaccatgttgaccaggctggtctcgaactcctgaccccaggtgatctgcccgcactggcctcccaaaatgctgggattacaggcatgagccaccatcatgcttttaaaataggtctttatttctttattgtgtcttagtgtctggtagtttgtctcctcttcttgttcttctttaaaatcatcgctactctttgtgttttgcttttccatatacattttagagttctgctccatgaaaaaccctcctttgattgaggtcatgcattaactatatagattagtttgaagagtaatgatattcttatgggatagatatttcctgtgtatgtcttctttaatatctatatttaggtctttttactgtatacatcatttttataactttttaaatgttaataaagatatttcttggccgggcgcggtggctcacgcctgtaatcccagcactttgggaggccgaggcgggcggatcacgaggtcaggagatcgagaccatcccggctaaaacggtgaaaccccgtctctactaaaaatacaaaaaaaaaaattagccgggcgtagtggcgggcgcctgtagtcccagctacttgggaggctgaggcaggagaatggcgtgaacccgggaggcggaacttgcagtgagccgagatcccgccactgcactccagcctgggcgacagagcgagactc

SEQ ID NO: 116118 - DNA, 245 bp, Homo sapiens
gaggcactgcacctggcctgttcttgatttttttcttatcaggcatactatgcaaatgccttgctttatattttcattaacttagtattaaggagaaataaaaccagaacttcaaggacgtttttatatgtactaataagaatttacttactttaattgatagaattgaaaaagggagaacaaaatgataatgtaagactgaagactcaaaggagttattatttaaatgtaattttaatagagtt

SEQ ID NO: 116119 - DNA, 413 bp, Homo sapiens
ctcttttatccaaccattttatttcactatacaatgttaggtatcctcagggcttgatttagatccccttcttctcccagacctttatccaccacattctcctatttaacaaaactgacagcccttcttccttagtgtctcttaaacttttcagtcccattgcttcaaggtgccatcatttcttagctagattattacaataacctccctttttctgttcttatgtctgcttatgcatactgcttcccccatcccccacactgtgtatagaatgatctctctgaaaggcaccctgcataaaatccttccccatcactttcaggctaaaatacagaaacctttctgttcatattagtgggtcagtctcctgctcctgaattcccttagcattttgtttctcgctctataaagac

SEQ ID NO: 116120 - DNA, 683 bp, Homo sapiens
cagacaacagacaccggacacagcagtagcgtggacgcgtaaagttataaatgaccctgtctcctttgttcagtgtactcttgtggcaaaactgctggcgagtgtaccctttctgcagaaagtaaaaatggccttgctgaggtagttaaaatttatgttcaagtgctatttctttacagcactggggaagaagcatttctaacaggagcctgcatgctgaggatggcagaggaaaaagacagagccatactgagcccttggagatgccactgaggagctacgctaaccaatcctggaggcaccataacctaggacttcttcttatacaaggatgctagagagcagtcttcagcctgagacccatctctagcttctaacaactcagtatactcctatgaacaaaatttggagcatatttgtttctctctacctgatttcttcagactgtggaaactatttgaatcaaacttgacttatggatccaataaagccaatgtgaaaggaaaatgtcttcagccccttcaagctgggaactctcagtacaaatctgtctctcattctattcaaagtcatttctctgctcagagatagatgcatattctgattgccttctttggaaagacttaccagaaactcaaaagaatgcaaccatctgtctctcacctacctgtgacctggaagcc

SEQ ID NO: 116121 - DNA, 569 bp, Homo sapiens
gaccccgtctcataaataaataaataaatagaaaattgagaactccccaaagcttttatttattagggttatatgtattgatagctgctgaattggaagttattacttaggaaacttaaaatatatattaattcatcaaaaataataatcctgttacatggtaatgtaaataacatatttttatgaaaaacaactattttccaaagcaaattattgaaaagagtgaattgtttaaattctttgcaaacccctttaatatctggcttaatagaagttagctgggttcctgtgtctgctctgcattcacactatttaagtatgttgttttggttgaagtgtataaagaaatgtagctacaaaaggaagggagcatattaataccttttcaggtgattgtggatattgttctttgacattataccaaaactcagcaagtggtttcttgggggtgggtagacagtgatgaatttttattcaaaacaactgtagtgactgacaaaaaaagttaaaacccagaatgatttgcttcaattaaaaattaattatatcccaagagcaggggtctacca

SEQ ID NO: 116122 - DNA, 344 bp, Homo sapiens
caattgtaactccccagaccagttagatcatagatccagatctcattgaaaattatccttttggctaggcatggtggctcatgcccgtaatcccagcactttgggaggccaaggtgggcagatggcttgagcccaagagtttgagactagcctgggctacctggtgacaccccgtgcctacaaaaaatacaaaaattagctgggcgtggtggtgtgtgcctgtggtcccagctccttgggaggcctgaggtgggaggattccttgagcctgggaggcggagattgcaatgagctgagatggtgccattgcactacagccttggggacaaagaccctgtctcaaa

SEQ ID NO: 116123 - DNA, 650 bp, Homo sapiens
catctcaaaaaaaaaaagctttacagtgaaaaatctgccttccaccttccccacatcctctcattctttgaataataggtagccatcattattagttacttatatgtaattccagagtgtattcacttcctaggacttccttaagaaattccacaaaccagttggcttataacaacagaaatttgttctctcacagttttggaagctagaagtccagaaatcaaggtgtcagtagagccatgccttcctctgaaggcttgaggggagaatccttccttgtttcttcgggcttctgggggttgctggcaatcttcagcgttcttggcttggctcactgaaatctctgtctccatctttccctcgtgtccctatctccctgtttcttctgctcttgtaaagacagcagtcatataggatttagggcccacctaacatccagtgtgacctcatcttaatataactattttttttttttcagtcttgctctgtcatccaggctggagtgcactggcaggatctcagctcactgcaacctccacctcccaggttcaagcaattctcctgcctcagtctcctgagtagctgggaatacaggtgcctgccaccacacctggctaatttttgtatttttagtggagatggggtttcac

SEQ ID NO: 116124 - DNA, 322 bp, Homo sapiens
ggcagaaagatgctttagactctgaagagccagaaaatgataaacatttgtccaatacagctggagacagtcaggaagaaggtgtgaaagatctaaaaagagcatgatccttggaaagacaatagacatttcagacaaagtaaaaattgtagattacttggtagacagctccattatgaagcagccagtgaaagttcttgatattgtgaattaatcatttgagcatttcctaattttattgcattgattgctaatattaagtgaggcattaatgtatcattccctccaaaacagttgtttaaagttgagataagtttagaaa

SEQ ID NO: 116125 - DNA, 159 bp, Homo sapiens
ccattagtacaatgcacagagtcctggcattgtggagagtgagaggaaaacatggctggcaccatattgtgattattgtaatatagcctcagttcttaagaatacaactttttattggtttatctttgtatattgaaccagtgcagtgtgccaacttaa

SEQ ID NO: 116126 - DNA, 344 bp, Homo sapiens
tagttatttcaagtacgccaagtgcggtgactgcccgagggctcctgtcggcattgcagctgcatgcccgccctctgctggctgtcgggtgttttagcctcactgggctgtaaatgaggagcgctggcctcagtgtcacagtcattgcgccctttttcctgtgcacgctcttcacttctgtattttttattccaaatatttaaaaagtgggtttaatcatttcagagacctcttcaaatgagtaggaatctacaaaaagtaaaattttgtattcagccaaaagaaagattgtaatattcttctggaggattacgtaaattatttaattttttaatttaaaattt

SEQ ID NO: 116127 - DNA, 437 bp, Homo sapiens
tatagaggatctgcccctggtatacccatcctacagacacttgacctgaaatagggggcaacagagaccagaaaagggagcagctgacagcagggatttgagatcaagagaggtcctggctttaggactgattggtccgcactcaccactgtgttggagtgtaccagagggcaagtcaggaagaccagagatgcagtcaggtttgagcaacagtcgggtcattgaaggtgaaaggagttggacgaagggcaggctcactgggctgaatgagggcagagagccttggaggctcgggtagggcgtccacgctctcgccggaatgtgtagatacatcctggaaagagatgctctctgagatacatcctgtagccctatttgccatgagactttctggcaccttttagtactactttttgccaggggtgggatacaatcct

SEQ ID NO: 116128 - DNA, 538 bp, Homo sapiens
gtactgtcgttattttaaagacctagaatctgaggcaaaaaaagggttacaagacttgtcaaagtcacttgaactcaggcgttcgagaccagcctgggcaacacagggagaccccgtttctacaaaaaatacaaaaattagccaggcatggtggtgcagctactcaggagtgggaggaaagcttaagcctagaagattgagactgtagtgaacaatgatgggtggcaccactgcactccagcctgggtgacagagtgagactctgtctcaaaaagaaagtaaaaatcataatgccccgatctatgggggcactatgggatatgtacttgccccattacaagaacattccattgatgaacatactccttcctgaggttttgaaagaatttaagaaattacttcaaaaatatggaaagcactctgctgcatggtggtaaatcaaaaacgttcctttgaggtacatttttcttatacctaaaatatcatttttaagaaactagcatagaatagaggatgcgaaccaaactctgggaatcct

SEQ ID NO: 116129 - DNA, 307 bp, Homo sapiens
ctcaacttgtggccctagagttcaaaaacaccagcaggcatgaagccaaggcttcaccagtaacttttgcagctcagcacttgactagaaaaaagtgtcctcactgggtaattttccccccaatgaaaacctggcagagttctcctttttcacctgccttggttggatacccttgtagatcaagttcaggaagcagttcttaaacaacaacaaggccatgtcataggtgatgggtaagaagaggttattttttccctatttaaaaagaggctacttttagcggggaaaccaacccttttaataaaaa

SEQ ID NO: 116130 - DNA, 564 bp, Homo sapiens
ccccttcccaccattagcccacactagagcaattctttaagcattcaataatcagaacccacatagaatgttaattgcctcacatctggtaaccagagagttattctgtcctctggatagtgtaccctatgtttttattagcttttagtgcccacgatatttgcacttattctacttacagcagctacaaccctaagatgtgatttttcattcatcctgttcccctgaaatgattttggtttggccacgaacagaggacttcacatatatcatttatttatttgtttcatgaatacttttaagaatgcagtctgcataatggaaacagttcctgcctttaagagacttggaagttaataagaggactgaccaaggtcaccaagacatccaatatgaggcagtggtgtgagataggtggcactcgagggcagacttggtgcttatttgattttgggggactgggaacttcttcatgaaggaagtaacttttgagttgagccaaacaggatgaataggatgttcagaaacaggtgggagacaggccggcaccatcttagcctgttc

SEQ ID NO: 116131 - DNA, 584 bp, Homo sapiens
ctcgtttggccatccgaacagcaccgtgggtggctttactgagcaccatttaagttaaatcttcacccaagggactattttgacgctaatccttatttttctgaggaatctttaccaccaattaaaaaagaagagaagaagaaaacaatttcaaatacttttaaaccgtcttctcctggtaaaaagcctggtggaatgaaggcaggaacatttgatccttacccatcacattctgctgacccttatgtggctaaattggcaaatatttctggcaaagatgataagattttccacccaccaagtggaccaaaaagcagaccagttgaaagtataatgactttgaatgtcagaagggcactaaattcaaagaactacaagacttcttcagtaccatcctattagcaactggaagacaagtagctttctagatcttaactatgagtaattcactatcaagagctaattatttgaaaaaatataagatgttatggagcagatagctcaagcagttaaaagaaattctgcaactctaattctcttccttattttaatactactacttaataaatagtatttgctaataa

SEQ ID NO: 116132 - DNA, 388 bp, Homo sapiens
aaaagcctaggaggttgaggttgcagtgaactgtgattgcaccactgcactccagcctgggcaacagagcgagacccggtcttaaaaaaaaaaaaagaatgtacaggtatttgacttgcacctataaaattaatgtgtgtttattttccaattttagggcactaaattcaaagaactacaagacttcttcagtaccatcctattagcaactggaagacaagtagctttctagatcttaactatgagtaattcactatcaagagctaattatttgaaaaaatataagatgttatggagcagatagctcaagcagttaaaagaaattctgcaactctaattctcttccttattttaatactactacttaataaatagtatttgctaataa

SEQ ID NO: 116133 - DNA, 443 bp, Homo sapiens
cccaggcgtgtcgcgcgcttgggaaccctcgccgctcccgcagcgcagttaacgtggacaagctggggcaacctggacgagctggggcaacctgatctcggctgtcggagtgggtgtcctcaagaaaggtgacttggtcctcgcggacgccaggtgttgccccttagatacctgccacctcccagcctccgtttcctctctgggaaacagactcctcatcacctcctccagttttctgccccttcttcacctctcctgacgctccatccgtaccttttgcaagggaacgtgccataattcggctatgctctattttcttgtctaatagattgtaagctccttgcgggcagcatctatgccttcttaaatctgtttctagtttctaccagcaagcttgccccgaaggggattgcagaatatctgttaaataagtgaatgaataa

SEQ ID NO: 116134 - DNA, 361 bp, Homo sapiens
acaaaaaattagccaggcatggtggcatgcacctgtagtcccacctcccaagtagctgggatgacaggcacaggccaccacgcccggctagttttttgtgtttttagtagagatgggtttcgccatgttgggcactaaattcaaagaactacaagacttcttcagtaccatcctattagcaactggaagacaagtagctttctagatcttaactatgagtaattcactatcaagagctaattatttgaaaaaatataagatgttatggagcagatagctcaagcagttaaaagaaattctgcaactctaattctcttccttattttaatactactacttaataaatagtatttgctaataa

SEQ ID NO: 116135 - DNA, 1805 bp, Homo sapiens
  misc_feature (1805)..(1805): n is a, c, g, or t
cccaggcgtgtcgcgcgcttgggaaccctcgccgctcccgcagcgcagttaacgtggacaagctggggcaacctggacgagctggggcaacctgatctcggctgtcggagtgggtgtcctcaagaaaggactttgctataaaacacgtgaccctagggaaacttttgaagttagcggtatagagagtaccaccaccagacgccaccatgcctgcggaaggaggaaaaacggacatggaaaggattggcctctttagtgagatggaatatattactgtgggtgataaatatgtgtcacaatttaatcatgtggcttaggaagctactatggaacaataggtggtccagtcccatttttcagcgcacagtcaaaacctcgagaaaaatacaaggcacctggaaagaatttatacacaaacccgggaaagaaaggaactggatatggaaagcgaatgaagagcaccatcgtttacttaaaggagcaccatttaagttaaatcttcacccaagggactattttgacgctaatccttatttttctgaggaatctttaccaccaattaaaaaagaagagaagaagaaaacaatttcaaatacttttaaaccgtcttctcctggtaaaaagcctggtggaatgaaggcaggaacatttgatccttacccatcacattctgctgacccttatgtggctaaattggcaaatatttctggcaaagatgataagattttccacccaccaagtggaccaaaaagcagaccagttgaaagtataatgactttgaatgtcagaagggcactaaattcaaagaactacaagacttcttcagtaccatcctattagcaactggaagacaagtagctttctagatcttaactatgagtaattcactatcaagagctaattatttgaaaaaatataagatgttatggagcagatagctcaagcagttaaaagaaattctgcaactctaattctcttccttattttaatactactacttaataaatagtatttgctaataaaaaaaacaaaaaacacccaaaaaccccaaaaaacacacccccccccccaaaaaaaaaccaaacaaaaaacaaaaccaaaacccgcccccttgcgcccgagggggggccctcggggccgttttctttataggaggggaaaacaaaaaacccccccccactccctccttgcccccgcccctcggttgggggaaccggttttatcttctctaagggcgggatacgggtgtccctcaccaccgcgggatacatcgcgcaaaaaacacgggcgcaacgcgtcccaaaagcgctcgacatccctcgagcgcggggtgtgggggtttttaatagtcttcgccctgcagagattcaaaaatgcgctttatttaggtggggcccccccgggacttttgaccccgcccccccgggaaattctttggccttccgcccaccctgcgcttcgagaacgttttgtttttcttggagagggggttctcaattagcgtggttctatatgggggggttgttccggtgggggcgagacccccccgcccaggtctctttcacacaccccgttgccacccttaaaataactcccgcgccgcctcggacgatagccggcgttgtcgttctacgcttacgcgccacaccccacaacaaaatcgttcgtcgcggcacctcgcctacttcgtgcaactacattcgagttgaccggacacgcattataggacttgctcgcgcgcatacttgtttcgcacctcactcgcgcccgccgctggcctgtcgctctcatcgtgtgcgccatcn

SEQ ID NO: 116136 - DNA, 443 bp, Homo sapiens
  misc_feature (33)..(33): n is a, c, g, or t
attaaagtatctcacttatacccttctttattnatataattatcacctggtggaatgaaggcaggaacatttgatccttacccatcacattctgctgacccttatgtggctaaattggcaaatatttctggcaaagatgataagattttccacccaccaagtggaccaaaaagcagaccagttgaaagtataatgactttgaatgtcagaagggcactaaattcaaagaactacaagacttcttcagtaccatcctattagcaactggaagacaagtagctttctagatcttaactatgagtaattcactatcaagagctaattatttgaaaaaatataagatgttatggagcagatagctcaagcagttaaaagaaattctgcaactctaattctcttccttattttaatactactacttaataaatagtatttgctaataa

SEQ ID NO: 116137 - DNA, 1022 bp, Homo sapiens
cccaggcgtgtcgcgcgcttgggaaccctcgccgctcccgcagcgcagttaacgtggacaagctggggcaacctggacgagctggggcaacctgatctcggctgtcggagtgggtgtcctcaagaaaggactttgctataaaacacgtgaccctagggaaacttttgaagttagcggtatagagagtaccaccaccagacgccaccatgcctgcggaaggaggaaaaacggacatggaaaggattggcctctttagtgagatggaatatattactgtgggtgataaatatgtgtcacaatttaatcatgtggcttaggaagctactatggaacaataggtggtccagtcccatttttcagcgcacagtcaaaacctcgagaaaaatacaaggcacctggaaagaatttatacacaaacccgggaaagaaaggaactggatatggaaagcgaatgaagagcaccatcgtttacttaaaggagcaccatttaagttaaatcttcacccaagggactattttgacgctaatccttatttttctgaggaatctttaccaccaattaaaaaagaagagaagaagaaaacaatttcaaatacttttaaaccgtcttctcctggtaaaaagcctggtggaatgaaggcaggaacatttgatccttacccatcacattctgctgacccttatgtggctaaattggcaaatatttctggcaaagatgataagattttccacccaccaagtggaccaaaaagcagaccagttgaaagtataatgactttgaatgtcagaagggcactaaattcaaagaactacaagacttcttcagtaccatcctattagcaactggaagacaagtagctttctagatcttaactatgagtaattcactatcaagagctaattatttgaaaaaatataagatgttatggagcagatagctcaagcagttaaaagaaattctgcaactctaattctcttccttattttaatactactacttaataaatagtatttgctaataa

SEQ ID NO: 116138 - DNA, 907 bp, Homo sapiens
gggccagagcttgcggggcgcacagagcccccaggcctcatggcgcagaaacctctcagcaccgcggcggctgaacgcatgaaccttgtgggtcaggatgagatctggaaataccgtctgaaggctgaatcggaagcacggcagaactggccccagaactgggggtttttaacaaccccttttgaggagttgatcaagtgtgaagaagatctccccaccccaaagcccaaaatcgagcttcctgagcgtttccgcatccggccggtgaccccagtggagaagtacatcaaggtctttccatcccccccagtcccacagaccacccagggcttcatcggctggagatctgcagtgccaggcctgaacaagtgcctagagctcgacgatgcgatcagaagctgcaaaggtgcttttgcacgagagctgtgctggcccaagcagggcgtgcactgaatccagacggagttctgcccaggggtgctgcatatcggtcaccaggcacccagggccatgccagggaaaggaagagctcccctgaatcccgaggacacagtcccctgcgtacttgctcatgggatgttgcaaagaacacaaagtgtgccttagacattctcaagtcatcagcgtcacccttccagaatgttcacgtccacacccattcttggctaatgtaatgaataaggcttctctcatttgtttttgataccttgggaatttctatgcagggctttaaaaaaaaataagtgattcaattttaaaaatatttgtctaggtccttcaatgtagcttttcattgcacctatcatcatccttatttataacgaacttgttgatcaggtgtttctctatccagatatccctgggcctgtttttcaggaagaagaatacacttagagaatcccttggc

SEQ ID NO: 116139 - DNA, 253 bp, Homo sapiens
gcctcagtgatcttgttaatattcgatttcttgagctgtatattatttaaatttttttatacacacatgtatgtgtataattcacatgtataacatataattatgcatataagtcacacactctttggcattatttattttatgataaaatgttaaattctaaaataggcttcagtgcaccaggcttcagtgcctgaccgggcttcagtgcctgaccaggcttcagtgcctgaccaggcttcagtgcctgacc

SEQ ID NO: 116140 - DNA, 473 bp, Homo sapiens
aataataatatatattttttttttttgagacaggtctccctttgtcatccaggctggagtgcagtggcaccagtctccactcactgcaacctctgtctcccgagttaaagcaatttctctgccttaacctcccgagtagctgggatacaggcatgccccaccacacctggctaatttttgtatttttagtagagacagggtttcaccatgttggccaggctggtcttgaactggcctcaagtgacctgaccacttcggcctcccaaagtgttgggattacaggcgtgacaactgcgcccagccaaatggtaataattattatatctaagaaagagtaaacaggtgtctactgtgttagtcttttgaattttctgtacatctgaaacattttcaaaataaaaactggggagtcagaattagatttttaatattattgtaggaggttgataggttcttttctgtttcatcctgcc

SEQ ID NO: 116141 - DNA, 741 bp, Homo sapiens
ggcaagagagaaaagccagagtggctggtggatgcggggagtcacagctccgagtgggaggagggcgctgagggctctaggagagggtatgggcaggtgtatgaatgtgcagcctctggagtgggtagagtggttttctggaatgcccggggactggataaaaaggtagagatgtaaaggcttttaaagttctagaggccacggagctttccagccaggacggtgaacttggccctcaagggagggcagcacagagaggaaggccctgagctggagagagaggaggcgggtggtgatggggagagcccggctgctgctcggcccagaggaggaagggtacgttcgggagaggatgaagacttgggagtggtgtgtttgctgtagacaatttccagagcaagaaggcaggctgggagcaggggccgggggtaaaaggcagatagcaaggtaaggaggtgtgggggaagaccagcggctgtgctcaccgtggttagtgacactgtcaccatccagccccggtcagacatggtcctatagctgagggtctcaccaggcagtgggggcacaggtcaggggaatgggatcgccagaggagcattctcaaaatgtgcctgtgcaggcatctcccacccctgacattctgcatgggaggaccagggggtggccaccctacatgcagcagacccctggtggtcattctcctctcagcctcccgtcctcccctccccacctcaccacccc

SEQ ID NO: 116142 - DNA, 535 bp, Homo sapiens
agaggcatggtggcaaccacaaggtggccaagacaatttgtctccagttggatgggatgtctgtctggacatagtctgtgcttgcattggttgcaattctgatggatggacatagataccttggccttggacaatttgggctgactgtggagcatctgtgggtcctgtggctggcagtggaggcggtaaggagatgactagcagtgagctgccctgaggcccccttgtctaccgcctctcgtctcaaagtcctcatcctcctgtacacatgactgcatggacagccagtaggtgctttcttcttcagtttcttgaaacttgaacagtcatctgttttgctgatagattaagtttgttaaaaccctgccttgtccaagggcagtggttcatgcctgtaatctcagcactttgggagaccaaggtgggaggatcacttgagcctaggaagtcgactctgtttttataattctaccatccgctctccaccatggagccagactgacctttggaaaacatccccccacccctcaccgcc

SEQ ID NO: 116143 - DNA, 539 bp, Homo sapiens
acctctttaaatttctttattgtgtctgagtttgtctacatcttaccctccatatagagacatttacttttggtatttgttaagatagttcacctgatctgtccttttacattcttgctaatactggttaattaagctgaaagcaatggtcagaaatggtttcccgacaagttctttttttgagacttgccataccataaaagtcgtgctagaaaaaccacagaaacagcttaatggcaatgccggcttgcctcactgggagggtgctaggggaagaattacacatccacttcatgccactgacatgcactttatactacaacaaccgggccaggcatggtggctcacgcctgtaatcccagcactttgggaggccgaggcgggcggatcacgaggtcgggagttcgggatcagcctgaccggcgtggtgaaaccccatctctactaaaaatacaaaaattagctgggtgtggtggcacacgcctgtagtcccagctactcgggaggctgaggcaggagaatcgcttgaacccgggagt

SEQ ID NO: 116144 - DNA, 442 bp, Homo sapiens
aacagattagagtccaaaggagcttttgtgctaagcctgcttctggtattaagaccccagaagacctaggttggttgctagaaatcactggatctcacccatttaaatagatcctaagacttgatttcttgtcaaagaaaggtgctcagcgctctgtgaaatccgcaacctctatcgtaaaactggctcatctactcgcttcttctctagtcttaggcctctcctcaccccgcaagtagctctttcaggcaatgaaacctcttgacattttccagattcctggtggggccaagcaagtattcctgcttcccacatgagatattacagattcctgccccacagtctgtgccggctgggtgcaccctctgtgttggcacttactacatggcaaaaacctagttttcctttatttgggtcacatgccaccctatcaagtcaccag

SEQ ID NO: 116145 - DNA, 457 bp, Homo sapiens
tataagatacattccaaggctgggcacggtgtctacaaaaaatacaaaaatttgccagtcgtggtggtgcgttcctgtagtcgcagctactctggaggtgggagaattacttgagcccaggaggcagaggttgcagcaagccacgatcgtgccactgcactccagcctgggtgacagagcgagacactgtcccaaaaaagaaaaaaaattattttatagtccacagtaacagccagcatttactgagagcttatgtgtgcaaatcactagggtaacaacttcctcgtgttatagacactcatgggcctatgttatcatcctcattttacaaaaggggaaattgagccccagagagatgaattcacctagttacacaacacaaaatagtaactgtctcagctgggactcaaacccaggcagcggagagtagccaaagacgagcagagaccaggtccca

SEQ ID NO: 116146 - DNA, 700 bp, Homo sapiens
gagaggtttctgtatggaactgagctcaacttctaatacagcaaagacagttgtggatttatagccaaggagtagagcaaggtggtaagcagatggaaatttactaagaacttacctagatatcaaaggtagagggattcttgctaaactggcttaataaaattattttaaataataaaactgttaattaataaaactattaataataaaactactttctaaaactaagatatccagagtggagagtgagaaacttgatcaaatatccagtagtctaatatcaagaattagtaaattcttgataaattcgctaagcaggaatctttactaaaactcggctgggcaggccaaggtcaaagtctacttaggaagaatgctccaaggagcctaactcaagtttggtcaagggaagagtctttttcagtggataattgtgaactattttcatacacactatttcgtagcagactaatagatcttatgaatatacatctcattatttttgcagtaataaacatccctataataaaactcactgtagcaaaaaataaacatgctcattaacacacccaaatatataggctctccgtattatataaaaaataagcagcaaaaagtctacaagcagaaaattatacttagtaattaatgcttcagtattttattatagttagataatctaggtatctaatgaatgccc

SEQ ID NO: 116147 - DNA, 860 bp, Homo sapiens
agcggggggacagggaagactgaaaacggacatgagggaacttgctgggagaattgttttcttccttgctcctaaatcacagaggagatagtccataaccagtgagctgggccagaagctaagtacttttatccctcttcccaaactggaaataatgcttttctttggctacctaacagtgcagtggcaaaaggttcagattcggttttcaggctcagagtagaatgagcaaaaaccaatgacatttccacttttccaactataatgctgaaaaaaatagctgctgcactgtatcttttaagagtgttgtggataccagctattgtgggtttgttcaactcccaacccctggcaactcagaatatgactttaactggagatagactctttacagaggtaattaaaatgaggtcattagggtgggccctaatacagtatgactggtgtccttacaagaagaaatttgcaaaaagacatggacagagggaaaactaaagggagaagacagcgattttgcaagccagagagagataccctgaacagatccttaccctctcagccttccaaaggaatcaatcctgacggcaccttgatctcagacttacaggctccagaactttgagtaaataaatttctattgtttaagcaacccagtttgtagtacttgttacagcagccccaccaaagtaatgtaccagcactgaagtcaaaaagaagagacacatactttagggttcattcttaatggcagaaacatcagaacggtgttttctagtaaggagagtattttttataaaaggccaatcgaatgaatttttgacaaatgccttccacaatgcagtcatttaaggacttaatac

SEQ ID NO: 116148 - DNA, 343 bp, Homo sapiens
atttcagagtagtcagttattacttcctttaactgaaaatattttttgacattaaattcatatctatcttacttattttttagaaagttaacagaacaaatctccaaaatcacaaaaatagttgatctagcaaggcaatacttgcattatactacttaaattaaatgtaaaacagcatcaaaattttactttgtaaatattttagccatagtcaaagtataaactctgatttagggatgcttttgtattgatgataagatgttaagaattagaagagaccttaaacctgtatatatgacagtggtaattggactaattgattgcaacatcttctttcaaataa

SEQ ID NO: 116149 - DNA, 182 bp, Homo sapiens
aaaaatccacagaagagtcaaatgcattttggttaaatcttctttcaaaactcagagatctttttttcctccttaactctcggtaggaagtgatctccatgccgcacgaacagcatggaaatccacggctttaaaagaaccttgccataaaatgagaaaacctctccaaatgactaatcttt

SEQ ID NO: 116150 - DNA, 564 bp, Homo sapiens
atgtttgatattgcccatcaattgttaactcattttatctagataggcatgtgaaattatctaggaaatcaaaggattgcagatggaatcagaaccacgttgccacagtttcattctggctttagccttgagtacagtatggactgaatggagactactaggctctcagccatctgctgtgttctggtagtgctctacaatcatgtgtctctactacttctttgcaatgtaaatactagtgtaaaactactcagccacaagctctgagagagatcgagagatgttcttctcttaatagaaataagtcatttggtggaataactcttcgagtcaaccagtgtaagtaacagagacaccaaaaactagccattagtttagtttgcttgacccagcaatctacctcttagtatatgctttggtgacactcatgtacttatgcaccaggtggcaggtgtgtactagaattaagatattcatagtagcattgtttcagatagtaaaaaagtgttatccacaaaaaaatggatgaattatcagtgaaaattactgaactttggacacaca

SEQ ID NO: 116151 - DNA, 337 bp, Homo sapiens
aaacagaaccccgacatcatgcaagtctgatgataagcacgctctgcaaatgtattaccaagatcagcagcatcttcaacgttgcttgtctcaaacagtaacactctaaagggatgcacgatcttttcttttatacaacagacagtgcttccatctagagggtcactgcctgagatcttcttttttttgacacggagtctcactctgccgcccaggctggatgcggtggtgggatctcggctcatggcaacttctgcctcctgggttcaagcgattcttctgcgtcagcctcctgagtagctgggattagaggcacccaccaccatgcatattgcat

SEQ ID NO: 116152 - DNA, 651 bp, Homo sapiens
tgtataaaaagccagctaggagtaagaattagaaatgagctttctcaggggcattttcaccattaattatctagagttttttttttgttttttcagagtagtagccattctctttgtttatcttaatgagcccagttatgccatctggtggccaaaataaattgaaaacatgcaactatgctgtcagaaagtgtgaacgtgtcctttttagagttattccctttcaccccttagttttctccccattttccatgagcatctatcactcactacataaggagtaccagggcattgatcttgatggtgcctgtttccctgcatggaaaggtaagaaagtttggtcttggtacaagtgaaactggttaagatcaaaagaaaaagaaggacaagttagggacaggacccttgcccatgtccaaaggaacagaataatgtttccagaagaaagagcaagagcagaagccagtgcccccagcttatcagtaagcagcatggaatttgactaggaaacagcagaacggccactgctaagtgggaatcaccataacacctgaaaaaaataataataacagcaagagtagctgctccaaatgtgttcaaacctcctggtctgaatggattacattcctaagtaccaaaaataaaaattaa

SEQ ID NO: 116153 - DNA, 179 bp, Homo sapiens
aagtaccttccacctttttttaaggttgtggcaatataacaacagagaacactggtggccagggtcctaagggaaggtttgatgctgcttgtaagttctgataccttccaaaattcataatactgagagtatattgaaagacaggccgggcgatgtggctaacccctgtcatcccagca

SEQ ID NO: 116154 - DNA, 548 bp, Homo sapiens
tgggcacccatctgtgcctgcgccctaatagatctggcactccctatgagatgaacccggtacctcagatggaaatgcagaaatcacccgtcttctgcgtcgctcacgctgggagctgtagagcggagctgttcctattcggccatcttggctcctccggcttacattcttgtatagggattactttcctcactttgttatatatcctggaagctatgaacaatgatgcttcttcatactcttcaacctcatcatgataccttgcacgaagcaggagctcaactaatttgggttgaggccagaatgccaatagtgagcaaaaaaggatgatatttgacacttggcattgaatatctgaatcatgatgtccacataactacagctatgcaccacataatgatgttttactcaacaacagaccacatatacaatggtggtttcataaggctataaaggagctgaaaatttcttaccacctcatgtcctcatgtcatagtgcaacatattgctcttgtgtttgcagtgatgctggcataaacaaacccact

SEQ ID NO: 116155 - DNA, 139 bp, Homo sapiens
gggagggcaaaagtttccttggtcatgggctgaggcccaggcaggtgagcaatgtcaaggtgactgtagggagtgggctttctgcaggcgggtggagggcgacaggagggtgtgccagctgtcagcccgcatgacagtt

SEQ ID NO: 116156 - DNA, 748 bp, Homo sapiens
cgggaaagcatctctgagagggacccaggtcctacccgtcaggtgagcgcccagcaacctgagcattgtgggcgcgtgtctgcctttgagccacggccggtcagggaggggacgcaggagagctctgtgtcccctgcctgcccacccactaagttcacaaagcactcactgtcccatcaggttgtgacaaccccatgtgttcaagaagccatttactttgagagacctctgtgggctgtggatgaggcttttgctaagtcctttttactcgtcaaacagatgggtttgctgggctgttacaccctgggcaccagggttctagccacgaaagagacactctctcttccctcgccatgtcttacaaaattgtgggtccagacaagtcagcaggcaggggctggactgtgacaagagccctggcaaagcgtggacggcattgtttctgggagcactgcagagggaggtttctccagagggggcagcagagcagaggtcggaaggtgtggagtcagccaggcccaggactgcgcaaaagtgctcctagcggcgaaccacaaccagcagtcgggaggcagtgaggacgtgggggtgcatcagtgtggctggggagcgtcgggaccctctgcagtatccagagatgcctcagggacgccaccctccccaggaaggctggatgctgtggtgccagcaggcccctttctcttcgctctgaccctccaggagttgaacctcctctttctagttcata

SEQ ID NO: 116157 - DNA, 258 bp, Homo sapiens
agcgcccggggagcgcgcccgggtagccaagagggaggagcgcggggagcgccgacagccgcccgcccgcccgcccccgcgacgcccgcgcgcaacagttcccccaaagttgcagcccgggaggcgagcgcgcacgggcggccgaggggcgggcggttggcggggacgcggcctcgcggcccagagcggagagtcccggcgggcggcggcggcatgggcacccggcagaccaagggcagcctggcggagagagccagc

SEQ ID NO: 116158 - DNA, 255 bp, Homo sapiens
cggtgtagtctcagctactcgggagactgatgcagaagaactgcctaaacccaggaggtggaggttgctgtgagttcccacaactgcactccaggctgggcaatagagtgagatcctgtctcaaaaaatgaaaaacatttttgctctacaagattacatttaattggcaactacctagctttgaaccagcaaggggaaaagtaacagaacggcatgtctgtctcactaacttcttgtttttttgagacaggttct

SEQ ID NO: 116159 - DNA, 869 bp, Homo sapiens
agcgggcggaaggtgacgggaaacaggccgcagacctgaacttccaaccgtatgtaggcgagaagccggtgccgatactcccactatcccacaatgtcccactgggccccagagtggaagagggcggaggctaatccaagagaccttggggccagctgggatgtcaggggcagcagaggcagtggctggagtggccccttcggccatcagggaccgagagcagcaggctcccgtgaaccaccactctgctttaaaataaagaacaatatggttggtgtggtcattggttacagtggatcaaaaataaaagatctacaacattcgacaaacactaaaatacagatcataaacggggaatctgaagcaaaagtcagaatttttggcaatagggaaatgaaagcaaaggccaaagcggctatagaaacacttattagaaaacaagaaagctacaactcagaatccagtgtggataatgctgcatcccaaacccctattggaagaaatctaggcagaaatgacattgttggagaagctgagccattgtcaaattgggatcgcattagggcagcagtcgtggagtgcgaaaagagaaaatgggcagatctaccaccagttaagaaaaacttttacatagaatccaaagcaacaagctgcatgtctgaaatgcaggtgattactggagaaaggaaaatttcaacataacgtgtgatgacttgaaaagtggtgaaaagcgtctcatttcaaaaccaacttgcaggtttaaagacgcttttcagcaataccctgatcttctgaaagctataagggtagggattgtaaagccaacgccaattcagtcacaggcatggccaattattctacaaggaata

SEQ ID NO: 116160 - DNA, 396 bp, Homo sapiens
tgatctagaggacctggctcagtggtccagtgggtgacaagtcagtgggtgacatccaagccgggcctcagctggacctcgggattggagcggggcctactcttaggggtgcaagcagtgagaggctgggacttgggctatggcgggggcattctgtgggccctgttctcggtagggggtcactgccttttccctggggttttcccacatgttgtgccttcctgaaagcacttctcctttcctgggctccgtcctgactcagcagtgccctgataccctgtggtaagcaggcaggcagggagcagccaggagacttcctggagaaggtggctagaatttcccagatgcttccgagaggcccctgtgttccaccttcgtgagacacggtcccttccc

SEQ ID NO: 116161 - DNA, 194 bp, Homo sapiens
gtggtcttcttcccccaagccattcccttgatacttggtgtcagtgccttctcccaccttgatcttggctttcccttcaccacctccatcattcgcttcctctccattggatcccattagcttacatacatgctcgggtatcaccgtgactccatatcctgccccagtctctgccctccatcgtgccaagccag

SEQ ID NO: 116162 - DNA, 404 bp, Homo sapiens
gggctttaaaaaaatgaaaattgacaaagtaatacaataacaatgtcatgtgattattccagtggaagagaaaggatttatgaagtcacctcacatctgcatccattcggtcattgtctgttttatcccagaatgtctcttaagttattctcatctgtagttcatgcctgctttgtagcttctgaccgttctaaccaaacacccatttacaatggtatgcagttggtcctccatattcacagcttctgcacctgcagattcaaccaactatggattgaaaatatcttttttaaaaaatgataaacagtaaaaaataatagaaagttgaaaacaatgcagtgtaacaattatttacatagcatttacaggcatacttcattttattgtactttgcacatattgct

SEQ ID NO: 116163 - DNA, 406 bp, Homo sapiens
ggagacggctggtgggaagacaggcaggtgcctgagagcctgagctgtccatgctcctggggggccgagatgcttcccagggatggatggggaaatgggaaggagacagtgtggattccgaggtcccagctggcattccagctctgtctgagtgctccctgtacacggagcgtcacacccactcacacggtgtctgtggggcacgagaagagacctgtgtcagcagcagcctcagagccacgagtgggcttcaacaagtggaaggagccgaggggggagatggcaaaggcctgtgagatgcaaacctctggggaagaatgacgacccctccagggatgcgcctccctgtccccagaggcttcatcctagggaggccctccaggagtcctcccgccctctcacagag

SEQ ID NO: 116164 - DNA, 319 bp, Homo sapiens
tgtgtgtgtgtgtgtgtttcttttaaaagtctcttcccctgaaaatacttcatgttgatatttcttcttaaagatgctgtaattatgagagagcagaaagaacccccgaatgactgtataacttgaaatattacaagcacagtcaccccacttccccactccgcggggaaatttacaggcttccaggctgccaccaagagggaaggactagagcccagcagctctcagagttcttggagttctcggcctccgaagcacactgtccagccacctgcacaaagtccatcataaacccatgcggggcacaatgggagtagct

SEQ ID NO: 116165 - DNA, 200 bp, Homo sapiens
gtagacggggtggggtgtaatccttgctccagatcctagagttcaggactgctgtgccagggtgaccttatgtgtgtcaagtagatatagttatatgaagccatggtttgtaacctttatggggccgtagatacctgggagactgaaattcattgccctcctctctgaacactgcacattcacatgtattcaaataattg

SEQ ID NO: 116166 - DNA, 165 bp, Homo sapiens
agtgctctcatctctctaaggccaatctctctaaggcttggagaccagctaggattaagttcagctgcatgaaacagaaaaatctaacgtcctcgggctttttaccactggtatggtattcctcacataaaagcaatctggagacagccaagagcgactgacagg

SEQ ID NO: 116167 - DNA, 913 bp, Homo sapiens
tatgagagtattttgttgaaaaaaattagccaaagctttagcagaaaaacgcctgagagagcttcaccaaaacgtactctaccccaacaatgcagccaaggcccttcatcaaactagggcagttttgtaagaattttgatgggaaaatatgaggcatctaccttgcagccctgatttggctccttctgacttcgattcctaatcttaccaattttttttaagggcacccatttttcttctgttaatgtaaaaaagactgcattgacatagctaaattcccaggaccctcagttctttaggaatggactgaatgactggtattattgcttacaaaagtgtcttgatttggtggaacttacgttgagaagtaaactttatgttttttatcatttaattgtttttccacaaattttttgaagtcccttcatatatgtatgttttaaaagggctcaaatggaatagagtgaaatatctttctttttcccctcttccagagtgtactaatttttgtgtattctgttttagtttatttttaaaataatgtctagagggaacagatatttttatggaacatgaatgtttagccaagattctttatctgaaatccaggtaaaggtgtcaagtgtctgtggccttctaaagtgctgggatctacaggcgtgagccactgtgcctggccgacaatttacttgtcttagtatcatatgtcgatatgtgatttccgagacggtatttcagacctgaatttgactaacgacttacttatatactgagattcttacaaaattacgtacactgactaacctaggctggtggtcagggcctttaaattcattacggcggtctctggacacatcccttaaaccttacttctgccccattatgcacaacaagtcccccccaacagcaacct

SEQ ID NO: 116168 - DNA, 831 bp, Homo sapiens
tatgagagtattttgttgaaaaaaattagccaaagctttagcagaaaaacgcctgagagagcttcaccaaaacgtactctaccccaacaatgcagccaaggcccttcatcaaactagggcagttttgtaagaattttgatgggaaaatatgaggcatctaccttgcagccctgatttggctccttctgacttcgattcctaatcttaccaattttttttaagggcacccatttttcttctgttaatgtaaaaaagactgcattgacatagctaaattcccaggaccctcagttctttaggaatggactgaatgactggtattattgcttacaaaagtgtcttgatttggtggaacttacgttgagaagtaaactttatgttttttatcatttaattgtttttccacaaattttttgaagtcccttcatatatgtatgttttaaaagggctcaaatggaatagagtgaaatatctttctttttcccctcttccagagtgtactaatttttgtgtattctgttttagtttatttttaaaataatgtctagagggaacagatatttttatggaacatgaatgtttagccaagattctttatctgaaatccaggtaaaggtgttgtgtcttgtttttataaatcatttttatttcaacaaaatgttcagtataagaaattacttttaataattacgtcaaaacatgcagtaggtggacttttgagctaaccctggagaaggagctggatttcaccagttagcctcctatggatctgctaccatcatcaccctcccaccccacctccactgccttttttcccaagacttttaaaaa

SEQ ID NO: 116169 - DNA, 116 bp, Homo sapiens
ggtggcttgggcgagggaagctgggtgacagaggggaccatgccagagaggagacctacagagtgtggcttgggccaggggagctgggtgacagaggggatcatgtggcacggagg

SEQ ID NO: 116170 - DNA, 116 bp, Homo sapiens
aaaaacaaaacaaaacaaaaactgtcaaagactgccctgcatggttgttataaaaactggatcatgtcggccaggcgcggtggtcacgcctgtaatcccagcactttgggaggccg

SEQ ID NO: 116171 - DNA, 438 bp, Homo sapiens
atataaaagagaatatatttacatatatatgaaatataatttattaaggagaattggctcacataattacaaaggcaaagtcccacaataggccatctataagccggaaaatgagagaagcctaaagcatggctcccaaggaagccagtgacatggctcagtccaaatttgaaagtctcaaaaccagggaagctgacagtgcagccactagtctgaggccaaaggcctgagagctcccaaaaggctgctgatgcaagttccagggtccaaaggcaaaagaacctagagtttgatgtgcaagggcaagaggagaaaaaggcatactgctctggaagagagagaaagtgcataaaaaagaaatccaagcaagctgaatgttcccattcttctgcctttttgttctagccacacttgcaaccaattgcatgatgcctaccc

SEQ ID NO: 116172 - DNA, 901 bp, Homo sapiens
atagtatagatgaatgtgagtgatattgaagagcttattttttgtggtttatgtgtatgtctttattaatgaattactcaataaacaagtgtaggtaagaatgaagagaaagaaggccaatcctggactgttgatgacaagtggtggcttatgtggttgtacatgctggttgtatatgaagaatattacatatctgaaactttgaggtccaaacacaaatagaatctagttcattcccgtgtttaaagtgatgtaatagacagataccggaaatatacaaggagtttgtgattagtcttgtgagcatgaggtttaaaaagattgtaaaagtggcaatagcagaataagcaaatacatgtacaaataaaataaaacaaataaaaatgaagaggacaaagcattgttcattgctgaaatatgcagtaaggaaaatattgctaatgtacattggaatggataataaatggaccacgtgtataatatttctgactaaagatgatagagacaatggtaataattactgataagtaatagccagttattgccccaagtcaattacaagtttgaagtttataagaagaaaaataaataaaaaaaaaaaaaaaaaacactggtctgggcacgcatgggccccggaaaacgctcaaaaccatggtatagagcgcgcagcccagacagagtacgggcacacggcgctacaacagcggggtcccccaagggaaacaccctggtgcgaaggacaatgaaggcggggggaactccaccacgaattaaaaaaaacgcgccgcggaggacacaacagaagaggttctgcaacaaaaccccgagagagcactcgaaagggcacaacgggagcacttcaccaccagagcagcacaggagaccgccatattcaaatagg

SEQ ID NO: 116173 - DNA, 576 bp, Homo sapiens
gtgctctagaggatctcctccataatgtgtgcccacgagaaataatgaaaattgctgagactttttttaaccccagtaaactaagggatgaaggtcaaatcagaaacactctttaaacaggtgtgagttgattaaagggatgatggtgaccaggctggttcccaacttccccagtgctgagtgaaagaatacttgtagcgagagagaaattgttgtgaaacagaagttctgaaacaggaagaaatatggacacaatgtcacctgcctcttgcaaggctctaggagagatgctttcacagggtaaaatgaaagggaaaacaatttcaaatgtggtcattgtgacctgtaacatcttgggcacacattatggagatgtgtgcccagccaagggtttcattttgattgcattatcaagagatttggtgcttttaaaaaatggatagtgtccatttaagtgggtgtgagaggattttgtttctcattgtgattttaatgcatttctctacaaattagtaattttgtgtgtcctttcaaatgtttttttatttgtgtttttttatgaaaatttattttaat

SEQ ID NO: 116174 - DNA, 177 bp, Homo sapiens
ccccaccagaagacagccggttgaagagcagggatttgcttgtccgtttccctagaaactatgagaatcactggtgcagcgggcactgagctggcatctgctgagcggaggaggggcaggcggttccagcgaaggccggaggccggctgacctgggcgccctgtctggctctctcca

SEQ ID NO: 116175 - DNA, 328 bp, Homo sapiens
ggttgttatgaggattaaattagttgctttttgtaaagtctttggaacagtgtctagcacatagtgatttaagtgtttgctcttatgataattatgttcatgcatgaacacaaatcaatctaagggtgaatggcttttttattcatggattattcttgttaccactaacagataaatagctacatcttattccttcatttttacctccttctcattttctatagaaagctttttaataggccctcaaaaaatgcttattgaatactctatgtaaatggacagagttttagaaaacccaacctaaagaaattaaatgacttgggctggg

SEQ ID NO: 116176 - DNA, 196 bp, Homo sapiens
attcctcagggccttctattttcattctcaaaagccctttttttctcccaacaagtctccttatatatcaaaagctttggctttcaaagcttttgtttctcatgtgggctttaagaacatattttaggattcagaaaaactaaacatcgatttttttttgttctttttacatttctgctgtaactacatcagttct

SEQ ID NO: 116177 - DNA, 568 bp, Homo sapiens
caacaacaggagaggcaagcagagcacagtaggaactgaatggggtttgcgtgaaagaaaaatccagagaaaggtgtcctgcagaacgtgcacgagacggggcttcaccatgttggccagacatgttggccagacgggtcttgaactcctgacctcaactaatccacctgcttcggcctcccaaagtgctgggattacaggttgcctcccttgaacacacctgaatttgccaacatccctcttaaaaagaggcaccaagaggaatgcagaaggccagcatgcaatgctatagcccaagttccatgccagcacttgaactttgagatgctcttagcttttctagcagtcataaggcacttttgcccaagaccaagcttgcagtcagggaaagcctccaggtttttcgaaatggccttgaacaggttttaagccagctctcttgcttttaatcagaggtcatttggccaagttgcagcctgttgttccagcccaggatttctccacctaagcagatacttctaattggggagagtggagaagcggcaacttcaattgtcccccctgacat

SEQ ID NO: 116178 - DNA, 406 bp, Homo sapiens
caacaacaggagaggcaagcagagcacagtaggaactgaatggggtttgcgtgaaagaaaaatccagagaaaggtgtcctgcagaacgtgcacggtggagtctagttcctgtcccctagagtgtgggttagcgtttatgacggccttcatgaatgagtgcaatagaagtgacactgtatgatttctgaggctggatcataaaaggcgaaagagaaaccactgcaagctggcttttgggatgctcacctttggaacctggccgccatgttgtgagagagcccaggcctcgtggagaggccacaagtagatgttctggctgacagcaatcaacaattgccagataaacaactgaataagcattcagatgacatcagctcccaggccttggggattccagctaaggcct

SEQ ID NO: 116179 - DNA, 489 bp, Homo sapiens
ttgattcgttagcattttttagcaatgatgtatttctaaatcatggtaactatatttattttatatatacataattgctattgcactgcttaacagtactatggccaggccgtggtgggtcacgcctgtaatcccagcactttgggaggcagaggaggatgggtcaactgacgtcaggagatcgagaccatcctggctaacaaggtgaaacccctgtctctactaaaaatgcaaaaaattagctgggtgtggtggcatgcacctgtaatcccagctatttgggaggctgaggcaggagaatcatttgaacccgagagacggaggttgcagggagccaagatcgcaccactacaccccagcctgggtgaagatcgagactctgtctcaaaaaaaatgagtactccccacttgtgtgtatctgactacctggctctgatactaagccagtgaagagctttcctcatctacatctggtcttacaatagatgg

SEQ ID NO: 116180 - DNA, 2763 bp, Homo sapiens
tcccagttggggcccagccttttaaagccatcgctccttctttctggccggatgtgtgctgagacccagagtcacccaggggtctccgtcacgtgccaggagtaggcagaagtgggctgtgacagatcaggaaacagagctcagtgcagcccactaaattgctcagggccctacagctaacaagcggcagaggcaggatctgcactcaggagctgcttggagatgctgctgtggccactgctgctgctgctgctgctgctgccaacattggccctgctcaggcagcagcggtcccaggatgccaggctgtcctggcttgctggcctccagcaccgagtggcatggggggccctggtctgggcagccacctggcagcggcggaggctggagcagagcacgctccatgtgcaccagagccagcagcaggccctgaggtggtgtctacagggagcccagcgcccccactgttccctcagaaggagcacagacataagcaccttccggaatcatctccctctgaccaaggccagccagacccagcaggaagacagtggagagcagccactgcccccgacctcaaaccaggaccttggggaggcctctctgcaggccaccttgctgggtctggcagccctaaacaaggcctacccagaagtgctggctcagggacgcactgcccgtgtgacgcttacatccccttggccccgacccctgccttggcctgggaataccctgggccaggtgggcacccctggaaccaaggaccctagggccctgctgctggacgcactgaggtccccagggctgagggcactggaggctgggacggctgtcgaacttctggatgttttcttgggcctggagactgatggtgaagagctagctggggcgatagctgccgggaaccctggagcgcctctccgtgaacgggcagctgagctccgggaggccctagagcaggggccacggggactggcccttcggctctggccaaagctgcaggtggtggtgactctggatgcaggaggccaggccgaggctgtggctgccctcggggccttgtggtgccaaggactagccttcttctctcctgcttatgctgcctcgggaggggtgctgggcctaaacctacagccagagcagccccatgggctctaccttctgccccctggggccccctttatcgagctgctcccagtcaaggaaggcacccaggaggaagctgcctccaccctccttttggccgaggcccagcagggcaaggagtatgagctggtgctgacggaccgcgccagcctcaccaggtgccgcctgggtgatgtggtgcgagtggttggtgcctacaatcagtgtccagtcgtcaggttcatctgcaggctggaccagaccctgagtgtgcgaggggaagatattggtgaagacctgttctctgaggccctgggccgggcagtggggcagtgggcgggggccaagctgctggaccatggctgtgtggagagcagcattctggattcctctgcgggctctgctccccactacgaggtgtttgtggcgctgagggggctgaggaatctgtcagaggaaaatcgagacaagctggaccactgccttcaggaagcctctccccgctacaagtccctgcggttctggggcagcgtgggccctgccagagtccacctggtggggcagggagccttccgagcactccgggcagccctcgctgcctgcccctcctcccccttcccccctgcgatgccccgggtccttcggcacaggcacctggcccagtgtctgcaggagagggtggtgtcctgagtcaagtcctgccccaccgcccagctccccccagaggccacctcgcccctccctctgggacctctccggatggggagtccttggccagggtctctgactctgtgtcacctgacatttgcccatgagagccgctgggccttagagaggccttggcccagctgaccggttctgaagtatgggcctccggggttagcagatgccagcagtgcctgcccgtgtccccatgtcccggcatgaaggacactgctagagagttaccatgcacaccgatggtttcctgtatcacagcccaaagaggttctctggtggccacagctgtgtgctcagtcagtgcactgggcaagctagaagtgttggggggttaatgtccccaggagcagcaaccctgagtcaataaggagcaggacctcagcttcattgtccttgagcaggacaattctgaagtgtattctacataaactctcagaggatgcccagcaggatggagtcccagttgcccgcagcagtaacccactcattcatgtacttcctgcgggggctctcccttccctctcttccccactcccccgccttgggcttcctgggatggctcccaaataaacctcttgcacccagaaaaaaaaaaaaaaaaaaaaaaacaccgagggaataaacagaacaggatagctggaaaacagagggtcactgaaattggccacattgttcacaagcatagctccctgacccagactctcagtttgttccaataggttgtgtagaactccttagccggtgtaccaccccttcaatacgttgcggtgtgcataaacttccgcgctaaggcccatgggttataacccttgtcaagtaaatagacatctcgtgctacacccaacacaccggcgacattatacaaccagctatcacaagagtcgcgctctactcgatagtatcatcgccacgtaaacc

SEQ ID NO: 116181 - DNA, 2429 bp, Homo sapiens
tcccagttggggcccagccttttaaagccatcgctccttctttctggccggatgtgtgctgagacccagagtcacccaggggtctccgtcacgtgccaggagtaggcagaagtgggctgtgacagatcaggaaacagagctcagtgcagcccactaaattgctcagggccctacagctaacaagcggcagaggcaggatctgcactcaggagctgcttggagatgctgctgtggccactgctgctgctgctgctgctgctgccaacattggccctgctcaggcagcagcggtcccaggatgccaggctgtcctggcttgctggcctccagcaccgagtggcatggggggccctggtctgggcagccacctggcagcggcggaggctggagcagagcacgctccatgtgcaccagagccagcagcaggccctgaggtggtgtctacagggagcccagcgcccccactgttccctcagaaggagcacagacataagcaccttccggaatcatctccctctgaccaaggccagccagacccagcaggaagacagtggagagcagccactgcccccgacctcaaaccaggaccttggggaggcctctctgcaggccaccttgctgggtctggcagccctaaacaaggcctacccagaagtgctggctcagggacgcactgcccgtgtgacgcttacatccccttggccccgacccctgccttggcctgggaataccctgggccaggtgggcacccctggaaccaaggaccctagggccctgctgctggacgcactgaggtccccagggctgagggcactggaggctgggacggctgtcgaacttctggatgttttcttgggcctggagactgatggtgaagagctagctggggcgatagctgccgggaaccctggagcgcctctccgtgaacgggcagctgagctccgggaggccctagagcaggggccacggggactggcccttcggctctggccaaagctgcaggtggtggtgactctggatgcaggaggccaggccgaggctgtggctgccctcggggccttgtggtgccaaggactagccttcttctctcctgcttatgctgcctcgggaggggtgctgggcctaaacctacagccagagcagccccatgggctctaccttctgccccctggggccccctttatcgagctgctcccagtcaaggaaggcacccaggaggaagctgcctccaccctccttttggccgaggcccagcagggcaaggagtatgagctggtgctgacggaccgcgccagcctcaccaggtgccgcctgggtgatgtggtgcgagtggttggtgcctacaatcagtgtccagtcgtcaggttcatctgcaggctggaccagaccctgagtgtgcgaggggaagatattggtgaagacctgttctctgaggccctgggccgggcagtggggcagtgggcgggggccaagctgctggaccatggctgtgtggagagcagcattctggattcctctgcgggctctgctccccactacgaggtgtttgtggcgctgagggggctgaggaatctgtcagaggaaaatcgagacaagctggaccactgccttcaggaagcctctccccgctacaagtccctgcggttctggggcagcgtgggccctgccagagtccacctggtggggcagggagccttccgagcactccgggcagccctcgctgcctgcccctcctcccccttcccccctgcgatgccccgggtccttcggcacaggcacctggcccagtgtctgcaggagagggtggtgtcctgagtcaagtcctgccccaccgcccagctccccccagaggccacctcgcccctccctctgggacctctccggatggggagtccttggccagggtctctgactctgtgtcacctgacatttgcccatgagagccgctgggccttagagaggccttggcccagctgaccggttctgaagtatgggcctccggggttagcagatgccagcagtgcctgcccgtgtccccatgtcccggcatgaaggacactgctagagagttaccatgcacaccgatggtttcctgtatcacagcccaaagaggttctctggtggccacagctgtgtgctcagtcagtgcactgggcaagctagaagtgttggggggttaatgtccccaggagcagcaaccctgagtcaataaggagcaggacctcagcttcattgtccttgagcaggacaattctgaagtgtattctacataaactctcagaggatgcccagcaggatggagtcccagttgcccgcagcagtaacccactcattcatgtacttcctgcgggggctctcccttccctctcttccccactcccccgccttgggcttcctgggatggctccaacctttctttcttttttttc

SEQ ID NO: 116182 - DNA, 2837 bp, Homo sapiens
tcccagttggggcccagccttttaaagccatcgctccttctttctggccggatgtgtgctgagacccagagtcacccaggggtctccgtcacgtgccaggagtaggcagaagtgggctgtgacagatcaggaaacagagctcagtgcagcccactaaattgctcagggccctacagctaacaagcggcagaggcaggatctgcactcaggagctgcttggagatgctgctgtggccactgctgctgctgctgctgctgctgccaacattggccctgctcaggcagcagcggtcccaggatgccaggctgtcctggcttgctggcctccagcaccgagtggcatggggggccctggtctgggcagccacctggcagcggcggaggctggagcagagcacgctccatgtgcaccagagccagcagcaggccctgaggtggtgtctacagggagcccagcgcccccactgttccctcagaaggagcacagggtctcaccagtcttgcctgaaactcttgggaaactggcttcctgaggcgtttctgttgtcattggggctatagacataagcaccttccggaatcatctccctctgaccaaggccagccagacccagcaggaagacagtggagagcagccactgcccccgacctcaaaccaggaccttggggaggcctctctgcaggccaccttgctgggtctggcagccctaaacaaggcctacccagaagtgctggctcagggacgcactgcccgtgtgacgcttacatccccttggccccgacccctgccttggcctgggaataccctgggccaggtgggcacccctggaaccaaggaccctagggccctgctgctggacgcactgaggtccccagggctgagggcactggaggctgggacggctgtcgaacttctggatgttttcttgggcctggagactgatggtgaagagctagctggggcgatagctgccgggaaccctggagcgcctctccgtgaacgggcagctgagctccgggaggccctagagcaggggccacggggactggcccttcggctctggccaaagctgcaggtggtggtgactctggatgcaggaggccaggccgaggctgtggctgccctcggggccttgtggtgccaaggactagccttcttctctcctgcttatgctgcctcgggaggggtgctgggcctaaacctacagccagagcagccccatgggctctaccttctgccccctggggccccctttatcgagctgctcccagtcaaggaaggcacccaggaggaagctgcctccaccctccttttggccgaggcccagcagggcaaggagtatgagctggtgctgacggaccgcgccagcctcaccaggtgccgcctgggtgatgtggtgcgagtggttggtgcctacaatcagtgtccagtcgtcaggttcatctgcaggctggaccagaccctgagtgtgcgaggggaagatattggtgaagacctgttctctgaggccctgggccgggcagtggggcagtgggcgggggccaagctgctggaccatggctgtgtggagagcagcattctggattcctctgcgggctctgctccccactacgaggtgtttgtggcgctgagggggctgaggaatctgtcagaggaaaatcgagacaagctggaccactgccttcaggaagcctctccccgctacaagtccctgcggttctggggcagcgtgggccctgccagagtccacctggtggggcagggagccttccgagcactccgggcagccctcgctgcctgcccctcctcccccttcccccctgcgatgccccgggtccttcggcacaggcacctggcccagtgtctgcaggagagggtggtgtcctgagtcaagtcctgccccaccgcccagctccccccagaggccacctcgcccctccctctgggacctctccggatggggagtccttggccagggtctctgactctgtgtcacctgacatttgcccatgagagccgctgggccttagagaggccttggcccagctgaccggttctgaagtatgggcctccggggttagcagatgccagcagtgcctgcccgtgtccccatgtcccggcatgaaggacactgctagagagttaccatgcacaccgatggtttcctgtatcacagcccaaagaggttctctggtggccacagctgtgtgctcagtcagtgcactgggcaagctagaagtgttggggggttaatgtccccaggagcagcaaccctgagtcaataaggagcaggacctcagcttcattgtccttgagcaggacaattctgaagtgtattctacataaactctcagaggatgcccagcaggatggagtcccagttgcccgcagcagtaacccactcattcatgtacttcctgcgggggctctcccttccctctcttccccactcccccgccttgggcttcctgggatggctcccaaataaacctcttgcacccagaaaaaaaaaaaaaaaaaaaaaaacaccgagggaataaacagaacaggatagctggaaaacagagggtcactgaaattggccacattgttcacaagcatagctccctgacccagactctcagtttgttccaataggttgtgtagaactccttagccggtgtaccaccccttcaatacgttgcggtgtgcataaacttccgcgctaaggcccatgggttataacccttgtcaagtaaatagacatctcgtgctacacccaacacaccggcgacattatacaaccagctatcacaagagtcgcgctctactcgatagtatcatcgccacgtaaacc

SEQ ID NO: 116183 - DNA, 2785 bp, Homo sapiens
cactcgggagtgggcaagagatatcgttacgcagctgctgtgtgcccgaccgaccctgtccgaaacccttcctatcaggaaacagagctcagtgcagcccactaaattgctcagggccctacagctaacaagcggcagaggcaggatctgcactcaggagctgcttggagatgctgctgtggccactgctgctgctgctgctgctgctgccaacattggccctgctcaggcagcagcggtcccaggatgccaggctgtcctggcttgctggcctccagcaccgagtggcatggggggccctggtctgggcagccacctggcagcggcggaggctggagcagagcacgctccatgtgcaccagagccagcagcaggccctgaggtggtgtctacagggagcccagcgcccccactgttccctcagaaggagcacagggtctcaccagtcttgcctgaaactcttgggaaactggcttcctgaggcgtttctgttgtcattggggctatagacataagcaccttccggaatcatctccctctgaccaaggccagccagacccagcaggaagacagtggagagcagccactgcccccgacctcaaaccaggaccttggggaggcctctctgcaggccaccttgctgggtctggcagccctaaacaaggcctacccagaagtgctggctcagggacgcactgcccgtgtgacgcttacatccccttggccccgacccctgccttggcctgggaataccctgggccaggtgggcacccctggaaccaaggaccctagggccctgctgctggacgcactgaggtccccagggctgagggcactggaggctgggacggctgtcgaacttctggatgttttcttgggcctggagactgatggtgaagagctagctggggcgatagctgccgggaaccctggagcgcctctccgtgaacgggcagctgagctccgggaggccctagagcaggggccacggggactggcccttcggctctggccaaagctgcaggtggtggtgactctggatgcaggaggccaggccgaggctgtggctgccctcggggccttgtggtgccaaggactagccttcttctctcctgcttatgctgcctcgggaggggtgctgggcctaaacctacagccagagcagccccatgggctctaccttctgccccctggggccccctttatcgagctgctcccagtcaaggaaggcacccaggaggaagctgcctccaccctccttttggccgaggcccagcagggcaaggagtatgagctggtgctgacggaccgcgccagcctcaccaggtgccgcctgggtgatgtggtgcgagtggttggtgcctacaatcagtgtccagtcgtcaggttcatctgcaggctggaccagaccctgagtgtgcgaggggaagatattggtgaagacctgttctctgaggccctgggccgggcagtggggcagtgggcgggggccaagctgctggaccatggctgtgtggagagcagcattctggattcctctgcgggctctgctccccactacgaggtgtttgtggcgctgagggggctgaggaatctgtcagaggaaaatcgagacaagctggaccactgccttcaggaagcctctccccgctacaagtccctgcggttctggggcagcgtgggccctgccagagtccacctggtggggcagggagccttccgagcactccgggcagccctcgctgcctgcccctcctcccccttcccccctgcgatgccccgggtccttcggcacaggcacctggcccagtgtctgcaggagagggtggtgtcctgagtcaagtcctgccccaccgcccagctccccccagaggccacctcgcccctccctctgggacctctccggatggggagtccttggccagggtctctgactctgtgtcacctgacatttgcccatgagagccgctgggccttagagaggccttggcccagctgaccggttctgaagtatgggcctccggggttagcagatgccagcagtgcctgcccgtgtccccatgtcccggcatgaaggacactgctagagagttaccatgcacaccgatggtttcctgtatcacagcccaaagaggttctctggtggccacagctgtgtgctcagtcagtgcactgggcaagctagaagtgttggggggttaatgtccccaggagcagcaaccctgagtcaataaggagcaggacctcagcttcattgtccttgagcaggacaattctgaagtgtattctacataaactctcagaggatgcccagcaggatggagtcccagttgcccgcagcagtaacccactcattcatgtacttcctgcgggggctctcccttccctctcttccccactcccccgccttgggcttcctgggatggctcccaaataaacctcttgcacccagaaaaaaaaaaaaaaaaaaaaaaacaccgagggaataaacagaacaggatagctggaaaacagagggtcactgaaattggccacattgttcacaagcatagctccctgacccagactctcagtttgttccaataggttgtgtagaactccttagccggtgtaccaccccttcaatacgttgcggtgtgcataaacttccgcgctaaggcccatgggttataacccttgtcaagtaaatagacatctcgtgctacacccaacacaccggcgacattatacaaccagctatcacaagagtcgcgctctactcgatagtatcatcgccacgtaaacc

SEQ ID NO: 116184 - DNA, 1796 bp, Homo sapiens
tgaagggccatccttgtgtcctgggctccactgcctctcccttcctcctcttcaggctggaccagaccctgagtgtgcgaggggaagatattggtgaagacctgttctctgaggccctgggccgggcagtggggcagtgggcgggggccaagctgctggaccatggctgtgtggagagcagcattctgggtgagcctccccaccggctcctgcctaccatccttgagctacccttcaactcctacctcccctgccaggggactgctaggaaagagataagcctcctttactactcctacaaaagtccttctctgcatctaactctcatccatcctgctgcagtctctacccattttctttcctgatctgtctcctatttaggatcaagctctaggttcctctccatttaccccacgtccccaccaagaaactcttttttccctatgaatctcagagtggggaagaacagatagggcagaggacactagacttggcagctgcccattcaccggaagtatgtgtgcacatggggtctattcacagattcctctgcgggctctgctccccactacgaggtgtttgtggcgctgagggggctgaggaatctgtcagaggaaaatcgagacaagctggaccactgccttcaggaagcctctccccgctacaagtccctgcggttctggggcagcgtgggccctgccagagtccacctggtggggcagggagccttccgagcactccgggcagccctcgctgcctgcccctcctcccccttcccccctgcgatgccccgggtccttcggcacaggcacctggcccagtgtctgcaggagagggtggtgtcctgagtcaagtcctgccccaccgcccagctccccccagaggccacctcgcccctccctctgggacctctccggatggggagtccttggccagggtctctgactctgtgtcacctgacatttgcccatgagagccgctgggccttagagaggccttggcccagctgaccggttctgaagtatgggcctccggggttagcagatgccagcagtgcctgcccgtgtccccatgtcccggcatgaaggacactgctagagagttaccatgcacaccgatggtttcctgtatcacagcccaaagaggttctctggtggccacagctgtgtgctcagtcagtgcactgggcaagctagaagtgttggggggttaatgtccccaggagcagcaaccctgagtcaataaggagcaggacctcagcttcattgtccttgagcaggacaattctgaagtgtattctacataaactctcagaggatgcccagcaggatggagtcccagttgcccgcagcagtaacccactcattcatgtacttcctgcgggggctctcccttccctctcttccccactcccccgccttgggcttcctgggatggctcccaaataaacctcttgcacccagaaaaaaaaaaaaaaaaaaaaaaacaccgagggaataaacagaacaggatagctggaaaacagagggtcactgaaattggccacattgttcacaagcatagctccctgacccagactctcagtttgttccaataggttgtgtagaactccttagccggtgtaccaccccttcaatacgttgcggtgtgcataaacttccgcgctaaggcccatgggttataacccttgtcaagtaaatagacatctcgtgctacacccaacacaccggcgacattatacaaccagctatcacaagagtcgcgctctactcgatagtatcatcgccacgtaaacc

SEQ ID NO: 116185 - DNA, 2031 bp, Homo sapiens
tcccagttggggcccagccttttaaagccatcgctccttctttctggccggatgtgtgctgagacccagagtcacccaggggtctccgtcacgtgccaggagtaggcagaagtgggctgtgacagatcaggaaacagagctcagtgcagcccactaaattgctcagggccctacagctaacaagcggcagaggcaggatctgcactcaggagctgcttggagatgctgctgtggccactgctgctgctgctgctgctgctgccaacattggccctgctcaggcagcagcggtcccaggatgccaggctgtcctggcttgctggcctccagcaccgagtggcatggggggccctggtctgggcagccacctggcagcggcggaggctggagcagagcacgctccatgtgcaccagagccagcagcaggccctgaggtggtgtctacagggagcccagcgcccccactgttccctcagaaggagcacagacataagcaccttccggaatcatctccctctgaccaaggccagccagacccagcaggaagacagtggagagcagccactgcccccgacctcaaaccaggaccttggggaggcctctctgcaggccaccttgctgggtctggcagccctaaacaaggcctacccagaagtgctggctcagggacgcactgcccgtgtgacgcttacatccccttggccccgacccctgccttggcctgggaataccctgggccaggtgggcacccctggaaccaaggaccctagggccctgctgctggacgcactgaggtccccagggctgagggcactggaggctgggacggctgtcgaacttctggatgttttcttgggcctggagactgatggtgaagagctagctggggcgatagctgccgggaaccctggagcgcctctccgtgaacgggcagctgagctccgggaggccctagagcaggggccacggggactggcccttcggctctggccaaagctgcaggtggtggtgactctggatgcaggaggccaggccgaggctgtggctgccctcggggccttgtggtgccaaggactagccttcttctctcctgcttatgctgcctcgggaggggtgctgggcctaaacctacagccagagcagccccatgggctctaccttctgccccctggggccccctttatcgagctgctcccagtcaaggaaggcacccaggaggaagctgcctccaccctccttttggccgaggcccagcagggcaaggagtatgagctggtgctgacggaccgcgccagcctcaccaggtgccgcctgggtgatgtggtgcgagtggttggtgcctacaatcagtgtccagtcgtcaggttcatctgcaggctggaccagaccctgagtgtgcgaggggaagatattggtgaagacctgttctctgaggccctgggccgggcagtggggcagtgggcgggggccaagctgctggaccatggctgtgtggagagcagcattctgggtgagcctccccaccggctcctgcctaccatccttgagctacccttcaactcctacctcccctgccaggggactgctaggaaagagataagcctcctttactactcctacaaaagtccttctctgcatctaactctcatccatcctgctgcagtctctacccattttctttcctgatctgtctcctatttaggatcaagctctaggttcctctccatttaccccacgtccccaccaagaaactcttttttccctatgaatctcagagtggggaagaacagatagggcagaggacactagacttggcagctgcccattcaccggaagtatgtgtgcacatggggtctattcacagattcctctgcgggctctgctccccactacgaggtgtttgtggcgctgagggggctgaggaatctgtcagaggaaaatcgagacaaggtaaaggagacgaggacagggtctgactgtagaccccttcactctgcacactcccagggtgccatggagatcagggctgat

SEQ ID NO: 116186 - DNA, 2611 bp, Homo sapiens
ggacccgcgtcgccacgcgtcgagctaacaagcggcagaggcaggatctgcactcaggagctgcttggagatgctgctgtggccactgctgctgctgctgctgctgctgccaacattggccctgctcaggcagcagcggtcccaggatgccaggctgtcctggcttgctggcctccagcaccgagtggcatggggggccctggtctgggcagccacctggcagcggcggaggctggagcagagcacgctccatgtgcaccagagccagcagcaggccctgaggtggtgtctacagggagcccagcgcccccactgttccctcagaaggagcacagacataagcaccttccggaatcatctccctctgaccaaggccagccagacccagcaggaagacagtggagagcagccactgcccccgacctcaaaccaggaccttggggaggcctctctgcaggccaccttgctgggtctggcagccctaaacaaggcctacccagaagtgctggctcagggacgcactgcccgtgtgacgcttacatccccttggccccgacccctgccttggcctgggaataccctgggccaggtgggcacccctggaaccaaggaccctagggccctgctgctggacgcactgaggtccccagggctgagggcactggaggctgggacggctgtcgaacttctggatgttttcttgggcctggagactgatggtgaagagctagctggggcgatagctgccgggaaccctggagcgcctctccgtgaacgggcagctgagctccgggaggccctagagcaggggccacggggactggcccttcggctctggccaaagctgcaggtggtggtgactctggatgcaggaggccaggccgaggctgtggctgccctcggggccttgtggtgccaaggactagccttcttctctcctgcttatgctgcctcgggaggggtgctgggcctaaacctacagccagagcagccccatgggctctaccttctgccccctggggccccctttatcgagctgctcccagtcaaggaaggcacccaggaggaagctgcctccaccctccttttggccgaggcccagcagggcaaggagtatgagctggtgctgacggaccgcgccagcctcaccaggtgccgcctgggtgatgtggtgcgagtggttggtgcctacaatcagtgtccagtcgtcaggttcatctgcaggctggaccagaccctgagtgtgcgaggggaagatattggtgaagacctgttctctgaggccctgggccgggcagtggggcagtgggcgggggccaagctgctggaccatggctgtgtggagagcagcattctggattcctctgcgggctctgctccccactacgaggtgtttgtggcgctgagggggctgaggaatctgtcagaggaaaatcgagacaagctggaccactgccttcaggaagcctctccccgctacaagtccctgcggttctggggcagcgtgggccctgccagagtccacctggtggggcagggagccttccgagcactccgggcagccctcgctgcctgcccctcctcccccttcccccctgcgatgccccgggtccttcggcacaggcacctggcccagtgtctgcaggagagggtggtgtcctgagtcaagtcctgccccaccgcccagctccccccagaggccacctcgcccctccctctgggacctctccggatggggagtccttggccagggtctctgactctgtgtcacctgacatttgcccatgagagccgctgggccttagagaggccttggcccagctgaccggttctgaagtatgggcctccggggttagcagatgccagcagtgcctgcccgtgtccccatgtcccggcatgaaggacactgctagagagttaccatgcacaccgatggtttcctgtatcacagcccaaagaggttctctggtggccacagctgtgtgctcagtcagtgcactgggcaagctagaagtgttggggggttaatgtccccaggagcagcaaccctgagtcaataaggagcaggacctcagcttcattgtccttgagcaggacaattctgaagtgtattctacataaactctcagaggatgcccagcaggatggagtcccagttgcccgcagcagtaacccactcattcatgtacttcctgcgggggctctcccttccctctcttccccactcccccgccttgggcttcctgggatggctcccaaataaacctcttgcacccagaaaaaaaaaaaaaaaaaaaaaaacaccgagggaataaacagaacaggatagctggaaaacagagggtcactgaaattggccacattgttcacaagcatagctccctgacccagactctcagtttgttccaataggttgtgtagaactccttagccggtgtaccaccccttcaatacgttgcggtgtgcataaacttccgcgctaaggcccatgggttataacccttgtcaagtaaatagacatctcgtgctacacccaacacaccggcgacattatacaaccagctatcacaagagtcgcgctctactcgatagtatcatcgccacgtaaacc

SEQ ID NO: 116187 - DNA, 2852 bp, Homo sapiens
tcccagttggggcccagccttttaaagccatcgctccttctttctggccggatgtgtgctgagacccagagtcacccaggggtctccgtcacgtgccaggagtaggcagaagtgggctgtgacagatcaggaaacagagctcagtgcagcccactaaattgctcagggccctacagctaacaagcggcagaggcaggatctgcactcaggagctgcttggagatgctgctgtggccactgctgctgctgctgctgctgctgccaacattggccctgctcaggcagcagcggtcccaggatgccaggctgtcctggcttgctggcctccagcaccgagtggcatggggggccctggtctgggcagccacctggcagcggcggaggctggagcagagcacgctccatgtgcaccagagccagcagcaggccctgaggtggtgtctacagggagcccagcgcccccactgttccctcagaaggagcacagacataagcaccttccggaatcatctccctctgaccaaggccagccagacccagcaggaagacagtggagagcagccactgcccccgacctcaaaccaggaccttggggaggcctctctgcaggccaccttgctgggtctggcagccctaaacaaggcctacccagaagtgctggctcagggacgcactgcccgtgtgacgcttacatccccttggccccgacccctgccttggcctgggaataccctgggccaggtgggcacccctggaaccaaggaccctagggccctgctgctggacgcactgaggtccccagggctgagggcactggaggctgggacggctgtcgaacttctggatgttttcttgggcctggagactgatggtgaagagctagctggggcgatagctgccgggaaccctggagcgcctctccgtgaacgggcagctgagctccgggaggccctagagcaggggccacggggactggcccttcggctctggccaaagctgcaggtggtggtgactctggatgcaggaggccaggccgaggctgtggctgccctcggggccttgtggtgccaaggactagccttcttctctcctgcttatgctgcctcgggaggggtgctgggcctaaacctacagccagagcagccccatgggctctaccttctgccccctggggccccctttatcgagctgctcccagtcaaggaaggcacccaggaggaagctgcctccaccctccttttggccgaggcccagcagggcaaggagtatgagctggtgctgacggaccgcgccagcctcaccaggtgccgcctgggtgatgtggtgcgagtggttggtgcctacaatcagtgtccagtcgtcaggttcatctgcaggctggaccagaccctgagtgtgcgaggggaagatattggtgaagacctgttctctgaggccctgggccgggcagtggggcagtgggcgggggccaagctgctggaccatggctgtgtggagagcagcattctggagtggggaagaacagatagggcagaggacactagacttggcagctgcccattcaccggaagtatgtgtgcacatggggtctattcacagattcctctgcgggctctgctccccactacgaggtgtttgtggcgctgagggggctgaggaatctgtcagaggaaaatcgagacaagctggaccactgccttcaggaagcctctccccgctacaagtccctgcggttctggggcagcgtgggccctgccagagtccacctggtggggcagggagccttccgagcactccgggcagccctcgctgcctgcccctcctcccccttcccccctgcgatgccccgggtccttcggcacaggcacctggcccagtgtctgcaggagagggtggtgtcctgagtcaagtcctgccccaccgcccagctccccccagaggccacctcgcccctccctctgggacctctccggatggggagtccttggccagggtctctgactctgtgtcacctgacatttgcccatgagagccgctgggccttagagaggccttggcccagctgaccggttctgaagtatgggcctccggggttagcagatgccagcagtgcctgcccgtgtccccatgtcccggcatgaaggacactgctagagagttaccatgcacaccgatggtttcctgtatcacagcccaaagaggttctctggtggccacagctgtgtgctcagtcagtgcactgggcaagctagaagtgttggggggttaatgtccccaggagcagcaaccctgagtcaataaggagcaggacctcagcttcattgtccttgagcaggacaattctgaagtgtattctacataaactctcagaggatgcccagcaggatggagtcccagttgcccgcagcagtaacccactcattcatgtacttcctgcgggggctctcccttccctctcttccccactcccccgccttgggcttcctgggatggctcccaaataaacctcttgcacccagaaaaaaaaaaaaaaaaaaaaaaacaccgagggaataaacagaacaggatagctggaaaacagagggtcactgaaattggccacattgttcacaagcatagctccctgacccagactctcagtttgttccaataggttgtgtagaactccttagccggtgtaccaccccttcaatacgttgcggtgtgcataaacttccgcgctaaggcccatgggttataacccttgtcaagtaaatagacatctcgtgctacacccaacacaccggcgacattatacaaccagctatcacaagagtcgcgctctactcgatagtatcatcgccacgtaaacc

SEQ ID NO: 116188 - DNA, 2518 bp, Homo sapiens
ggacccgcgtcgccacgcgtcgagctaacaagcggcagaggcaggatctgcactcaggagctgcttggagatgctgctgtggccactgctgctgctgctgctgctgctgccaacattggccctgctcaggcagcagcggtcccaggatgccaggctgtcctggcttgctggcctccagcaccgagtggcatggggggccctggtctgggcagccacctggcagcggcggaggctggagcagagcacgctccatgtgcaccagagccagcagcaggccctgaggtggtgtctacagggagcccagcgcccccactgttccctcagaaggagcacagacataagcaccttccggaatcatctccctgccaccttgctgggtctggcagccctaaacaaggcctacccagaagtgctggctcagggacgcactgcccgtgtgacgcttacatccccttggccccgacccctgccttggcctgggaataccctgggccaggtgggcacccctggaaccaaggaccctagggccctgctgctggacgcactgaggtccccagggctgagggcactggaggctgggacggctgtcgaacttctggatgttttcttgggcctggagactgatggtgaagagctagctggggcgatagctgccgggaaccctggagcgcctctccgtgaacgggcagctgagctccgggaggccctagagcaggggccacggggactggcccttcggctctggccaaagctgcaggtggtggtgactctggatgcaggaggccaggccgaggctgtggctgccctcggggccttgtggtgccaaggactagccttcttctctcctgcttatgctgcctcgggaggggtgctgggcctaaacctacagccagagcagccccatgggctctaccttctgccccctggggccccctttatcgagctgctcccagtcaaggaaggcacccaggaggaagctgcctccaccctccttttggccgaggcccagcagggcaaggagtatgagctggtgctgacggaccgcgccagcctcaccaggtgccgcctgggtgatgtggtgcgagtggttggtgcctacaatcagtgtccagtcgtcaggttcatctgcaggctggaccagaccctgagtgtgcgaggggaagatattggtgaagacctgttctctgaggccctgggccgggcagtggggcagtgggcgggggccaagctgctggaccatggctgtgtggagagcagcattctggattcctctgcgggctctgctccccactacgaggtgtttgtggcgctgagggggctgaggaatctgtcagaggaaaatcgagacaagctggaccactgccttcaggaagcctctccccgctacaagtccctgcggttctggggcagcgtgggccctgccagagtccacctggtggggcagggagccttccgagcactccgggcagccctcgctgcctgcccctcctcccccttcccccctgcgatgccccgggtccttcggcacaggcacctggcccagtgtctgcaggagagggtggtgtcctgagtcaagtcctgccccaccgcccagctccccccagaggccacctcgcccctccctctgggacctctccggatggggagtccttggccagggtctctgactctgtgtcacctgacatttgcccatgagagccgctgggccttagagaggccttggcccagctgaccggttctgaagtatgggcctccggggttagcagatgccagcagtgcctgcccgtgtccccatgtcccggcatgaaggacactgctagagagttaccatgcacaccgatggtttcctgtatcacagcccaaagaggttctctggtggccacagctgtgtgctcagtcagtgcactgggcaagctagaagtgttggggggttaatgtccccaggagcagcaaccctgagtcaataaggagcaggacctcagcttcattgtccttgagcaggacaattctgaagtgtattctacataaactctcagaggatgcccagcaggatggagtcccagttgcccgcagcagtaacccactcattcatgtacttcctgcgggggctctcccttccctctcttccccactcccccgccttgggcttcctgggatggctcccaaataaacctcttgcacccagaaaaaaaaaaaaaaaaaaaaaaacaccgagggaataaacagaacaggatagctggaaaacagagggtcactgaaattggccacattgttcacaagcatagctccctgacccagactctcagtttgttccaataggttgtgtagaactccttagccggtgtaccaccccttcaatacgttgcggtgtgcataaacttccgcgctaaggcccatgggttataacccttgtcaagtaaatagacatctcgtgctacacccaacacaccggcgacattatacaaccagctatcacaagagtcgcgctctactcgatagtatcatcgccacgtaaacc

SEQ ID NO: 116189 - DNA, 1320 bp, Homo sapiens
tgaagggccatccttgtgtcctgggctccactgcctctcccttcctcctcttcaggctggaccagaccctgagtgtgcgaggggaagatattggtgaagacctgttctctgaggccctgggccgggcagtggggcagtgggcgggggccaagctgctggaccatggctgtgtggagagcagcattctggattcctctgcgggctctgctccccactacgaggtgtttgtggcgctgagggggctgaggaatctgtcagaggaaaatcgagacaagctggaccactgccttcaggaagcctctccccgctacaagtccctgcggttctggggcagcgtgggccctgccagagtccacctgggtggtgtcctgagtcaagtcctgccccaccgcccagctccccccagaggccacctcgcccctccctctgggacctctccggatggggagtccttggccagggtctctgactctgtgtcacctgacatttgcccatgagagccgctgggccttagagaggccttggcccagctgaccggttctgaagtatgggcctccggggttagcagatgccagcagtgcctgcccgtgtccccatgtcccggcatgaaggacactgctagagagttaccatgcacaccgatggtttcctgtatcacagcccaaagaggttctctggtggccacagctgtgtgctcagtcagtgcactgggcaagctagaagtgttggggggttaatgtccccaggagcagcaaccctgagtcaataaggagcaggacctcagcttcattgtccttgagcaggacaattctgaagtgtattctacataaactctcagaggatgcccagcaggatggagtcccagttgcccgcagcagtaacccactcattcatgtacttcctgcgggggctctcccttccctctcttccccactcccccgccttgggcttcctgggatggctcccaaataaacctcttgcacccagaaaaaaaaaaaaaaaaaaaaaaacaccgagggaataaacagaacaggatagctggaaaacagagggtcactgaaattggccacattgttcacaagcatagctccctgacccagactctcagtttgttccaataggttgtgtagaactccttagccggtgtaccaccccttcaatacgttgcggtgtgcataaacttccgcgctaaggcccatgggttataacccttgtcaagtaaatagacatctcgtgctacacccaacacaccggcgacattatacaaccagctatcacaagagtcgcgctctactcgatagtatcatcgccacgtaaacc

SEQ ID NO: 116190 - DNA, 369 bp, Homo sapiens
cattgtccttgagcaggacaattctgaagtgtattctacataaactctcagaggatgcccagcaggatggagtcccagttgcccgcagcagtaacccactcattcatgtacttcctgcgggggctctcccttccctctcttccccactcccccgccttgggcttcctgggatggctcccaaataaacctcttgcacccagattcttgcctcagggtctgctttggggaaacgggagtggaccccggcccagccattcccccactgagctccaggactttcccccaacattctgctctgggcctggcaaggctgcatgcgcacacaggagccttggaggactcgtggcacatcctaggccagcacccaca

SEQ ID NO: 116191 - DNA, 819 bp, Homo sapiens
ggttcacatgtacacggacacttgctttatgacaaaacgcacactttagtagggaaagaattagtcaataaatcgtcctggaacaagtgataatctgtatggaaagaaatgacttatgttccataccatatgcaaacatcagtttaagaatgattcgtatatttcaacatgaaagacaaaactgaaacttttggaagctaatatagatgaacaggttcatgctctttggccaggaaaatatttcttaaaaaaaaaatcaaaacggcaagtattaaaaaattgataattttgactaccttaaaattaagaaattttgttcttgcaaagtcaccattaagaaaagagaggcaagtcagagtagagaagatatctgcagtacctttaacagacaaaagacatgtatcagaatattcaaagcgcttctacaaatcaatgtgacagagacaatccaatagaaaaatgggcaagagacatgaaaaatacttcacaaaagaaattcagatatttaagaaacgtggaaaaaaaagtgcttaaccttattaataatctgggaaatgcgaattaaaaaaaactaggctccaccatatgcccactagaatggctgaaattttaaaaagggatttatagtacaagtttttgagaggatgttaggttatgggaactcagccactttaagaaacatcttgacatttacataccctgtgatgcattaatttcttttcatgggtatacacttgagtaatacatgtacatgtgtgtggagggatgtgttaaagaacgttggtagctgtttgtaatagcctcacactcaatatgatg

SEQ ID NO: 116192 - DNA, 713 bp, Homo sapiens
ttctacagtgctgatcagacctagtaagcacaaagtcgcaaatatcccagacaccctgaccacagacacacatgtataccaaggacaggaataaatacctaaaactgtaaggcactgccaccttcttagatgtcttggtgagaggtccactgttcagagggcacactgagatataaggcgaaggcctttttggatctgtagtgtgctacctctttaatgggaaatcttagaggctatcagtattgaatggtgaccagaggaaaatactgctctacatataggtctgggctgtcatacaaactgatctgctactggggcctcatgacctagcagatccaaaagtattcaacatgtttgtggcagatgcaaatgctgtttagaaccttcgagaggtcgctgtagaagcacaatgcaaaacttcaggattttggagcaaaactttgtcatcttttgcacacacagtgttctcttttgatagctcctggtgtgctactggaccttagtagagatagaatgtctgactctgagccactaagtaaccattcaacctcttctgcccttcaagaactgggaaatgtctgaaaaaacaagtaatgaaacgtgtgtatagcagcactccattacaagttgtagttttatatacgagattggtctcaagcaagacctaaaggtaaaagtaagaggctcagatttgcatggctcctcctcttgct

SEQ ID NO: 116193 - DNA, 402 bp, Homo sapiens
agtcacccagggccattggaacaaagaggaagaatcaggccccacgatgttttgggagagtgtttagcacaggaaaatgcgcagaatacacgcacgacacgggggcactgtcagtgtgggagcaatggtttacaacctccagccctaatctgagcactctcacctgtgcaatctgaaaggaacaggagacttgcaggaaagacagtgcctggatttaacttaaaggaactaaaaatgttggaatttttactcttgatatccttccaaatcaactctctcaatgttcccatcctcaaaactatcatatggggtaactgaggcagtcagagatttactgactcaatgtcactcaattgattctgagttcactgctgattacatccgaccaaactgctttttctg

SEQ ID NO: 116194 - DNA, 570 bp, Homo sapiens
taccctccccatgatcgctcagggttgtaattttgcatcactggcaagagttgcctgggatgagctctggccatttctctggggtactgaaaatacacggcaggtgcagaatcacacagatcaactgagcacgaagcaggacagtgcggaagggcccacaggagccacacagagaaagtgtgcgtccatttctctcgggtggaagtagaaatagcaccagctcgatgaggaggctgtgtggcagagggaaggattgctgggtttgattcctagctctgctgcctcgtgaacatgggctgggatttccacatcgctgtgcctccgtttcctcagctgccagtgggaccttgaccctcccccagaggaccacggggaaggtgaataacaccctgtgtgcaaaagcccagggaacacagcaggagcttaacacatgctcattgaacttgagcctgattgaggcccaaacctttccaccccctcccccatctctccttctggatctcttgttttcccaggaaaacagagaacccggatctcacacttctgccttcagagaggggcggagcaggt

SEQ ID NO: 116195 - DNA, 430 bp, Homo sapiens
cttggccaacgcgtcgaccccatctctactaaaaatacaaaacttagccagatgtggtggtgggcgcttgtaatcccagctactcgggaggctgaggtgggaggatctcttgaggctgggaaacagaggttgcagtgagccgagatcacgccactctgctccagcctgggtgacaaagtgagatcccatctaaaaaagaaaagaaaaagctgcctttgttgaggaagtcacaggatgacttggcagagcagtgtggctgcactcacccagctcctcctccaagcgcttggttaccgtggaaatgtcgccaccagcagatgctgctggatgtttgctgatgtttgccctcagctcatgctcctccagtcaccccacagatgccatttcaccaagaaaatggggtggtgggaggctggggagctcccctctg

SEQ ID NO: 116196 - DNA, 492 bp, Homo sapiens
ttttttagtttaatcaagttgaaatttcttgttaaaaggaataaaagatccaacttcaagcaacccccttgtatataaggataccgtgctattctgcctatagcagcagtcagggcagcaaggtgttttcttttctatcagatttcagcagactaataaaactcaaagcctgaaaaagggagagatgaggtagtctctccaaacatgctcacgtggatggtgccaggaagcccctaggcaagtaaaataacttctttggaagcctcaaatcactttagcctcaaataaaccttgacacccaagtaggggtatcaggcaacccaccaaggccatatatatctccgggttgctgtggaaaaagaaggacagagtttcctaatccagacattgaaacactaagtggtaccctcccatttgtaaccgatgagtattcacaaggacaggtgggtaatggaggatgaacattccctcccagcatttttaattaactgg

SEQ ID NO: 116197 - DNA, 371 bp, Homo sapiens
gagagcattcggtggccagtcctgttgaatgaaatctgagcactgagctggatttgcgtgccttgtaggtgactggtgcagttgcagcaccaggatagatagtgccccatattccgatttttacctgggattaccagccaggctggagtctcagcacaggaaccgagcgtagggatttgtgaatgaatgagtgttcgtgttttaagagatgtgggaacggagcagagtggaacctgttgtttgtcactgtaacgtttctctgggttggctgcatcctagacagaattgagagaaccgggccatgagttcggagtgtcagcagagccaccgtgaggggacgtggtttccagtgcagtacagctgtctgagga

SEQ ID NO: 116198 - DNA, 682 bp, Homo sapiens
ttatcccctgcctgtaccatctatgggttcaaccaactcattcttaactttatgctgaaagagcagaggtgagtggtgaactgtatttggtttggggctaggcacacctgtcttcctcttttcagatgtcagcttaaatgatcatgagatctttgctgccttctcttcttctagaggcactttcttctttagccaagctggtctcccctttcctccttgctggcaggggtgccctcgcctcatctctctgcctgtccaacccttccgcagttttctgtgctcagttcaaacctggctgcttctggtagcccatcacatatccttgctgtagtcagtgctaagtcatcatttgatgaatgtgtactacctggtagttcgtagaagaatattggagtgacaagagactagaacccctggtctaatggctgcaagttcaactgccatccagccagggtgagtcagtttaaagcactggtaggcattcataggccataacgaaacaaaacaccgtgctggcctgtaagccaacctgccaagttacacaacctggcctctttttttggctatgatttcaggagcatcccttacatctccaaataggttttgtgtctttagctcccagcatagttcagtgcatagtagggtcctcaataaatgcatagatgttacaggtaccgactga

SEQ ID NO: 116199 - DNA, 736 bp, Homo sapiens
cttagggctgcgtcgacatcacaaactaggaggcttaaaacaatagaagtttatcctctcacttcccgaggccagaagtccaaagtcagggtgtcagcaggattggttacttcttggggactcctggggagagcctggtccgggctccggggaagagtctggtctgtgtccctcgctaagcttctgctggctgttggcagtccttggcgttcttttgctggaagctgcttgactccagtctctgcttccattgtcacatggccattttgcttttgtgcatctgtgtcttaacatggcattcttctctctgtgcctctttgtctcttcttttcttataagaacaccagtcatattggattaagggcccacccctctccagcatgccctcatcttaactaatgacatctgcaatgatcctatttctaaataaagtcacattctgaggttctaggaaggacataaattttggggggatgctatgcaacccagtatacctacatgactttcaatttaaagtaggctgtgttattggagctatacagtagtcctcccttcttcgcgggggatacgtttcaagacccccagtagatgccagagatgtcggttagtactgaaccctatatatagtatgttttttcctatacatacatacctgtgataaagttttatttataaattaggcacaataagagattaacaacaataatgaataataaacaactatgacacattaaaa

SEQ ID NO: 116200 - DNA, 423 bp, Homo sapiens
tcatgatctgcccgccttggcctcccaaagtgctgggattacaggcgtgagccaccgcacctggcctaaaacagcgttttggggcaggaaatgacaagagaaaaacatggtgaccaggtgagatggtggtcagggaatggcatctgggcaggtggcatctcagctgccatctaaaaggtgggatggaagccaggcatggtggctcacacgtgtaatcccagcattttgggaggccaaggcaggaggattgcttgaggccaggagttaagagaccagcctgggcaacacaggcagaccccatgtgtacaaaaaattaaaagattagccaggtgtggtggcatgtgcctgtagtcacagctactcaggaggctgaggtgggaggatcacttgagccagggaggtcgaggttacaatgagccaaca

SEQ ID NO: 116201 - DNA, 748 bp, Homo sapiens
aggggatatttccgttgaaccgtttggagtttaagctgaaaatattaacgaatgtatctaaagttcactttgccttgactttatgcatccatcacatagagatcacgcagcgggcacccactatgggtttcatcatcgctcacttcccttggatcaactagaaatcaactcagatgagagtgctgagtctcagaggatggacgtctcactccttgccatacagataagtagaaagggtggtattgaaattaatggccagactctaagtcccgggcactatacttgatggtctcccaaccctcaaaatgttgtgggttcttttttgtttttgagacggagtctcattctgtttcccaggctggagtgcagtggagcgatctcggctcactgcaacctccgcatcccaggttcaagctattctcttgcctcagcctgccgagtagctgagatttcaggcgcccgccactacgcctggcttatttttttctctttttaggagagacggggtttcaccgtgttggctaggctggtctcgaacacctgaccttgtgatttgcctgctcagcctcccaaagtgctgggattataggcgtgagccaccgcaccaagccctactttgtattttgaatagaagcaacagcagtgatgggattcgtactccaaacctcagcgtcacacaacattcccatgcagcaaatctgcacatgtatcctctgtatctaaaataaaagttgaaatgtttttaaaa

SEQ ID NO: 116202 - DNA, 128 bp, Homo sapiens
tccagctcggtacctggctctgtcaattttacagcaacactggctcactcggtgcccgcctgtgccgtggctgatatgccaagccccagaaacacatcccatacacacacagagaggggcggagcagt

SEQ ID NO: 116203 - DNA, 379 bp, Homo sapiens
tatacgttaaaattggagaggtaccttctaacttactgtgacttctccatatgagaactggacagaacttactgtgtataatgtaaatatggcactcaaaactgtatatgcttgtgtttatgccataaattttatgctgtattattcagaaaactacagtacctacactggttttgtggatcttttttcattttctttcctcagaatgcaaaaatatattacagaatctttctctatttaacaatattttattggataattccagtctctgtaactctcaaacacctagagtaaaattaacaattctgcccatggccatttgctaaatatgtgtgggtgtttgggtttgtttaggaaatgttaacattcaaggctttgg

SEQ ID NO: 116204 - DNA, 399 bp, Homo sapiens
ttcattcatgctgcagcatgcaacaggattcccttccttttgaagtctgagtactattctactgtacaggtttgccatatcttccttatccatccatctccagtagacatttcagttgcttccaccccttggctgtgagccacgccttctttttaaaccaaatttcaatacgcccgtagctatatccatccctcctcacaaccctctctcctactcagctccccaccctagcctgttctttcagttgactcttctatttgttctgtcccatcaatctctgcccctcagtgatcattcctatgcacataccagatgtgctttcgaatctacccttaaaaaacaacagcctgacacagtggctcacgcctgtaatcccagcactttgggaggccgaggcag

SEQ ID NO: 116205 - DNA, 710 bp, Homo sapiens
ggtactgaaagagtgctctaagatgagattcagtctctgcctttaaggaacttacagtgtagtagggaggtagcatgcactcaggtaatcatgagcaagagaagatatgatgagaagagtcataaagcattgcaaactctaagaagcaattgttgacttgttttttgcttgggaataaaaaatggagatcgattttgaggggagacttggaagattaatgtagttgagttgaggagggatagagataatttgagagagagtgttccagatagaacagcatgagcaaagaggggtgggaattctggataggaaaacctctaggtaacttgtcagcttgccatgtgacagctaaccaaggggagcttatcacgcagcattcataatttgggcgacatcacttgaatgcatttagattgtagcagaatatccttagctgtgctaggagaccttttattcaacccaggcttcccttcttcccagcacacagggatcctgaagcaaggtcccagtgtattctgtctctggttttgaaaaatgatttctaaggtgtaatttcaagaatatcacatcagtctattttaataaccttctctattcactattaaaatcttatattttttcacaatttctaatagtggtgaaagatgtgacaaattttcagaatagcaattgattgtatcaaatagagtataattttatgaacatgccaa

SEQ ID NO: 116206 - DNA, 513 bp, Homo sapiens
cgtgcggcgatctagaggaccccctcggtctaccatgttttgctaagcacccggagctggcagacaagaatgtgcccaaccttcatgtcatgaaggccatgcagtcttccaagtcccggggctatgtgaaggaacagtttgcttggagacatttctactagtaccttatcaatgagggtatccagtatctccatgattaccttcatctgctcctggaaattgtgcctgccaccctatgccacagccatccagagactggcaagcctcagcctaaaggtctggagggtaagtgacctgcaagactcacaagaggggaagccgacagagatacccacagacaaagtgttttgccccctggtgccaacaagaaagccgaggttggggctgggtcagcaaccgaattccagtttagaggcggatttgatggtggatgtgttcagccacctcagtaaaattggagaggattattttgcattgaataaacttacagccaaaaaaaaatttaagaaaact

SEQ ID NO: 116207 - DNA, 436 bp, Homo sapiens
gactctcaatctccatctctgacttcctccatctgctgcttcctccttcttctttccatcccatagctatgagaaatcaggtgggtgctcttctattcatctcatgaactactggacatgtttacatttggggaacttaaaaataaaaatgaaccagatagctgttggctgttgtctttttgtgaagaataattttagggatcaaaagacaaaaagaaaaacattctttgtatcagagaatagcattatgatctccacacatagtgccagctcttttaactttgaaggtcaaatttcctagttttccaaatgtccactgattccctttaaacaaaaccctgtctgggcaaaataaaacatgtccatgaactcaatttagataaagctgatttggcctatgagccgtgaatttaaataaagaaatcttaaataatgg

SEQ ID NO: 116208 - DNA, 258 bp, Homo sapiens
tgctgagcaaggatgacatacaaattcatgaaacattccattaaaaaaaattttaaacttatgttaagttgtacaaaacttcaaactattttctaaacagcaaaaagagaaactaaaggtcagcagtcaacaaagaaaacttctgacaagtaatctaatacatgacacaaaaataggcatctcctactattgaaacttctaaaactaggactattgagacttctaaaactaggtgctattgaaacttctaaaactagg

SEQ ID NO: 116209 - DNA, 802 bp, Homo sapiens
tcaagctgttatttttgtttgtcaaatgttttgtctaaatatttttgtctgcttgaaggatcagtactgtgtaggaaaatctcccacaacgataatgaattgatcaatttttttcctgtggttctgtcaatctttgctttatgtttattgaagtatatgttagttacacgtcattagttacatgtaattttttcgttatacttcagtaaatttctgctttatgtttattgtgctatctcattactatatgtatgtttatagttgtttaaagtgaattaaattttaatcatatattttgaacaattaatctccagtttctctagtatctttagatattgttttaggtcttaaacctatattatttgtaataatacagctatatcagctttcctttgattcaatttgcttggtccttctttttttattagagcatatttatttcttttttttctctttttgaaaatttttatagatttaggagctacagttgtgcatgtcatgcagttatgttacatagatatattgcatagtggtgaagtttgggtttttagtgtacccacaacccaaatagagaacactgtaccaaataggtaggtagtatgtcatccctcagtcccctctcactatcccaccttttggagttgccaacgtctgttatttcactttgtatgtccatgtgtactcattggttacctctcacaaataagaacatgcagcttttgactttgtgtttctgagtcatttcacttaggactatgtcctccagttctatgcatgttgctgcaaaaaaaaaaaaacatga

SEQ ID NO: 116210 - DNA, 324 bp, Homo sapiens
gttaggcaaggccatgtgattatttctgagcagttagttggcagtgagtggaagtgatgtgacatgtgtcatttccaaggtgaagctcttactagctggcttgagaacttttagatctcttttcttttgcatggaaaacctggaaataccatgttgagacagagacacccaagataaaattgcctggaaggctgagccaccacatgaaaatgccaaactacccatggcaaatgctgtgtgagcaagaaataaaattacattctgtttttttcttggagaaataagggaaaaaataaaaataaattacattctaataaaccatgg

SEQ ID NO: 116211 - DNA, 658 bp, Homo sapiens
gttttaatggcctgaatagaagatcaaaccagccataacattcccttaagccaaagcctaatccagagcaagaccctaattctgttcaattatatgagggctgagagaggtgaggaagctgcagaaaaaaggtttgaagccaaatagaggttggttcatgaggtttaaggaaagaggccatctatgtaacataaaagtgcaaggtgaagcagcaaatgctgatgcagaagctgcagcaagttacctagaagaacttctttatcatttttcttagaattatgtgttatggttatatagatgagggcttgctaagttgcccaggctggtctcaaactcctggcctcgcctccttatgcaccagaaccataggcctgagccaacatgcctcaccagaagaactaatttagataattgatgaaggtggctaccctgaacaacaaattttattgtagttgaaacagctttctattgcaagatgctgtctaggactttcatagctagagagaaatctatgcttggtttgaaagcttcaaaggacaggctgactctctacttagccaatgcagctggtgacttgaagttaacatttaccattccagaagtcctagggccctttaagaatgatggtaaatctactctgtgctttatgaatggaaca

SEQ ID NO: 116212 - DNA, 296 bp, Homo sapiens
ctattttcatatcctaatggctgcaaattggtagcttatgggtttttatttgcatttacctaaataaagcctaattaaaacatcagacaagtggccgggtgcggtggctcacgccggtaatcccagcactttgggaagctgaggcgggcagatcacgaggtcaggagaccgagaccatcctggctaatgcggtgaaaccccgtctctactaaaaatacaaaaattagctgggcctgcttgtggtgggcacctgtagtcccagctactcggaaggctgaggcaggagaatgatgtga

SEQ ID NO: 116213 - DNA, 858 bp, Homo sapiens
ggaggcagagatgtgctgaaatacagcatcaaacatgggcacgggcccttggagctcacactcttgtgggaggaagcacgtaattacacagatgctgaagcatagtcatggtgtctggtgtgcaggagaaagccgtggggcttagagactcatgtgtctgtcactcgttcattcagccactcacccattgccatttttggccatctgctaaggtaccaggaagtgtgttaggatccagatccccaggggtgaaacagactctagccctgctctcaagcagtttattgtcatcaaacaccgccatccaggcagggcaatcggtgctggaacccggaccaccgtgggtaccgtggcacacggtggacagagtgaccaactgccaggagtgagcagcacttggggtaggcttcctggagaatatgatgcccattctgggtcttgaagaaatgagtgggcatcttctggttgatgaaaggcatgagaaaggcttgtggggccaaagaacaacttgggtgaaaacgggaggaagtgaacgagcatgatgtattggggtcagtgctaacagttctgggatgctgatgtacaaggtggggctgggagatgaggccgggaaagtagccacaagctagagtgtaaaggtaccagggtggccgggcgcggtggctcatgcctgtaatcccagcgctttgggaggctgaggctggagtatcacttgagcccaggagtttgagaccagcctggataacatggcgaaaccctgtctctacaaaacattaaaaaaaattagccgggcgtggtggagcacacctgtggacacagctactcaggaggctgagggaggaggaccatttgactcca

SEQ ID NO: 116214 - DNA, 312 bp, Homo sapiens
aggcctttgggaagtaaagattacatgagctcatgatgtaagagcactcatgaatgggattagtgcccttataagggccatgagagagcatgctactctctgctctttcccatgtgaggatacaatgagaagtcagcagtctacagcctagagtgacctcaccagaagtcaaccatgttagcaccctgatctgggatttccagcctccaaaactgtaaggaataaatttgtactattcatatgccagctagtctatggtatttttgtcaatagaagcccatacagaccaacacagggagaaaaagaatgaat

SEQ ID NO: 116215 - DNA, 251 bp, Homo sapiens
gaatgtaaaatcctctgcctcagcagcataccccaacatgcaaaggcttaggaaggcatgaaattagcccagcttgtcaatcatggagcttggtcagactctggctaaattctttcaagtagaaaggggaataaaacttttgaaaattaaactaaatgaggaaccttttcctcagggcaggagaggtacttctaattgacttttcaactagagtgaaggttcacgcatggccccaggctttactcctctgg

SEQ ID NO: 116216 - DNA, 442 bp, Homo sapiens
gaggaaatgtaaaatatagttaccttgtggaaagtaatctgatgtaatatattaaaattttatccatgtatgtcctataattcagcaattccatgttggggaatccatacaaagaaatacttatacacatgcagaaggagctaagtttaagaaagcacacatttcagcgggttgtggtgtctcacccctgtaatcccagcacattgggaggccgaggttggtggatcacctgaggtcaggagtttgagaccagcctggccaacatggtgaaaccctgtctctactaaaaatacaaaaaattagctggtgtggcagtgggtgcctgcagctactcaggaggctgaggcaggagaatcgcttgaacctgggaggtggaggttgcagtgagctgagatcacaccactgcactccagcctgggtgacaagagcgaaattccatctc

SEQ ID NO: 116217 - DNA, 98 bp, Homo sapiens
tatccatactaaaacaatcctaaataataaaaatacagttttctctcccatagatagatatggactagtcaagttggttgtaggataatatctataaa

SEQ ID NO: 116218 - DNA, 674 bp, Homo sapiens
agaacatgtttattttgcataatttctctggcttccaaaatctgaagaattgcctctgtttaaactctattttcttctttcgtgtacttgctcttgatttgctgaccttctaaatggggaccagcatctaatgcttaatgcagagtgctggggacatggggaggcaggaggagctggaggctgcgtcatggaaagaccttggcgccccctcaggaaggaaggactggcttggcaggatcccaggctgttttcctggttcagccctcccgaagacattgtgttctctgcagccctggagggcctctttctctcaatttctcagtgaggtacctgttttgtaatcagtcctgtcaggtgaagcagccatgttactactggacaatcatggattatcttttcccttccttcctggatccaggtgtctgaatttataccaccaaaattcttccagattttctatctagtggttcattctcttttgtactttgtagtgccgttgtttattctcatgattgatttttttctgagccaattggaaggaatgtctaacactgactgatcaacccacagtgtttaagaggaaaaatatattttagaatcttgagggagttttatttcagtgtatgtgaattgtattggctatgtagcgtcttcattttcattgtaagaagaat

SEQ ID NO: 116219 - DNA, 419 bp, Homo sapiens
tggggattgtggcgcatgtgttgtgtgcacacgtttgtgtgtgagtgtatatgtgtgtgcttgtgtgtagattcctggtgtgtgtgtctaagggttgaggtgtcaggcagagcgtggggaactctgaggaacttggtcccagctgccccctcctccccatctttctccttggggacggaggaggctctgttctctcctgcccacctgctcagtgccagttcccagctctcctgctgctcagctcttaagcagacctttttccccaggtgtatctgcctatacctctttaccccatgtgtgcacctgaaggcaccgggactggtagggtggtgttcacatgcagcacacaggagggacacagggttccatagtctcctttgacagaagaggaaagaggccaagcaggggacattgacctg

SEQ ID NO: 116220 - DNA, 624 bp, Homo sapiens
ggagggagagcttgggagaagcagtttggaactaggataatgctgatacctcttcctaactctgttttgaggtaccctagacttctccatctttacctgacaggagtaaaaggagagaaatgttcttaggggagaagcagatttcctgaaggcctggaggtaaaggcagcacactgtctgatgtcagagagtgtggggaagtttatttacaatggaaaagagttttcagtgtgcacaatggaaagcactggaagagaaatcagcaaaaggaagataagctattggaagaaagggaggatccctgtatcgcatgacatcctcagggaggattcatgaacccagaggcttcggacaatgagcaggagaggaagcggagctgaggataaccaggtaaaggccaggatggtggtaccatagagttgtattaaaagcacaaactttggaattaggtcctggattggctattgactccggaatcttggtcacattatctaaaatcctatgcctcagtttccttttctgtacaatgagaataaatagttacctcatcagacaattttgaggatgaaatgtaaaatgctaagctccactcttggcccacaataaacactcaataactgttca

SEQ ID NO: 116221 - DNA, 537 bp, Homo sapiens
cacatggtcactgtcagatagtcactgaggctgaagatatctgaagactcaactaggctgaatatccaaggtggctttttttgtgcccctgttggttcgttacctgggatggctgcagtagctgtggacccgctgagcatttctctctgtacacagccttttgatgtgattagatgagctgtctcacagcatggtggcctctaggcagctaaagttttggcatggtcgttgaccaccctaactgtgagcattcaagagacccagatgtggtcaactaggctccttacagcccagcctgagaaatatgcagtgacacctccaccacaatccagccagctcggattcaagagaagggcacccctgggaaggtgaccactggccagtgtgtttcatcaggctggtgtctttgaagaccaaataccacaccacagccatttgaatttgtgtcattacttggtactcttattttttccctgctgctctttttgcattgaagtccttttgggatgacatcaataaaactatttcatgttttta

SEQ ID NO: 116222 - DNA, 916 bp, Homo sapiens
ggtagccttctggtagtcaggaggaccccagctgtttctccacatggctcctaaaacaggcaagaaaatggtggatctagacctgtactgtcaaatatggtaactgctagtagccatatgtgactattgagcacttgaaaatatggcaaattgagatgtgccataagtgtaaaatacacaccaaagacgtagtagaaaaaaggatgtaaaatatctcatcagtaatcttttattttgacaagaggatgtaacaattctaaatatacatgcaccaaatactagagtgcccagaatcataaataatattagacctacaaaaagatgtagaaccaatacagtaataagggggacatcagtaatctactgacaacattagacagatcatcgaggcagaaaaacaacaaaccctggacttaaattggactttagaccaaatggacctaatggacatttacagacattctgccttacaaccacagaatctacattcttttcatctgctcatggtgcagtctcaaaaattgaccatatgctaggccacaaggcaagcctcaatacattttaaaaaacaaaaaaacaacaacacaaaaaaagcgtgtctgaggagcagaggcactggcgcccccgagagaagagttcaagaacccactcgtatggagaccgaggggcccacaaagggaaacaggccgaacccggggccccacaacggcagaggagccaccaaacagaaaacctccgcgggcagacaacagaagcggcgccgggagacttcccaccaacaaaaaaagagcgccgggggagggaaacacacagccgcggttgtggagacaaaattcccgaaagggggaatcgaaggagagcaaaacgggggtctagaccagacggggggcccaaggcagccaggaaataaattcgg

SEQ ID NO: 116223 - DNA, 931 bp, Homo sapiens
gaggacccagcatagaagagcacagctggccccggcgtttcatgaagtcagaaggcctggcagccatttcctggacgttgagaggatgtttatttgatttttatcctcatcccagcaggcctggctttgtggttagttgggtacatcacaaaaataagttaaaaagaaatatttgtgccttggggagaagaaacatggtgaaaacaggctgaggttgtcagggcagagagctgaaggtggggacagtgaccgcggacccctctgtgcttgaaagatttcctccacggcctttgccccagttgtggggaggtctctgtgcacagcggggaaaatgcttgtgtcgcctttggtgggccatgtcctaattagtttcatctgcttccctgggaacttactaagggggcccagagcactgttggaagtctggttagagtccccagagagttactctaagttaaaatgagccactgaccttggctcaccttagaggaatttcctcgagaacaacagagataagaaaagaaccggcctggccaatccttcaacagctctagagccccttttctctgctggcaggggctttgtttaccagctcactgtttaggctaaatgttagggaccagatcactgcagttgaaaacaggcactccaggcttagtgacagtggcagcagaaacagtgttggctgcctttctgaccaccccactttcctgccctgagacagcagcccagggcaggtgcttcatattcagaccaggtaagcctcatttgcacaacagtcaaattgtttgttcctttaaaaaggacacaattagcctggcacggtgactcatgcttgtaatcccagcactttgggagggcaaggcaggcggatcacctgaggtcaggagtttgagaccagcctcaccaacatggaaaaaccccatctcta

SEQ ID NO: 116224 - DNA, 312 bp, Homo sapiens
tgcttcctaatgtatcattattactattactacataccacttttccttcaatttcttccttttgctataatgaaattacagaatccaaaatttattttagtttcttagacttcttatttttttgtgctgtaggtactgttgatcctcactccaaaatttaactcagcagcggcagatccttcagccaaacaatggaagaagacatttggttgttttttaaccagggtcactagaccaagaatcatctacaagaggcaaaatagcagtcccacttaaatctctaggttgtggtgtgctacataccccagccag

SEQ ID NO: 116225 - DNA, 541 bp, Homo sapiens
ggttcgagggcgcgcgctgcttcccgggagagggcgggctccgtggcagccccctgtgggcggagccggcggccggggctcacaacccgccggaagacgcgcgggttgtggcagctgcagcgggaccgcgtggggtgggccccgggaccgccagggctgcagcgagagcggccggcggtgcaagcggccgggagggcgcggccggaggcagaggccaggcgagacacccggctgcggcctaagaggccaggctgggtgggcttggctgcagccgccagccccgtgttaaagcggcagccagggaggtgtatcctccccggggtctgcaagacgccggctcagggcatccctcccattccggccctcaaagcctcgctcctgggggcgctgctgggaaagcccacccgcctgggcgggcccttgatgggaatgtggagcagaccctcgtccactccggaggccgagggtcctccgggcttccgaaggaagccgacctcaacgctggacgcttcttggagaatgattgcgttgagtggagatg

SEQ ID NO: 116226 - DNA, 316 bp, Homo sapiens
atttattccagatcttgttgcttgacagtatgctagtatattggcctgcatttccatggtcaaaggggctcagtttcacatgtgccttccagcctgtgggaagcaggaaacaattagcccctttctagagtagttttgtttttgtttttgttgttttgttttgttttgttttggtgacagagtctctctctgtcatccaggctggagtgcagtggcgccatctcagctcactgcaagctctgcctcccgggttcatgctattctcctgcctcagcctcccaagtagccaggactacaggcacccgccaccacgtgc

SEQ ID NO: 116227 - DNA, 174 bp, Homo sapiens
tattgtgaggattaaacttatgtaaagcacccagcctaatgcttggcatggaacgggcactcaataaatagtagttattaacccacattggctctataaatagcagagtcaaagtcgacagacccagcctgaacaagaatttcgctggggatctagccttcaggccagtattgg

SEQ ID NO: 116228 - DNA, 765 bp, Homo sapiens
tgccttttatcaaagtaagaaagtttccttctattcctagtttattgagaattctaccatgaatagtagttcaattttatcaaatgctttgtctgtgtctattgagatgattatatggctttttcctttaagggtcagcaacattttccagaaaaggctatatagtaaatatttttggttttgtgagccatatgagctctgttgcaaccaatcaactctgctttgtagcagaaagcaatcatagacaatatgcaaatgaatgggcttggctttgtttcagtaaactttatttgcaaaaacaaatgtcatgccagatttggcccaagggctatagtttgcttttggctatagtttgctgaccactgatttattctattaatatatgtattacatgaattgatactcagatgttaagctaaagaacattcctgtaataaatcgaccacacttggtaatagtgtataatcctttttgtacattactggatctaatttgttgttatttaaacaattttagcatttacattcatgacgagtgttgttctataattttcttgtgatatctttgtctgtggcttttagtatcagggtaaaatgagctgtaaagtgtccccttttcttctattcttgaaaagatttccattggattggtattattaattatttaaatgttaatagagttcccaataaaaccatggaggcctggactttgctttgaagaagattctaaaataatttaattaaacgctttaatgtttttcactga

SEQ ID NO: 116229 - DNA, 151 bp, Homo sapiens
gagcttagacgacccagtgctgcagagaaggggcaggtgactaggacagccacttccttcccagcacttcagttttctggatgtgtctctggctgccccagaaagggaccgactgtcaagaggcaatatctcctcttgaagtaaccctggc

SEQ ID NO: 116230 - DNA, 560 bp, Homo sapiens
aaagtttcgtgtaatatagctgtacccattcacttacgtgttacttatggctgctcttgagttacaacagcaaagctgattagttgcagcagagacaatatggcccatacagcctaagatatttactgtctggccctttaaagaaaatatctggctatctctgtcctaattgttgaagtccttagtctacaaaaatggcagttttgttcatggactttggaaattgttaaaacaaaaaaatggcagttttgtataatttgaactaatacataaaagggactataagctttggaaaagagataaaagctgtgggggatgtgtgtgtatgtgtgtaaaaatttaaaaacttgagggtatagagagaggtgaagtctggaacattattgagaatgagaatgggaagtgaatagtaatagagaataattactcagaagaatgctgaatatccggcctccctgctggtctccagttaggctgcatggagaaaccttgaatccaagtggggcagtggatcaaacctcataccagccgggaaactggtagagtcaaggaaaaaaaaa

SEQ ID NO: 116231 - DNA, 651 bp, Homo sapiens
tgaaagatctgccacatggaaacgtacttttcccctgtgttttacagctatacctaagaaacactgcattgctacctcagtttattttagaaggtccatttaagcagagtatctatatgtaaatcaagcctacctctttccttttacttttaactttttaatggaaatccacataagtttataggagagtagagagaggaagcaatgctgctatcatagaaaaacaagaaactaccatgtgtaacctacttggtcttttggatttgaataggtcttaccgcatatttgtccttttcacttcattatggagtgtagcttcgtatactgagatttaagccttgatggatccaatactaactgatcatggagaatatttaagggttcaagattgaacgttttcatgaatcttctgaattgggttgtactaaatacatggtaactaattgcatcaaattttggctccagaatccagtgatgctatcaaacatttttcctgtttcctggaattgtgtttggaggaaatgtctttatatcacaaagactattgtactccatcacagaaatgtcaatatctagaatatctatggagattagttctgtattctagtatttatgcctcttactaaaggtaaggtactaaaagtaaaggta

SEQ ID NO: 116232 - DNA, 510 bp, Homo sapiens
gagggctactatctataagccaggaaggcaaccctggcaggagccaaaatcagctggcaccttgatcctggacttccagtctccaggactgtgagaaataagtatgttggtgaagccacccagtctatggtattttgttatggcagcccaagcagactaatacagttaggctgagcagtgttttacttattttaatgtggtttccttttattttcaaagaaccagcttttctagttgagcaacactactttcttctatttgttttaaattcactaattctgctcttagtttgttccttcagctctgtaaggggcagtgtaagcaccactccaatcctcttatcccatcctcagtccagttctacagaggttagtcagctttgtgaagctgcaagctaccagaaccttcacaaggacctacatcacctatgcctggttcctgccctggggcttctctggtgtcctatgtgggacacctgtggacacctgctgggccctgaagtgcagaggc

SEQ ID NO: 116233 - DNA, 236 bp, Homo sapiens
ccagaagctcattgagataggagtgatcacagtcactgcatcagcaggcatgctgctgggctgggggtgtggtgatgagcagtccctccagagtctcacagggaggctgacaggcagttggctccaggtgatcgtggtggcaagcagacccgcagtgggcaccttctaaactctgcctgagctgggggctgaggtggggaaggatcaggaaagccttcagcaagctggactcattt

SEQ ID NO: 116234 - DNA, 583 bp, Homo sapiens
  misc_feature (424)..(424): n is a, c, g, or t
  misc_feature (434)..(434): n is a, c, g, or t
  misc_feature (440)..(440): n is a, c, g, or t
  misc_feature (449)..(449): n is a, c, g, or t
  misc_feature (456)..(456): n is a, c, g, or t
ggaggaaacctggacgaggccctgcgctacaatacggctcattgcggcttgagctcatgaatccgcctccacctgcgaaaagcggcggaggacgcagcggtagttggcgcccagggttgagccgctgttgggttacgggtgtatagctggactgcggtagtgaagcacaaagcccccaagtgggacccagagctaggggaacgttccaataatatcctagtcacctgaatcatgcaaagaaattccgctttccaggagcacgggactaggagggcgcctacttcctccctggtgcataatgggcccttaaaattaaatatacaaaggatacaaaccgccgcagagctccttaaagtcttttcattaaattgtttgtgttttaaagccaaaaaaaaaaaaaaaaaaaagaaagaaaaaaacagtntggtggggcncgcccngcgcccttnaaaaaanggggccccggcgaagaaaagcttttcgcaaaaaccaactgcgcgtgggggcgcgcgcggcgggcccccggggagaggttacgggtgcaaccggggtcccaagggcgcggtgttccagagggggaacc

SEQ ID NO: 116235 - DNA, 559 bp, Homo sapiens
tcctagattgtctatctaattatcaataaataacagttgtatttaagggatgccaggtacagtgataacaaaacatacattagtagttacagagcgtgtcagaatacttgcattctcagataatgaggtgattgcaaaagtccaaaaataaagagttcattgaattttggtttatacaatcaatgtaaccatttaaaaaaatgatgataatgatagtttttcaacaagctaggtaaatggttagaatagaatgcaaagttaagagcaaaatcccaggatatgaagttgttgatgtgctctgattgaacctgtacagaaacacacagaggctatgatctggcagtagtaccctgacattgctaacagtggttgtattagactggctgagttagaagcaattgttttttttttccctcctattttcctaaatatatttaatttgattttaatgactaacattttttcaaattaaataaaagaatctggactcagattattaatcatatctgaattgccttccctcccaggcaccaaaatgtaacttaaagttctgagaaac

SEQ ID NO: 116236 - DNA, 420 bp, Homo sapiens
gagcttttggagagatggaagactagagcaaaggccttcaggcagaggtgcgttatagcactgagcccactacagccaggcagtgtgagagggcaagaggaggagggggtcagagatgatgggcagccgctgtgcaggctgtgtagggtgttagaaagactatggcctttactgggagcgaaatgaatcactccttgctaggttggcagaggcatcacatgatctgacttccattttaaaactgtaactgcatattaaaaacagaatatggggggtaagggtggaagcaggaagacttatcagaaagtattgtcagctcagtgctcttgtgcaactgtagtcctatctgcttgggaggctgaggcaggaagatggcttgagcccgggaggttgaggccaggcattcatgctggtccagac

SEQ ID NO: 116237 - DNA, 82 bp, Homo sapiens
cgcatattttattatttataaattatattgtataatcctttatcagtaagatatatagtaaatttatgcatgtataggtata

SEQ ID NO: 116238 - DNA, 361 bp, Homo sapiens
acagacatcctgttattctattatgttatctattatgctgagaataatagctccatccacatttctgcaaaagacatgatcttgttctttttcatggctacataatattccatggtgtatatgtaccacatttcctttatccagtctactgttgatgggcatttaggttgattccatgtctttgctgtgtgaatagtgctgcaatgaacatatgcatgcatgtgtcttcatgcagaatgatgcattgtggtgatttctcaaacagggaacatacttgctgagcatctgttgtgtgcccatcatcagaagcacatcctctgtaaagggagcaagatgaattaatttatgaataaagctcctt

SEQ ID NO: 116239 - DNA, 514 bp, Homo sapiens
agcggggccatcagaaggaagcctggacaggtcccttgtttctaagaattcagaggcttgctgactctaactgtgcttgaagcaagatgactgcaggttgcagagtgaaccattgggaaagtttgcctttttggggatgaactgattttccaaccctgatgctggcggaaattgagtgatggaactaaggtcatctggtgctctccttgagctgcttaataaacagtaaagctattcctttctatttaaatgacataaaaaggaattgatttttagtcacctttccaggaagtgcttcctgaacctgaaaacctgcatggagaaattgaagaaattgttcttaaagggtaaaccaaggaaattgtgtccaagatccctgtttctcacaaaaaataagaaaaggaaccaggtaattagatggattgttcgttcaaggcattatgtacacttcttttggttctgaggttaataaagacaaagaagagaaaaaggaaaaaaaaaagaattaagggca

SEQ ID NO: 116240 - DNA, 595 bp, Homo sapiens
cctgccccattgcagaattatcagaaggtcacctcagaaaagcagaaccaacaagaaccttgggagggatttcagcttcagagaatgcccggtggcaacccaagtcagtagcactagctttgtggaggtctgtgttccagggaggagatgaacgtgggaggaggatacgtgggagtaaggatgccgggcggagcgaagtaacgtgcaaccatggtacaaagaacctcgttgtgtacaacaaatgcagcctcctttcccatgcccgtgggcataaggagaaaggggtggtaagtgcaatgctcccacttaattttaaagccagtcccagcagatcaaatgatagttgctcggtcaggcaatagttccacttcaacttccactcttcagagcccgtgtgggagctgtcacagacactgtcgacaaaaattcagtctggcataactgggacagtcatatcggctccttcaagcactcgcatcaccccagccatgcccctagatgaagacccctccaaactgtgtagacgtagtctaaaatgttgggagtgtaatgaagtcttccaggacgagacatcacgtggtacacatttccagca

SEQ ID NO: 116241 - DNA, 641 bp, Homo sapiens
tgtcatatactgtctaaaattttgttcttgctgttctcttccacctcttcatctttctgcacttatcgtgccaaactcctgcttcaagatttctagagtcacctcctcttttctcctgaatgagtcactgtgtgactcatcatctaaccgctgccattgaatgccttctagagcaattacattttgctaggtcttaacctttgaggtgctttgagagagaaacttctaagctttgagagagaaacttctattttactgtatcctttacagcactttctacaaattaggaacccaagtatctcatggatcttcaagttattccctttctataaagttaaatatataatggcttattaggaaatccatactctgtatcaactaacagtcatgaatagaagtaggtagagctcacttaagatataagacagtacatagttacttgcagcaatctctttagggaaaaggaagctatttaaaacaaaagaattatttgcattttttgtgtatgcaaaccctgtatatccttatctaaaagtttaactaaaaattgaccaggcacagtggctcacaactgcaatcccacctactcaagatgctgaggaggaatgatttgaggccaggaggttcaaggccaacctagg

SEQ ID NO: 116242 - DNA, 192 bp, Homo sapiens
agttgacctctgtgtccttcctggattctgcaccctaatctggtctctaccctgaggggctctgtccttgttggatcagctgctgatgcaattggccccacctggactttgagccagtgaatctgttgctgacctaccattgcctttggacttgaggttcccccttttctccccatgccagggcttcctcag

SEQ ID NO: 116243 - DNA, 343 bp, Homo sapiens
tgggaggaatgggtggaacagggcaaaggtgaacttgtgcttcaagaaatcattgtggccaggcacagtggctcacgcctgtaatcccagcactctgggaggcccaggcaagcagatcacctgaggtcaggagtttgagaccagcctggccaacatggtgaaaccccgtctctactaaaaatacaaaaattagccaggtgtggtggtgcatgcctgtaatcccagctactcgggaggctgaggcaggagaatcacttgaactcaggagatggaggttgcactgagctgagatcgtgccactgtactccagcctgggagacagtgagactctgtttcaaaaaaa

SEQ ID NO: 116244 - DNA, 586 bp, Homo sapiens
tatgataggtacttagctgcatgtggcccaaagattgaaattaatgaaaataaattaaatttaaaattcagttctcccatcttactagccacatttccagtcctcagtggcacgtgtgtctagtagccactgcattggagggtgccgtatagaacaattccactctggcagaaaattccactgaatcagaatgctgttctagagacagtgcctttaggttcattagcgggagcccatagccctgccccccacctgctctccagcaaggtaggcagctgacctgctcctcagggggcagcctgggactctcaaggggcaggtgcctgggaggtggatttaaggctagaacatcagatggagggctctgtggtctggcttgggcttctcctggccctatggagagggcctctgagcagtttctttgggcaattaacaaaatgatttaaaagtcaggatagcttgacccttacacactaatctttgggccatagtcattttcactgtactgcagactttgcatttccttctgagcctggttgcttacatctcagtgttcttttcagaccatggaaggaaatgtagccct

SEQ ID NO: 116245 - DNA, 543 bp, Homo sapiens
cggatgacagtgagatgctccaaggggctcctgagaaggcggtgggagagaagagccacccgggagctcctccaggcctcggaagagggaggctgccggggatgggtccagtggcaccgggctccggtttatgtgagccgaggctggctagggaccccagagatgcaggcaaaagcctgtgccgtaagccacattcctcacttaggcccccttccaggggaagcgaagtcaagccctggtaaatgcttctcatctctgggtccagctgggagaacagtggcatgatgacatgctacccatgtagccaagctccccctcttcctcccttgcacctatcgtttccatcctgttcatttgccagttattacaggagcaccacgggcaggccacacagctagtgctgtggagatgacacgtcttagtgaaggaacggagggaccggcatggggatggatgagggaaacgcctgaccataaacctaaacatctaaagatctggaggagccacggggaagtgggactgtgtgatgatgtcagacatttc

SEQ ID NO: 116246 - DNA, 349 bp, Homo sapiens
gctttgaggacagctcatctggcacaactccactgtgggtggtacaagactcataccaggttgcaccggccccttgctgccttcgcagttggaagtggtgatctcagacctggctgagaacacagtaaaggcagcaagcctgggcctgccctcctccattcatgcctcagaggttgggacccttctgtagcctcctctgcactgtctctctttggattaataggaggcccgtgcaggagtcagagaacacggctctgagctgtgaccatccccaaagcactgccctgagttgccaaaggtcatatccccacatggaccttactttataccagcaagatggaacctccgg

SEQ ID NO: 116247 - DNA, 434 bp, Homo sapiens
cgtatggaaaacatgttcaagcacactcgtaatcagagaagtgcagattaaaacaatactgagataccatttctcacccatgagactggcaaaaatttaaaaatcctaccacaacccctggcctggctgtgagcaaacagcgctcgacacggggcacagctctcaggagggaggaatgtggcaacatccggctggctaatgacctctgtgcaaccccaattctgggagtcaaccctgcagagatgaaaaggtccacatgtggtgttcacagcagcacaggtggagatggcaaaaccctggaaacagcccagtgcccgcacagagcaaggtcgctgagtaaacgcgggtgtctacacggtggggcacgtgccggaaggaggaaggtctgtaaggcctgccacgagatgacttccaggacattaagtgagaaggca

SEQ ID NO: 116248 - DNA, 1062 bp, Homo sapiens
  misc_feature (1061)..(1061): n is a, c, g, or t
attactgttattaaatagttttaggaggagtgaaggtggccaaaaaaaattttttggagttatacattgaaatgtttgtaaaagaaatgactgacgtctgaaatttgcttcagagtaatctgggatgagggaaggggaagagggcgtggatggaataaggttggctgagacttgactgctgaagccaggcttattgtaccacacgctccgttcctatgtgtgcttgaagcttttcacaataaaaagaaaaaaacaaaacacacaaaaaaacaccaacaaaaagacaaaacaaaaaaacaaaaaaaaaaaaaacaacagtggagggcaaccaacacaaaaaaaagagaaacaaaaaacagagtgacggagacccgacgcccaccagagagcacaggaaaagggagcagaccgcagaacaacaagaaaatacagcaggggcagaaaaaagaggaggcgacacccagacaaaagaaaaaacaaaagaacacagaggagaaaacagagggaaggaaaagaaaagcaagacacgacaaagagaagaaccacgaagaagaaaaaaaacacgaagcaaaacacaaaaaagaaggcagcgacacagcacgaggcacaacgaacaaacaaacatagaacaaaccacgaagcagagcgagagcacagcacgaacaaggacacaagccacgaacacgaagaagaagaaggaaggagaaaaagacaagcagaagatgagacagcaacgagagaggaaaagggagagggaagcacaggagcgaaagaaagaggaggcgaagagagagcagcggcgcaaggcagagagagggaagaacgaaagagggagcgagaaaaaaagaacagagaagagagacgaaaagacacaacagggcagagaagacacagaaaaaaactagaagaacagcgaaagaaacagaagaacagacaacgaaagaaggagagaaagacgaagcacagaccagaaaaagagaaccaaagaagaacaccagaggagaaacaaaagagcaaggcagaaaaaaacagagaaggcaacacacgacagaaggaaaaana

SEQ ID NO: 116249 - DNA, 773 bp, Homo sapiens
gttttcttggcttctccatccactgataatctctcccacaatattgtgacttgattctgttccaggtgaaccttttcctagtatttcttgtattctttattatctgtcatgttagggcagctgtggagcttcatttttacaactgctgaatctaaatttaactgctgattttctaccatccattttcaaccttctttaaaaagcctggtgagtaactttatctgtcatggcccatttcaatgccctcaatagtaaaaccggcgaatgtggagacccatccttaatgaagagaccagtttggtcattcttactattttccatggattttcaacatgattaagaaaaaataatttgaggctgagaattgtagttacccaactgaatggaaggcaaaggaagaaactagacgctcccaggtaactgcccagtttttgtatttgtttttcctttccaccaatgacaaggtatgctcaataactttactcccgaaggaggatatcccattctgaaaaacacaccactgtatgcgataaaggcagggggaggaaacattacactgtgggagagggaacaaacgtttgatcagcgtgtaacagaaaacagttctggcaactattatttcttcttctccctcaaatccaggaaaggtccataggccattttctgtaatatttcaccaaccaaaatgatctcttggacttgaaaataaacgcccccatttccaaccctccatcactctaaaattattagtgatcttcaggtacttgaaaaag

SEQ ID NO: 116250 - DNA, 484 bp, Homo sapiens
gctaatttttgtattttttgtagagatggggtcttgccatgttgcccaggctggtctcaaactcctgggatcagctgatccatcccccttagcctcccaaagtgctgggattacaggcatgagccaccacacctggccactctaggagctttttaaagtcctgatgtccatgccatcctagaccagtttaatagtaatctccaggtgggggcccaagactcagcattcttttaaaactgtccaggtaattctaaagtacaacccagtgggacacagtggttctcaaccctgctgcctattacacatcagctggagatctgttaaaaaataccagtgtctgggccccacccctagagattccaattaattggtgtaaggtgaaacctctggtagctttgtttttttaactcctcaagtgattccgctacgcatctggtgttaaggaaagagctgttgttctcaaacttggtggtgggatcagaat

SEQ ID NO: 116251 - DNA, 251 bp, Homo sapiens
gctgattagtctgcaatctttatatgatatgggggaagtcaaagcaaggaatctgggtacaaggtagaaagaaagtgctgttcacatagagtaggccgggcgaggtggctcatacttgtaatcccaacactttgggaggccgaggcaggcagatcacctgaggtcaggagttcgagaccagcctggccaacatggtgaaaccccgtctccacaattagccaagcgtggtggtgcacacctgtaatccaagc

SEQ ID NO: 116252 - DNA, 566 bp, Homo sapiens
ggctggagaggatttgtgaacagggcctgggggtggaggggaggttgggacctgtcagaggcagcagggctgaagaaggtttgtgaacagggccctggggtggaggggagctggggatctgtcaggaaggagggctcatccctgccttcaccaagcccacccaccagcaggcagcctttctaggagctggttctttctaaggataccaggctccttcctggaagaaaggaaagttgttctactttaaaggataacataggccgggcacgtccgtctctccagtctttgattgtcctgcaacaagtgcattgatgacaaaatggaatgcagtgctcagccctcctggcctcctgcctgattctcttcggagtgcaccacatgggtggaagagctgcccccaccacatacagccctcacccacagtgtgatgggtagaaccaggaccagatctaccgggagccctcctcccacacaccgtggcttctatgaaaggactaaatttaggacctgaaaccagctgaaatggggacagcagagcctgctgcgccgcagctgcccatccaggt

SEQ ID NO: 116253 - DNA, 369 bp, Homo sapiens
gatctggccaagcttctctctgtgcaaaagaactgctgagtttgtagttgtgccccctcatttgttctggtggaggtgctaagtccagacaactcccagtggcagaagtgaggtcaggcctggcccaccaccagccatagtgatgtttgtggattgactgctagtgacaaaatgctcttccactcagcctgcccagggacaccagcacacacgttctccagcttcccttgtcccagctaagtgagcagagtgtgcagaagtgcgttgcagaagcacctgcagggactggctttggacacattctttgggcatctccattagcacatgggagtgtggacaccagccacagctggccactgcacggctgaa

SEQ ID NO: 116254 - DNA, 388 bp, Homo sapiens
tgtcatccaatccatcggcaaatcttattagcttacttccaaatatattcccaaactctactcttctttctatctagcaccactgccctcgtcctagtccaagcctccatcatctcttgcctggaggtgtgtcgtggacactctcacactgaatcaagttagcctctgctcaaaaaacctctaatgggccaggcgtggtggctcacacctgtaatccctgcacttcgggaggttgaggcaggtggatcacctgaggtcaggagttttgagaccagcctggacaacatgataaaaaccctgtctctactaaaaataaaaaaaattagctgggcatggtggcacacgcctgtaatcccagctactcaggaggctgaggcaggagaatcgc

SEQ ID NO: 116255 - DNA, 742 bp, Homo sapiens
ggttttctttgaatttgtgtttttattttctccttttcatttactgttactatccagatttgattatgaacatctattacttttgatgttagcttaaaaacatttttaaataaaaagagaatcccattttccatgccagtataaggatactcagaaaagtaaatcacagtttgagaattgccagccttaaaatgatcaaaagtacaacattgatgacatggaggcaggagagtcacttgaacccaggaggtggaggttgcagtgaaccgagattgtgccactgcactccagcctgggtgacagagcgagaccctctctcaaaaaacaaaataaaacaaaaccaaatccaaaaaacagaactctttctcttcaacgttgtgttgagaaaactggatagccatgtgaaaaataatgaagttgaacccttactctatattatctacaaaaattaactcaaaacagatcaaagactctaaatttgagaaccaaaactgtaaaactcttagaagaaaacataggggaaaatcttcgtgacctttgatttgacactggattcttcaatatgacaccaaaggcacaggtaacaatacaaaaataaaagataaattggatttgattaaaattgaaaatttttgtgcatcaaagcatactatctatgagaaagaaagacgacccacagaatgagagaaaatatttgcaaatcacatgtcttttaagggtctatacacagaatatataaaga

SEQ ID NO: 116256 - DNA, 626 bp, Homo sapiens
gagacagtctccctcttgtcacccaggctggagtgcagtggcatgatctgggctcactgcaacctccacctcccaggttcatgcaattctcttgcctcagcctcctgagtagctgggattacacgtgcccgccaccatgcccggctaatttttgtagttttagtagagatggggtttcaccatgttggtcaggctggtctgaaactcctgacctcaagtgatccgcccgcctcggcctcccaaagtgctgggattacaggcatgagccactgcgccaagctgaacatctttattaaatgctcctgccaggttctgggcagacaagctttgatttactttccctttcaagagccaagggaataaagctaccaagtacgagttgatgatttgaactaattctgaagatttgtgaaaatgctcaaaatccaagtggggagtgaagagcagccgcctgacaactaaaactgggaaatgggtgttatttgtctcacagtccccgcttgcccctgcctgcgctgctccatctcttcccctcctccctgccacttcaggagcccatgccctctccccttattgaaaccaaaacaaacactgctgttctaaaagaaaggatgtgaataatagaa

SEQ ID NO: 116257 - DNA, 273 bp, Homo sapiens
ctccagcaatccggggatagtttcagcaagatcaacactgagtatccctgacaggattcagccaagggccagtggcagcttcccagcctctttgggtaagagccccttctttttttgctcctcagtccttccagtagtttttaaccaatttcctgtgttccatcctactctgcttgagatatatagagaggtttctacttttgtgtttgagcactgaatgatacatagttccttccatatcagtccatagtgagcttcctcattctctagtca

SEQ ID NO: 116258 - DNA, 309 bp, Homo sapiens
cgtggatgctactcatggagagttcctctcttacatgtgataatctgcccacttctagcacccaaacaaacaaccaactccaattggcagaggggaaatgactctgtgtttcatcctgaggaactctgaagggccacagaccttgccaaggcacttcacctctaataccccagagatagtgtgcatctctggtttttccatacaatggacagagctccagaactctctgtacctttaggcaagtcttctgaaggctcagaggccactgtcctgcctgccaacctccaagtaccagccaaccccccaagc

SEQ ID NO: 116259 - DNA, 537 bp, Homo sapiens
gcagggatttgtgggatgcccattcctctttatctttcactctttataacaatagctatcaattatcgcacactctaggggccaggcaccatgctaagcactttatgtgcctcatacaatcctcacaacaatgctatcatacaatcctcacaacaaccctttatgtgcctcatacaatcctcacaacaaccctcatacaatccttacaacaatccttacaacaatcctcacaacaaccctactgatgctgttatcacatccagctcactgagccttagagtggtcaagtgaggggtggatccagacttgaacctgggtctctccgactcgagcccttgtgcatgaccttgcccctccatggaggtgcccgggagatccttttctcccctgcagtgcttcaaaagctcctctgtcacctgctctgtatgtgtggctttctgtttgaaaaaaacagaagaaagaatggtgttcttggaaaaacaagtttggtaaccccgggctagaccccggcccctctggatttctgatgtattacct

SEQ ID NO: 116260 - DNA, 455 bp, Homo sapiens
gaaaatgtatttgcattaaattacatgtccacctgtgggtctttttcacccaaggcagcattgaatatgatcactttgtaatctttgctattttggtaggcagaaacaatcttattattttaatttgcatttctttggttactagataaattgaacttagatttaccagccatgtgaggttattttttttttttgtactgcattgtctcttctggtcctttgccagattacctactggggtcttagtgttgaatccgaagtgaattttttggttttcaactttacttcccttttattcttccttttaaaagatgaaaaaagaaaaaggccaagtgcagtggctcacacctttaatcccatcactttgggaggccgaggagggaggatcacttgagcccaggaattcaagaccagcttgggcaacatggggagaccctgtatctatttaaaaaaaa

SEQ ID NO: 116261 - DNA, 147 bp, Homo sapiens
tctcgcccaggctggagtgcagtggtgtagtcaggtctcattgcaaccttgaccctcccaggctcagcccccggagcagctgggactgcaggcgcatgccgccattcccgacagttttttgttttttgttttttgtttttctttttt

SEQ ID NO: 116262 - DNA, 603 bp, Homo sapiens
tcagatggggactgcagattcaaaccatgacttgctgtcctgagcctcgcccagatttctaaatccaccattccatcagggagtaagaaacaaaatttagccccatccttcttggggtttctacccacttcacagttttttggggtaacaactcctggatctcctgttgcccaagcccaaggctgcagcttgaagattttgtttcctggtcttgacacacaggctgccctgagctatccatcattcctggattgcagagtctcttcacatctgcagttgtctgcagcccaagcacagggccctggcctcatctccaaggctggctcttcagacaacgactccatccagggtcctgatggtgctcctgcaggaagcaggccaagatcctgctgcttctttctaattcaaggccttcgtcttaaagcgccgtgccctcaaattgccttctttaaaatgcttttagaactcaaataggaaagatgtgcaaatggtttctccttttctttcatgctctatatgttcattaagcaactactatgcccagtcactgttccaggcagtgggggaggaacagcgactgagagacacaacatctcttcatgg

SEQ ID NO: 116263 - DNA, 400 bp, Homo sapiens
tctaaagcgctatatcgttcctaaatcttgagaaacagaagtttgaggtccctcctaacccccgttgggaattggtccccatatccaaaaataagctgccggtgtcgctgcagatttacccactttaggcaccatctgacaacttcccacgtggaagtagaggttccagctctttccatcccctcccacgtgcccgtcccctgcctgccgtgctccgctggcatctgaccctgggtttgttagggggccgagtcgggtgcagcccctggcctcagagcacgctgtgatcgctcttcccacagtaagcggctgtgttccttgccgcagttgaccatgtgttgccgcagactctccgcagactgttgtctctggaggcagtcgggcaccaggagcctgcgac

SEQ ID NO: 116264 - DNA, 356 bp, Homo sapiens
gttgggttgagtagtaggagtaatggagaaggttaaataaaaagctttagaatcgtgttaactctaagtcagtaagattatagccagagcatttttataattacaatttcttgattaacacctgttttacagaacatctatattttaatagctattttaattgcaggacacacaaagacaatattcttaacctagaaaagttcatgatctagagaagacacacagctaagcaagataataaaactgtaacagaaaagacgtagctttttaggagcacagaataagctctaagattagttctgcctgggaaataagtcattaaagaagtgatattattgttggatccaatgaagcaa

SEQ ID NO: 116265 - DNA, 965 bp, Homo sapiens
cctggctctgagttctgtgttgaatttgagctctcttttctttcctgtagtctagggcttcttgaaaagtttcaagaaggaaattcacaagccaacaaccaaagactgtaactgagtggcaatcattatagatattataacaatcactaatcatttggtcaagtgcaagtggtcactattatcttaagaattcagaacaccagctgaattctaagaaaatttgttttctgtcccaatttgcacccaggacccttgtggactggagtcatagtgacaagaccctttacaagtcaatttgtagaaactctggcagaaaaatggcattgcttgccttgtggaaaactgaaaatatttcttcaattggctaagaatcagagatgagacagccacttttgctagaaataagaccacagcccaccatacatgaagtttctgtgaattaactataaggtccttcgctacgtgaaaagagtctggcttttttagcaccacggagagactgccagctagaaaaacgccccgatcctgccctgccatgtgaactgcttcctgcacaggagctgggtctgctgagagaggagacatgtggctggactcttctgagaatattaagttactatgaaattaaattaaaagcatgctgtgaattccagaggcagcgaacttggtagagaaagaacaccattctcccctcacaggtcaggtttttttggctggcatcgtggcattgggagagcctaggaacagtattttccagatgtttcttgtttctctcttcatttgctcacttgcattttctgattttcttacagtgaccatgtattgcttttatgagaagaaaaggaatgaaacattcttattttaaagcaaaaaggagatatatgctcaggaattatcaatttataagaagttaaataggaggaggttggtggtggaacaaaaagaggctctgcagaaacaccgct

SEQ ID NO: 116266 - DNA, 304 bp, Homo sapiens
ggcccatagcactagactgtctcaaaaaaagaaaaaaaacgcttggagccagaccgtctgggtttgaatctgatgtcatactgcttagctggtgacttttggtgagttgccaaacctctccatgccttagtttgcccctctctcaaataggggtattgttaatagtacctaccacagagtttgttttgaagattacataaatctgtgtaaggcatttaaaagctttgcatgtaaatgctctaatgttacctgctatgaagttgaaaaggtcattttcttagtggtggctgctgtgtaacagtga

SEQ ID NO: 116267 - DNA, 548 bp, Homo sapiens
  misc_feature (488)..(488): n is a, c, g, or t
cggtcgattcttgatgatcccaatgcagcggactcggcagggtgagacattcagaggaaacgacgacaggaaatggtgacagatagggaacgaggatgaagggaagggagagccagtgatgactggcagtggagtggggagcaccgccacctctcctcctccacttgcccctcctgtggcactggacaagcgagtgggcttttcgttgtccatgggcttttttggtggggatgtgaccagctttgaacccttccccttaaacatgctcctcctgcacggaagagacaggggcaggggagagactctctccccaccacccagctcaggccccagcacagcccggcctctggcctcactggcgtctgtgcccagtgacgcaggcaggtgagctcctggcaaattagcattgcaggctgtgctctctcctcctgctctgctgcagccgggagtgtgcagagactggaggggatgacaatcacctcccaggntgtcttcacacgtgccctccagcccctccctgcccctctttctgccgattccgctgcatt

SEQ ID NO: 116268 - DNA, 365 bp, Homo sapiens
agcaccgccacctctcctcctccacttgcccctcctgtggcactggacaagcgagtgggcttttcgttgtccatgggcttttttggtggggatgtgaccagctttgaacccttccccttaaacatgctcctcctgcacggaagagacaggggcaggggagagactctctccccaccacccagctcaggccccagcacagcccggcctctggcctcactggcgtctgtgcccagtgacgcaggcaggtgagctcctggcaaattagcattgcaggctgtgctctctcctcctgctctgctgcagccgggagtgtgcagagactggaggggatgacaatcacccctctgttttctgtggtggctctg

SEQ ID NO: 116269 - DNA, 747 bp, Homo sapiens
tgagtttcctcttctgtgaattgattgttcatatcttttgccttaaaaaacaactggctacctcttttaatatacgagagtactttatattctgagtactaaccttctgattggtattatatgttgcgaatctcctctccaaagctatgacctgtttttttattatggagtcttttgtataaagaactttcatgtgctccaatatgtctatttttcttaatagcatgtagttctatgtcttgtttaagaagtgttttcttatcctgatgtgaattctctggtaatttattctaaaacttttataatttttcttttcatatttaaatatttgatctatcaacaatttatttttgtatatgatgtgagattaaaatgcagttttattttttccacaggaataaccagttgccctagtaccatttgctaaatagttcatcttttcctcattgatttgtaatgtcaccttattgctggccttttgtttttccatgttaattttaagattagtttctcaagttctgtgaaaaaaaactttggagaatttgattggaattgcaacatacagatgaatttgaaatcatttgccatctttattaatcgagtcttactgtccataaaaatagtatattggttttttatttaagtcttaccttatgccctttaatataggttttcaattttcattttatctataaagctcttgcatgcctttttttaaagatctgtatggcttttattacattacaa

SEQ ID NO: 116270 - DNA, 781 bp, Homo sapiens
ggccgcttcgggagagcgggcagttctaggaggccgacctggagagcctcccggttccccttccccttttcccggaccccgcggggacaccccctcgccgccacccgggcctccccgagggcccaactgcgggtcaggcggcccgggccagccgaaagggaagtggggctaccccacagccaggcagcggggctggggtcagacccgggagccggaggttggagacgtgcgacagtcacctgcgggcagattccagaggggagacccagggctgcaggggacgccccttcgtggcagctacccagcctcggcccactgccagtgttacgtggctgcatgaccatacacttctgggtagagcccagtggaagacaaagaagactcaaggaatagcccttgagatcctgaaccaactttgaaggcagagaagtgggctagaagaagtggggttggagcctccaccaaggacaagaaggccttagccccctgcttccagctcaagctgaagtggctgtgagctgagctaagaagaccccacttcgccaggaggagtgcctcacgcctgtaatcccagcactttgaagggcccgaggcaggtggatcacgtgaggtcaggagtctaagaccagcctggccaacatgatggagtctagctctgtcgcccaggctggagtacagtggcgtgatctcgcgtcactccaacctccggccccccgggtccaagcgattctcctgcctcagcctcctggggtaagctgggactacaggcatgttccacccg

SEQ ID NO: 116271 - DNA, 161 bp, Homo sapiens
ccaccctccccacttttctgaacaattacttaactgggtaattctgccccccaacctggataatgtgatcttagataattcagtctggtggattactcaaaccaccagattctcatttcaaagtttttgtacctgaatcttattcgagtcccatcccaccc

SEQ ID NO: 116272 - DNA, 356 bp, Homo sapiens
taaagacagcaggaaacaaaccaacttctaacaaaacacttccctgctcatgagccttgaatggccaattaacataaatggttcattccagcattcaagcccttctgcagcacagccccattctaattgtttcactggtcacctactctcccatctgtcctctagccaagggtttctgaccttagcactattgacattttgagccagacaattctttattgcagctgctgtcttctgtattacagcatgttgagcagcatccctggcctctacctacttgatgctagtggcacacagccccactcaagttgggacaagcacacatgcctccagacaatgccaaatgtgccccgggg

SEQ ID NO: 116273 - DNA, 600 bp, Homo sapiens
gtctttttgaatgttcatttttctccaggttctacttccatcatgaggaagatccatccatgtggttagaggaaccccagctcttagagtcttctcttcccttgtacccaagaacctttgccataggaaccatttgtcaattaataatttactgccctgtaaggaagcaggagatttggtcaaaaacagccatttctagttacttatttttcagttgttggaaatcttacacattggggtgggtttacagggtttttgtttgtttgtttggagtgtttttttgtttttgttttctactgttaaagacttcctattcagttttcagaactttggaagtggctgtaatttttgtgcaccaaagggggcagtcttgtaatgttttatttagttttttggcctcttttcattctcagtcccctatgcctattttaccagacaagaacactaactgtgtgttactgtattcagagtgaagatccagcaacatttagcatatttgggatgttatattaatcagacatgctctaggaaattttttaacctctatttcatgttatattgttaaaatctggctagatgctgtggctcacacctgtaatc

SEQ ID NO: 116274 - DNA, 345 bp, Homo sapiens
gatgatataaaacatgcacagtagccgagtgtggtgatgtgtgcgtgtagtcttagctactcaacagtccgagacatgagctcaggagtttgtgaccagcatgggcaatatagtgagactctgtctcaaaaaaaggaaaaaaaaaagtgcatagtttatggtatcccaactggaggagctaaagacagaatagcttaacatcatttagaaaaaaaattataattgaaaagtgcaaatacacattttgcagtgtttttggcatttacaaaatatgtaaacacttttagtttcttagggaaaagatgacgataggctgattgaaaaatatcatttttacttgtcaca

SEQ ID NO: 116275 - DNA, 277 bp, Homo sapiens
cctgccttggcctcccaaagtgctgggattacaggcatgagccactgcgcctggccagatgagtctttttaaagtaagattctaatcaggttcctttgttgtccctcaggcaccagcagagttaattaatagtctgaataaatggcctggcattcactacaccctggccccagcctgccttcccatcatatttgtcactctgcttcatcgctttgctccagccaagctggactgctttccaggccgctaacatcccgctcctttctttttttttttt

SEQ ID NO: 116276 - DNA, 1281 bp, Homo sapiens
atggccacagcaggaaatccctggggctggttcctggggtacctcatccttggtgtcgcaggatctctcgtctctggtagctgcagccaaatcataaacggcgaggactgcagcccgcactcgcagccctggcaggcggcactggtcatggaaaacgaattgttctgctcgggcgtcctggtgcatccgcagtgggtgctgtcagccgcacactgtttccagaactcctacaccatcgggctgggcctgcacagtcttgaggccgaccaagagccagggagccagatggtggaggccagcctctccgtacggcacccagagtacaacagacccttgctcgctaacgacctcatgctcatcaagttggacgaatccgtgtccgagtctgacaccatccggagcatcagcattgcttcgcagtgccctaccgcggggaactcttgcctcgtttctggctggggtctgctggcgaacggcagaatgcctaccgtgctgcagtgcgtgaacgtgtcggtggtgtctgaggaggtctgcagtaagctctatgacccgctgtaccaccccagcatgttctgcgccggcggagggcaagaccagaaggactcctgcaacggtgactctggggggcccctgatctgcaacgggtacttgcagggccttgtgtctttcggaaaagccccgtgtggccaagttggcgtgccaggtgtctacaccaacctctgcaaattcactgagtggatagagaaaaccgtccaggccagttaactctggggactgggaacccatgaaattgacccccaaatacatcctgcggaaggaattcaggaatatctgttcccagcccctcctccctcaggcccaggagtccaggcccccagcccctcctccctcaaaccaagggtacagatccccagcccctcctccctcagacccaggagtccagaccccccagcccctcctccctcagacccaggagtccagcccctcctccctcagacccaggagtccagaccccccagcccctcctccctcagacccaggggtccaggcccccaacccctcctccctcagactcagaggtccaagcccccaacccctccttccccagacccagaggtccaggtcccagcccctcctccctcagacccagcggtccaatgccacctagactctccctgtacacagtgcccccttgtggcacgttgacccaaccttaccagttggtttttcattttttgtccctttcccctagatccagaaataaagtctaagagaagcgca

SEQ ID NO: 116277 - DNA, 1745 bp, Homo sapiens
atggccacagcaggaaatccctggggctggttcctggggtacctcatccttggtgtcgcaggatctctcgtctctggtagctgcagccaaatcataaacggcgaggactgcagcccgcactcgcagccctggcaggcggcactggtcatggaaaacgaattgttctgctcgggcgtcctggtgcatccgcagtgggtgctgtcagccgcacactgtttccagaactcctacaccatcgggctgggcctgcacagtcttgaggccgaccaagagccagggagccagatggtggaggccagcctctccgtacggcacccagagtacaacagacccttgctcgctaacgacctcatgctcatcaagttggacgaatccgtgtccgagtctgacaccatccggagcatcagcattgcttcgcagtgccctaccgcggggaactcttgcctcgtttctggctggggtctgctggcgaacggcagaatgcctaccgtgctgcagtgcgtgaacgtgtcggtggtgtctgaggaggtctgcagtaagctctatgacccgctgtaccaccccagcatgttctgcgccggcggagggcaagaccagaaggactcctgcaacggtgactctggggggcccctgatctgcaacgggtacttgcagggccttgtgtctttcggaaaagccccgtgtggccaagttggcgtgccaggtgtctacaccaacctctgcaaattcactgagtggatagagaaaaccgtccaggccagttaactctggggactgggaacccatgaaattgacccccaaatacatcctgcggaaggaattcaggaatatctgttcccagcccctcctccctcaggcccaggagtccaggcccccagcccctcctccctcaaaccaagggtacagatccccagcccctcctccctcagacccaggagtccagaccccccagcccctcctccctcagacccaggagtccagcccctcctccctcagacccaggagtccagaccccccagcccctcctccctcagacccaggggtccaggcccccaacccctcctccctcagactcagaggtccaagcccccaacccctccttccccagacccagaggtccaggtcccagcccctcctccctcagacccagcggtccaatgccacctagactctccctgtacacagtgcccccttgtggcacgttgacccaaccttaccagttggtttttcattttttgtccctttcccctagatccagaaataaagtctaagagaagcgcaggttctgtttgtagtgtcctccttgcttccccttccattcaagagattccagcaaatggctttccctccatgggtcgcatttccctatctgggaaatgcgagctttgaccaggagggccacagagtttcagagggaggggccattccctggatagttaagagaaaccagtgccatggatgttgtccagtttctgaaaagtcaggtcagcaaatggtaaccgtagagattttcttgcttagtttaactattcagctttagttgatctatattcatttttgtcttcttaactgcatttcaagaatttttaatttgcatgtgtctcagaagttggctgctgcagctagagtctagtggggagaattgtggcgagggctactgtgagtgacagcaacagagaccaaggagtagaaagagggaagtttgaggggcacaatggggcaactgaggggcaaggagatgggag

SEQ ID NO: 116278 - DNA, 1828 bp, Homo sapiens
atggccacagcaggaaatccctggggctggttcctggggtacctcatccttggtgtcgcaggatctctcgtctctggtagctgcagccaaatcataaacggcgaggactgcagcccgcactcgcagccctggcaggcggcactggtcatggaaaacgaattgttctgctcgggcgtcctggtgcatccgcagtgggtgctgtcagccgcacactgtttccagaactcctacaccatcgggctgggcctgcacagtcttgaggccgaccaagagccagggagccagatggtggaggccagcctctccgtacggcacccagagtacaacagacccttgctcgctaacgacctcatgctcatcaagttggacgaatccgtgtccgagtctgacaccatccggagcatcagcattgcttcgcagtgccctaccgcggggaactcttgcctcgtttctggctggggtctgctggcgaacggtgagctcacgggtgtgtgtctgccctcttcaaggaggtcctctgcccagtcgcgggggctgacccagagctctgcgtcccaggcagaatgcctaccgtgctgcagtgcgtgaacgtgtcggtggtgtctgaggaggtctgcagtaagctctatgacccgctgtaccaccccagcatgttctgcgccggcggagggcaagaccagaaggactcctgcaacggtgactctggggggcccctgatctgcaacgggtacttgcagggccttgtgtctttcggaaaagccccgtgtggccaagttggcgtgccaggtgtctacaccaacctctgcaaattcactgagtggatagagaaaaccgtccaggccagttaactctggggactgggaacccatgaaattgacccccaaatacatcctgcggaaggaattcaggaatatctgttcccagcccctcctccctcaggcccaggagtccaggcccccagcccctcctccctcaaaccaagggtacagatccccagcccctcctccctcagacccaggagtccagaccccccagcccctcctccctcagacccaggagtccagcccctcctccctcagacccaggagtccagaccccccagcccctcctccctcagacccaggggtccaggcccccaacccctcctccctcagactcagaggtccaagcccccaacccctccttccccagacccagaggtccaggtcccagcccctcctccctcagacccagcggtccaatgccacctagactctccctgtacacagtgcccccttgtggcacgttgacccaaccttaccagttggtttttcattttttgtccctttcccctagatccagaaataaagtctaagagaagcgcaggttctgtttgtagtgtcctccttgcttccccttccattcaagagattccagcaaatggctttccctccatgggtcgcatttccctatctgggaaatgcgagctttgaccaggagggccacagagtttcagagggaggggccattccctggatagttaagagaaaccagtgccatggatgttgtccagtttctgaaaagtcaggtcagcaaatggtaaccgtagagattttcttgcttagtttaactattcagctttagttgatctatattcatttttgtcttcttaactgcatttcaagaatttttaatttgcatgtgtctcagaagttggctgctgcagctagagtctagtggggagaattgtggcgagggctactgtgagtgacagcaacagagaccaaggagtagaaagagggaagtttgaggggcacaatggggcaactgaggggcaaggagatgggag

SEQ ID NO: 116279 - DNA, 1644 bp, Homo sapiens
ggaatgagcctggatccggggagcccagagggaagggctgggaggcgggaatcttgcttcggaaggactcagagagccctgacttgaaatctcagcccagtgctgagtctctagtgaactaagctcctacaccatcgggctgggcctgcacagtcttgaggccgaccaagagccagggagccagatggtggaggccagcctctccgtacggcacccagagtacaacagacccttgctcgctaacgacctcatgctcatcaagttggacgaatccgtgtccgagtctgacaccatccggagcatcagcattgcttcgcagtgccctaccgcggggaactcttgcctcgtttctggctggggtctgctggcgaacggcagaatgcctaccgtgctgcagtgcgtgaacgtgtcggtggtgtctgaggaggtctgcagtaagctctatgacccgctgtaccaccccagcatgttctgcgccggcggagggcaagaccagaaggactcctgcaacggtgactctggggggcccctgatctgcaacgggtacttgcagggccttgtgtctttcggaaaagccccgtgtggccaagttggcgtgccaggtgtctacaccaacctctgcaaattcactgagtggatagagaaaaccgtccaggccagttaactctggggactgggaacccatgaaattgacccccaaatacatcctgcggaaggaattcaggaatatctgttcccagcccctcctccctcaggcccaggagtccaggcccccagcccctcctccctcaaaccaagggtacagatccccagcccctcctccctcagacccaggagtccagaccccccagcccctcctccctcagacccaggagtccagcccctcctccctcagacccaggagtccagaccccccagcccctcctccctcagacccaggggtccaggcccccaacccctcctccctcagactcagaggtccaagcccccaacccctccttccccagacccagaggtccaggtcccagcccctcctccctcagacccagcggtccaatgccacctagactctccctgtacacagtgcccccttgtggcacgttgacccaaccttaccagttggtttttcattttttgtccctttcccctagatccagaaataaagtctaagagaagcgcaggttctgtttgtagtgtcctccttgcttccccttccattcaagagattccagcaaatggctttccctccatgggtcgcatttccctatctgggaaatgcgagctttgaccaggagggccacagagtttcagagggaggggccattccctggatagttaagagaaaccagtgccatggatgttgtccagtttctgaaaagtcaggtcagcaaatggtaaccgtagagattttcttgcttagtttaactattcagctttagttgatctatattcatttttgtcttcttaactgcatttcaagaatttttaatttgcatgtgtctcagaagttggctgctgcagctagagtctagtggggagaattgtggcgagggctactgtgagtgacagcaacagagaccaaggagtagaaagagggaagtttgaggggcacaatggggcaactgaggggcaaggagatgggag

SEQ ID NO: 116280 - DNA, 1608 bp, Homo sapiens
atggccacagcaggaaatccctggggctggttcctggggtacctcatccttggtgtcgcaggatctctcgtctctggtagctgcagccaaatcataaacggcgaggactgcagcccgcactcgcagccctggcaggcggcactggtcatggaaaacgaattgttctgctcgggcgtcctggtgcatccgcagtgggtgctgtcagccgcacactgtttccagaactcctacaccatcgggctgggcctgcacagtcttgaggccgaccaagagccagggagccagatggtggaggccagcctctccgtacggcacccagagtacaacagacccttgctcgctaacgacctcatgctcatcaagttggacgaatccgtgtccgagtctgacaccatccggagcatcagcattgcttcgcagtgccctaccgcggggaactcttgcctcgtttctggctggggtctgctggcgaacgggtgactctggggggcccctgatctgcaacgggtacttgcagggccttgtgtctttcggaaaagccccgtgtggccaagttggcgtgccaggtgtctacaccaacctctgcaaattcactgagtggatagagaaaaccgtccaggccagttaactctggggactgggaacccatgaaattgacccccaaatacatcctgcggaaggaattcaggaatatctgttcccagcccctcctccctcaggcccaggagtccaggcccccagcccctcctccctcaaaccaagggtacagatccccagcccctcctccctcagacccaggagtccagaccccccagcccctcctccctcagacccaggagtccagcccctcctccctcagacccaggagtccagaccccccagcccctcctccctcagacccaggggtccaggcccccaacccctcctccctcagactcagaggtccaagcccccaacccctccttccccagacccagaggtccaggtcccagcccctcctccctcagacccagcggtccaatgccacctagactctccctgtacacagtgcccccttgtggcacgttgacccaaccttaccagttggtttttcattttttgtccctttcccctagatccagaaataaagtctaagagaagcgcaggttctgtttgtagtgtcctccttgcttccccttccattcaagagattccagcaaatggctttccctccatgggtcgcatttccctatctgggaaatgcgagctttgaccaggagggccacagagtttcagagggaggggccattccctggatagttaagagaaaccagtgccatggatgttgtccagtttctgaaaagtcaggtcagcaaatggtaaccgtagagattttcttgcttagtttaactattcagctttagttgatctatattcatttttgtcttcttaactgcatttcaagaatttttaatttgcatgtgtctcagaagttggctgctgcagctagagtctagtggggagaattgtggcgagggctactgtgagtgacagcaacagagaccaaggagtagaaagagggaagtttgaggggcacaatggggcaactgaggggcaaggagatgggag

SEQ ID NO: 116281 - DNA, 827 bp, Homo sapiens
atggccacagcaggaaatccctggggctggttcctggggtacctcatccttggtgtcgcaggatctctcgtctctggtagctgcagccaaatcataaacggcgaggactgcagcccgcactcgcagccctggcaggcggcactggtcatggaaaacgaattgttctgctcgggcgtcctggtgcatccgcagtgggtgctgtcagccgcacactgtttccagaactcctacaccatcgggctgggcctgcacagtcttgaggccgaccaagagccagggagccagatggtggaggccagcctctccgtacggcacccagagtacaacagacccttgctcgctaacgacctcatgctcatcaagttggacgaatccgtgtccgagtctgacaccatccggagcatcagcattgcttcgcagtgccctaccgcggggaactcttgcctcgtttctggctggggtctgctggcgaacggcagaatgcctaccgtgctgcagtgcgtgaacgtgtcggtggtgtctgaggaggtctgcagtaagctctatgacccgctgtaccaccccagcatgttctgcgccggcggagggcaagaccagaaggactcctgcaacggtgactctggggggcccctgatctgcaacgggtacttgcagggccttgtgtctttcggaaaacccctcctccctcagacccagcggtccaatgccacctagactctccctgtacacagtgcccccttgtggcacgttgacccaaccttaccagttggtttttcattttttgtccctttcccctagatccagaaataaagtctaagagaagcgca

SEQ ID NO: 116282 - DNA, 1195 bp, Homo sapiens
gccgactactactactactactactaaattcgcggccggtcgaccagaaggactcctgcaacggtgactctggggggcccctgatctgcaacgggtacttgcagggccttgtgtctttcggaaaagccccgtgtggccaagttggcgtgccaggtgtctacaccaacctctgcaaattcactgagtggatagagaaaaccgtccaggccagttaactctggggactgggaacccatgaaattgacccccaaatacatcctgcggaaggaattcaggaatatctgttcccagcccctcctccctcaggcccaggagtccaggcccccagcccctcctccctcaaaccaagggtacagatccccagcccctcctccctcagacccaggagtccagaccccccagcccctcctccctcagacccaggagtccagcccctcctccctcagacccaggagtccagaccccccagcccctcctccctcagacccaggggtccaggcccccaacccctcctccctcagactcagaggtccaagcccccaacccctccttccccagacccagaggtccaggtcccagcccctcctccctcagacccagcggtccaatgccacctagactctccctgtacacagtgcccccttgtggcacgttgacccaaccttaccagttggtttttcattttttgtccctttcccctagatccagaaataaagtctaagagaagcgcaggttctgtttgtagtgtcctccttgcttccccttccattcaagagattccagcaaatggctttccctccatgggtcgcatttccctatctgggaaatgcgagctttgaccaggagggccacagagtttcagagggaggggccattccctggatagttaagagaaaccagtgccatggatgttgtccagtttctgaaaagtcaggtcagcaaatggtaaccgtagagattttcttgcttagtttaactattcagctttagttgatctatattcatttttgtcttcttaactgcatttcaagaatttttaatttgcatgtgtctcagaagttggctgctgcagctagagtctagtggggagaattgtggcgagggctactgtgagtgacagcaacagagaccaaggagtagaaagagggaagtttgaggggcacaatggggcaactgaggggcaaggagatgggag

SEQ ID NO: 116283 - DNA, 240 bp, Homo sapiens
aggggagaggaaaatggactcctgaactacagaggagggccccagggcctctgccctcagagaatgatgtacaaggtgggattagagcagctaagtttgtcatctaatcatggagctcaggactcagaacaaactgcaggcatccctactacaggccagggattgtacacggccatcctccttcagccaacaaggttactcacagcatcccgaattcagacaggtaagcggcgtggccag

SEQ ID NO: 116284 - DNA, 417 bp, Homo sapiens
atccttgcattgctggtctgctgaaaggagggcatcaatcatcccaaggagctcctcagtctcctgacatatcataagcaaaaagaggatagcttttattcatgatgtgaccagttacattcatatcaataatacatgctcatgttagtgagaggggcagcaatcttggactgttatgacactttaaacatgctccaaacaaggccgggtgcagcagctcaagcctgtaatcccagtactttgggaggccatggtgggcggatcacttgaggctaggagttcgagaccagcctggtcaacatggtgaaacccctgtccctactaaaaatacaaaaattagccaggcgtggtggcacgcgcctgtaatctcagctacttgggaggctgaagcaggagaatcgcctgaacctaggaggt

SEQ ID NO: 116285 - DNA, 714 bp, Homo sapiens
agaggtgcatccacctcagctccctgtgccttggcaggggctgactggacactggccaaggctcaggcaggcaaagatggtgctgagctcaggggctgatacccaagagccctagactcaggatctggtttctgtgtccccctgccttgggctgacagttcagggtgaggccaaaagtcctggccaggccgggccatgagaggccctggtgctccctggggccccatgaggccctcgtgtgcattccttttatgaacttagtggccaggacatctgggaaaagcataaagggccatgttatctccccagggacccaagagcttttctctccagccatggggagggtgaagaggagactcagagatgggtcctctctctcaaacaggctggtctaacccccagtgtacagatgggggaaactgaggccaagtgaggagtcaggagcagagctgaggtcagaacccaatccaggggtaaggctggctctggggagagagtccttggtcctgccctatggcaccaccacttccctgtacagcccttggggactctagaggcgactcccctccagccagctccgtgccttgggcactacccagccttccatggagcccctccctgctctgactttgaagagccctggcagaagtggttgtgctgagcccaccgtggagttccttatccacaagggcccccgggaatggtggggcccag

SEQ ID NO: 116286 - DNA, 379 bp, Homo sapiens
gaaatacatgtttctgtagcatgattgcagcctactgcagtccagtatacttgggggtgagtcttttcagtgataaacacacctccagtagcagagcagcatattgtacttccaggtggaagaagacctgcctgtgctgcgcaactgagggcaggatactcccagagagggactctgtagcctctctgcctgccattgaggcttgttgccttggcaactaaaacacagccatccatcctttccccaggcagggagctccagtcatccttgactttgccatgaccttttctcctcccctttacaatctgtttagggttctgccatgcatctcccaggcagctttgaattttctctcccttggaaatctccaggccacctc

SEQ ID NO: 116287 - DNA, 566 bp, Homo sapiens
ggccgactgagtactctgtttctaagcaacaaaactcttcagaaacttggttataagtttttatactgtaatttcttgccagtttgtaggtgaggtttttatattataccttagttatctctgtcttctttccctagtatttatgtgtaatgtctttattccttagactatggtctccgtggaagattactgatactcccactagtattaataacaatgttaggtaacatttactgaatgtttactgagtgccaggtaatgttctaattgctttacatgtattaggctatgtattcctcacatgaaccatatgaaagagatactcttattgttgtcattttagaagtgaagaaactgaggcacagaaaacttaagtaattagtccaattcatacaggtagtatatggtagaactgaagcagttgggccccaggtctttttttttctttctttttcttctgccgccgactcctccaccaggtctatgcctttaaccatcatactatactgctctttcctttgtgagtgctatttccatgtgcattttattatagggcatccatacag

SEQ ID NO: 116288 - DNA, 614 bp, Homo sapiens
ttggccaaggtttctccaggtaattagtgggatatctaagttttgaatgccagtcttcagaattcagggtctgtattttttaattttttgagtgcttactatgtgccaagcactttactaggagcagggtaatacactggtatgtaaaaaaggccatggcctcatagttcttaggatctagtctttctatttaatataaaaaaaaattatgggtttagctcgttgtcttcaaattgggattcatggacttattctggtatttttaggaatccgcaagtctacacaagaatctttaaattgtgtgttttcattttgataacatagttcaagaaataataatataagctgagcacagtggttcatgcctgtaaccccaagactttgggaagccacggtgggtggatcacttgaggccaggagttcaaaatcaacctggccaacatggcgaaaccccatctgtactaaaaatacaaaaattagtcaggtgtagtggcgcacatctgtagtcccagctactctcgaaaaaacagaaacaaaaactctgacatgtagagtatgtagatgtagagaaaaaagtcaactgattgttgcaaaaaatgtctatttttaatctt

SEQ ID NO: 116289 - DNA, 618 bp, Homo sapiens
ttggccaaggtttctccaggtaattagtgggatatctaagttttgaatgccagtcttcagaattcagggtctgtattttttaattttttgagtgcttactatgtgccaagcactttactaggagcagggtaatacactggtatgtaaaaaaggccatggcctcatagttcttaggatctagtctttctatttaatataaaaaaaaattatgggtttagctcgttgtcttcaaattgggattcatggacttattctggtatttttaggaatccgcaagtctacacaagaatctttaaattgtgtgttttcattttgataacatagttcaagaaataataatataagctgagcacagtggttcatgcctgtaaccccaagactttgggaagccacggtgggtggatcacttgaggccaggagttcaaaatcaacctggccaacatggcgaaaccccatctgtactaaaaatacaaaaattagtcaggtgtagtggcgcacatctgtagtcccagctactcgggaggctgaggcacgagaatcacttgaacccaggggaggcagagattgcagatcactccactgcactccagcctgggtgactgagtgagaccctgtctg

SEQ ID NO: 116290 - DNA, 841 bp, Homo sapiens
atcctaatcacacaagaccttaaaagctgagaacttcctcctgctggggacaggacagatgaggcagaaggggaggttagggaggtttgaagagtgagaagaacttctgcagtggctgacttggaagatgaaggaggttatgaaccagggaatgggggcagcctctagaggctgagaacctgctgacacctacccacaaccgctaaggaaatgaagactttaattccacaactgcatgcaactaaactcagccaacaacctgaataagtcggaaaaagtcttctccagagcctccagataagaggccaggctggcgacaccttgattttgaccttgtgagacctagagcagagaaactagccaagatcactcagacttctgatctacagaactgtgagaccgtaaatttatgttgtattaagccactaattgcgtgggaatttgttacaggagcaatagaaaatgaatacaccttctgatgtagtttaatcagttgacattaggggtgacaccaagatgtgctacactgaacccaacttctgcatgtttaagacaagacgcaaggtcaaaaatttacatcaggtatctgaatgtgtagcatatacaactgagtgttgaaagaagacaaaatcgttttcatcacgaagaatatgtgctcagtaagaatcagaatgttcaattgtgtgaaggtgggagatgggaagattggtattatggcctggatccagaaatcagtcttccactataggaaatgggaatttaaagatgatcagaagacagttgggagcagagtgagaataagaaccctcaactgctgtctcacctttcagatcacgaagaa

SEQ ID NO: 116291 - DNA, 533 bp, Homo sapiens
atcctaatcacacaagaccttaaaagctgagaacttcctcctgctggggacaggacagatgaggcagaaggggaggttagggaggtttgaagagtgagaagaacttctgcagtggctgacttggaagatgaaggaggttatgaaccagggaatgggggcagcctctagaggctgagaacctgctgacacctacccacaaccgctaaggaaatgaagactttaattccacaactgcatgcaactaaactcagccaacaacctgaataagtcggaaaaagtcttctccagagcctccagataagaggccaggctggcgacaccttgattttgaccttgtgagacctagagcagagaaactagccaagatcactcagacttctgatctacagaactgtgagaccgtaaatttatgttgtattaagccactaattgcgtgggaatttgttacaggagcaatagaaaatgaatacaccttctgatgtagtttaatcagttgacattagactcctcccgtttgtaatatggagatttat

SEQ ID NO: 116292 - DNA, 555 bp, Homo sapiens
tgcctgggaacctgggggctgtacaaagagataaagaattgaagaacctaagatctctaaaggaggtttaagtgtgtcttgggattggacctttagggaggcttttaaagagaactgctttttctagactgacattcttagatagcacagctcctgtgttgatcatctttgcacagccaggctgtagcctagtgtctaagatgtaggaggcagcctataaatggttgttgatgaaataagtgaaagaaagaaaacttttccctctggcaaggaaagactcagataaaattccccatgacttctaaaggtgctcctgggcattacttttcattgtttttcctggggatgctgattcctcagaatgtcgttgtattatagtacattccttaagggatatggttttcattttcctgaatgttgctcctttctctcattttaccagcaacttgttactccctttcactttcagactcttttctctctttcccttctccttcagcaacttctctccccattgaagttagaagtaaaatgtaacaattaatcaaccatttt

SEQ ID NO: 116293 - DNA, 2348 bp, Homo sapiens
  misc_feature (78)..(78): n is a, c, g, or t
  misc_feature (418)..(418): n is a, c, g, or t
  misc_feature (2343)..(2343): n is a, c, g, or t
gacgtccccggcacgctgatggagcccgggcgcggcgcggggcccgcgggcatggcggagcctcgggcgaaggcggcncggccggggccccagcgctttctgcggcgcagcgtggtagagtcggaccaggaggagcgccgggcttggaggcagccgaggcgccgggcccgcagcccccgcagcccctgcagcgccgggtgcttctgtctgaagacgcgccgcctctcgcggagcgcgcccgcggacgcccgccgcccccgcgcccgcagcgctggtagcgcagccgggagcccccggagcccccgcggacgccggccccgagcccgtgggcacgcaggagcccggcccggaccccatcgcagccgctgtcgaaaccgcgcctgcccccgacggcggccccagggaggaggcggcggcnaccgtgaggaaggaggatgagggggcggccgaggcgaagcctgagcccgggcgcactcgccgggacgagcccgaagaggaggaggacgacgaggacgacctcaaggccgtggccacctctctggacggccgcttcctcaagttcgacatcgagctgggccgcggttccttcaagacggtctacaaggggctggacacggagacctgggtggaggtggcctggtgtgagctgcaggaccggaagctcaccaagctggagcggcagcggttcaaggaagaggctgagatgctgaaaggcctgcagcaccccaacatcgtgcgcttctacgacttctgggagtccagcgccaagggcaagcggtgcattgtgctggtgacggagctgatgacctcagggacgctgaagacatacctgaagcggttcaaggtgatgaagcccaaggttctccgcagctggtgccggcagatcctgaagggcctgctgttcctgcacacaaggacgccacccatcatccaccgagacctgaaatgtgacaatattttcatcaccggaccaactgggtctgtgaagattggcgacttgggcctggccactctgaaaagagcgtcatttgccaaaagtgtgataggtactcccgagttcatggcgcccgagatgtacgaggagcactacgatgagtccgtggacgtctatgcctttgggatgtgcatgctggagatggccacctcggagtacccctactcggagtgccagaatgcggcccagatctaccgcaaggtcacctgtggtatcaagccggccagctttgagaaagtgcacgatcctgaaatcaaggagattattggggagtgtatctgcaaaaacaaggaggaaaggtacgagatcaaagacctgctgagccacgccttcttcgcagaggacacaggcgtgagggtggagctcgcggaggaggaccacggcaggaagtccaccatcgccctgaggctctgggtggaagaccccaagaaactgaagggaaagcccaaggacaatggagccatagagttcaccttcgacctggagaaggagacgccggatgaggtggcccaagagatgattgagtctggattcttccacgagagtgacgtcaagatcgtggccaagtccatccgtgaccgcgtggccttgatccagtggcggcgggagaggatctggcccgcgctgcagcccaaggagcagcaggatgtgggcagcccggacaaggccaggggtccgccggtgcccctgcaggtccaggtgacctaccatgcacaggctgggcagcccgggccaccagagcccgaggagccggaggccgaccagcacctcctgccacctacgttgccgaccagcgccacctccctggcctcggacagcaccttcgacagcggccagggctctaccgtgtactcagactcgcagagcagccagcagagcgtgatgcttggctcccttgccgacgcagcgccgtccccggcccagtgtgtgtgcagcccccctgtgagcgaggggcccgtcctgccgcagagcctgccctcgctgggggcctaccagcagcccacggctgcacctcctccgctggcccagccgacacccctgccgcaggtcctggccccacagcccgtggtccccctccagccggttcccccccacctgccaccgtacctggctccagcctcccaggtgggggcccccgctcagctgaagcccctccagatgccacaggcgcccctgcagccgcttgctcaagtccctccgcagatgcccccgattcctgttgtgccccccatcacgcccctggcgggaatcgacggcctccctccggccctcccagacctgccgaccgcgactgtgcctcccgtgccaccacctcagtatttctctccagccgtgatcttgccgagccncgctg

SEQ ID NO: 116294 - DNA, 437 bp, Homo sapiens
actcctgaccttaggtgatccacccgccccagcctcccaaagtgctggcattacaggcgtgagccactgcgcctggccgaagctattgtttttatctgagtatttggtgacttacacaagcagtccccaacctttttgggggtggtttcggagatgaaactgttccacctcagatgatcaggcattagttagattcccataaggagtgcagcaacctagatctctcacatgcacagttcacaatagagtttgtgctcctatgagaatctaatgccaccgctgatctgacaggaggcagagctcaggtagtaatgctcacttgcccaccgctcacctcctgctgtgcagcccagttcccaacaggtcaggtccaagttccaggggttagggatccctgacttacacaaatgggtggaaatacaatgtttagttttgta

SEQ ID NO: 116295 - DNA, 206 bp, Homo sapiens
cccacattagggaagtggtggccgtgagagctgggcagcgaatttacagggggttgctggggagttgcaccttacatttctcggcaacgtccacattctgcaatagggcaagcttggcatcagggagactaagtgaaaagctactgtggtaaggcatggaagtggcttgggctaacgcagttagcagtagagacggtgacaaatgg

SEQ ID NO: 116296 - DNA, 287 bp, Homo sapiens
gacaatcaaaagctagtcctgtgaggtaagacacaggagatggacataggcaggaaggttctcaagatcagtccatcagaattgatgccctaatctctatgccctcatggggtcagggagacctgctgagttatttactgcctcaagtcagataagtctgggcatcaaggtgggctggtcctaactaggaggagtggaggaggaagctagactgtgctgacctggagtccagaacactgaggttattgggggaggagtctccacttgcacttcccagagatccctcc

SEQ ID NO: 116297 - DNA, 660 bp, Homo sapiens
gctctgccagtagcagaaattaagagtatttctagaaacattaatattggtgtatgtatagtaggtttagatttaaagacctttattcctaacatgactacaggctacttcagacaactatgacagggacttgaaaatggacagtagacttcctatagagaggatctggagggcacttaggtccacggaaatttctaaagtatgactactaacataccatgattagcccctgatatttaccctatcttacttgctccactgctttgttgctgaatgaaaacatagacaacaggaagtgggaaataggttttgaacagtttagttcaaaataaagtgtgggtgaacatggttaagtcatgggaatattcttaaatatgctcaatttgacattggtgtctttaggtagttaaatgttgcaaattttattgactcaagacaaaaattccatccaaatgttaaacaagaagttttaatctgctccatgatcaagctttaagaagcatgtggactctctgaagttttgtgcaatacagcatatatagaaactatgtgcatttttctagggagaggatctatagctttcagaagaatctcagtaggattcttttggggtgagggggaagcaagcaaaaggttggatttgctccatttcctagggtc

SEQ ID NO: 116298 - DNA, 427 bp, Homo sapiens
ctcccattcgttgttcttaagaatccagggcatgaatgcaggaatgagacccagggaagcagagctacagatggccctcaaaatcaggatgggatgtgggctggtttcacttatatcccacacccctttagggatctgaagggactgagttttctcatccccagagatcttggaaccaaaaatctcatgcaagcaaactcatcactggcatttctgagatccagaacacatgtgagtccctcctggctgggctgctcccacatgtccagcaccctgtcggcctgtaacatcaatcagagctgaaggtcagaggtttttcaggttctcgtgaacctcacaagaacatgctgggcctccgatctcaccaacttgtttatcagttccttgtttcgatctgtttatttatttatttttttgttattattat

SEQ ID NO: 116299 - DNA, 500 bp, Homo sapiens
aggggtgtcattgtcagcttcgtgttatgcatgtggtaactgacgctcagcagccggctcatttgcccaggctagggtgcagtttgccctggggtttggagcggaccgtgtgctccagccacaaagccagggccagcatagccaggccaggtctcaggcctgccccctttccatgccacctcgatgcagccaggacatgcggcactgaatgatgcctcccatgcctgcatctgtccagcccctcggcctggctctgtgtcttacctgagagggcggggctgttccccagcagtgccgattgggtgggaggtccttgcagccgcgccctccccaggctggcagcagggggcagtgcagctgtgtctgggctgcagctgctggggtggatggagatgcttcgccccgctgcctctccagccagcacacctgctgaccttggtctccccacctcctccaggccaaggtgtctggcaggggacttggggtccatttgtctctga

SEQ ID NO: 116300 - DNA, 390 bp, Homo sapiens
ccctgttctgctcactcaggttaggtcagtaagatagatacgatccatattttcatggagcttttcacaacccgccatgcatttgaaaattaaagcatttgtcttctattccatcagtggttctcaactaggggtgattttcgccccagcagacatttaagtgtcacaagcagggaatgctgctagtgtccatatgttgaggccagggcaccttacacttggacagcgatacacacacacacacactctctctctctctctcacacacacacacacactcacatggccaaaatgtcaatagtactgaggttaagaaacttattctagatggatataaaggtgcctttattttagagtgtgtatatgtgtgaatgtgcacggggagtgtat

SEQ ID NO: 116301 - DNA, 602 bp, Homo sapiens
atataacctgagtagatagagtggatagatagatagatagatatagatagatgaggtagatgatagatagatagatagaggatggatggatagatagagtgggtggatgaattaatacattgatcggtagatacatagatatgatagactgagataggtagatagatagatacgtacatacatacatacatacatacatagatgggtacatggatatacatagatagatagatagatacttgttcagtagtagacataaggaaaacagccttgaactgagtctgactcgttcttgccaatcttcaaaaccagccccagcttctgttttgtttgttttgttttactgcatctactgacagtaaataaagacatgcagtccaatagccaagcagcctggtgccaagtgtgtctcattttaaatcaatagtgctactgctgccaactggctctgggatccaggaggccagagactgacaacagagaagtatgcatcacgtgtttgcagtaccatctgttctccctaccctatcagagctgtgccaggcctcagtccctggctccagattgtgtggttctgtctaatatctgcctttccctctagg

SEQ ID NO: 116302 - DNA, 127 bp, Homo sapiens
cgtcacccatcacacggaacatcccatcacccgtcacacggaacatcccgtcacccatcacacggaacatcccgtcacccgcagctgcccctgcccctttgtggccagctccccgcctggttcgtct

SEQ ID NO: 116303 - DNA, 519 bp, Homo sapiens
ccttgaacacagtggctccccgcaaacctcagttccctgctcccagtgctggatgaacccagcttcagagcagccccactggcagatacgcaatcagcctgagcagagaaaggggctggggaacatctgaggatgtacaactaaggatggctgaagagcccggaagtacaaagcacatgtttgctgagtgctaactctgtgagtcctgcactgagcaagcactctttgccatcatctgatggaaccccatgagacaggactgatccccattttacagatgaggacactgaggctcagggaggccgggtaactttcaaaggtcacaaatcaggtgagcggctgaactccaaagctcaccctcttgaccttcacactctctagagccaggtggcctgagtttgatcttggctgtgccacttaccagctgtgtgaccttccccaatctacttaatccctgtgtgttcccctccccctggagatagtaacaatggccctttctcatggagttgttgggaagat

SEQ ID NO: 116304 - DNA, 300 bp, Homo sapiens
agctgttttctgctccaccatggaagtctcacatgcatcacatctattcatatccatttgccacaactagacaaaaagtcctttttaaaatctgcctagagatcaggaagtattatctctggatgcctaggcaggagaggtgaatcagatattggtgggcactagtgtgttctatgatacatagcttaataaaaataagtttcagataaatctaaatatacattagaatactgtaaccacagtagaaaaaaatattggctcctttttgtgataaactaatgatggtaaatgcaccctatt

SEQ ID NO: 116305 - DNA, 185 bp, Homo sapiens
ggcgttggtgttgcgtgtgggtgtggctcacttgtggcatgtgaagagcgtgtggagcaccccaaggctttaggagtcactgcctctggaaggcccttcccacctccctccatggggagacagccttagtttctgttcatcctcctctgttcctcctgcacagccaggcaggcacctgtgcattt

SEQ ID NO: 116306 - DNA, 390 bp, Homo sapiens
tgacactggattttgcaatgactttttggggaaaatgtaacagaaaaaaacagataaactggactacataaaaatttaaaacttctgtgaatcacagggcaaaaaagggttaaaaggcaatccacagaatgggagaaaatatctgcaaatcatatctgataaggggttcatacacttaccaatataaagaactcctaccataaactgtaataataaacacacaacgccactaagaaataaaaaaaggatctgaacagacacttctctaaagaagatagacaaatggccaataagcacacaaaaaaacgttcagtgtcattaatcactatggaaatgcaaatagaaaccacaatgagataccacctcacacccagcaggatagctactatt

SEQ ID NO: 116307 - DNA, 251 bp, Homo sapiens
ccacttcagagattaacgctgtgatccagatgagatgttatgaaggccctaatgaggacagtggccatggggtagggcagaggaacagagcaacaagtgtctagagcaggggtgtccaatcttttggcttccctgggccacatcagaagaagaattgtcttgggccacagcagccaagggaccaccattggcagcagcaccaataaaacaggagctgggccaggtgcagtggctcacacctgtaatcccag

SEQ ID NO: 116308 - DNA, 719 bp, Homo sapiens
gggtgggtgtaaagtaagcccatgcgtggcaggcagtgctggggcgtggggtatatgtgatctgcactgtcagggctgctgggccataggtagggagcctccctctacccagataagcctctgttgtggagtaactattgcagtgacctctgggatgagagtttctatggtcagaggtgagtcaaggtgagtctaaaaacatatacaaaggccactgtctgggtcatgccagggcagctagcagccagggtctctgagttgggaggggttctattatgtggtcagcatatggggagggccctgttttctgagacgcctcaggaagaatacccctatggataaggagttgataagtgatggagttgacatcccactctgggcatccagggacagtgggagtcttcctggcggtgggccaccaggcagggggaccctctggatcagagcaacctcatagtcatgagacgatgagctggtcctcatctttccacctgccagcccctttctgcttcctccagcacgtttttatccgtgggaaaacaggtgaggccccagcttgttagaaagctgactgcatcgagacaccgtggattctcaaaggtcttgtggatatatgaggcgagtggctagaagttttgctgagaatccactcatttatctgtttatttgagacggggtctcactctgttacccaggctggagtgcggtggcaccatcac

SEQ ID NO: 116309 - DNA, 670 bp, Homo sapiens
tgggagctgctatcggagagtcttgcattctgggcccagccacatccctgctcttggtaaagatgcagaaactgaggcccgggaccacacacctgacaccaagtggactaggattcaggccgttgaccatattctttcaacttcaggagcaacagcacctggaggacccaaatttgctgtcatcctccacgaggcctcagcagtctccaacatggaagggcactgagccagcctgggggtttccagggaccttcctgactgaacactggaaagaccctttcattccatcctgtcccccaggtgggaccccacgccctgaggtggaacagaggtgaagaggaaggggagcggctcctgtgcattttaatagaaatgaattcaagttctctcctgaaggactcagttccttgggcccaaacttctccagtctctcatgaaaggagatgaactgcttcagataaagtgctaatcttcagcctcaaagtcctcagaagggccttctccacgctgctgggctgtgaaaggctgaaggaggtggagctggggaggaagatgaagatctagaggtctgagagagcttcaactgagtagagagcagcctgggttccaaagtcctggccccagctctgtgtagccatgtgactttagttcaggcccttgacttctctaa

SEQ ID NO: 116310 - DNA, 128 bp, Homo sapiens
catgggaggcccagaggatgcatcatattctatggccatggggaatgcactggcgtgaggggcactagcatcactaagaagttcagagaaggctctcctctggagggaagggctgacggtaggagagg

SEQ ID NO: 116311 - DNA, 223 bp, Homo sapiens
aaatacctttaggtcatataattcctaaggatataatgcaaatgccaacataatgtttatagtatggatacattagaagtatcttaattaattcaagatacatatttggggttttttgtggctaatcataagaagttgttctggttttgtttttctcagtcctcccaccagataattattttagatcagttttagatcaagtgaaaacctttcttagaaggct

SEQ ID NO: 116312 - DNA, 226 bp, Homo sapiens
tcagggatacagttgccagaacttcccagttcaggtggaggtttcctctgggtggtacaaacttgcttgatttacttctgtaaatggtgtcaggatccaatgtcaatgtcaggcactcctgatccgaatgggtcactaaggaaatgagctctgaattaagagagactggcttcaatgcacttattttcattattattaaatagtccatgggatttctcctaataca

SEQ ID NO: 116313 - DNA, 529 bp, Homo sapiens
cttctctgtaagtgtctataggtaagtggttcattctttcctggagtctaccgagagtgttctaaaactctcagagcttatcagaatcctctatggcaagcttgtccaacccacagcccgcaagccatatgcgacccaggatggatgcgaatgaggctcaacggaaattcgtaaactttcttaaaacatcgtaagatttgtgtgtgtgtgtgatttttattttttgtccatctgacagttgctgttgttttcattgttaggatatgagttccagttccagtatttctgtggcagagccttttgttctttagcatgtagggatttatttaggtctattacttgttttcactttctctttgccttttcttaaatttcaactttaataatagcctttaatagaataacagtgcattagctttcattgactacatgtatgctgaagaattcatgctaaagaaataataaggaatgtgtgccaagatgtggctatgaggatgttcattactagattgtttataatagcaagaca

SEQ ID NO: 116314 - DNA, 241 bp, Homo sapiens
ctgtcagtcgctctgggggatcagagtcacggcatcattccatatctctaatgcctatcctttaagaagcatggatacacacttatggaatgagtgaatgcaatggtcataatatatcatctcatatcatcttacatcagttttatcaggacaggaccatgcacaaacatggacaataattttcctttaggaaaaagaaatcttacataatttatcttttctgccaagagcgactgccatg

SEQ ID NO: 116315 - DNA, 793 bp, Homo sapiens
tgccatgcctttaagtgcactaatcttttcttgtacaatatttaatctgctcttactcccatccagtgttgttgctgtttttttgagacattgtagttttcatctttaaaatttcactttaggtcttctttatatcttttatatctctccctaactttttgaaaatatagtgataataactgctttaattactttctctgccaattctaacatctgtgtcagttctaggcctgttttgattgattgactttcttctcattattgatcatgttttccttcctctttgtatgcctggtaaactttgattgactgccaaacatcgcaaattttaccttgttgtttcctgaatatctttgtattcctatgaatcttgagctttgttctgggatacagttaaattttttgggaacaactttcttctaagtctttcatgattttttaggtgggtttggagcagtgctcagtgtagaactagtaattagtgtagagctaattattcctcacactgaggcaagacattcctgagtactctacccaatgccctgtaaattataagtttttccagtatggctggaggcaaacaatttacattttcttatgaaaatgaagtctgcaaacaagattactttattaaatcaccaccttctcagctgttctcctctgtgacctcttggaaaaagcggtttttcatcctgtcaaaggctggggaaaagagctttagtctttcctattataaagaccatcatcaccgaggttccattgaaattgatcagtgtgtatccaagcaggaaaa

SEQ ID NO: 116316 - DNA, 261 bp, Homo sapiens
ctgaggtgggagaatcacttgaacccaggaggcagaggttgcagtgagctgagactgcaccactgcactccagcctggcgacagggtgagactccatcttaaaaaaaaaaaaaaatagaaaacgaaaaaaaaagaaaattcaatgtgttgagattatcagggagggcttcttggatgtggtgcctgatatgggcctgaaggaaagacaatatttctatagcagggttggtaagggctgtagcaggtagaaggaactccagg

SEQ ID NO: 116317 - DNA, 341 bp, Homo sapiens
ataaactgactataggaagaagagagcttaggaggcagcccatgggcaggtcctggcaatgaatgaaaaaaaaaaaaaaacaaaaaaaaaaagaggcagctgctgaatatggttaggggtgatgtggctgtggctgaagctcaccctctgcaaagcacatctgcaaacaaggggtgcagcagggcaaggagcaaacgcagaggggctggagtccagcaacctcgggttgaaatctctgggtcacttaagagacatgtgactttgggaagatccctaaacatctgtgaacttctgtgtcctcctctctgaagtgggcatcataatcatccttccctcgaagg

SEQ ID NO: 116318 - DNA, 217 bp, Homo sapiens
tgaagaggccttactggggctagccaggacctgtggagaatgtggcttgaatgtcccagcccaaatctagccagctgtgtggctgggggtttgccgctcccagctcagggaagcccaggcacttggcttgtcccctacccttctctccacgacccgtgcagggtccccggctttttgctctgatgttccagtgaggctgcaaggcacttgctgtcct

SEQ ID NO: 116319 - DNA, 455 bp, Homo sapiens
tgatgatgcttatgttgatctcttggctaaggtgatgtgcatcaggtcccacccctaaatagttactatttttgtgtttgtatcttgcagagatatactctttgtaaatattctgtttctcattgaatttctcccccattggttttagcatgcaatgaaatttctgtttgcaacaattaaaacttggtggtcatcaaatggtgactttctatttccttcctttctcctacatttattagctgacactccactataagaaagcactttcccttctcccccacttatttctctattcatccatttctttcttttaatacaaacatatgcatttttcttaagaatcatcacctatttaataaataatcacctgttactataattagtagtttgaggctcaaattgtcccagtgctcatcacacaagccccatcactctttggccacttgttttttcct

SEQ ID NO: 116320 - DNA, 204 bp, Homo sapiens
gtgcacgtggcttgctgctgtgggaacatcctgtgccactgcttcaacaaatacaggaagaatgaagccaagcgcagagaggtaataatgaatggccttaatagtctctttttggttgtgagcataaatgatacaatcttagggggtgagaatttgagagttctaccaatgttaatgcaaacaccctttgacccagcaattcca

SEQ ID NO: 116321 - DNA, 365 bp, Homo sapiens
ctgtttgggaggatcacttcctccacaacaaagtattattctggaatagactgttcttttgtcttttttccatttatcattccattttgatcccgtcatattatccgcctctaaaaaagtgctctaaacgtccctttgcttccactgcttctaaggtgaggacatgaattgacttgattttctgagttcatacctgtgaaagccagatgtttacctttccccttcattttctgtgtgttccaaatcacaagatagtccttttaaaagttactcctgtagcagtcatcttcacccattattataagctctatcactttttaaaaaggtacaagaacactgtgtaaacggtagattaaaaattttaa

SEQ ID NO: 116322 - DNA, 462 bp, Homo sapiens
accaaggaggcagcgtccgcaggaggtggaggcgttggcgggggggcgtgcgggtgcggtaggggtgggcaggcggggtgggcggggcctccgcggcggcgggcggggcgtgggtgggtcttccctactggagtcacccacgtccgcgcccggccgccgcggaggcctcagcgaacaccgctgcgcaccctccttagccgctaccgccgcaactgcgacccggcagcgaacacagcgagtccaatgcaccggctggactgcggaaccgcactgcccaaaccgacggacacgtccgacgccaaagcgccagactctcagcgcaaagaaccaacagtacacacacagcgcaagaagggcagcgaagcgctagcgaaaagcggaaggggacaacccgccgcaaacaacccaacgcacacaacacaccccgcaccaaagcatcaaagagacagacccaaccaaacg

SEQ ID NO: 116323 - DNA, 262 bp, Homo sapiens
tttattcttattctatcactgcatatacaattttcatatgaatgcatacttttatccatttgttatttatttaatgaatatctcatttaatcttcacaaacagcttgagaagaaggttttaatcttcccaattttgcaaccaggaagttaaggcttaaggtgggtgagtaatttacacaatgttctatgatttacacttcagcaattctcattctttagtgagtaggtttgcagtgtagactccagtgtagactttaggaga

SEQ ID NO: 116324 - DNA, 2148 bp, Homo sapiens
ggttcatgggtcaggtgtccacaaagcagacccggatgctgtgtgagccacagtcctctgcccacaaggtgcccggccttgaatgtccagcggtgactttgacctctgatgagccagcctggaagaggacagacctgtggagaagaggctcagggccccaagagcaggcctggcggggtgctgagggcaaggtggctatggcaggcttcatggaggggaggcggccaggagcctggtttggctgagcttgggcatggagtgggtaggcctctggtgcctgcagagcctcatgtaactggcatcaggactacccagttgccgccatgctcctggccccctacctgccttctccctgtgggtctctctctgtactacacacaccccgcctcttgaaggctgtctgcttccatctgacatgcattagaccccacatgcctgcaaacccacaccagggcacactggcttgggagcagatagggttactggttcctgaagctagggagccctcctcatctcagcctctctagttagtaactgtttgaccttgaacagatcgcttgatatcattaggtctcagcttcctcatctgtaaaatgggttcatgtttagtgtgtaggctggtgagagtcaagtgaaatctctgaatatgtaaagggactttttaaaccagtgattcttggccgggcgcagtggctcacgcctgtaatctcagcatttttggaggccgaggcaggcagatcacctgaggtcgggagttcgagatagcctgaccaacatggagaaaccttgtctctactaaaaatacaaaattagctgggcgcagtggtacatgcctgtaatcccagctactcaggaggctgaggcaggagaatcgcttgaacccaggaggttgcagtgagccaagatcacgccattgtactccagcccggggaacaagaacaaaactccgtctcaaaaaataaaataaataaaccagtgattctcagcgctggttgtgcacagcatccctgggacctttaacatctacagattgctggtccaccccaacagagaccaacttcaggagtccagacagcagtccagggggtgagatagtgtcgcctcgtctctctctgctcttctctgctacatacagctaaacggacctgcaaatgatacggcagacggttggtcacaggacaactctaaaggtgggaacagcaaagtggcctggcgaggcagcctcgggacctcaagggacagcagccctgcctgcccactcccacccccacccagcagcaggaggtggcccaggccagcagactcccagcctcccatgcagtggcaggaggtggcccagacctgcagactcccagcctcccatgtggtggcaaaaggtgacgaggcaggtgttttcctcctgcagccacactagcagatgggcaggtggccagcaggcaccccgcagtcctgggagtgaacccaggggcatggtctccacccgtggcaggcatctcccacccccacccagcgacacaggacaccccaagaagggcattttatccccacaggcagcaccggcagggacccaggtgggcagaccggcagctccaggtgaatttagcagaccagaatagcacttcagcaagcattctgaaaagcaaattgtcattggaaccgtagcctccaaaagaacaggctgtacacgcgaaacctaaacagggtgacagcctgctcaaatagaggatttaacacttaacaagatcagtcttctaacataatatccaaaatgcccaggatactgcagaaaaattacccgtcacaccaagaacaccgaagatcaatgatttgaatgaaaaaagacagcagaaggcccggcgcagtggctcacacctgtaatcccagcactttgggaggccgaggaggacggatcagatcacctgagatcaggagttgaagacgagcccgatcaacatggagaaaccccgtctctactaaaaatacaaaatcagccgggcatggtggcacattcctgtaatcccagctactagggagggtgaggcaggagagtcacttgaacccgggaggcggaggttgtggtgagccgagatggtgccattgcactccagcctgggcaacaagagtgaaactccatctcaaaaaaaaaag

SEQ ID NO: 116325 - DNA, 302 bp, Homo sapiens
agatgccagtgaccttagcaagttcaagggtcgagtggagatggcagggggcagaccagcaattcaaacacactgcgggagaggaggtgctagccacagcagaggcacagcagggacccaaaccgcctgagagcagggcttgggaaggacagtctctgtggtgtccgagatgagtctcaaaggagatgggaaatgaccagagaggagatggcagagtctgtgtggggggcacaggctgccaggctgttctgcacaaagaccaaaggagagaacagcgcccacgagaccctgggacgccttgg

SEQ ID NO: 116326 - DNA, 143 bp, Homo sapiens
ggctttactccaagagactcaaagagggttagccatttgtctctgactgctagctgtgctgacagaagagagggagcagacagctgaggctccatgtagcataccttgccatagcaggccccatgcactgtgttttgcaaatt

SEQ ID NO: 116327 - DNA, 237 bp, Homo sapiens
aaagaaatggtccacaaacctcatcttcagtgcatactggtcacccaaattatagaggtactcatagcgcgtgggttccttacaggcctgatgggacaaaagttgggattcaagaattgtcaaggggaagggtcctaataaacatcccagtctttcagatgggagccttgaaaggctatatactggtaataaagctagtctggtaatagactagcactaacaaagactgaaacccag

SEQ ID NO: 116328 - DNA, 478 bp, Homo sapiens
gtgtggcccaagacaattcttccaatgtggcccagggaagccaaaagattggcacccctgctctatgtactgtatgattttatttatacgtcattctggaaaaagctaagttacagagacagaaaacatcagaagttgtcagggactggggttgggaagggagctggttgcatgagggaatttttgggggtgttgaaaatggtctatatcttaattgtagtgatggttacatgaaagtatgtgtttctcaaaactgtacaacagagtgaattttaacttatgcaaacccgcccatcttggttgctaagagtctctatggcacaggggtaaactggtggaacgccactccacgcggtgactgggggaacctggggatgcatgtagagtgtgacggtgactggggaacctggggatgcatgtagagtgtgacggtgactgggggaacctggggatgcatgtagagtgtgacggtgactgg

SEQ ID NO: 116329 - DNA, 776 bp, Homo sapiens
tgaaatgacagataaagccataccatataacaacttattgaagatatattaaaactggcaggttaacccacatctagagccagaaagcataaatatttttgacattgattgtcacaaagaaataatgtgaaagtatagggtattttggcatacaaattttgtgtaaatgtcaagaattcaaaggcttttatatctttgtttttggtgaggaattactaatactaaacaactttgtattatcagatattaagactccttttcattctcactaatgttcatcttaatgttttccaaactacactttaaaaccagagctgcaatttctaccacactaatgggaaaatttctggcaataacttttttgcttttataagataaaatattggtgaatgatcaatatgtgatcaacagtcttctgcatgctatttagtataaaactgcctgtttggtttttaaactggaaccactatttacaaaggatgactttaattggctaattcagaaaaatgcagaattacaaaataatcaacaaatatctgtcaagtaccacctcgttgtgtcatttgccatgggatatataaaatcaagtgttaagatatggtccttgctctcacaaaacttaccaaggaactacctaagcaacaaaataattacttcatgaactaaattgcagcaattaaagccaggtgctgtggtacatgccactgcttaggaagctgaggctcaggagtttgaggccagcctggacaacgtaacaagacttcatgtcaaaaaaa

SEQ ID NO: 116330 - DNA, 585 bp, Homo sapiens
caaaggtccccatctctcagccaggaatcatcagacaacagaggagactgaaaagtcacacctggtactttacaacccggttctacaacatacattgtcttgcctcgtgctcaacagttaaccacaacaatgttaaatgctattatcagtgcctgtgtttcagatgaggaaaccgaggaacagaaagttacacttgcacacactgtgtttacccagtgtgatgaatagcacaggcgctttcttccacaccatcccatccagttctcctaacaaccctggaaggggagcacccgcctgcgggaggaggcaggctctggggcagaggatattgcccaagtcacatgactacttcacaaagcacaccagacaggcctagattttcccactcctctgcacacacccaagcttcactgtaagctccacagtaaaacagacatttaagctccgtacagccctaaggctccctggaggctagaaacttgggctagaaatctgacactaaagaatctcttttctcttgttctcacttgtaaaacagggataagaacacttagcccaaagggttgttggaggacaaaatgagat

SEQ ID NO: 116331 - DNA, 948 bp, Homo sapiens
agcggacagtgaccgccaccgttgcccggggatgggtccctgagacttggcgaagtaggagccctttgtgattgtgcgtcagagtcggggctgagaccagtcctggccaggcagttaccaggacggtctccggaggccgggattcgcggagggtccgccaggaggaagaaacctcagacagatcgccggggacgcagcacgggatcccagcctcaggcgtgcacggacggtgtgcggaatcctccatctcaggaaggccccagtattgccaggctgggagaaacccaagccatgaggatagaccatgaataggagttctggttgacaatcccagttcactcccagcttcaaatacacaaggccaagtgccagatacgggcataaaaagcaattttggaagtggacactccagtcccagctgtcctagccctcagctatttgagttgcatccagacatgtaaatcttcccagctgaggcctcatcattgaggtgcagaaaaggggcatgcccattgtgcctgtttctaaattcctgacccacagaacctctaatcagcaatacaactgggatttgatatcagattcatgcgattccgaagaccctgaccaccaaatgcaaaagtgaaatggtctcatcctacctgcaactgagggtgaaaaatacagcattttccgtatggtccaaaggaggaccatactgttatcatctcaccagtctctgtcaagacacagttcttgaagtcttcaggcaatcatgagtatctgtcccttagcttactcatctttaagaagggagccaaaaaaccttccgacacggtgtgcttactggcccaattcattacccgtctaacgttcctttacttggagttcttccagctggtgaccacaactgggtgtagcatcacttgaactccttgggatattttccaggaacctgagggcacaccc

SEQ ID NO: 116332 - DNA, 382 bp, Homo sapiens
tctccaactatgtccagttttcagcgggtgtatgtgtcccacaccccagaaacacctataaagtcagagacctcagtgagatcctcgccagtctctctcacgtcttctccaccagcccttatgaaccctcctgtctgtgccagctactctccaaccatgcccacatttcagccccagtcagttccaggatcccagggatcaccaccaagctccccactttcactgtgttactccccagactctaccacgtgtttatatccaaacctctggaaatctcctgtctgtcccagctactttccaacctcgcctacatttcagcaggagtccgttgcaggcactgagaaatcaccaccaaactcaccaatttcactgcgttactccc

SEQ ID NO: 116333 - DNA, 206 bp, Homo sapiens
cacacagctctggtcccagttactcaggagactgaggcaggaggattgcttgagcccaggagattgaggctgcagtgagctgtgttcgtgccacaccctgggtgtgtttgcactccaccctgggtgacaaagggagaccctttctcttgggggaaaaaaatggattaagagacctagaaagtaagtccagaagccataagattttt

SEQ ID NO: 116334 - DNA, 431 bp, Homo sapiens
gatcgttaacgagctcagggtgttactgtcactgctgctgtcttgtggatttgaaagtaatgccgtgatgggatgtggtataggtacgggggagtctggttaaaagggaacagggctggagaactctctttgtcagactgtgattccccctgctctgctctttgatttgtggctgccattggtgtttacacagcctttccccgctcacactttccttggttagttgaaaagaaacagcctgttttcctgttactgaatgctggaccgtgggcttacttgttttttactctttttcattcatttgttcattcatttaaatacttactgagcatttgactgcttcccaggctttgtgctaaatgttggctctacagaaatgaaagacctagaccctgcctttcagaggctcataatctagtatttacatctcc

SEQ ID NO: 116335 - DNA, 141 bp, Homo sapiens
tgatttgccttttgtattctgcaggactcctttggcaaatgatgatgtgctttgtggtctttcattcctttctgaagccttaggtttagtatctaccatatgagtgcttctcagcaccacagttgacagccctttgaagat

SEQ ID NO: 116336 - DNA, 706 bp, Homo sapiens
gcgcccaacaactttgaactggcctggggatttctgtgcagaaccaaggactcagtgcttacagctttaagtgctttgtctgacttaatcctaatgctggaggaaaggtctcttaatgtccccaactcatagaggaggaaatgtgtgttaaatgcgtaattattgtgagctgttctatacatgctgggggaggggcagacctcacaggctcaccccaggggttcccctgcagtgaggagacttggggtaggagaaagagggcccatctgtgcagtcactggcatttggtgggtgggggtggtggtcagggaagtggtcactagggctgttttgagaaccacctctcaattcacgatttgccatgacttactgcaaacatggcctgggcagaggctcgcccaggtgccccacctctctggctgcttccttatagttcgggcttcggaagccacattcaaccctggcacacagtggtttttcctcgtgctggggccaccagttctgtgttgggatgcacctactccagccccttcagggagcagtcagcctctaaggcatccctccaggaagctgccctggctgcaacaaagggcctttgtgtgtctgtcccaccagcactctctctcatgccctcaagctgtccctggtcttggcatgggcaatgaacacctgctcacatagggctgatttgcagggttcccccagc

SEQ ID NO: 116337 - DNA, 155 bp, Homo sapiens
aaggcctgtggaatggattatctatgagttgagggaaggcctgtggaacggattatctatgaattgagcggaaggactgtggaacagattatctatgagttgagggaaggcctgtggaacggattatctacgaactgagcagaagtcctgtggaa

SEQ ID NO: 116338 - DNA, 206 bp, Homo sapiens
gactttttatctgtagaagcagaagagatcattttatccatgggcaaccccattatacctgaaaagacatttaactactggctcggcctaaagtgtaaactgtaaaccagattggatatttaatcaaggggctcagaaaaaaatgacaggagtacacgtgtacacgcacacacacacacaccatgtgtttgtgtatatacacacac

SEQ ID NO: 116339 - DNA, 419 bp, Homo sapiens
tcctggctctcctttcagacctgggtgctcaggcccatcttccccgctatgtctcagccccagtaactagaataactgtctctcttggtagaacttaggcaaatgggcactgagaagggtgaccatgtccccacccacctgctgccatcccctgacttcaccagtgggtcagcaacaaggcagggtgctgtatggcagctctggggctcagctccccacctttcactgagcaaaatgccattcagattgagcgtgcgaagccccatggcagtggccatgtacatcagagtcacgtgggatgctgttaaaagtccagatacccacattccagcaccactcccattgagggcacgagctggtgggcttggcacaggactgatggcaagtaccctccacagccccagcaattttgaaacaga

SEQ ID NO: 116340 - DNA, 370 bp, Homo sapiens
tggccctcaccaaacactgaatctgggggtaccttgatcttggacttctgttctccagaactgtgagaaataaattgctgttgcttataagctgtgcaatttatagtggtttattatagcagcccgaatgcagggagatttcttcactcaaaccccccgagaagcagtggaacaacttggtagtaaaagtaggtaagaatgggagcagccagttcatgtttactcaaacgcactgcaccctctctctcacctcacacctgtgtttcattctttcaagtcttcccatctacactctgcctttcttgagatcagatgctgtcccctgtacttgagcactcttccctcacttcttttacctagtgagctctta

SEQ ID NO: 116341 - DNA, 496 bp, Homo sapiens
gcgccaatcaacagtgatgaatagctaaagggacaagtaggtctctaaatttacttcatatctgacagcccttcagcagatatggataatggatccctatgactcacaaatacaactccctcctactacaagcaagccctttcttttccctacaagaaagggcaagaattcctaatgacccctgttcttcctttccccttttcaacaatccaagaaaagtatgttaaacgcctgtagcatcaggttctttgcagctgctgggccagatataaaatgctagtgaaaacacacatccctttttatctcttaagctattactgtgagtcttatgactacatttgaatcagtgttaccaatcaaacgaagttgaaaaaatcaatttgtgtagatgtgtacatctcactactgtaccttgctgacctccagatattcacgtgcctactgcatattaatctgcatcctggaccatttgcaacaagtagatccccacacattt

SEQ ID NO: 116342 - DNA, 402 bp, Homo sapiens
acccagaaggtctggctttatagaggcagccaaatggttcagagtgtaaggcacagagtgaagaactgccaggaacttgacacttgatcagccagcccttcaacaaatctgtgttcatcattatcacattcaagggtgcaaggaaaaacaaacaacacaaataaagctaatgtgaatccaggcctggaaactcactatcctagcagagaaggaagaagatcttattgataagaccttatggagcaacttcaaatacaatctctcatatgatatctcttcacaatgtccctgaattgctattcccagttcatagagaaagaaacagagaccaaatatgccgagcaagttattcaagattacaaaagtattcagtggcattccccacatatgaacaggtgttaa

SEQ ID NO: 116343 - DNA, 134 bp, Homo sapiens
ggggacacaaaaggaagagaaaacacagtccctgccctctgagcttatactgctgtgtgtctgcagaccactgcacaagatataattgcaagctgggtgccgtgactcacacctataatcctagcactttggga

SEQ ID NO: 116344 - DNA, 989 bp, Homo sapiens
gaaatctcttttagagagtgatcaatcatccacttatgcagagtcagctctttcctctgctttcccatgcccaggctgcttctggaatatggaggggctgggtagtgcaataactagaaacacccaactttgggatctgacagtcccaggtttaaatcttgattctatcaattactgtacttcctttgtgaacctgagaaattactcattccctaattttgcagactacagctcatggaggctcataactactttactgcgatagttataaatgttaaatgaagtagtctatgtaaagttgtagccaaataataaatggtccttcattctgcaagtgtgattgacccacaccactttcttgtgtatgatctttaaaaaattatacttagatcttttgtttatagcatggtccctttaaaactataatctagtgtgtgctgttgtcaactgtgtaaacttttagagagacagaattaatcaatgttcattgagtacgcaaagcatgttttgctgtaaaacagaatacagagtgcaaaagccagattttggctgtaaggacaaggactatattccctttgttctttgcatttaggggttgattcacaaatactaaaaactcatttactaactactcagtcatctgcttttacaaacactttttttcataaaaaattcaaacagtacagaaatatttaaagtaaaagtttctcctttccagtcccatttctttactttgccactattaacaatttgatttctagctgaattactttaaaaatgattttaagtggtaacgataatataaatgcataataaattctcaaaggaaatctgctaaatattaagttattactgaatgaaggataatattatttattatttattcatgttttttctccattgttctataatgagctaatactcttaataaagagacaaaggaataaatgcaatgaaaataaattatttcagctgctctgaaactcact

SEQ ID NO: 116345 - DNA, 339 bp, Homo sapiens
aaggggatagattgcatagaggctgagtagtttttacatgtgtggccgagtggttggttggttttcagtgtaagtaggtgttgtcatccacacacctgccaccacctctggcttcattctgtgggtctttgtgcccacccacctggcattgttacctaatttcatctgtaattttgcatcctgcatttctgatgtaacatcacattctcttaccttcacaaagtctagaaatctatggaatgggctgcaaactatggcctgcaggccagtcagtttttttggcacacagtgaggctcatttgtttcaggattatttgtggctgctttcattttatgatg

SEQ ID NO: 116346 - DNA, 815 bp, Homo sapiens
tgataggctcaaatgtgatgggtttagtttagttctgcttgtatttggatgacttttttctttctttctttttatggaatgtaaggcaagcagatatatcagagtttgtcctatataggagccgtgaagcaagtattttggaaaatactgtatttgaagctctaattcagataaagttctaaagatttagggaaaaaaagagactctttatactgagtacttcagcagactgttatgctaaaactataggcctcacgaaagaacctatggttccattacttaagtaagcattctgagaaggacagactggttaatgtaacaaccaaaaggaataagagacccacacaaaactaaggttgtcagattcatcttgataaaatgaccgtgtggaaagctgtggaaaagataattttgtagtctcaaaatattagctcactaattattaattatgtagggcaaaggtacctttacaatagagaaatccagcagatagcagcttaatcagttgatcagatatcaccaccaataatgcggaaaatcgttattatgtgccttcatatgtgatcctgtgatcctgtgggaagtacagcacctcttacagtattcttgccaaaaaatgtttaatctgaatttaatcacaaggaagcaatcagacaaatcaagattatggatgtcccacaagacaactgatacagattcttcaaaattgtcattgtgatgaaacacaagagcaaaaattaaaggagaatgacaattaaatgcattgcatgatcccttgttgcatcttggattgaaagaaatctgttaagaacatg

SEQ ID NO: 116347 - DNA, 658 bp, Homo sapiens
cccgcgtccccaccccctcattcctccctcgccttcacccccacccccaccacttcgccacagctcaggatttgtttaaaccttgggaaactggttcaggtccaggttttgctttgatccttttcaaaaactggagacacagaagagggctctaggaaaaagttttggatgggattatgtggaaactaccctgcgattctctgctgccagagcaggctcggcgcttccaccccagtgcagccttcccctggcggtggtgaaagagactcgggagtcgctgcttccaaagtgcccgccgtgagtgagctctcaccccagtcagccaaatgagcctcttcgggcttctcctgctgacatctgccctggccggccagagacaggggactcaggcggaatccaacctgagtagtaaattccagttttccagcaacaaggaacagaacggagtacaagatcctcagcatgagagaattattactgtgtctactaatggaagtattcacagcccaaggtttcctcatacttatccaagaaatacggtcttggtatggagattagtagcagtagaggaaaatgtatggatacaacttacgtttgatgaaagatttgggcttgaagacccagaagatgacatatgcaagtaagtgatcatacttga

SEQ ID NO: 116348 - DNA, 203 bp, Homo sapiens
agctggccagttttcttaaaaatgtgtcaaattgtctgaatgatttgaccagaaaccccgagagtcaacgtgaggaggaaagaaagaggaagggaacggggaaaaaaagggaaggaaaaagacaaataccacctaattgagactaaaggaatgatcactggggctaccatggcttttgtttggttttggcaaggctttatttt

SEQ ID NO: 116349 - DNA, 296 bp, Homo sapiens
tggatgtggtgaggcacaataaaaaatgacaaggaagttcagccttcttctgtatcttcagatattggcaagtggagctgcactgtttattaactgaggtattttcaatagaagggagatatgaaaagtgatgcaacagcaaaaataatctgtaattaccaaatatttggaggtaaatcctatacatacagacttcaatttccacaaatgactacacctcacagtttaaatagtgtagtcaggaatcaaatcaagacttgttctggtaaacaagggaaaataaactatttttttaa

SEQ ID NO: 116350 - DNA, 515 bp, Homo sapiens
ctctctgccgttagaggggacaagactaccagctgcaggggaactaccctctccagggcctcctctgagctgttttaacactcagtaaagctcctcttggtcttgttcaccccactgactgcgaacctcattcttcctggatgcaggacaagaactcaggcaaaggtgccaccaaccacagaggtttctgtcaggaaaagtgacactgcaaagctcccgtaacagaagtagtaaaagtactccagtttcttcccacatcctgaagatgtgtatttcaggtgggtgggcatgtgtcagcgatctcagtcaagatgttccatttaagcagacctcttccatagctgtagctggagcggtaattggagctgttcttgcccttttcatcattgctatctttgtgactgtgctgctgactcctcgaaaaaaaagaccatcctatcttgacaaagtgattgaccttccacccacacataaaccacctcctctgtatgaagaacgatccccacctttggctc

SEQ ID NO: 116351 - DNA, 413 bp, Homo sapiens
attcatttacttgtaataagtgcatttagtttcatacagtttacatacaaccggtttgactgtatctgcagagatttaggatagtttttcttaatggtaagccctagggtggagctacaatgcactttccgttgtgaaccctgaaaacttgagagaggtctcagttaatttagaaagtttacgtaaccaaggttcaggacgcatacccgtgacagcctcaggaggttctgaggacatgtgcctaaggtaaacagagaacattatcgttttatacattctagggagacatgagacatcaatcaaagtatgcaagatgaacattggttcggtctgcaaaggcgggacaaattagcaaacgcgggaagactgaaagtgaggaggggacttcctggtcaaaggtagttaagagacaa

SEQ ID NO: 116352 - DNA, 397 bp, Homo sapiens
agcaaacgattacggtccagctcgcattgtaggaacaggaagcctttggttcattgaactccacaaacaatccccacacattgtagccactgtaactttctccattgctaactctttaacatatgattttccctctgagagttgctggtcttgctagttgctatggtctgaatgtttgtgtcccttccaaattcatatgttgaaatcctgacccccagggtgatggtattaagaggtggggcctttggggaggttgattaggtcatgagggaagtgctcttatgaatgagattagagcccttacaaaagaagcacagggaagctcctggccctttccaccgtgtgaggacacagtgagaaggtggccatctgcaggcagacaccagaacccaaccat

SEQ ID NO: 116353 - DNA, 288 bp, Homo sapiens
agctgccaggacttaccagtggagcttactggggagcttggacgggtcaggttgtttgggcctttctagactgatggcgattaccatcagttaatattttcagagttttgcaacggtctgtggtgccgcagatttgagctcttcctttacacaaggaccaggtggcttatccagataaaagggaaattttacttagcgtctatattttaaaagctctatctgtaaatctgtctccaaatacacttggtgaggtccaaggttgggtatctctcctctgtgccactttgc

SEQ ID NO: 116354 - DNA, 360 bp, Homo sapiens
catcctgcttccccctcagtttagcaggtagacattactgacaccattccacaccaggtctgggctgagccggcgggtacaggggcagggtgtactcagatgaatgaggcacagtctgtgcctctcacagccagatggcagaggctaggacactggcgaggctaggacactggcgaggctaggacactggcgaggctaggacactggcgaggctaggacactggcgagggtagagacactggcgagggtaggacactggcgaggctaggacactggcgaggctagagacactggcgagggctagagacactggcgaggctagagacactggcgaggctaggacactggcgaggctagaga

SEQ ID NO: 116355 - DNA, 389 bp, Homo sapiens
cctaacatggcaccttttaggaatgtaatcatccccactctcagttggtgagagattactgtaacaaattctgaaacactcacatagattcttatgaatcatgtttttttcccccctgtcttatggtgctgaatgaatcatgtttaactgagaattagctaaggggagagtagagcagtaaggacatagatttatctctatttgtgttttcatttactacttttatcaagaataataacattttacctcttttttaaataccactctctagaaagtaaattcaggagtaagaaactccttacctattcagcataatccaatttattgttaattccattgtctattaacatagtaaatagtgtgttggcttgtaacacttccctcataga

SEQ ID NO: 116356 - DNA, 306 bp, Homo sapiens
cctctcagaaccctaaggcaatttggagcccagaaggaaagtgaggcccccaggtggatgtatggaaggaaggtggtgcacctttgggcccttgtgatccaggtgagtgacagagtgactcacctaaaaagagagggaggtctctgcagttggaagctgcaaatgatgatggtagaattttgcacaacccagggatcacaagcccagttttaggggaaagggctctaagagtagagacatccatataggcgcagatagtcctcctttatttaaatacaccagcagctgcaaggagtaaagggtctt

SEQ ID NO: 116357 - DNA, 373 bp, Homo sapiens
aaaatgtctgtatcattttaattaaagtaagtaattggcaaaagtaagctaccaaaaacgtaaaacttgcaagcgttcacttttgcttttacatataaagtctttgtactcttgaagccgggcacagtggctcacacctgtcatcccagcatgtgcttgagcccaggagtttgaaaccagcctgagcaacatggcaaaactccatctctacaaaaaagacaaaaattagctaggtgtggtaatgcacgcgtgtagtcccagctacttgaaaggctgaggtgggaggatcacctgagcctgggaggcggagactgcagccagctgtgttgcaccaccgcactccagcctgcatgacagaatgagatcctgtctc

SEQ ID NO: 116358 - DNA, 197 bp, Homo sapiens
tctgtttctttggggaactctgactgatatactcactcagtgtggtctgcttcctagactggagtctgatacaacgttgaaatagattcctctgctgtggaattggtctgtctgcgacctggagcataagtcaggtaggggcctggtctcaggccaaacagcctaagttcagagccaggcctaagttcagagccagg

SEQ ID NO: 116359 - DNA, 731 bp, Homo sapiens
attgtaactttttaaatgtctgtagcactgaagttattttcaggttttgtattttctttcattgtggaatattttaattaatatagcatggcacctcattttcttttgcctgctgttaaagatggaagctgttgtcaaataacaactttaaaaagggaagtataaataaaaagcctgattattttaggccagtttgccaatcactgtgtaattcttctggtagtattctacctactttaagtctaattttactagatagagtaatggaaaatgaaaatctaaccctttattccgataatctcatgaagcaaacctaactatttaacatcagctggaaagaagggaacatttatattgcccgtctcctgtgtcttcaaaggtgtgagagttgaggaatatgtgttcctacgggaactatgtttgaatatgtgcagttttcaacattttggcaaatgaaagcctgacaagtttttaaaagggcagaagctttattttttgaacagaaaaatctattttttaaattcacatgtttgtatgagtacttctgggaagcaagggatgaactgctaggtattattaagaatgaatgatttttgcatttaagttgtttgaaggcatgtattttgaaaaatatctgttacaaatttataatttcaagacatactaaatcttataatacttttggaatttcattaataaggctaaaatctgaggaatgtaactaattttca

SEQ ID NO: 116360 - DNA, 876 bp, Homo sapiens
cgcccagagatggagctgggtgaggggctgctgtctgcagtgtcagcctctgcaccccacccacagcctcccacggcatcccctccccatctcccctttgtcttcctctgtcttcctttttacttccttttcgctgtttaatgagaacgacttccatttgctatttgttgactgagtccggcactgcattaagctctgtctacattttgtcttagtgcttgcaggcactttataaggtagacgcaagtattgtgccacttttacacatcagggaacgtatgaacacatcaggttgctcagcaatgaagtggaagagcattgatagccctttgggcacagatctgtgtgcctccaaaacccatgctctgagcgctggtaacctctactcctcctcttcctcaccttgtcagcatcagcactccaccttccctttcctcctccgcttcgaatctcagagccaacttcagctagtgcctctcccttcggaaacacctccgggaaatacctcctcccagatcacccctgccagaaccagcaacgactatgagtacagcacgtgggtctgcagattggcaaggaccaaaagaactgattactatacaaggagtggctatggtggtgagatttgtcctctgcaaaccatgacggtggtagctggcaaaggtttggtgaaataggctttggcatacattgttgatgggaatggtgcatgcagtgttaaagggaatttatctgtcaaatttttttaatgcacttcaattttgacccagcaattctgcttctaggaaattatccaacagataaatgtgcaagtgcaaaatggcatatacacaaatatttactgcagcattatctcagcaaaaggctagagataac

SEQ ID NO: 116361 - DNA, 428 bp, Homo sapiens
aatcaggcctggcgcagtggctcacacctgtaatgccagcactttgggaggccaaggtgggaggatcacttgaggtcatgagtttgagaccagtctggccaacatggtgaaactgtctctactaaaaatataaaaattagcgagacttggtggtgcacgcctgtaatctcaattactagggagcctgaggcaggagaatcgcttgaacctgggaggcagaggttgcagtgagccaagatcgcaccactgcactccagcctgggcaagagagtgagacactgcctcccagaaaaaaataaataaataaataaataaataaaagagagagaatgaaaatcaataagatatataaactgtaaaaagtatattagctctcataagagcattaccagaacccaaatatcatttccatcacacttgccctgagc

SEQ ID NO: 116362 - DNA, 276 bp, Homo sapiens
atattataaggaatgtattcactatgaaaattcatcaagctatacattttgctgtatgtgtctctatgttaataacaataaacctgcccatgtacagaacactttgcaagatcttttaaaagtcactaatttatttgatctttgtgggaaaaaacttttgtgagacacgtaagacaggttcaaaaaaaattaaaaataactcactatgataacataatgaaggattcgatttcagattttctccaaatccagggctcttttcttttcttttttttt

SEQ ID NO: 116363 - DNA, 405 bp, Homo sapiens
tttatatttttgtttgaaattaaagcagctttttgagacaagaattaagattgttgccctgatgctagtcatagtgaatttctaacccttctaacccttcttaaaaggagatggtcgtatttgtttcctttggatgccgtatcaaattaccacaagctgagtggttcaaaagaacagaaatgtactctctcacagtacttgatgccagaagtttgaagtcaaggtgtgtctgaaggtcatattctttctgaaggctccagggaagaagccttccttgcctcttcctaacatctagtggttcctagcaatccttgacctgtgttggcgtgtagccgcctcactccggtctctgcctctgtcatcacatggctttttgccctctgtctcccctgtatctctaactcc

SEQ ID NO: 116364 - DNA, 417 bp, Homo sapiens
gataccacatttcattgtgctccacggatactgcagtgttttacaaactgaaggtttgtgacaaccctgcatcaagctagtctatcagcaccatttttccaacagtgcttactacatatctctgtcaaattttggtaattctcgtaatatttcaaactttttcattactattatgtctgttgtggtgatccgtgatcagtgatctttgatgtcactattgcaattactaatgtcactaaataatgtttagtaacaatatataatggcaaacttaattgatagccattgtgcgtgttctgaatgctccaccttccagctgtaccctgtctcttaccctcttctcgggcctccctattccttaagaaacaagaatactgaaattaggctaattagtaatcccacaatggtctcttaagt

SEQ ID NO: 116365 - DNA, 338 bp, Homo sapiens
tgtgctgcatcatggacacagtagccccaagccttcctctctctagcatcaccctgcagcatttcctgagatgactcagggcaaggctgcaggagtagctcagtccccagggtgggaaccaccttggtacaggccccagggtacctgccgtcctgatgggcttaccctgggccctgagtgagtggatgaatgaatcaagtgtgctggcctgaggtgccgccgcctcctggctccagcctaagccgccggcatgcctgtgggatttgtgggggctgtggtctggccagtgtcaccatatggatcccataaattaaagcattcccggaaacaaacggtaa

SEQ ID NO: 116366 - DNA, 375 bp, Homo sapiens
aactgtcaattttttgcccatattcattcttctcacatttcttccactcttgcaatagcaaagagaaaattaaaaacaggttgggcaactgataatattctttttgcatcaccaattagaattctgagactctaagtcataaggtaggaacagcttcagatgtgttttgaaaaacagaaacaaacccacatagcactctgcctggggagaaaatcatttctcccatgaatactgattcagttcaaaggcacacctaactgtaatccataatagaataagatgaaaagtttattcgaagagaatctaaacacagaattgagagggggaaggaaaatagtcacacatagaaaatttattctgggccaggtgtggtag

SEQ ID NO: 116367 - DNA, 681 bp, Homo sapiens
ggtcacgatgaggagtgggtcttggaatcctcttcgctaggggaaggggagatgtcaggaccatggaaatggggtgaacaggatttgctacccattgcttgctcaggagggaaggtgggatcgggacaatagtgacgtctgcttgttgaggggccttgaggtaggggtgagggtctgacctgcaaaacctctcctctgagccttgttggaggcctccattgtctgttgggaaagattgcagccccaggcctcaccttccagggcttcttcagatcctggggcaagatctctatcaacccaaccctcttttggccatcacctgggctgggtggccgcattccaggcaaatgataatttcttgcaggaaagtccaggagggtctcatgagctcgttcccactcactctttgggcagtgttttcagaggctcagaaccacggggtttattcttgccatgaccttctgtgggttttgttttgtttgaaacttaacaggaccctcacccaaccaactggagtaaagtgtaagttctttccttcttgcagaatgtgcatctccatctcctcacaggacacaggatatctttggaaagtgataatttggagggcaagttctttagcataatatgggctacctgggtactgataaccacagggtgcatctccacactgctaaggcccca

SEQ ID NO: 116368 - DNA, 286 bp, Homo sapiens
ggtctcaaaaaaaaaaaaaaaataccaggtgtgatcactgagaactcagctgctctcctgtttgtgattccaggaaagggcaggaggacctcagaattgctgtgagccatttgtttacctggcattggccttctcctgcctgccttttctgagaccctgtggaggggaggccaagggagggcacagagggagcagccacagatagagtcgcgtcccctccgccatccagggcctccacgtagcttcctgccaccccttccatgcccatccatgaccaaagaggggg

SEQ ID NO: 116369 - DNA, 920 bp, Homo sapiens
taagagaataaatttttcttttaagaatacctaagccttatgaacatctgatgttcaaatacccagcaatggctggtcatcttttgcttgcctaaactccatctgaacaacggcaaagctctgctgaaccaaccaacataaggaattgcacatccccacatttctttccatctttttcttttctgtcagactttcactcttttgctgatagtaagtacccttaatctattaaaagaaatacaaaaatcacttctgacttgcctattctctttcattatatgcatatttacatcaccactgtatgacaaattatttcacctcatagaccctgttttctgatctgtaaaagtggttaatggtacttacctaaaaggttgtaaaatgtttttaaataaagtatgtaaagctttcagtgcaatgccttgtatttggcaagtgcattgtaaatgggagtattatctacatcaacatcttcatcaagattacaatactgctctgactcattcctgattaaggtcatgcattacttaacaaggatatagtctgaaaaattcatcatgaggtgattccatcgttgtgcaaacatcatacagtgcacttacacaaacatagatggtatagtctacaacacatctaggctatatatggcattgtctattgttcctaggctgcaaacctggcagcctattattgtactgaatactgtaagcagttgtaacataatggtcaatatttgtgtacctaaatgtagaaaaggtacagtaaaagtaaactatagaagatataaagtggtacacttaggccaggcacagtggctcatgcctgtaatcccagcaatttgggaggcagaggcaggaggatctcttgagcccaggagttcaagaccagcctgggcaacatgatgaaaccctgtctgtacc

SEQ ID NO: 116370 - DNA, 526 bp, Homo sapiens
  misc_feature (1)..(2): n is a, c, g, or t
  misc_feature (4)..(4): n is a, c, g, or t
  misc_feature (6)..(8): n is a, c, g, or t
nncncnnngctcttttgccacgggatattgcagcatgaaagctctcaccagatataagcaccgtgcttttggaattctcagcccccaaaatgtgctataataaaaccatggtgctgatttatgatgaacgtggagatgtaccacctagatttctcttcaaggaaggacttgtttcctctgctgatggaattcctgtcaacagagacctttcaggtgccagtgacttggagaaggcctgagctgtagagcaacatcacctaaggtcacgccctacgtgagtcagcagaatccactgactgatggagattataaagacttagccattttgtctcaatgaggtgtacctacaatgggtcatatgagctccacagctccctgtggagtcagctcagactgttgttgacttacattgtacctcaacttctctctctgccaaatctagctccctttacctcacaatcataggcgttcatcccaaagacatcccttaatataaataatgcacaatatactctatatgttaatc

SEQ ID NO: 116371 - DNA, 433 bp, Homo sapiens
taaaaaggtttttttaaaagccattcttgtagaggaggtctactggctacacattcccttggctttcctttaagaatgtctctatattttacctttatccctaaaggctattttcactggatatggacttctgaattgacggtttttgtttagcactttaatatgttataccacttccttctggcatccatcatttctggtgagaaatccacagtcccccaaatctttattcccctataggtgatgtattattgtcctctggctgctttccagatttttctttgcctttagtttcagcagttagatgaggtgtgcacatctttgtgtttctactgtttgggatttgttcagcttcttggatctgtaagtttatgtctttcatcaaattgggaagttatcaatcattgtttcctaaaatatggttttttgtttt

SEQ ID NO: 116372 - DNA, 322 bp, Homo sapiens
cagttaccaaccctgtggctaggacatattctctaacaactcagtgtttgtttcctcacccataaatgggatgatagcagaccctacctgcaatatagagcgattatgaggattcaattgtcagacatacattgcttataacagtgccctgtacacagtaaagtatagatatgtggtagtgaggcagatagcctatgtaaccacgtgttagtttccaattctgcagttaactaccaccatgaccaagtttgaatttatgttacttcacattaatgtcattagattacttgttgttatacattaataaacagttgttttgcat

SEQ ID NO: 116373 - DNA, 150 bp, Homo sapiens
ctacacataaaaactaaaactataaatcttttagaagaaaacgtgatctggtagttggcaaagattttacacaggacacaagaaatccatacagcaagtcctcagataatgttgtttcattcaacatcactttgttataacattgatgag

SEQ ID NO: 116374 - DNA, 652 bp, Homo sapiens
gctctgtgctcttttgtccaatcttttatatccagggagatcccctcaagataaatgtaacttttgaaatgtttggcttgcaattatatactgaaatgttacttcagacactattttaggtggtaccaaaggatgtcttttgcagagcaaaagtttttaattttgctgaagtccaagttaacagtatcttttctttatggaatatcctctagttttcatgtctcggaactctttacctagctctaggtcccaaagattttctcctgtgttttttttctaacagttttatagtttcttattttgaatccatgatccattttcagttaatttttgtacaagatgtgcaacttaggtccgtgttttgtttttgtttgtttttgttttcctatcagtatccaattgtttcaataccatttgttgaaaaaaaagaaaacaacaacaaagaaaaaaaacagctattctttctgaattgaattacttctgcacatttgttaaaagtcagttgggtctatttgagtgggtctatttctaggttccctgttctgtttcattaatctatgtgtctctccttcagccaataccacactgtcttgttcattgtagtgtcttaaaattgggcagtgttttctcccataccatttttcaaaattgt

SEQ ID NO: 116375 - DNA, 254 bp, Homo sapiens
ctacatattcttgaggaaaaaatgcatattctatagttgctggtgatatattctccacatgtccactgagtcaagtttgttaattgtattattaaatttttccgtatatttacagatttttgtctgattattctatcagttgccaacagggatatgataaatctccccacaattaggaatctatttctccttgaaattctgtcaatttttgttttgttttgttttgttttgtttttttgagacagagtctcgct

SEQ ID NO: 116376 - DNA, 682 bp, Homo sapiens
aactcatctaccaaattgttcaatggaacagctgccagataaagtgcagaacaactaattaaatgtgaatctcaaacaaacattgaaatttttagtgtaagtatgttgactatagcatgggacatagtatactaaaattatttactatttatgtgaaattaaaatttaatggggtgtcttgtagttgtttgtatgtagttgctttaattctggcaaccctattcaatggagaaatcatatctctgaggtccagacattctttttgtgtatgcatttgattttccttaagtgtccttgtttatttgcttggttctttgttgtttttaaaatcttcagttcactggccaggtgttttgtttgtttgggttggtctttctctgtttggatgctgagtttcccttactatgttatgttaaaaacagtcagagatctgcttgtcatgggaccccaagtagaggctgacctctgactggtagaagataaaggaatttttcccatagcgggaagggggagggtatatggtagaaggtggacagcagtcccatgctgagggcctaagaagagcccctctgtgccaaagtgtctttgtgctcttctagcttcacagatgcaaaagattaagtttacctgttcggtgtctttgtggcctctaagagccatggatcccacacatactcagata

SEQ ID NO: 116377 - DNA, 361 bp, Homo sapiens
tggtgtctgaggggtttttgtctgtggcttgtcctgctacaatttgacctagcaattctattactgggtatatagccaaaaaagaaaataaattgttcagccgggcgcaatggctcatgcctgtaatcccagcactttgggaagctgaggcaggcagattgcccgaggtcaggagtttgagaccagcctggccaacatggtaaaaccctgtctctactaaaaatacaaaaattagctgggcatggtggtgggtgcctgtaatcccagctactcgggaggctgaggcaggagaattgcttgaacctgggaggcagaggttgcagtgagttgagatcatacctctgtactccagcctgggcga

SEQ ID NO: 116378 - DNA, 282 bp, Homo sapiens
atctaaggatcccccctgtcgtcgctcttggtctggcagtctgctctggggcattaccaccctaggcctacagagggtggttgctggaatgcagagatagagatatggagactgtcacctcatagatgagggatgaaggcagcctgtgctgtgcaccatggaagacagagatttaattaatagcccagccatccgtggagcccatgctggtgctcctcactggccaaacccaagtggaagacagaaggcaaggaagcccgcaaatctaagccaggtcatcct

SEQ ID NO: 116379 - DNA, 608 bp, Homo sapiens
ttgaacctaatttattattcctttttctttttaattcagtctttgatctgaaggtaaaagtctttcgctattcaagtcaacgttgtaaacattaaggcacaataggacatttgtaaaagtatttttaatttctatagatgaataaaaatattttatggtaacttatttctccccctcttcccaccccctaaaaggatagcacagcagaaacaatcgcttgtttgtgcttttgctataggttagagaaagtgaggacatgtcatttccctcttaatcaaatataagccctcatactgttctccactagccttgtgctttgaggcttggtgtcaccctgttaaaatttgctagaatgaggaacagaggagactctccctccccaagtctgtgccttcagtctctgctacttacatccacccagtgttggcaaaatcaccagcagctccccgagcttctgttttttttttttgaaaaaattataaaatatgaaactgtgtgtaaaaaaatgcgcatgtacataaatttttttttttaccatttcccaaaagattgaaaattaaaggatttaattcaggaagtgagcaaggaaacaaattgtaaaaaaaaaa

SEQ ID NO: 116380 - DNA, 884 bp, Homo sapiens
cacttttcagatgtctctctctctctctctctctaagagctgctctcctctctcctttcttctatctattaaattttccactccctaacccacccacatgtgattgtgtcctgaattcttggtgtgtgacgatgaaccccagggtgtataccccagacagcacagccacttcaccagcagggacagcagctgtcacatgaactggagatgaactggaggtgagtctgatgtctcggaattttgaggaaagtgggtagaaagttgccaagcaagctgaagagacaagcaaaagggatcatattccagaagaattcttagcaagaccacagtcagaacttcaatcaaggtgattgattggtctgaaagggggaatagaatgtaacataaaatacaaccatgagaaaccacatgtatgttgttgaaccttatctagacactaagtgtgaaaaagccagcttggattattgatgaaggacattcagaaaaccacaattttgccatgcttatttcagagaacagagacagtggtattatcagcctatagctcaattgtacaaaatgggatgactagatgtcccgagactattctgttcctcggccctctcgacatcactaagaagcttccaaatttaccaagttctcagtcattgtaaggatgctgcatgtcaataaggatgattatggaagatgatgggcatggttctacattagagaaccagaaaggtcacaataataagcttttataagttatatttggaattatatagagtccataagtctaaataacatggggaatattgaacaatttgatatacaggaacttaacaaggaggtagacgtaacaagtggatttatctatgtagtagaaatcttacatgtgaagt

SEQ ID NO: 116381 - DNA, 580 bp, Homo sapiens
ggctttgcttggcgcgtctccgtttctcttctgaggggctgagagtcgcggagtttcctggttggaggctgtggcggacgcgatttgcttcctcatatagggttccggaggcggcggaaagtccagcgggtctccgaagccggtagacggagccatgaagaagacctcgggcttcaggagggggaagggcgagctgccctggggctcggtcagcagccccgggaaggtgggcgcgggcgccgggagtgagagtgaggaccacgcctcctcccagcccaggcgccacgacccggacaaggggttcgacaggctccgcagagctgccggccgacaccggacagagacgatgcggcggatcctttctctgccgaagagtggcgtggatgacagagacgagaagaacaggctgtcctgtggacagagttctggtgactcatggctttcagtagatgacgaaccctttgattctgataccaagattctcttgagcaatatcatcacttgaagcctaaggttgaaatcaaagagtgtgtttcgaaccaggcggtcggaatgaaagatgtacaagcatgcacatcag

SEQ ID NO: 116382 - DNA, 425 bp, Homo sapiens
tacccatagtacttgacatttactttgaaactgaatgcaaactcagttttactcattttcaaaatctaacttaaaaaagaaactaacacttttcatgttagttgctgagaaacaattctacaaatactttagacgtatttgaagtctagatttgagattcaaaacatcttcctaaaattttagcagttgagtgtttaagaaagatattttaaattcttcacatttttggatgcttttataatttattcattcttggttatgaaaattgatagtaaatatcatgtagaaaagtatttgctaagatcctaaaaagaacagcttagtttctctataggatttagttcattttatcacctattatctttaaaaaggcaatgagccatgtaatatttcttttttttcctgttttttgagacagaatctct

SEQ ID NO: 116383 - DNA, 126 bp, Homo sapiens
  misc_feature (1)..(2): n is a, c, g, or t
nnagcccctttgaaccagctgatgcgctgtcttcggaaataccaatcccggactcccagtcccctcctacattctgtccccagtgaaatagtgtttgattttgagcctggcccagtgttcagaggt

SEQ ID NO: 116384 - DNA, 340 bp, Homo sapiens
agatcgcgccactgcactccagcctgggtgacagagcaagactccatctcaaaaaaataaaaaaaataaaaaaaagaaatattatgctcaaaatatatagcaataagttggaaacttttacttgaataatttttacaaaactgaccaaagaacaaaaacgtgaagaggccaagttccaagactcatgttatgtaaattgttctaaaacaacattagcacttaacaaagttgaaaagttaacaaagccaagtactgtactaggcttccaacactaactaagtataaaattccacagagctggttttcttatctttaaagaaatttgttggcaagtggtact

SEQ ID NO: 116385 - DNA, 375 bp, Homo sapiens
agcaaatgcaaagagatggagtcataaaaggcgcaggtagtactgtgaggagtgtgaacaatgaagcttaggaagtgagatggtctgtagcaattagtaagagatgaagctaccgtggtggctagagaccaaattgtgagaggacgtaagagtccctttgaaggagttcagcttttatcttgtagttgggtcagtgttaatgctgagtatttaatagggacattttgataaatgtcttaaatctggtgatttactagtttagaaggtagaatatatattttattaactctacaagtggtatttaccaacaagtataacttgaatctttaaattgtgtaacatggcaacctattttacccctccctgctaatctta

SEQ ID NO: 116386 - DNA, 580 bp, Homo sapiens
tgtagctccccaagtggcgaaactgcttcacacctcctgtcctctcattctctttgctttgatatatacttctttgcaatgttctcctacttggcactaactcatctttcacaatccagcccaagggccagctcctctacaaactctcccctggccaatccagtgccatcccagcgccagtggaactggcactgctctccttggtttacctacatttttcatgcacacacctgccacatctactgtgacacgctccttcacagcttgctgccatgtttgtctcctccttctagactcaaagcatcggtgacaacagggactacatggtatgaaatgatcactcatgcttgttgactgaataaaccattacaaactactcatagaaaccaatctgcgagccggatgcagtggctcacacctgtaattctgacactttgggaggccgaggcaggtggatcccctgaggttcggagttctaaaccagcctggccaacatagtgaaactccgtctctactaaaaatacaaaattggccaggcacagtggattgcgactgagagacggggatactctagaatctg

SEQ ID NO: 116387 - DNA, 1323 bp, Homo sapiens
  misc_feature (4)..(4): n is a, c, g, or t
  misc_feature (6)..(6): n is a, c, g, or t
  misc_feature (1150)..(1150): n is a, c, g, or t
ggcncnagggtttaaaaacagtaaaaccatttctgtcattttttagttcttctatcgtagcatctgtactgacataatccgcactttagggtgatgaatgtcaattactacttctatctagcctcctgccaaaattgatgctcagaatcgcagaatcggggaggtccctcctgagcatctctaagctccccactcagaaaaggaggcggcttcgggctttcgttggctgccgccccatccctaagaaggaaggggagcgtgtctgcttcctgaaggttcggaaatcaatcgaaaataatccatgcaaccgtcccacgacgtgagccccacccctgcgccccaggcctcgcggagccagttggtcgcagttgttgcgagcccgacgcccagccccgaagggggcccagaagagcgtcccaggcgtccgtggggtggccggctgtggtcctggcgcccagaagtggccaggcccgctggatttcctgggatgcggtcaagtccacaaatactgtccgtgcatcctgatgctggagggcgggaccttgggccgagcgagtgtggctccgccagaagggccctcggacacaaccggtgctggaggaactacaaagtggaaggattaggaaacgcacaggaacatgtacgaaagaaggcgaaatgtgaggtgtaacttacatttctaggataactcaagaaaaattcgcgtttaaagagaacctctctggcgaagcatcaggaaaggcttcctggtggtggtgcattcgagggttgtcatcatagtgttagtttttatttttccctcagggattgttacattactcccccaaatggttttcctactcgtgatctctaacaaaatccatcccataagcaacccccggatttatgatctaaaaagcccagtggctctttagtttggcacttgatgacctccgtatgattagtctttctaacctcatctcacagttctccctaattcagtactttaatcttccgttgagcttgggcattgccaccagctgtggactgaactatttccctcctcccccaatccatatgttaaagccctaccccaccccaatatgttggtatttggagatggagcctttgggaggtaattcaatttagatgaggtcaccttggtgggtcncccatggcgagattagtgcccttatgagaaaaaacaacgaagagcttgttctcctctgtgtgccatgtgaggacagagcaagaaggggctttcacctggaacccaaactgccccatctttatctgggacttagcctccagaattgagagaagtaaatgtctgttgttatagcc

SEQ ID NO: 116388 - DNA, 470 bp, Homo sapiens
cttactcgggtgcctgttagttatcagctgcaaattatgaatttttgttgctccaaaacaacagctggtattgtgcagcctgcaaggagcgctgtggggctaacctcaagtccagagaggcacaaacgccatgctggagtctcagtagccagtgtcagtagccagtgtccctagtcctgtctccttaagcccaccctactcatggtaccaaaggcgcaccagcccaccactctgagcccccgtgactccttctgcaatagctatggctgagtggggtacagacccagccgtccctgggtgtcccagcgagggtgtcacagccctttagctcagagaaattgcccacagctctctgtgtcgcctaagacagggtttcccaaacttgccacattacaacagtcaactccttaaagacacagatgccagggcagctaacagtcagagacttagtccccaccccgaccctggcc

SEQ ID NO: 116389 - DNA, 666 bp, Homo sapiens
ggtccttggggtcctgatgtggcactgcatctgtgggaagcctcagggtgtcacaatctctttgtattctctgcagtcaagagtcagcccttgggtcctccctctctgttgctaggaatttttccatgacatcccattgcccactgaataaaatttaggttcttcagttctctgcagaaccatggacatgtgattttagtaaagttactctttgccacttagataggaacccatggaaggctgggctgggcttcaaatccaagagacagatatggcgacagactcatcattctgaccaccttggctttgtcactgatccagcacattgtgcctgatgctgtcccagcaagttcccatatctcttgggcaaatggaccctggtgacctacctccagctctctagcccaaacatgtctgcattccagtggtgagcatggaccgatctagaatggaccttctgttgtaatgggaagcaggattatgaatttcttttatttcaataacttttagggtacaagtggtttttggttacataaatgaattgtttagcggtcaagtcagattttggtgcacccttcacccaagcagtttacattgtacccaatatacagttttttattcctcacccccaacttccccctaagtctccgtagtccattatatcac

SEQ ID NO: 116390 - DNA, 416 bp, Homo sapiens
atactaaccaccctggaagacactgcatagccttccagacccagctcaggtgtcttataccctgggaaaccttcccgattcttgcagccagatgcttcctcctctgcctccatgacctgtcacagccccacacctctggactgtgaatgtccaggtccctgggtgcttctgccatttgcttccagctggggcttggcacccacggggcttcaggagactggctgaataaatgaattagtatgtaatacaaaaacaacaaataaatagaaaaaattaaccaggcatggtggtgcacacctgtagtcccagctactcaggaggctgaggtaggaggatcaactgagactgggaggcagaggttgcagtgagccgagattgtgccaccgcactccagcctgggtgaaagagcgagaccc

SEQ ID NO: 116391 - DNA, 530 bp, Homo sapiens
atactaaccaccctggaagacactgcatagccttccagacccagctcaggtgtcttataccctgggaaaccttcccgattcttgcagccagatgcttcctcctctgcctccatgacctgtcacagccccacacctctggactgtgaatgtccaggtccctgggtgcttctgccatttgcttccagctggggcttggcacccacggggcttcaggagactggctgaataaatgaattagtatgtaatacaaaaacaacaaataaatagaaaaaattaaccaggcatggtggtgcacacctgtagtcccagctactcaggaggctgaggtaggaggatcaactgagactgggaggcagaggttggtggggggggaacttaagaagcagtaatgaggatggttttatagctattccatagccttcctctttcttatcctcgtatgtgttctcactgtttttggtcaaattttactttgccctttttgttgttcctctgcaggtcattgttgaaaataaattatctgaattata

SEQ ID NO: 116392 - DNA, 219 bp, Homo sapiens
gcacacaggaagcgcttagtcaagggcagccttcttccaccagtatgtcagcactgcagagcaggtggggtgacatgcatcgccagcaccctgaacggcatctgactcacacgtgctcagcaggaatgagctaggtaccattttcagtcagttctgctcctgggccacttccacctgctcagcttttctttttttttttttttttttttgttcgttctg

SEQ ID NO: 116393 - DNA, 499 bp, Homo sapiens
atagcctttggaattatgatttgtagttgctagatagaatttaatctcatgattggggtatcatttatttttggggatttggattgcctctggtttttaccatgttaggtaatactaattttatctggaaaccattttagctttttggattgacagctttagttattgtttcagtcagttcttgctgcgtaacaaactgcccccaaaggtactggtttaaaacaaaggacatttattctttctctcaattctgcaggttcactgggtgattcctttgtcctgggccagtttggctggggctggatggcctcattcacatggctggggcctcagctgggggcacttggagctttgtcctcatgtgttctctcactgcccagtgagctagcccaggcaaggaaggacatgccccatatacaaacacttcttaggactctgtttgcatcacatttgctagtgtccctttggcaaagtgagcccatggctaagcccagaatga

SEQ ID NO: 116394 - DNA, 873 bp, Homo sapiens
ctgctgtatcttttataaaggaactatgtatagaattaagaaactggaccttacatttgtatcttacacagctatcattttcaaattctgaaaatttgaaaatggtcttattattttttggtcttattattccttttcactcctaaaaattattgtgtgtcctgaagtgtctttgcttatacaagttttatctattagcatttatcagactcaacagtaaaaccaaggactgtttaaatatttattttttcatgtaagataacaataggacaccaatcacttaataaaataatcagtgtaattttaatgaaaaattggcacattttccaaaggaaaattagcaggaagagtggaactgttttatacttttgcaaatcactttaatcataagcttactagaaggcagctccattcacctatctctttctccattcaattcctttgctatatacatgtcatcacaatatctgggaaaatctactgtatatttctgagaacaaggcagtgatggcttccgatctttatggaaataattttgatcttgcagaacccctgaataagaacccctattttagtgtatttgtttttacaagtagaaatgattgataaaactattttctaaagctttttatacatttttgtccttatatctgttagtaatatgtgaattctatgaatagatgttctaatgttgagtgatccttgaaatcccagaataaataaaccctacttggtcatgtcgtgttattttcttaatgtgatattggattttgtttgtatgttgatttagaattttgacatgcatattcaaaggtgaaattggcgtgtactaggcttcttattgatttctataataaaaacctgactataaag

SEQ ID NO: 116395 - DNA, 486 bp, Homo sapiens
  misc_feature (446)..(446): n is a, c, g, or t
cctcgcgccccttctcagtgactcacctgttgtcctcccacagacacctacccaccaggaaaccgcttttctgattcacatcaccacaaattagtgctgtctgttttagatcctcataaaaatgaagtcatactgtgtatattcttttgggcttgactcctcttgctaaacgtgcctgtgagagtcattcatatgattgcgtgtattaagttcgttcctctttattgctgccaagtattctgttgaatggatataccacagtttgtttactcatccttttgttttaaaataataataatccacttcccgggctgaagccatcttcccacctcagcctcctgagtagctgggattacaggcacacacccccatgcctggctagtttttgtatttttagtagagacagggtttcaccaggttggccaggctggtcttgaactcctganctcaagtgatctgcccaccttggcctcctgagtagctggg

SEQ ID NO: 116396 - DNA, 671 bp, Homo sapiens
ggagctccccatgttggctgtgtcattcctgccctggaaatactagcatcctggcagagcagacactggattccttcctgatgtagaattaatgttgcaattgcttaaggttagtgacctttaacttctgacgttacaatgtcagtttattcattcactcaacaaatacttattatgtaccaactaaggctatgctagatactgtggatacagtaatgaaccagacagacaggatcattgcgctcatggaacatatattctgatgagacaggctaataaacaagtaattaatgaaatgaaataacttattatgataaatgcccactgacttcagggataaaaagtaattcatgttttggatatacctctgggtcatgtttgtttatatgaagagttttcagcagttgaacttggcttagcctttctcagactggcctgggttcagagtggatttccactgaaaagtcattgttcctcttctgcagtctaaggtagtagttatctaaactgtctcagatatgaaagagaagggaggaataaatgaaatgataaagtcaaaaggatggggtgttttgttcatattttagggggttaatctcatgattaagcttatcagcttttggtgctggggtcagcttggtgtaaaatgaatgctgtcctggggtgtggtg

SEQ ID NO: 116397 - DNA, 586 bp, Homo sapiens
agacagggtcttgctgtgttggccaggctggtcttgaactcctgggctcaagcagtcctcctgcctcggcctcccacagtgctgggattacaggcttgggccactgcactcggcttagtctcatgacttttttactcaaaacgttaatgttttccacattatcattagcgacttacaaccttctctgtctggtcatcacaactgtttgcgggctgcttttcctgcatcttgcttagcagctttggaggcagcgtctgtgtctcccgagaggcaggaagacctgtgcccctctccccctcctggccccacacgctcctcaggagggttgcttcccgcagggggtgggggtgagtgctgtctgcatttcccgtacctgctgagggaaccccccaccccgagactcctgggggagctgtagctctcaggcccctccctgggagtccctgcaggttgctctgtgtttcaaagcaacgttccatcagacttttgtgttccgttcgcatgggaatccctgatctatttcctcagagcccagacggctaaacaggccgtggacacagatgacatcattcccggtggtcactca

SEQ ID NO: 116398 - DNA, 314 bp, Homo sapiens
tctctgtctgccttctacactggggaccccacccagcatcacttgggaaagatgtgatgtgatgcttcttcagttccgtagttctgagtatactggagccaccctgggtgtatgttgttatgcaaaaaaaggggtgaacatgccctgctgtgtatactaggtaggtactcagtaaatgaagctgaatgagtgtgctatacctcactcccctgaggccaacaaggttttctctttcttcctctgaaacactttaaaactcctctttccctgtgctgggctgggcaacaaagccgagtcccagataaaatgcagtg

SEQ ID NO: 116399 - DNA, 707 bp, Homo sapiens
ttcaaaagggttaatgagctcacatacaagagatggtggatcttgtggcccagaagtaccacttctttgtgtgtgagacaagcagggtgcctttcaatttgccagattaataagcaatctgtacataaagattgcagggtaaggagatgggcagagagaagtaatagctcgctataactttttaaatgactgttaaatcctctcaattttaatgtaatttgcttggggtatatttgtgtggttaaaataggtggcaatctaggaataaagattgcaagacacttaggacaaaatataatcttagtgccagtacatacaagataatagttggggaggtaaagaatgtcttataattgttgcagattgcataggtatttaaaagcaaaagagtgattaacattttaacttgatattttttggtgggggaggtacagttaaatagagggtggaaaggttgggaaatgtggaatttaggagtataattttaaaagccatttagtgcaattgaatgctagctttctaaaagatttgtgtcgttaaaaggaatttttttcttccctgcttcaatatggcgactttccttgtccttttgtcttccaagcggcgttgcaggttgtgtcttgacccattttttttcctgtcctcccacctcaaccctatttgttgagaggggtccaagtccttcctccccctttccctctataggg

SEQ ID NO: 116400 - DNA, 1477 bp, Homo sapiens
tcccaggcaggcaggcgcgctcgggcgaggtaggagcgatgtggcctgggaacgcctggcgcgccgcactcttctgggtgccccgcggccgccgcgcacagtcagcgctggcccagctgcgtggcattctggagggggagctggaaggcatctgcggagctggcacttggaagagtgagcgggtcatcacgtcccgtcaggggccgcacatccgcgtggacggcgtctccggaggaatccttaacttctgtgccaacaactacctgggcctgagcagccaccctgaggtgatccaggcaggtctgcaggctctggaggagtttggagctggcctcagctctgtccgctttatctgtggaacccagagcatccacaagaatctagaagcaaaaatagcccgcttccaccagcgggaggatgccatcctctatcccagctgttatgacgccaacgccggcctctttgaggccctgctgaccccagaggacgcagtcctgtcggacgagctgaaccatgcctccatcatcgacggcatccggctgtgcaaggcccacaagtaccgctatcgccacctggacatggccgacctagaagccaagctgcaggaggcccagaagcatcggctgcgcctggtggccactgatggggccttttccatggatggcgacatcgcacccctgcaggagatctgctgcctcgcctctagatatggtgccctggtcttcatggatgaatgccatgccactggcttcctggggcccacaggacggggcacagatgagctgctgggtgtgatggaccaggtcaccatcatcaactccaccctggggaaggccctgggtggagcatcagggggctacacgacagggcctgggcccctggtgtccctgctgcggcagcgcgcccggccatacctcttctccaacagtctgccacctgctgtcgttggctgcgcctccaaggccctagatctgctgatggggagtaacaccattgtccagtctatggctgccaagacccagaggttccgtagtaagatggaagctgctggcttcactatctcgggagccagtcaccccatctgccctgtgatgctgggtgatgcccggctggcctctcgcatggcggatgacatgctgaagagaggcatctttgtcatcgggttcagctaccccgtggtccccaagggcaaggcccggatccgggtacagatctcagcagtgcatagcgaggaagacattgaccgctgcgtggaggccttcgtggaagtggggcgactgcacggggcactgccctgagctctgggtaaggacgagaagagccaaggtccgcctgctgccacagggtcaaaggaggttttcgatcagcccagaccagaggctctgagccctgaaccaaagtcccagagctgggctgggacgtgacctgtgctgagggctgtgagaatgtgaaacaacagtgtgaaaattggctgtga

SEQ ID NO: 116401 - DNA, 522 bp, Homo sapiens
tcccaggcaggcaggcgcgctcgggcgaggtaggagcgatgtggcctgggaacgcctggcgcgccgcactcttctgggtgccccgcggccgccgcgcacagtcagcgctggcccagctgcgtggcattctggagggggagtgggtgatgcccggctggcctctcgcatggcggatgacatgctgaagagaggcatctttgtcatcgggttcagctaccccgtggtccccaagggcaaggcccggatccgggtacagatctcagcagtgcatagcgaggaagacattgaccgctgcgtggaggccttcgtggaagtggggcgactgcacggggcactgccctgagctctgggtaaggacgagaagagccaaggtccgcctgctgccacagggtcaaaggaggttttcgatcagcccagaccagaggctctgagccctgaaccaaagtcccagagctgggctgggacgtgacctgtgctgagggctgtgagaatgtgaaacaacagtgtgaaaattggctgtga

SEQ ID NO: 116402 - DNA, 1555 bp, Homo sapiens
tcccaggcaggcaggcgcgctcgggcgaggtaggagcgatgtggcctgggaacgcctggcgcgccgcactcttctgggtgccccgcggccgccgcgcacagtcagcgctggcccagctgcgtggcattctggagggggagctggaaggcatctgcggagctggcacttggaagagtgagcgggtcatcacgtcccgtcaggggccgcacatccgcgtggacggcgtctccggagggcctggcactgtcatctttccaggcctgcccttgccccacctgagctgctgtatccatctcctctccttcacctcaggaatccttaacttctgtgccaacaactacctgggcctgagcagccaccctgaggtgatccaggcaggtctgcaggctctggaggagtttggagctggcctcagctctgtccgctttatctgtggaacccagagcatccacaagaatctagaagcaaaaatagcccgcttccaccagcgggaggatgccatcctctatcccagctgttatgacgccaacgccggcctctttgaggccctgctgaccccagaggacgcagtcctgtcggacgagctgaaccatgcctccatcatcgacggcatccggctgtgcaaggcccacaagtaccgctatcgccacctggacatggccgacctagaagccaagctgcaggaggcccagaagcatcggctgcgcctggtggccactgatggggccttttccatggatggcgacatcgcacccctgcaggagatctgctgcctcgcctctagatatggtgccctggtcttcatggatgaatgccatgccactggcttcctggggcccacaggacggggcacagatgagctgctgggtgtgatggaccaggtcaccatcatcaactccaccctggggaaggccctgggtggagcatcagggggctacacgacagggcctgggcccctggtgtccctgctgcggcagcgcgcccggccatacctcttctccaacagtctgccacctgctgtcgttggctgcgcctccaaggccctagatctgctgatggggagtaacaccattgtccagtctatggctgccaagacccagaggttccgtagtaagatggaagctgctggcttcactatctcgggagccagtcaccccatctgccctgtgatgctgggtgatgcccggctggcctctcgcatggcggatgacatgctgaagagaggcatctttgtcatcgggttcagctaccccgtggtccccaagggcaaggcccggatccgggtacagatctcagcagtgcatagcgaggaagacattgaccgctgcgtggaggccttcgtggaagtggggcgactgcacggggcactgccctgagctctgggtaaggacgagaagagccaaggtccgcctgctgccacagggtcaaaggaggttttcgatcagcccagaccagaggctctgagccctgaaccaaagtcccagagctgggctgggacgtgacctgtgctgagggctgtgagaatgtgaaacaacagtgtgaaaattggctgtga

SEQ ID NO: 116403 - DNA, 1346 bp, Homo sapiens
tcccaggcaggcaggcgcgctcgggcgaggtaggagcgatgtggcctgggaacgcctggcgcgccgcactcttctgggtgccccgcggccgccgcgcacagtcagcgctggcccagctgcgtggcattctggagggggagctggaaggcatctgcggagctggcacttggaagagtgagcgggtcatcacgtcccgtcaggggccgcacatccgcgtggacggcgtctccggagagcatccacaagaatctagaagcaaaaatagcccgcttccaccagcgggaggatgccatcctctatcccagctgttatgacgccaacgccggcctctttgaggccctgctgaccccagaggacgcagtcctgtcggacgagctgaaccatgcctccatcatcgacggcatccggctgtgcaaggcccacaagtaccgctatcgccacctggacatggccgacctagaagccaagctgcaggaggcccagaagcatcggctgcgcctggtggccactgatggggccttttccatggatggcgacatcgcacccctgcaggagatctgctgcctcgcctctagatatggtgccctggtcttcatggatgaatgccatgccactggcttcctggggcccacaggacggggcacagatgagctgctgggtgtgatggaccaggtcaccatcatcaactccaccctggggaaggccctgggtggagcatcagggggctacacgacagggcctgggcccctggtgtccctgctgcggcagcgcgcccggccatacctcttctccaacagtctgccacctgctgtcgttggctgcgcctccaaggccctagatctgctgatggggagtaacaccattgtccagtctatggctgccaagacccagaggttccgtagtaagatggaagctgctggcttcactatctcgggagccagtcaccccatctgccctgtgatgctgggtgatgcccggctggcctctcgcatggcggatgacatgctgaagagaggcatctttgtcatcgggttcagctaccccgtggtccccaagggcaaggcccggatccgggtacagatctcagcagtgcatagcgaggaagacattgaccgctgcgtggaggccttcgtggaagtggggcgactgcacggggcactgccctgagctctgggtaaggacgagaagagccaaggtccgcctgctgccacagggtcaaaggaggttttcgatcagcccagaccagaggctctgagccctgaaccaaagtcccagagctgggctgggacgtgacctgtgctgagggctgtgagaatgtgaaacaacagtgtgaaaattggctgtga

SEQ ID NO: 116404 - DNA, 1351 bp, Homo sapiens
tcccaggcaggcaggcgcgctcgggcgaggtaggagcgatgtggcctgggaacgcctggcgcgccgcactcttctgggtgccccgcggccgccgcgcacagtcagcgctggcccagctgcgtggcattctggagggggagctggaaggcatctgcggagctggcacttggaagagtgagcgggtcatcacgtcccgtcaggggccgcacatccgcgtggacggcgtctccggaggaatccttaacttctgtgccaacaactacctgggcctgagcagccaccctgaggtgatccaggcaggtctgcaggctctggaggagtttggagctggcctcagctctgtccgctttatctgtggaacccagagcatccacaagaatctagaagcaaaaatagcccgcttccaccagcgggaggatgccatcctctatcccagctgttatgacgccaacgccggcctctttgaggccctgctgaccccagaggacgcagtcctgtcggacgagctgaaccatgcctccatcatcgacggcatccggctgtgcaaggcccacaagtaccgctatcgccacctggacatggccgacctagaagccaagctgcaggaggcccagaagcatcggctgcgcctggtggccactgatggggccttttccatggatggcgacatcgcacccctgcaggagatctgctgcctcgcctctagatatggtgccctggtcttcatggatgaatgccatgccactggcttcctggggcccacaggacggggcacagatgagctgctgggtgtgatggaccaggtcaccatcatcaactccaccctggggaaggccctgggtggagcatcagggggctacacgacagggcctgggcccctggtgtccctgctgcggcagcgcgcccggccatacctcttctccaacagtctgccacctgctgtcgttggctgcgcctccaaggccctagatctgctgatggggagtaacaccattgtccagtctatggctgccaagacccagaggttccgtagtaagatggaagctgctggcttcactatctcgggagccagtcaccccatctgccctgtgatgctgggtgatgcccggctggcctctcgcatggcggatgacatgctgaagagaggcatctttgtcatcgggttcagctaccccgtggtccccaagggcaaggcccggatccgggtacagatctcagcagtgcatagcgaggaagacattgaccgctgcgtggaggccttcgtggaagtggggcgactgcactgggctgggacgtgacctgtgctgagggctgtgagaatgtgaaacaacagtgtgaaaattggctgtga

SEQ ID NO: 116405 - DNA, 816 bp, Homo sapiens
tcccaggcaggcaggcgcgctcgggcgaggtaggagcgatgtggcctgggaacgcctggcgcgccgcactcttctgggtgccccgcggccgccgcgcacagtcagcgctggcccagctgcgtggcattctggagggggagctggaaggcatctgcggagctggcacttggaagagtgagcgggtcatcacgtcccgtcaggggccgcacatccgcgtggacggcgtctccggaggaatccttaacttctgtgccaacaactacctgggcctgagcagccaccctgaggtgatccaggcaggtctgcaggctctggaggagtttggagctggcctcagctctgtccgctttatctgtggaacccagagcatccacaagaatctagaagcaaaaatagcccgcttccaccagcgggaggatgccatcctctatcccagctgttatgacgccaacgccggcctctttgaggccctgctgaccccagaggacgcagtcctgtcggacgagctgaaccatgcctccatcatcgacggcatccggctgtgcaaggcccacaagtaccgctatcgccacctggacatggccgacctagaagccaagctgcaggaggcccagaagcatcggctgcgcctggtggccactgatggggccttttccatggatggcgacatcgcacccctgcaggagatctgctgcctcgcctctagatatggtgccctggtcttcatggatgaatgccatgccactggcttcctggggcccacaggacgggtgggaccatgtggcacctgaggcctggggtggggcttctgagggt

SEQ ID NO: 116406 - DNA, 1662 bp, Homo sapiens
tcccaggcaggcaggcgcgctcgggcgaggtaggagcgatgtggcctgggaacgcctggcgcgccgcactcttctgggtgccccgcggccgccgcgcacagtcagcgctggcccagctgcgtggcattctggagggggagctggaaggcatctgcggagctggcacttggaagagtgagcgggtcatcacgtcccgtcaggggccgcacatccgcgtggacggcgtctccggaggaatccttaacttctgtgccaacaactacctgggcctgagcagccaccctgaggtgatccaggcaggtctgcaggctctggaggagtttggagctggcctcagctctgtccgctttatctgtggaacccagagcatccacaagaatctagaagcaaaaatagcccgcttccaccagcgggaggatgccatcctctatcccagctgttatgacgccaacgccggcctctttgagagcagggcgctggtccagcccggcactgagacacgggggccccagagagaagcacagaacaccttgcctctctacccagaggagcgccctggctggcagtacagttttttgatttgctggagtcccggtcaagggagaagccagggtggttaaatgatggctctacgctcactgcctccctccaggccctgctgaccccagaggacgcagtcctgtcggacgagctgaaccatgcctccatcatcgacggcatccggctgtgcaaggcccacaagtaccgctatcgccacctggacatggccgacctagaagccaagctgcaggaggcccagaagcatcggctgcgcctggtggccactgatggggccttttccatggatggcgacatcgcacccctgcaggagatctgctgcctcgcctctagatatggtgccctggtcttcatggatgaatgccatgccactggcttcctggggcccacaggacggggcacagatgagctgctgggtgtgatggaccaggtcaccatcatcaactccaccctggggaaggccctgggtggagcatcagggggctacacgacagggcctgggcccctggtgtccctgctgcggcagcgcgcccggccatacctcttctccaacagtctgccacctgctgtcgttggctgcgcctccaaggccctagatctgctgatggggagtaacaccattgtccagtctatggctgccaagacccagaggttccgtagtaagatggaagctgctggcttcactatctcgggagccagtcaccccatctgccctgtgatgctgggtgatgcccggctggcctctcgcatggcggatgacatgctgaagagaggcatctttgtcatcgggttcagctaccccgtggtccccaagggcaaggcccggatccgggtacagatctcagcagtgcatagcgaggaagacattgaccgctgcgtggaggccttcgtggaagtggggcgactgcacggggcactgccctgagctctgggtaaggacgagaagagccaaggtccgcctgctgccacagggtcaaaggaggttttcgatcagcccagaccagaggctctgagccctgaaccaaagtcccagagctgggctgggacgtgacctgtgctgagggctgtgagaatgtgaaacaacagtgtgaaaattggctgtga

SEQ ID NO: 116407 - DNA, 1089 bp, Homo sapiens
tcccaggcaggcaggcgcgctcgggcgaggtaggagcgatgtggcctgggaacgcctggcgcgccgcactcttctgggtgccccgcggccgccgcgcacagtcagcgctggcccagctgcgtggcattctggagggggagctggaaggcatctgcggagctggcacttggaagagtgagcgggtcatcacgtcccgtcaggggccgcacatccgcgtggacggcgtctccggaggccctgctgaccccagaggacgcagtcctgtcggacgagctgaaccatgcctccatcatcgacggcatccggctgtgcaaggcccacaagtaccgctatcgccacctggacatggccgacctagaagccaagctgcaggaggcccaggggcacagatgagctgctgggtgtgatggaccaggtcaccatcatcaactccaccctggggaaggccctgggtggagcatcagggggctacacgacagggcctgggcccctggtgtccctgctgcggcagcgcgcccggccatacctcttctccaacagtctgccacctgctgtcgttggctgcgcctccaaggccctagatctgctgatggggagtaacaccattgtccagtctatggctgccaagacccagaggttccgtagtaagatggaagctgctggcttcactatctcgggagccagtcaccccatctgccctgtgatgctgggtgatgcccggctggcctctcgcatggcggatgacatgctgaagagaggcatctttgtcatcgggttcagctaccccgtggtccccaagggcaaggcccggatccgggtacagatctcagcagtgcatagcgaggaagacattgaccgctgcgtggaggccttcgtggaagtggggcgactgcacggggcactgccctgagctctgggtaaggacgagaagagccaaggtccgcctgctgccacagggtcaaaggaggttttcgatcagcccagaccagaggctctgagccctgaaccaaagtcccagagctgggctgggacgtgacctgtgctgagggctgtgagaatgtgaaacaacagtgtgaaaattggctgtga

SEQ ID NO: 116408 - DNA, 978 bp, Homo sapiens
  misc_feature (208)..(208): n is a, c, g, or t
ggtcagcctcccgagtagctgggactgcaggcgcccgccaccatgcctggctaatttctcgtatgtctagtagagacggggtttcaccgtgttagccaggatggtctctatctcctgacctcgtgatctgccctgcctcggcctccccgaagtgccggaattacaagcgtgagccaccattcccggcccaaagaggagaagaagtatnaagtgcttgcttggacctttctactgtgcttattattctgtcttctcctcatggcaaggatggggtcatgctttgttgtccaggctggtctcgtactcctggaatcaaggaacccttccacctcagcctctgaaagttctgggattacaggcataattcatcctgcctggccaagaatctttaatgctctgctcaggcaactcttcctctgaggatccttccagtgacaattcaagaattagcgactcaattcccagggtcccttagaccttcgacctgcttgtgggcaatttggaaacacaggattgtgcctgaatcacctttgcattcctagcatcgtttttcctggataataatttgttcaatatatgttcaataattgttcaattattcaataacaaatgttcaataaatgtgtgttaaatgaatgaccacagctcctatagcaggtagctgactttgtgtctcctcaaccaatctctgagctctttgaaacaaagcctattttgtttgaatgtaaatttatcatcccagtttctggtacagggtagggaactaatgcatatgtggtgaaacaatcaatgccttagtgcttatgaagaatatcactgtgttacacagaagcatggaatgactaatgttaagctaaactcaagttacttagggaatattaacttgcatttattatactctgggggaaaaacacatatatgtgtatatatgtataacatatgtatgtatacacatatcagaatttgtatatgagaatg

SEQ ID NO: 116409 - DNA, 735 bp, Homo sapiens
aaatatttgttgaacgaatagaagaattaaaaaattgtatcaccaactgttaattatctgggaattaattaactgatttgcagattaactgtcttaaaaatatgacttctttttgagagaaaataaaactaatgaaaatttcaaaagcctctacatatcagaaatgttttttataactacatataactttatagttcttctttctcttcatcagtcagaagtgtaatctaaaataatttttaaaaagcctgtcattcctcagtgttctttgtagtgctgtcaaaagtttgcaggtttaagaatagtaactctaatgatgaaagcattatgatctgagtgcatgttatataaataaagcttaacatttagcaaaaagttgaaattgtacatttgggtaaaaaggggtggataatgttaaataagtttcattacaatatggaataggagaataaatttttttgtggtttgataaagagaaacttgtttttaaaaaatgtcctcattgagttatcaagcaaactggaaaaatgaaaaaattatgaagaatctgtggctaataagacaatgttgatttggttcagttagctagcaatgggctctgtgtttgattttgtttgagttaaatagacaacaattttcattgaagctcttccagtggaggttatgctgatttgttatctgattgattagattcacaccacagaaaaattagtagccatagagagaaattaaatg

SEQ ID NO: 116410 - DNA, 271 bp, Homo sapiens
attttaagagagaagcagtttgaatctacttcatattgtggtagacacagtgagttgagttctccttatcttcctgacttcctgattgtatttccagcctcttttgaagccaggttttcgtttccagccttctttgaagctaggcatagtcagtgagatgtaggggaaggtcctccaatgaaacctctgggtaaagctctctaaaaggaactgattgagtcagctaggaggcacatctttttgatcttaacagccctttctcctgctgtct

SEQ ID NO: 116411 - DNA, 374 bp, Homo sapiens
gccaacgcatgctgaggcttgccgaccccgccagaggctagaagaggcgaggaaggattcttccctagagcctgcagagggagcgtcgccctgctgacaccttgattttggacttctggcctccagaactgaaataataaatgtctgcggctttaagccatctgaggtccttggtaatggcagccctaggaaatgaatgcagtgcccaggccccaggttctagccttggcctagagagccaaaaacagtgaagatgaaatcctgcttctgcctcaccacccctgctctgatcagctatgctcagccttgtcctgccccaggacaatgacatttacacatgagccaccctcccaaggacagccaggcacagccca

SEQ ID NO: 116412 - DNA, 689 bp, Homo sapiens
agcggatgatcacaccactgcactccagcctgggtgtcagagcaagactctggtttgtttgtttgtttatttgtttgttaaagctattctgtagggcagagggcactattccagagtctgatgcaagagaagataaggaagacaagatctcaaccactttcagcaaagctttgcggagaatgcaacatccttcaagacaccatgaagctccacgcatctggtcatcttgtttcttcagggaataaatttattgttctctgcttcagggcaggcacacttggccagtaaagaaaatccccccagcagagaattgcagatactcacagcaagaagcctttcttgtgaatggaggatggatgtggagctggtccgagcagtctgcctactgcatctgctatgacacccagcaaactggaagggaaaagcagttacaaagtttccaaccagcacaaattccatagtcaggttttccacatgtggggaaatgacaggggtcagcacatccaacgtgcaatggacaagccttgcactgggtaaaccacgttcatggtcatggaatctcatttaccagaaagaccatctggaaaaaatctccagggccacacctccgatgtcttctttgcaataggcagcttgactgcagcgttgcattgcagaaagagattgaagatatttacatttattgtaaa

SEQ ID NO: 116413 - DNA, 745 bp, Homo sapiens
  misc_feature (13)..(13): n is a, c, g, or t
  misc_feature (22)..(22): n is a, c, g, or t
  misc_feature (35)..(35): n is a, c, g, or t
  misc_feature (40)..(40): n is a, c, g, or t
agcggataggccntgacgggtngacgtgctgtgcncgtgnatgaacgcagggcccgctaccatacaaggaacgtcactgaagtatacaagtaagtaaaatattatacaaggcatggcgtagaaaactaactacaagagaagtagaaacaagcaggatactcagaagagggagagagatagtacctgttaagagtcggggtgagggagatcatagttggaccaggcattgagggatgaggaagcccttacccgacagaggcaggggaaaaaacgtttgggaggagagaagcttaaccatctggctgcgtgtgaaaatggagaggcgggagaagaacgctgttctgggctcagtcggcggctgggtcgttgacatttgcggtggaaatttgttgtctagccgccatcttcttccagtgagagcacccccttttcttttaggaaaccacctctcccctcttctcagtctaaatggagctgaattttatccccagttccaaaggaccgcatgacccaggcccagtcagtcacaacattttcctcctctacccatggacactgttttagggattgtcacttgacccaagcccagacaatatgatatatccaaggctttctctgaaacaatcaggaaagaggcactcactctctctccatttaggctgcaaaattattagaatgtaaacctgcagccgctggtggccgtcttatcatcacctgtaacacatcaagcctgcttgagaatgaa

SEQ ID NO: 116414 - DNA, 375 bp, Homo sapiens
atgctcatatatggtagagagaagaaaaagaacatactagactctccttttatgccacattatcaccaacatctgccaaaattcacccatagaacttatttgcatttagataagaatgaaacaatgtataatttagagccttctaaaaattcctggacattaatccataagtggcatgaggagtaggctttgtagttagtcagtcagggttcaagcgccagctgtgccacttaacaagctgtgtgactttgggcaagtttcttctttccatgcgagaatatataggaataaacaaaactcagtttctcctatactctcattcagcaagcaacacagaagacttctgtgacctctggtcatcgagaagtagggatt

SEQ ID NO: 116415 - DNA, 781 bp, Homo sapiens
ggaggtgcttctttttattttagcatccagaaacagctagccaggaactggagataacagagcaggctttgagagccaatgaattagtaggtaaggagagcttgcccatgattgtcagcatgacttttcgaaagatcagcttcctctctggctgctcaaagattttaaaaatcagagataatcttgttagagcatgtttctcaaagcagtgaaaagacatctttggaaagaaataattttgtgatcagatacatttgtaaaacacaaataaattttagaaagaatcctattatattcctttgagataaagctgtttgatcgaatatttcctaaatgtatttgactatggtaactttgagtttggggttttggtttggtttggtttcaatttccgtgagctttccacagacttagtgctctcaaaacatacttgaggagacctcgtgttagacagtgactagggtggtgagtcatgagaagtgatcctttgctcctacatcataaattggcccaacttcccataacgggaatgagcaataccactttaacctgcttttcattggtaagtagggaaagcttttagtggaaacctattgtaatccaccctgtaagatttccttcaggtacgagagtgcttctcagagcatgacttaacactgcagttactttgccccagaaagatccgaaatgccattgaaaatggaactagataccttagtaatggcataccactgaggcacccactagtaggttcaggaacactctgaaacatacatacccc

SEQ ID NO: 116416 - DNA, 765 bp, Homo sapiens
gagagagagggagagagagaggggaaagggctatcaatgtaatttgcctctacagctaaacacacaggccgtaatcatagccattttactaaatgcccataaaactaaaaaacaaataggaaacctccggattacagggccttctctgagcagggagtggcgcaatcaagtgctatctgcgctaagtcccagcttgcagtgagtgacccaggaggcgcgggtaaacagagagaggaccccgttccctgtcccccccatcaaacctccaaggctgaatgcctccgaggctgagcgccgggggaacggggggcttcctgggaacgcagtcccctccgtgtgggggtcctcagctcccctgtgtgagcctgtgccatgcggaacgggaccacagcctcagcctcacaacgtgcctgtgacccagcgggagtggaacccaggcctctggcaccggggaccctcagaaccctgcctgcaagggaaccccagactttgaggggaacagcctcgtgcagccctcatttctcccttacagctgtgggacttcacagacaagcaaaagaaagggagcattttagcaagagcagcctcaacgccaccccctagagagcagaaaaaaagggatgctaccccaggtcttactctagggtctcccctcggccacactccctgcctcaacagaatctcaagcgccagaatcaccaaaggacattctaagtgtcattccgccctgagtgtcagaaaatgcctgcagtggatcctcagtgg

SEQ ID NO: 116417 - DNA, 237 bp, Homo sapiens
ctcaggaatcgggctgtgtggggacagtctcctcacctttgggcatgaggtggggctgggcaaagaccacccagctccctaacccctactcatccacctcctgccccagttaaaatcaataaatatttactggcagctacaggtgtctggggaggcagaaaggaacaagtcatgggcccccacccaaggagggggcaggatgcagcgtaagaacctgcgcttggtcactgaggtgct

SEQ ID NO: 116418 - DNA, 709 bp, Homo sapiens
gtcacgggctccggtcccggcggcagaaatagggcagccgcggcggcggtggcacagcagcgggcagcggcggctcagggagctggagcctcaacagcctccagcgagcccgggacccgccgacagcccgagaaaccagccgaaggacgcggggcggggtcgccgccgccgccacggggtgctccctccctcccgcccaagtccggccacctggtcttcccctcggccccggccgtctcagactcatcaaaatgaaaccaggaggcttttggctgcatctcacactgctcggagcctccctgccggctgcgctgggatggatggacccaggaaccagcagaggcccggatgtgggtgtgggggagtcacaggcagaggagcccagaagctttgaagatcacaagaagagaaggggcttccagagcagcaaggagctgctgggctcctgacgggaagaagttctgcagccgagggagccggtgcgtgctcagcaggaagacagggagagcccgaatagcagtgccgtgggaggatgcaggcaccagctacgtgcatgtgtgcaggatatgatgggaggtatcatgacaacgcacatgtaagctccaccgtgctgcttgccctcctgggaacgaggatcaccgaccatccagaggaagggccggggccgtcaagtgacacggccacaggggcggtacgcccgttgagaatg

SEQ ID NO: 116419 - DNA, 250 bp, Homo sapiens
gtttgcagtgtcaatgagattgagggcttgggcttgaacccaaccttctccctccaaatagcctgctctttctgttatgtcatgtttcatatacaagtttgggagcctccagccctgactatcccaacatatacaacataatgtatatgttgtctttggaaatatcttctgtgaaggccaagcatttaatattacaggaaaccttgaagtggatatggaagcttggcagccagcttggatcttcctaaga

SEQ ID NO: 116420 - DNA, 361 bp, Homo sapiens
tttcccactacccatcaagggatctggttactcagctagttcccatcagctctggctgtggtctcggctgagtggccttggggttatgtaagaggtagtgggaggggaagagagctgagggctgcagcatatggtccacctgggcttggccctttgggaataggcagccctggctctctctgaatccttagaaattacacggctatttgatcctggaaagatcgtgcagagcacacctgagtgtcatacagcctggtctgaggtagtggggttggagatgaggtgggttggggcacagtggtgtttagctcaggtaccaggtggggaggtttagactttctgctttaaaaggaatgattag

SEQ ID NO: 116421 - DNA, 702 bp, Homo sapiens
catacacatacgtaattctatatgaaggtagtcatactgtatgtgcttagtattttcagtgtacactttacattttttgcttgcctctcccaccccgtcatatctccctatgtgtttttctccatgttcatttaatcatatacaaacacgtacacagttgtttcatggtctttgttttgctttgaatgcaatcacattgtacacacacccacgaaccttgcttttctcattcagcaatgacacttggagttggtttcctgaaagtcaactgccattgcccttactggttttttaatagtttataactgcatacgatttcacattgtgcttatacccatagcttattctgccatttcttgcttaatgggcattcacttgatcttcatgtcttgagacaaagttacattaactatctgtgtacttctgtccctacgtagtgagcttttgtctctgggatagtttcctaatactgggcttggtgattaaagagcatatggtttttaattttaatagatctcaccagatcttgatccaaagagaatggaccaactcatatttccattggctatgtcaagtgtacccacttcacattctcaaccatataggggctcttcatttctattgttgggcaatctaaagttgtgtcttattattttaactgctagtgaatttgagtatttttacccttatatttgatgcttc

SEQ ID NO: 116422 - DNA, 375 bp, Homo sapiens
caaatgtcctctttcttacaaccaggattcaggctctcacttcccacttggttttctccacttgaaaaagaaaagcacgagccgggcgcggtggctcacgcctgtaatcccgacaccttgggaggccgaggcgggtggatcacgaggtcaggagatccagaccatcctggctaacacggtgaaacccagtctctactaaaaatacaaaaaattagccaggcgtggaggcaagcgcctgtagtcccagctactcgggaggctgaggtaggagaatcgcttgaacctgggagggggaggttgcagtgagccgagattgcaccactgcactccagcctggtgacagagcgagacgccgtcaccaaaaaaaaaaaaaaa

SEQ ID NO: 116423 - DNA, 236 bp, Homo sapiens
agtagagacggggtttccccatgttggttggccaggatagtctcgatctcttgacctcgtgatccgcccacctcgacctcccatagtgttgggattacaggtgtgagccactccacccagcccagtgaaggcttttcatacttgcttgtcagcctcctgcatcctactccagcacctggcgctcacaacctgtgggctgctctcatccgtgatcatctctccccaggcctgctgtt

SEQ ID NO: 116424 - DNA, 748 bp, Homo sapiens
agtttgggttcaacagggaccatccctcagaacacctacaagtggcttctctagcatggagcctcagacttctgtatctcagggatcccaggaagatgattctatgagtgaaagttgtaagcccttcctatgagatagtttcagattctgttcttttgtgacattgcattaatcaacaagtcatcaagttcaactcaaactcaaagggagaggaattctattcccctcttagtgagacagtaccaggaattgtgccatcttaatctcagattcctgcattacatagatttctaagtcaaaatgttttgaccaaagccacatttgccagatattgggagataccactgctctcactcagaagcctgaatctcaaggggtccaagatgtcagtgctgctggaattttggacagcctattactacagaaatgtgttgaaacataatataaatcagaaaggaacaaatatagccagcatacaagaatgaggggagaagagagtgggagtcacctgcccaagagaacacaggagagtcctgaggttcccgtgctgaagaaattgatcaatctattcaggaaacagctatcagttggacattcctaagggaaaactgcaggagagtgggaccttctgctgatatggaaatactatatagagctctcgggctgctgctgaagaagaaagatttgctaaattttaatagttattctcaccttcttatgaagttaattgtagaaggaagattatgac

SEQ ID NO: 116425 - DNA, 371 bp, Homo sapiens
aaaaggctgggcacagtggctcacacctgtaattccagcactttgggaggccaaagagggcagatcatgaggtcaggagtttgagaccaacctggccaatatggtgaaaccccatctctactaaaaatacaaaaatcagcttggcatggtggtgcatgcctgtaatctcagccagttgggaggctgaagcaggagaatcgcttgaacctgggagacagaggttgcaatgagccgagattgtaccactgcactccagcagcctgggcaacagagcgagactccttctaaaagaaagaaagaaagtaagagagagagagaggagaaagagagagaaagagagaaggaaagaaagaaagaaagacggaaagaaa

SEQ ID NO: 116426 - DNA, 466 bp, Homo sapiens
ggaaaaacaaagatccccaaagtccatttcgctccgaggtcagtggacacagctctgtgactgtcctgtgctgtgtgggtctgtagaagggccagtcatgggccatcgagctactcacagccaactgcacccaagtccaagcctggctctgttcccatacacagagacaggatgggggctgctgatctggcctgaagccttgctctgggcactgaaaacgggggctatttccttacctgaagatctggaagcagcatgttgacaaaagcaccaactgctctgccatcacgtcccactgggtgtcagtgggaaggcctaaccaaggcctgcctccagtggctattcaggcagacgggccagcagttcccctccagggagcaagggacccttcttacccttttgatcacatttccctctcttaaaggggcactgctgtgggaaggggtcatgccttggatcctacagt

SEQ ID NO: 116427 - DNA, 375 bp, Homo sapiens
agaaaattaccttgagatttatagttgggatgactaggcctggagcattgccctttgctaagataagaaatataggtgttaaaattgatgttttctctttctttttagggagaacatgtaattggtttgggagggttgaatttaaggaaaaacatctgaaaccctcttacacagactgatagtgctgtgataggaagaaaatacccagagagaatgtacagtaagaagaaggaatctaaagacaaaccttggcgcatctctctataaccagcagtcagaaaggagggaaatcaaaagaaagtgtcagagaatgagtaggttaatacatagcaggtaaatgaggatggtgctttgccaaggcaaaagagaaaaaca

SEQ ID NO: 116428 - DNA, 140 bp, Homo sapiens
attatttagaggaaaaaacatccagtagaggatgaataggaaaggagtggcgtggggtggagtttcacacctttgaggaagggaaatgacacgaaataaaatcagaaatccaagcctcctgctcctgggtactttccttt

SEQ ID NO: 116429 - DNA, 210 bp, Homo sapiens
attttgaatcgatttgctccctctgaacttgtttctgcatccttatactggggataagattactattttctgtgtatggttgtttaaatgagatttggattcacaaatgtaggtgctgctggctatggtggtggcagctttctcttctcttctgaactcactgtaagctcctccggggaaaggcctgttctctactcctcctgtgtgtct

SEQ ID NO: 116430 - DNA, 174 bp, Homo sapiens
ggatattgctgatgcacaataaacaaagcagtgagtagactttaagatccaaaaaagggttttgcttgagcttataagaaataagttacataacaaatgtacagattatgtgtaatattcctaaaagtaaaatattaatacaacacaataggactacattatacgtatgcatct

SEQ ID NO: 116431 - DNA, 611 bp, Homo sapiens
aggacctttaaagtggcccagattcagaccatgaagggcagcttgggtgggcttccctcctttcttcagctcaagaaagaagtgaaagccactgaggcttgccaatgggaagggctggaaagttatcaactcaggcttcctcctgccgttaaatttgcaagtgctactccctagacggaaacctgaatactcactaagcctaggactttgaaccttaggaatccccaatgaaggtattataaacaagtgagagaaaaaaggtttgctccaaacacctcagtgcttacccctgccccacccatgatacaccttcttatggtctgagtcccacaccctgatcgggggtgacattttcaacaatctgcagtgcaatgagaaaaataaagggtaaatgtatgagtactttcctatgaccagataaattaccaatggttgattcttgggaaagactattttttattctgagatgatgttctttcactttttttcttttttcagaggtttgggtaatttaagcgtcccttctttaatggaatgatggcaatagtacgtggcagttgcctttcctaaaatgtcctcaattgaccagatcaccagtgggcaattcggtg

SEQ ID NO: 116432 - DNA, 882 bp, Homo sapiens
gtgtatacaaggttctgacttaacagaattaacataaagcgtttataaatgactgagatactttgatgactaagtctttagacaggttaattcagttatttaatgtgtatacatattcagtttttcttggtgcctgttctttaatttctataaaactcaaaggactctttagtgtaacttacactacatagattataagaagaccaaagttgttctctcttcaccaccacttacttcctgtctgatcttgtgcaagtaaccaaactttttttctttgtgcaacctctgtttccccctcctccccatgtcacgaaagaacgtaattgaaaccttcagattaaaagctctcacttttaactctccttgaacccaggaggcagaggttgcagtgagctgagattgtgccattaactctcactcattgttctcccctcttatttcaagttttgaattggatagtgtggaagacctaagtttgggaaaatattggtggtaagtcacaagtaggcctggactacttcttgaagcttcttgaaggatcatgccgagctgacagcctgttgatgcttatgacactatattataaagcaaggaatgccgggcgcggtggcttatgcctgaaatcccagcactttgggaggccgagacaggtggatcacctgaggtcaggagttctagaccagcctggccaacatggtgaaacctcgtctctactaaaaatacaaaaattagctgggtatggtggcaggcgcctataatcccagctactcagtgggtgctgaggcaggagaatcacttgaacccgagaggcagagtttgcagtgagccgagatcgcgccatcgcactccagcctgggggacaagagtgagacttcatctaaa

SEQ ID NO: 116433 - DNA, 237 bp, Homo sapiens
ctagagttggggtcagcacacatttttttaaagatccaaatagtaaatatttcaagttttgcaggccataaagtctgttgcaggtactcaactgctcttgtgacatgaaagcagccatatataatactaaataaacggtcctgttgtgttccaataaaactttatttataagacaggcagatggccaggctgtggtttgtctaccactgctttagagttttttccttcctcttcact

SEQ ID NO: 116434 - DNA, 341 bp, Homo sapiens
ttggatattttcaaagtaaatcacaagtatgtcatttcacacataagtcgtaggtatcataacagatatggaattttttacacataacccacaaggccattatttcacccgatgcaaacatgcttataccttaatatgtcctaagactcaatctgtgttcatatttccctaattgtcttaaaatgtcttttccacagtggatttatttgactgaggctcccaacgaggcccccacgtggcatttggttgctatatctcttaaatctcttatgtaacagttttccctccctcccttttttttcaagacattcatctgtcgaagaaaccatgttgtttgttgt

SEQ ID NO: 116435 - DNA, 560 bp, Homo sapiens
ctgtaggggaaagagatttaaaagacacatcagataaaaaagtggctcagactaaactgtcatgtttaaagatagagatattaaataatttgacctaaatgaaagtgtagagaagcacaagggagagaagatcctgtcaggacggtgatgactttgggggctgggagagggctgtggccatgagggtgctgtggagggggcctggagtggctggcaaagctcttggcttgcgtggtggtgacaaaaagtgtctgccctatcaaagtccatgaagcttggctgggcacggttgctcatgcctgtaataccaggctttgggaggccaaagtgggaggatcgcttgagcccaggagtttgagaccagcctgagcaacatagtgagacctcatctctacagaagatttaaaaatcagcagggcatggtgctgtgcacctgtaatctcagctactctggagactgagacaggaggatctcttgagcccaggaggtcaaggctgcagtgagctgtgattgttccactgcactccagcctgggcaatagagcaagacactgtcttaa

SEQ ID NO: 116436 - DNA, 385 bp, Homo sapiens
ctgaggccttgtggaaggagtgaatgtgatggtgatcctgcccaggggctatgattcatctggctgattgattccagctgagtctgtaaaaatctcagtcctgctgttggaaagcagaatgtcaagtcatggagtggggtgggggtgactgtcaggtcatctaacttgataggtttggaagggagtccacaaatatgcttcttgacaagggactcatataggtggcatgtgggccagactttgggatcctctgctctcccaaaaatggtattttgccttcagtctatctgcttctgctttgcatttctttgatgttaacaaaaaggcagtagagaaatcactatgagtgcaaaaacctaggtttgagtcttagctgagatatagg

SEQ ID NO: 116437 - DNA, 554 bp, Homo sapiens
ggggaaactgcccccgtgatccaatcacctcccaccaggtcctttcctcaacatatggggattaaggggattgcaattcaggatgagatttgggtggggacacagccaaaccatatcagcatacctaggttactagctcatatctggagccagcaatggggtttgtcccaccagaatcactcaagcgtagagtgatgtggttccccaaaggaaaactaaggtgtcgtttctagacaaagaggattcaatgctgggaaggcaaaagcagtgtatctattccatagtaggatgtgagtcatcagtacacaggagatagtaagaaggctaggagcagtggttgacacctgtaatcccagcattttgggaggccaaggcaggtggattgcttgagtacaggagttcaaggccagcctgggcaacatggcaaggccttgtctctacaaaaacaatacacaaatcagctgggcatggtggcatacacctgtagtcccagctactcaggaggctgaggtgggaggatcgcttgagccttgggaggtcaaggctgcagtgag

SEQ ID NO: 116438 - DNA, 304 bp, Homo sapiens
accttttactattatgctctttgataggtgcctgagggttgtgtaagtagcactgtctagtacctaggtagatagatcaggaaaccagtagagaggtctaagctggacatggagattcagaagtcagcagcacacagaggataactggagccatgggaatggagccaaaactcaggcagaaggtggaagtggcctcagaaaggggagaaccagagcagtctgttgcctgggggatgaggaagtggagatggagcgggtgtggaacattcgttcaagaagtttggctgtgaaaatggaaggaaaa

SEQ ID NO: 116439 - DNA, 452 bp, Homo sapiens
ggtcaaaactttattaattaattggcctccataaaccctcactctgaccagaagagcgtgctggcatttcaggtcccccagtattggtgtagtttagaactcaattgtaataggcctcaaaaagtttgggatttccctttccccagtgcagttatccatgcaaaacagtccttacatgctgtttcctctgcctgacacatttcattctccctgctttccttaggtattatctgatttccctgactaggtcagatcagccatatgttactaaatgatgtgcatctttttttcagtacttacaacagtagtagttttatattaattttctgtgtttatttaattaatgccagtctctatgtaagttccctgagagtagtgtcattacctgtttgtgcactgccctgtcccttggtgcctgtgtcacatattaggtgattaataactatttgagg

SEQ ID NO: 116440 - DNA, 385 bp, Homo sapiens
ttacttcacaattaaccaagaatgagaaagtagatacaccttgctggagagcccatgcaccaaatgtactgtatttttgtatatatacttagaaagtagagtcacataacatttgcatttgatttctgtaaattcatctacattaggcattaaacaacaaaaataataatgttaacatttcagaatatttcaaagagtatttactcaagagtgagcatgagaaacacgaatgtaatctactcttcccccagtggtctcagtttccacatgcttctccaagaggatgtatctcactgtgctgagtgtgagatgaggagggcttaaagagatgtatttggaacatacaagtttttccgtaaatacaaacccattacttcctctggtg

SEQ ID NO: 116441 - DNA, 324 bp, Homo sapiens
taacccctgcccctatgagaaagaaacttactaatgacaccacaatatttgcatataattctttttgtctttagccttataattttccaaagtatcttagacaagttattttcttccccaaccccttcagtgtattatccatttataatacaattaggtttgtgtgttattgtttatatacctttttgagttctccccacatcctggttgacctgcatgattcgtttgtttcggagatcatatgtctgtcatttttgtttttgtttttgttttaattaatagagacagagtcttactattttgcccaggcaagtctcaaattcc

SEQ ID NO: 116442 - DNA, 245 bp, Homo sapiens
ttccaggcacgacaggtgattggctctagtaaaaactgatgcagtgatgtcattcttagtgttttcaaaggagagaaggctgggatcggggaagtccggacgggctcagagcagaggatttgcggactctgggctgtcgacgtgaaccagtgcttgcattttgtaattgttaccaaagaattgataaaactgtgagagtgtgtttttccatggtcagcaggaaaatggaaaaggaaacaccattt

SEQ ID NO: 116443 - DNA, 377 bp, Homo sapiens
atataaagttcagtgctttgcatgggaacacagacaattaaacaaaaaaatcaggaaaacaatgaatgaacaaaatgagaatactcacagagagggaaactataaaaaagaattaagcagaagttctggagtgaaagaataccataactgaatagtaaaatttagtagtggaattcagcaacagccttgattaagtataggaaagaatcattaaactcaaagatatgtcatttgaaattacaaaatccaaggagtaaaaagaaaaacaaatggaggaaaagtgaagaaaacctaagggacttatgggacaccatcacatggaccaatatacacattaggggattttcaaaggataaaagtaagagaaggggacagag

SEQ ID NO: 116444 - DNA, 200 bp, Homo sapiens
cccgactagcccgacaggagggtcacaagcactgcccttactgacagggaaacaaggcactgggaagtgggggccacgcctggagctggagtcgcttcccagcagggccaggtgaggccaaggcaggagtgagaggtggaggagtcctagtgaggcctgtcatgttgctgtcgggctagtcgggggggtatggggctgtg

SEQ ID NO: 116445 - DNA, 417 bp, Homo sapiens
acaatctaagagagcagtcagggttatgcccagagatctgaaagaaaggaatagcctctcagctcttccgtatcgcccttgtaaaagaacaaccctcatttttatctcataaagtgttagggaggattagaagggtttacatatggagggcactgagaaaagaggctgacatttagaaggtgctccaaaagcagcggccatggtgatgggctaaggtactgcagggaaatgcaaaaagacaaaggagggtcaagttcaggagcaccacctccatttagcctgtgcctgagagagaagacatggggatggacacagagaattaagaggatgaaaatgacgcagagctccagtctcacaacaatgtgggagggcagagagtcaagtcacagtgtgggtcagtgtcctctgacgctgcag

SEQ ID NO: 116446 - DNA, 449 bp, Homo sapiens
acatgcaggtgatgttaatctacatgaaagatgctgaattccataacagaaaaaaaaattacatgtgtgtgtaatatgaaagaattaaataacttcagtaagtacattctatctgtacccttgtcttttataagggtaactgtatataagttaaactagaaattttatttttaaggggtcccatttcaaaccataagtgctttaaacagcaattatcagctaaattttcctgctggcagcattactagagatatgttgtttctgggcaaagttatccagaggaatcctgctccctcgtattttggaggagttgagtttcatagcatgtgataattacccatttttaccagttgagtccaagttgcaactcataaggctgctacagtgtatttctaagtattgtttaaattggaactttaaccttttatcctgggaaatgattggttttg

SEQ ID NO: 116447 - DNA, 304 bp, Homo sapiens
aaaacatcaagatacgctctgattggaccagcctgggtcccatgttcttccatgacccaatcctagtagcccaggagtgggatgtgccaattggcttggcctgaggagggcccccagagggtctgtaatccatgtgtaactggagttgctgtaaaatggggccatctggctgggtgcggtggctcacgcctgtaatcccaacactttgggaggccgaggcgggcggatcacgaggtcaggagatcaagaccatcctggctaacacggtgaaaccccgtctctactaaaaatacaaaaaattagc

SEQ ID NO: 116448 - DNA, 139 bp, Homo sapiens
tggtgacacactcctgtagtcctagctacgcaagccatattcactattatcactctctggaccaattattgatttgcaagttcctgtgaaatgttttatcacccagtgtgttttgtctgtgtacaggaagcactggata

SEQ ID NO: 116449 - DNA, 411 bp, Homo sapiens
catagcatagcttcagatattaattaaacttctggccaatggcaacctgttaactaaatcttcagaacagaagatagatttctacacctgcccttaactccaagattataggatggaaataagatttccttcagaagttaagaactgcttgtgattgtcttatttatttatttatttttaatcctaaaagcaatacatatccatttaaaaataattaaaagtagaggtagtatgctccacttgctgtgaaatcatttagaaaattgtttttgtgtacacatacaacacagctagaacaagtgtggctaaaaaaagcaatgcagttggtaaataaagatgaagtttgttaggttgttcatattcttttaactttctgtaagtttgaaaatttcaaaacaaaatggtggcgat

SEQ ID NO: 116450 - DNA, 363 bp, Homo sapiens
cacttctcagagggggcaccatcccccatcccttgtcccccttctccacctgctccagtctggcgtttgctctaacaaggtccacagtgacaacacctctgtgtccccaccttgcttggcttcctagcagcacagaatgcagtcgagtctcgatcttcttctggctcaaggacacccctttctgtggtctcctccaggtcaccttccagggcttccgaccctgctttgctggttaccctccttcagccaacccagctgtgggtttgctcctctctgagcaaatctcccgggggtgggggaagagggtctcatgcctcccgatatggtttggatctatgtccctgctcaaatctcatgtcaaat

SEQ ID NO: 116451 - DNA, 817 bp, Homo sapiens
gggtagctgtagataaactggttatcctaaaatcatgattatcagtgttgatctctgcaaccaacattgctttagggagttgctagtcattacccctgctacaatagatagtatttgtcagtctaagttacagacaaaaaattctaggttgactgattaagaaagccatgtgttttaatttccttcatgttttaaaaacaatggacgtaagtgcagagagacctttgaaaatattaagggaaatctatttaatcctataggtatgtgatgacttgtttttttggaaaaaggtatttggaacatcaatctgtaattatccattttccattcatgcattcactaattcaatatttgatatgtgtctgggagtgctgggaataacataaatacaaaaaaaaaccctaagataatcattcaccagaagctcatagatataatacagttatatagctaaatgcaaccagttgtttttccaaatgtactcatcatctgtaataaaagaaaaatgaagtaaaacatctgaaaccttaacttactcatgagttgctacttccttggaggcaactgtagaagcattaatatatggttctttgggttgggtcatactgccctctgctgactcagttactaactaaggacaacctgggtttgaggatcaggagaggatggtgtgggaacctgcctcaggaactacagttccctttctttgaaggattctatccagaagagaccatatcctactaacatactaataggagcaacatagcagatcaaatgataaggtggggtggaaattagaagggaatgggaataagct

SEQ ID NO: 116452 - DNA, 250 bp, Homo sapiens
acacaggtgtggagctcagacaagaagaacgagcaggggtacagccagggcagtacaggcatatggaggttattggggccccgggaggctgtggaggccctaaaggaaacaggctggagttcaaggcacatccaggacagagccctgaggacccccaaagaccccactgctggaagtttgagcagatcggaagatgctggaggtaaaagcacctgggaaggggctggcatgggactggcccaggtgggtc

SEQ ID NO: 116453 - DNA, 401 bp, Homo sapiens
atcctgtgcactgtgataactctagtcttggaggtgaatctgaggtccacgtctgaaacctgaaaggcatctccttttatctactaccgctttcaaggagatgctcttcaggtgccactgattctggcatgccaaaaagttgcatctgcaggatggttgtagccctgtttataaattcacaggctcaatttcaagaccttatgagaccctcaaatgtatcaagtggggccaggcgtcatggcacctgtaatctgaaatcccagcactttgggaggccgaggcagacggatcacctgaggtcaggagtttgagaccagcctggccaacatggtgaaaccctgtctctactaaaaatacagaaattagccaggcgtggtggcgcatgcctgtaatcccagcta

SEQ ID NO: 116454 - DNA, 437 bp, Homo sapiens
ccctatattagttcctggcatcacagccgtttaacaatgatgccaaccatcagcattcatcaatattttcaaaatacttgtattagcttgtaggcaaagtacccactaacccaggcagcacaattggcatgcaagccacaaccagagacatcctgcacacttcgcagagcataaaggtctgagctctgaagtatcacgaggagatagcattgctcatgcactgagccctagtgtgcactgagaggaaaggatcaggagctgtgcactcaaggggcgaagtctccactaggggcaggggtccctttgaaaacttagctggcaagggctctcctcatctgcaccttgtgctattctaggcaagtctgtctccctcttaccatctacctcagactatgataagctgacttctcaccaaaggcatctgtcttgctagcctc

SEQ ID NO: 116455 - DNA, 409 bp, Homo sapiens
acatgttctgctacttctgccagttctttattctcctttttcaggcgggcaatttcattgtccttttgttcaatttctttatgaagtttctcattttccttaagttcgagcggccgcccgggcaggtggcaaacatagatgtgttaaatggaatagctaaagaagtagaagcccaggcacctgaccttggtaagcataaaggaagaaaaaaaaatgaatgaaagaaaatagcctcagaggcctgtggagcaccgtcaacaatacacaaacaataggagtctcagagaaaaagagaaagagtctgaaagaatatttgaagaaatattgtcaggatactagaaatttggtgtaaaacattacacatccaagaagttcactgagctccaagtcggatgaactaaaaatatgt

SEQ ID NO: 116456 - DNA, 3159 bp, Homo sapiens
  misc_feature (2440)..(2440): n is a, c, g, or t
tttatttcccaactcacatttgaggtttacaagttttgcttagtgtgcttggtgctactcgatcaattgagacacagttcctctctggtgggggttcatgtctgtgtccagacatcttgttggctgtgctctaatcacagtgatcattttgagctgttgttaagaaaaaacatggcttccaacatagatgccttgttttctccaacaaatatttaagctatattgccacctccattttagttgtttccctttagatctggctgtcataatttatctgttttgcttcatccaagatgattgctgtaaacaggcatagggtgctgtcttcccttctaggcagcccagtaattccatctcagataatttctagttacctgttggatacttacgtgaaggtctgaataaattatgatcattacgaacatgatacatgagtaatgaattaaaagaaatatttaaaagttttatattttaagtctccagggagtaaggcattgagaaaatggggtaaatatttcttgtcgaagagaaatcaaatatgggtgaatcattgactactgggagtccttgggtttattctcagatctttcactttttggcagtattctggaagcaagttagtgacttgactgaagctcagtttgcacatctgtgaagaggacagtaatttctggtctcatagggctgttaagagcatggaatggaatccaattcggcttcatctatctttatttttcatgtaatctgtcaggcaccatgttagtggaatgtcttgtaaataatgaatcgtatagcctctggtctcaaggatctcataaacctactggacagatattatgtattttggtttcctacatgacatccaagttcatgaatcttttgaattctttccatacaacccaggatgcaagcttctggtaagacaaatggatatttattaagatcctgtaagaaacaaggcagaaaattaaagtcattaggagtatagaaataaaagatttcttgggctttcacctctgtaaacttgaggagtttggctaagtcagtagttggaagcgtagtaaggtcagaagtcaccgtcaacttccgttaaatcccaaagcttacaattatttaacagaggatcacctacgctaacagaatgttgggattttgtttgtttggggttttggtaaataattatatacattcaggggtcttagtactgggtagcttatataagtccaaaaatatgattgttagccttgccttttgattaataaaatgggggaaatatgttgttaaaaaaaaaaacgaaaaagggcaagaaactatttgaaaaccaggcattgggttgaattggaagtgaatacacttcaaaaggtctgaggagaaaatattagaaaccactgatttggataatgtctaatagctcttttaactcttagtcttttacctaaatatccttgatatttacagcatagtaaaatctggttttccaaggattctgatgaaagaaaagaaaaaaaatgaaaacagatggacaatctgagaagtaactagtgattgatggtaaatgtgaacaatgcttcagaaaggaaatgaaatgtctgcagcagatagaagtgtgtaaattttgccttcactttagagctagaatcactatgagtggtagcatttcagaatcagaagaatggaaagctcagttgattatcattacacataggagtaaaaggaaaggttcacatttttattgacagctcatatcgaaaagacagctcctcttagagagaagtgaattctcctccttcttgttgtttcttctgccacctttgccctcatacagcacgctctatctttatcttcttcccttttccctcctcctttcctgtcttttcttatcttcctccattctctccccatttcctttctgtgctccctctcctttctgcactcacctccttcacctttcatctgtaggtgacactaaaccgaggtttaagaagagccaccttggctgggtgcaatggcttacgcctgtaatcctagcattttgggaggctgaggcaagtggaacacaaggccaggagttcgagaccagcccagccaatgtggtgaaaccctgtctctactaaaaattcaaaaattagctgggcgtggtggcacgcgcctgtaatcccagctactcgggaggctgaggtaggagaattgcttgaaaccagaaggtggaggttgcagtgagccaagatcgcaccactgcactccagcctgggcagaagagtgaaactccgtctcaaaaaaaaaaaaaaaaaaaagccacctcacagagttgatggcagtgtgagtgctgctttttgtacattacctcattcagttctggacacaggaggggtctccaaatcatgctgcgtgggccagggagtctgatggaagaagtcatacttgagttatggctgtctcngggatgctgtgagttgactagcttgctgggaggctggagtctggctcacacattcagaacatttgcaggttactgagacaaccagtaccaaggacttgttctggagactaaccagatatggaaaacactgaggtaggcagaaatcagtttgtgatgggctattgatggtaaactaaggagctaaatggaaagctctggcaaacccttgaatgagagagaaatgatctaacagagaatcctctaacagaagtaggatgaacagattaaaggaaaaagtagggggagaccaggtgggaatctttcgcaccaagtcaggaaggaaatagagttgtcacaaaagctgagggaaggaagaggaggagaggcaaattcaagggactaaagaggttgactctttagaacttggcgatgatgtgaaaatgtgtaagaaagagtttaggaggccaggcgcagtggctcacacctgtaatcccagcactttgggaggccaaggagggcggatcatctgaggtcaggggttcgagaccagcgtgaccaacatggtgaaaccccgtctctactagaaagacaaaagattagctgggcgtggtggcacacgcctgtaatcccagctacttgggaggctgagacaggagaattgcctgggaggtggaggttgcagtgagccaagatagtgccattgcactccaacctgggcaacaagaacgaaactctgtttc

SEQ ID NO: 116457 - DNA, 247 bp, Homo sapiens
cccgaagaagcccatgtatttgctgtcaggtggagggcagccctgcctgctggggatggtgctgtgtcccccataccagcctggggaagccctaccttctgaggagcgggccacagcagtcccattttttaccggaggacaccactgaggccgagccagcatagaacccaggcctctctgatccacagcccacggggtctaggtaccccgctcccctgacccttttggagttggggccctgagagca

SEQ ID NO: 116458 - DNA, 87 bp, Homo sapiens
ttgaagacaaagtaagaatttcagtattgacgttagacaaagaattgaagtcaggaaatagtgcatgacaaaagataattttgtggt

SEQ ID NO: 116459 - DNA, 577 bp, Homo sapiens
atctttgagcacccagggagggcacttcctgttgccggctgccatggtttcagctgtccggtgcctgacctttctagaagatggtaatgatgagagttgtgactgcaaagcctctagccaacaactgagaagagctacactctgaggtctggaaggtctgtgcgtcttctgctccattttacacatgagacaataggggcagggaggggctgcatttgagggcactgcggaaccatggagggcttccgaaagatctctctagtgaaagctggaggaagaaagtataggcagaaggagcaaacagcaggccagactaagttccatgacagcagaaaccatgtttttgttttttgctgctgtatccgaagtacccagcatgtcaaaggcattgaattaaaacctactgaatggccgggcatggtggctcatgtctgtaatcccatcactttgggaggccaaggtggggggatcacctgaggtcaggagttcgagatcggcctggccaacatggcgaaaccccatctctactacaaatataaaaattagccaggtgtggtggtgggagcctgtaatccca

SEQ ID NO: 116460 - DNA, 187 bp, Homo sapiens
gaggtgattctgctcctgacttagccaggaagaggaagggagagctggtgctggacagcagccggtttctgctctgattcccccgctgattcctctctaggggtgagctttctgggcctgcggggaaaaggctgatggaaacagactgagtcacaaaagtgaggcagtgcaaagctgtgtcagaggc

SEQ ID NO: 116461 - DNA, 573 bp, Homo sapiens
tacttacttgtcttaggtaatcatcttaaatgcctggtccctacctcctgaatggcagtcccaagcctcgttttctcatgtaacctgggtattgctggtagatggcatcccagagtgatcttgcttagtgtgagaaaccaagcccaatctattcctcacacaccagtatgatatttgtaaaaagaagtcagtatatatttacctataaaaatacttatttatccataattcaacttatatgaacttttctggtaaaaaacaggtagataaagatatttattataatgttacttataatagcaaaatatggaaatcaatccagatgtccaattatgagaatatggttaagtgaattaggaatcatccttaatggaatatcacatagccatgaaaaatggtgatcaggcaaaagctacatagcaacatgcagacatgctgatgagatgatactaaaagggcaaagtagtgtgcaaaataaatccacactgaagattacagttgtgtaaaatacgtgtatagacaaaaaggcctggaaaacaatatataaaagtgataggagttgttaatgtgatg

SEQ ID NO: 116462 - DNA, 398 bp, Homo sapiens
tctagcagagagaaatagtgttggctgtttctcaaaaattttattatggaactattttgttgaatgcctactaatatttacaggaacacaaatacctttttgaccttaaacatgttatgaatcttcctgaatcatagcctcctaatccataacatggggataatatttgtctcataaggttattgtgaatgttaaaggagatgatgtatttgaagtacctcttttagtgtttgagccatataaagggctcaaacaatgtttattcttattactatcttttaagatttttatttcactatgtgatttttcttgctatatttttatattttgtcatcaaaattcaaaaaaaatgctcatgtacgtcttcatttttaaataaaattaccagacctcttcta

SEQ ID NO: 116463 - DNA, 801 bp, Homo sapiens
agacttgttttattcatggaatatttcaccatatatttgccataaggcctgaagactctgttaggtgcttttcccatttttttcccctcacacttgaggggtaaagaaagatatcggtaggtcataatcatttatacatgtgaaattttgatattgcatatgcttggcacattgaaagtaagcatatcagtaccatagatgaggaagcatattgctcccagattttattgattctttctcatttctgcctgtctttcctctccttatccccctaaattataatttcattgaaaaagggcttcttttcaacacacactggtgcctgtcagggagtgcggggttgtgcggaggagagcatcaggaaaaatagctaatgcatgctgggcttaatacctaagggatggctgataggtgcagcaaaccaccatggcacatgtttacctacctaacaaacctgcacatcctgcacatgtaccccggaacttcaaataaattttttttttaaaaaagggattcttttatagcccttaccttgagtgataaagggtcagaatgaaaaggtacttctagaatgtaatgcgattttatccccatttagatgtgattctattctctgttaagaaatgaaataactgtaaacacaatatgtaagtgaactgttaaactacttccattaaatgtttcaagtaatggaaatacatcaacactaaccctacaagctatgtgccttaaaagttcatagcctcatttttatgagcttcaaggctttttgcattagatgaaaggaatagtaccctgtaa

SEQ ID NO: 116464 - DNA, 135 bp, Homo sapiens
attttcaccacccaagatgaggtgaactagcaagtccattgggcctcatggtcttatattcttacaactgagatgacagctgtcactcacatgcaaaatctcctattgccataatatcccctgtgttatcactgt

SEQ ID NO: 116465 - DNA, 403 bp, Homo sapiens
aaaaaagaaaagaaaaaaagaaataacctggttgttggcagataattctattgagtatataactggggatagctcatttttgaaatcagtttagaacatttaaaatgtgggaaattcaaataaaaatgcaaattttcactgttttctaaaaagtcagatcaacattgctggcccaccactgatataatactctatatcaatactcagctaatattctttagaccctccagactattttactcacttacattaaatgcctgactcctatggacatttaagtaactgatttctgccctaattctctgttatctaatttctcctcccttataacatgtttgtttggggatttattctcatttgttagcgaagcagaattttgagacttcaaataaaagacaattcc

SEQ ID NO: 116466 - DNA, 218 bp, Homo sapiens
agcaagggggatgttcattcccatgattcagtcacctcccaccagaaccctcctctaacactggggattacaatttgacatgaaatttgggtggggacacagaacgaaaccatttcggggattaagtagataagttgtatttagaacagtggtgcctagctggatgcagtggcacatgcctgtagtcctgcctgggcaatgtagcaagaccctctctc

SEQ ID NO: 116467 - DNA, 324 bp, Homo sapiens
caatttagtgtattttagagagggtcagccagaatcctctttaagagaaaacacttaggctgggtgcagttgctcactcctgtaatcccagcactttgggaggctgaggcaggtggatctcccaaggtcaggaattcaagatcagcctggccaaaatggtgaaaccctgtctctactaaaaatacaaaaaattagccaggctataatcccagcattttgggaggctgaggcgcgagaattgcctgaacctgggaggtggagctacagtgagccgagatcgtgccactgcactccagcctgggtgacagagcaatattccatctc

SEQ ID NO: 116468 - DNA, 400 bp, Homo sapiens
acacgtgagggtaagtggagaggcatgacaaggaaggaagaggttggaataatttcattcttttacaagaattaatgagaaattcttaaacatgccaattcggttatgactcacacaaaaacaatagctcacgactacaaaacataaaacagaatgatttggggggtaaaaacaagagttataacctttctcctgccctttaaaaatattttcaataaatcaaagccataactagtttttgccaaacagctcatatttatatagaattttacccctgtagagaatttttctctggaacaatgtttctgcacttgaacgatggtactaacctcctttacagtaaaaaaaaaaattatctcaggcctccccagagcaaactaaaaagaaattatgcataaga

SEQ ID NO: 116469 - DNA, 902 bp, Homo sapiens
agcgggtgggggtgggcacctgcccacctgtggtcttcattgaggaggaaggacgttttcgaagatgccttggaaaccatctcaatatcttctcactcagatatggcaacaagcagccttcactttgcatcatgtgatacacaacaggcgcccagacagcgcggagcgtctactgtcagcagttcatcatcaaccaaggtggatctcaagagtggcctcgaagaatgtgctgtggcattgaacttatttctaagcaacaaatttacagacgccttagaattgcttcgcccctgggctaaggagagtatgtaccatgccttgggctacagtaccattgtggtgttgcaggctgtcctgaccttcgagcaacaggacatccagaacggcatttctgccatgaaggacgctttacaaacctgccaaaaatacaggaaaaaatacacagttgtagaatctttctcaagtcttctttctagaggatccctggagcaactgagtgaaaggaaatgcatgctgaaatctgttatgccgagtgtctcctacagaaagctgcactcacgtttgtgcacggatgacacatcatgatcacattcatcaacggtggactcacaaattagaacaagttaccaaatatataagtcaccattaacagatacagtaataactaaaaagttgcgccattttatgacgaatttacttggcaattgtggacccctgaaaaaccacaaaggtgaggcacataattgtttggacaacaactggggtcggataagacttgggctccaacaccagagattggcccacaaattctttccaatctggtcaaccacatggcgtttcccacaaatttgcggctaaaacacagcacacaggctttctatactgggtgaaaattcgcagac

SEQ ID NO: 116470 - DNA, 1054 bp, Homo sapiens
agcgggtgtggtttcttctcatctagagaggctactgctttttctttttgaatttattttcatttagatgggcgtcccccccacctcccgtttccacctcttctaggggtgtaactatagcgttagtatgttgggtagggtcttttgggttcgcttctaaggccctgcgcgattctgtctgcaggttttatattggtctgtgcagtttgacctggaggtcagtaggtggcgcctatggatcttctcactcagatatggcaacaagcagccttcactttgcatcatgtgatacacaacaggcgcccagacagcgcggagcgtctactgtcagcagttcatcatcaaccaaggtggatctcaagagtggcctcgaagaatgtgctgtggcattgaacttatttctaagcaacaaatttacagacgccttagaattgcttcgcccctgggctaaggagagtatgtaccatgccttgggctacagtaccattgtggtgttgcaggctgtcctgaccttcgagcaacaggacatccagaacggcatttctgccatgaaggacgctttacaaacctgccaaaaatacaggaaaaaatacacagttgtagaatctttctcaagtcttctttctagaggatccctggagcaactgagtgaaaggaaatgcatgctgaaatctgttatgccgagtgtctcctacagaaagctgcactcacgtttgtgcacggatgacacatcatgatcacattcatcaacggtggactcacaaattagaacaagttaccaaatatataagtcaccattaacagatacagtaataactaaaaagttgcgccattttatgacgaatttacttggcaattgtggacccctgaaaaaccacaaaggtgaggcacataattgtttggacaacaactggggtcggataagacttgggctccaacaccagagattggcccacaaattctttccaatctggtcaaccacatggcgtttcccacaaatttgcggctaaaacacagcacacaggctttctatactgggtgaaaattcgcagac

SEQ ID NO: 116471 - DNA, 392 bp, Homo sapiens
gcccagcttctgtgttcagatctgatgcttggtgcccgcagctccaaggagaccccatggttcaagctgcaattacttgctccacaggcccttaccaaggaaagtcaggttttttccctcctgaggatcctctgaccagcatcttcagattttttttcagttagaagtattcattgggcacctgttttttgtttgtttgtttgtttgtttatgaccacatcagtctttcattagaatctttgctttatctcattgcatagttgaatttcttctctgccatgttccagtcagaccccattcatactcacccatctttgttcacgtctttccctagaactttgtttttgcaacatgggtccactcttccatagttagtttctcacttccctctg

SEQ ID NO: 116472 - DNA, 719 bp, Homo sapiens
ctcactctgtcgcccagaggctggagtgcagtggtgctatctcggctcactgcaggctccgcctcctgggttcacgccattctcctgcctcagcctcccgagtagctgggactatgggcgcccgccaccacgcctggctaattttttgtagttttagtagagacgggatttcaccatgttggccatcatggtcttgaccttctgaccttgtgatccgcccgcctcggcctaccaaggtgctgggattgcaggcatgagccacagcgcccggccatcaagcttctttctctctccccctctctgtttcttgcacagctgtacagactttttgtatgtagtaagcatgtttacctgtgactagtaattccaccacaagcatttcacccccttatagctctgcagatattttctggaatgactggagatggcctgtcttcagtcatgatccatccctgaaccaatcatgataaaatctctttggttggttctaccacatgcattaatttctgctagagcatgggggtcctgtgaaggaaccaaatatctatgatgcttgttaaagacagaatgaaagactttactcaagagggactatcgtgataggtgaaatggggtcttgcagtgggggagaaagattgggctcaattctgaacgcaacaaccaaaagtggtgatttatagccaggaagtcaagtgagggtcagtggatggagacagcag

SEQ ID NO: 116473 - DNA, 489 bp, Homo sapiens
cttatagacatcaacagagacctaaaaaaaagcacataaacaaaacttcctaaagaaaatttataaagcggtatggatgttaaaaaacaaacacaatacaaacacaactgtttgcgatacatacaaattgagaggtacatggtattttaagcgtgtaacaagttgctgccgaggatggagtactgtccacagatcttacaactgaaaaaagccctcaggaaggaaattattgaagaaggaaaggaggaaggcctgatggctttagataagaaagacatttcaagcataggaaaaagtctctccaacatacagggtcagaaatataggaagaagtttcagctctctttgcttgcagctcagatcctctctagtgtggttttcccttaaatccttaagccagatgtagtaaacatctggggcaccaaagtatggtaggatttttcgagaaaactgatcatttacatgccattactaccaaagctgtcgttc

SEQ ID NO: 116474 - DNA, 268 bp, Homo sapiens
caaggagggctgtaagtagattcaatccctgggcagggtggaagaagcctgggaaagctcaagactaagcaaggccctgtttccgctgaatgggactaaaagcagaaattcagctgagttctagagcactcgagagcctcgcgtctcactcatctgagcctgctgaggtgcggtgggaggacagcagtgacgaggaggctgatagcatgcactgactgagatggtctgcctgtctgagaaatgaagacgggcagatgctgacctggag

SEQ ID NO: 116475 - DNA, 323 bp, Homo sapiens
caggctggtcttgaactcccggcttccagtgatcctcctgcctcagcttcccaaagtgctgggattacaggcatgaaccactgcacccaaccttttttcattcccttaacgaaacctttggatgaacaaaaattcttaatttcagtgaagttcagtttatcgacttcaatttatacattttataaagtttatgaatttttttttttttttttagacggagtcttgctctgtcgcccaggctggagtgcagtggctatacccaggtgtgatcataactcactccagcctcaaactcctgggctcaaggattcctcctgcctcag

SEQ ID NO: 116476 - DNA, 389 bp, Homo sapiens
agacgtcattctgcatattggatcagatagtgacatctttctgtatataaactctttaactgctattttagggacctgcagttggcacataatggttttatatcatagcagtaaatattggcaagaaatcccactcatcgaccccgggtaaaaaagggaaaggcttatgcaagaatggactgcatattccgaggctagtatgtgctcagctgggctgctccaggctgaggagaggagctgcaaaaaatatgattttcatgctcctaaaagagctttcagtcttgttggagaagcaagatgaacaatacctgacagaaagaatcatatccaatgagtgctttagaaaatattgccaaggcactgagaaagaaatgaggatggaagtaggc

SEQ ID NO: 116477 - DNA, 392 bp, Homo sapiens
ggtctggtagaatttggctatgaatactacatctggtcctaagctttttttttggttggcaggctacttattactgattcagttttgaagctaattattggtctgttcagggaatcaatttctttctgattcagtcttagaagggtgagtgtgtccaggaatttgtccatcttttctaggttttctattttgtgtgcatagagatgttcgtagtagtttctaattgttatttttatttctgtggggtcagtggtaacattccttttttcatttctaattatgttatttggatcttctctcttctttattagtatagcttatgttaagttgaggaattagtcttcaaattcttctcatttggcttcaaatcttccctcaggctgtttctaatg

SEQ ID NO: 116478 - DNA, 297 bp, Homo sapiens
tgactacaggccagttctgggtgagagtggaaggtcatgcagcttaattttttttcttaaaaatttgttttaaaaaaatagagatgggtctcgctgttgcccaagctggagtactgtggctattgacaggtgtgatcccactactgatcagtgtgggagttttgacctgctccattctgacctggactggttcagtcctccttaggtaacctgctggtcccctgctcccaggaggtcaccagtgctgaatttagtgtagatatccaatcagcataacccactgcagcctagaactcc

SEQ ID NO: 116479 - DNA, 799 bp, Homo sapiens
cagacctttctactgagccccaactccatgcttaagaggtttttcttattgaaagtcacctatctcttccctcaggaatgccaggatgggggttatggtggtctcgtgcattggttctcaaactgttatgtaccaaggagtatcctggggatcagttcaaatgcagattcaggagttctggggccaggcctgagactctgcatttatagcaagcccccgggtgacgccgacacagacctcccttggagcagtaagggcctggtggagtcagccagctccccagatctgagtgcaccccggccagccctgacactggtcccatctgagcccctgtcctctctcctctccactggagttcgtgtcactacatgcagttgccgtggggacaaaatgagagaaaccatatttaaaacttgtaacaacgcatcatctcaaaagatagaagcagttcaacgatactgttcattatcctgtttcttaggaaatagtacctctacatggtctggtggtgggagcagggcggggggcaggggacatgacattaccactcctgtccacagcgtctcctggcttctgagtactttgtggaaatatttttctcaaggatgttggaggaatattaggagctttagaaatttaggagcttttgagatttatgcaaagacatttaaactagactcttttcactttctgggagtaatttttatttttaatgtcacttatcacaaaaggaaagaaagagatgaaaataacttttcctgtcgggactttttgactgaggatggaagttgataaggac

SEQ ID NO: 116480 - DNA, 248 bp, Homo sapiens
gtgtctcctctctgggtcatctctctgtcttctctctgggtcatctctctgtcttctctctgggtcgtctctgtcttctctctgggtcgtctgtgtcttctctctgggtcatctctctgtctcctctctgggtcatctctctttctcctctctgggtcatctctctgtcttctctctgggtcatctctgtcttctctgtgggtcatccctgtcttctctctgggtctttagctgctgagcgtgcatct

SEQ ID NO: 116481 - DNA, 924 bp, Homo sapiens
atcttttgaaattctaaattctgatgcagaacgtatcagtgaaactccctcccactgtctcttgtattagcatcaaggaagcgagaaaaaataagcaccctgagaatggagacagtgtttgaagagatggatgaagaaagcacaggaggagtttcatcttcgaaagaagaaatagtccttggccagagactccatctaagctttccttttagcattatcttctcaactgttctctactgtggtgaggttgcctttggtttatacatgtttgaaatttatcgaaaagctaatgacacattctggatgtcatttaccatcagctttattattgtgggggcaattttggatcaaattatcctgatgtttttcaacaaagacttgaggagaaataaggctgcattacttttttggcacattcttcttttaggacctattgtgaggtgtttgcacaccattagaaattaccacaaatggttgaaaaatcttaaacaggagaaggaagagactcaagttagcatcacaaagagaaacacgatgctggaaagggagattgcattctcaatccgggataatttcatgcagcagaaggctttcaagtacatgtcagtgattcaggcttttctcggttctgttccacaattaattttgcagatgtatatcagtctcactatacgagaatggcctttgaatagagcattgctgatgacattttccctgttatcagttacttatggggccattcgctgcaatatactggccatccagatcagcaatgatgatactaccattaagctaccgcgatagaattcttctgtgtcgtgatgtggcgttttttggaggttatctcacgtgtagtgactctggcatttttcattgcatctctgaaactgaagagcctacccgttttgttaatcatatattttg

SEQ ID NO: 116482 - DNA, 308 bp, Homo sapiens
tggtgctgcacgcctgtagtcccaggtactcacaaggctgaggtgggagaattgcttgaacccaggaggcagaggttgcagtgaactgagatcgtgccaccgcacttgcatttcagcctgtgtgacagagcaagactccatttcacaaaaaaataataaaaaaaaaaaacttaatgccaaagtggaatattttggggtggcaaatctggaccttttcaccattcagtaagttaattcccagttaacatctcttcataaatcaaagagctgcttctttagataacctgtggtaatgaagcctttaatgg

SEQ ID NO: 116483 - DNA, 146 bp, Homo sapiens
ggggagcagtattcacaatatggtaagtgattttgaaaaacaagttacacagacattttgaagtagtatgcagatgtctaataagcccttgaaaagatatttaacatcagtcattatagaaatgaatatcaagccagaataccact

SEQ ID NO: 116484 - DNA, 465 bp, Homo sapiens
gaagctaataagttaaacctttgagagatgccaaaaaaagaggtgattcaaactgttgagagaagtccattgttttctaaggggaaatagaactccagaatgaaacagtgtacttataagtatttaactggaaagtttaggggaaaaaagcaaactcacacattattttattattattttaaatctggtaatctttaaaaagaactgttctcagtgtacttccaaggaaaagaaaatgtgaacagctagggttaataggatacaaagtgcaaataaactattttttttatagaaacagcacataatgaggagtaattttgccaagttagtctggattctatctgtggacaaatacaaagaatcttaggttatattataacatattatagcaacattttatgtttagcattgttttctataaaccagcttcaggtggttcaactactattgaatgaaaaaaaatta

SEQ ID NO: 116485 - DNA, 493 bp, Homo sapiens
taaacagcctgctctgttgcccaggctggtgtacagtggtggcatcaaagctcactgcagccttgacgtggcctcaagtggtcctcccaggtagctgggactgactataggcatgcaccccacacttggctaattttttatttttttgtagggacagatctcactgttggtgcctaagctggtctcaaactcctgggctacagcagtcctcccacctcagcctcccaaggtgctgggatgaaaggtgtaagccactgtgcccagcccaactgtgttatttgtggaagtttctcagagggagaaattacagggctaaagtactacacgtgtgcatatattaaagttttttccagtaactacttaataatgtgtacttgaaaactgctaaattcttaaatgtcctcaccattaaaaaatagtaagtgccgggtgcatggctcatgcctgtaatcccaacactttgggaggccaaagtggtcagatcgcttgagac

SEQ ID NO: 116486 - DNA, 666 bp, Homo sapiens
ctgagactcggtcctgggcctgggagccagcagcaccatgcccacctggtgctttctgcctgccccatcccctgaagtctcgtgctgtgatgcctacatggaaacagaagataaagatttcccctcattcaaggcgggacgttagaaccaaaaaccccacatgatgctgggaccctctaagaattggaccctcaggaaggttaaactggaaaagaaaattacctcccagcacagagaaatggccttgaaacctgcctttctcctcttgggctcaagaaagtcttcctgggaattcataattacaggcctgtcctccaacaggcttgaagtttgaatttatacaaacaacatagttcaagaagcacacagccaaaatgtgtgtgccaggacactcggggacattccggaggcagggagctgggtgctcaggggtggccaggacacgatgacacctgcctttgcacggacacagtgtgtggctggcagggggcaccccaaccccagtttccagcaggaagctgagaaccatgaagagatcaaagagatcaactagaaatatcttgaagccagtgagctcagtgataacagtctccaaccatcttttgggaggccgaagtgggtggatcacgagatcaggagttcgagacaagcctggccaactggtga

SEQ ID NO: 116487 - DNA, 666 bp, Homo sapiens
ctgagactcggtcctgggcctgggagccagcagcaccatgcccacctggtgctttctgcctgccccatcccctgaagtctcgtgctgtgatgcctacatggaaacagaagataaagatttcccctcattcaaggcgggacgttagaaccaaaaaccccacatgatgctgggaccctctaagaattggaccctcaggaaggttaaactggaaaagaaaattacctcccagcacagagaaatggccttgaaacctgcctttctcctcttgggctcaagaaagtcttcctgggaattcataattacaggcctgtcctccaacaggcttgaagtttgaatttatacaaacaacatagttcaagaagcacacagcctcaggggtggccaggacacgatgacacctgcctttgcacggacacagtgtgtggctggcagggggcaccccaaccccagtttccagcaggaagctgagaaccatgaagagatcaaagagatcaactagaaatatcttgaagccagtgagctcagtgataacagtctccaaccatctttaaaagagagcgggtcggccaggtgtggtggctcacatctgtaatcccagcactttgggaggccgaagtgggtggatcacgagatcaggagttcgagacaagcctggccaactggtga

SEQ ID NO: 116488 - DNA, 216 bp, Homo sapiens
gaccctaagcctcttcaggatatttgttttcctggctcccttcctgaattttttccatcctgcacaggaatgtttaatctcctctaaagagttagagcctagatcttctcttccagtaagaagatgtagaatttataggaaacagtgaaaacgacaacaacaacgcccttacacttgcatttagttttcccattttacagaatcatttcccatggt

SEQ ID NO: 116489 - DNA, 413 bp, Homo sapiens
ttcatggagtgaaagtcagagagtgaaatttagcttagtttctatggggatgtgagtaatctttagggattattaaaacaatatactttttttccccccaagttttcccttgctcctctttttctagctcttcccccattcacctatggaatcatctgcattcattatttcaggagagaggtagatacagtctaaaatgtaggagtaattgctcagctctgagacttacattttataaaaataaattcttatcttaatgtaaaatacttcttcaggaacaaaattcaaaagatccaaaaggatctaattgtacataaatctcctccttctttctccccaacccaccagcattctttctctttgtcattcagttctgtatacacaaacagtacatagtttacactcttgtacac

SEQ ID NO: 116490 - DNA, 828 bp, Homo sapiens
gtcaattcagttcatgtaaaatgaagaaaataataatcatcagatttatctgtgttctgaggctataagggaatttaaaattgaaagcaattttaatgactgcttaataactttaataactggagcagcaaatttgaacgattagacaaaaagttaatgcgaagtactgatattatttaatttctctactaactatttcagaacaagttgtgtgtaccttttgaaataaactctagaaccgttaggtgagctgtgaagtgatatctaatagagatgggtctaagaaataggctcaggttctaagagaaaattgtcaatatgatattggggctggggttacagattaacagcatctcaaggcagaagaatttttcttagtacagaacaaaatggagtttcttatgtcttcctctttctgcatagatacaataacagtctgatctctctttctttcccccacaatttattggtaacaatatggtggattggattgtcatccaccaattcgggcagttctcaatttagaaatctcaatttagattatgttccaaatgtgcttcattgattataacttggagtacattttccttatagaaagaatggtataaatgatttccatattagcattcttctggttttgatacaattgaatgtaattttttctacattttttggagagtaagttaataatttctagcattttctcagaatatattactattaaaataataggaatgaaaatatataatcaagtatatagtcttttaacatttcattttctgctagtaaaataatatctagaattttatttactagtaaaatgaaaaa

SEQ ID NO: 116491 - DNA, 711 bp, Homo sapiens
aacaggatgactaatctatcttccatctaattctttaagggtgtattgtattaaatagaagcatttctgaacatgggatataggtttgttctcagtttatgataattacattctgacaagttttagggaatggcctagagggctggagtagcaaaggacagctctaagcaggtggaaagcagcctcttgtgcttagataatgagctgtgtaccattagttggttcttagtcctgtatcccctccccaaagtggcccccttaacctctgcagtgattggtatctccgttcagacctcattttgtggcacagcatctgatcagggagagaggaaaatgagtatcagcatctgagcatgttactcagaaggtgtgctggcctggcttagaggtcagaaggtcatctctaggatgttgggtttctaaaacctagcatggatgagctataaacctatgaattttcattgtgtgttcaagtatctgtacttgccctcctgttttcaagaggtttcactaactcaaaaaaaaaatcaaaaggattggtttcctcatctcattatttatggcctcatttctgtatttataagagagatgaaagaaacatttgatttactgaagattccttttcaaaggtttgtttctcaaatagctttgaggtagtgggagtaaatcagggattaattccagcccggtggctggttttcctctagcttt

SEQ ID NO: 116492 - DNA, 470 bp, Homo sapiens
actctccctactgtatcctaaggacaaatactgtgtgattccacttatataaagtgtctagagtagtcaaatttagagaaatggtgtgtagaaacagaaaggtggtctccagggactggaagaagggggaaatggagagttgtttaatagttataggatttcagttttgcaagataaaaagttctggagattggttatacaacactgtgaatacacttaatgctactgagctgtacacttaaaatggttaagatggtaaattttatgtaaattttacccaattttttaaaaagtctatctcaaaagtttatatattgtctgattccatttatataacatttatatcattttcaaaatgacaaaactgtggagatggagaatagtaagtgttttctggagtcagggacaatgtgaggaatagggaggagtgtaaatacaaagaggaatattgtggtagaacagttgggagt

SEQ ID NO: 116493 - DNA, 360 bp, Homo sapiens
catcctcatgttgcttgtgatagagggtgggctccttaccctcttgttgaatcaggagaataggctgtaatagaaataaaagcgtttttaaaatgaatgctgataggctgggtgcagtggcttacagctgtaatcccagcactttggaaggccatggtgggcagaccacctgaggtcaggagtttgagaccagcctggccaacatggcgaaacccatctctactaaaaacacaaaaattagccaggcgtggtggtgcatgcctgtaatcccagctacttgggaggctgaggcaggagaatggcctgaacccaggaggcggaggttgcagtgagccaagattgcaccactgcactccagcc

SEQ ID NO: 116494 - DNA, 170 bp, Homo sapiens
aaggccactctatgagggaaaaaggaacctacaatcatgggctgctgagttcccacgtggtctttaagaaaaactgggcacgttctcctgtggccaaagggtcaataccgtacttgaagaaaggaacatggctgagtgtgtaatcccagcacttggggaggccaatgcgg

SEQ ID NO: 116495 - DNA, 194 bp, Homo sapiens
tgacttgcttcacgtctccaatggggataatattatctgccagctgtcccctggagctactgttgtgtaggtgaagggccgactcagaaaatgctttgaaacccataaataatgacatggatgagaatgagtattttgtgtgttttactttcacatgttaggactcaaaggtggaatgaagtgttttctaagtt

SEQ ID NO: 116496 - DNA, 674 bp, Homo sapiens
agctctttctgccatgtgaggataagaagtcagcagtctgcaacccagaagagggccctaaccagaaagttgttgtggccctgatctgacttccagcctccagaactataagaagtcaatgtctgttgtttacaagccactctgtcttgacttttgttacaggagcccaaattaactaagataaccctatctgagactgggcacagtggctcacgcctgtaatcccagcactttgggaggctgaggaaggcagatctacaaggtcaggagtttgagaccagcctggccaacatggtgaaaccccatctctactaaaaatacaaaaattagccaggcacggtggtacacgcctgtaatcccagctactcaggaggctgagtcaggataattgcttgaacctgggaagcagaggctacagtgagccaagattgtgacactgcactccagcctgggcaacagagcaagactctgtctcaaaaaaaaaaaaaaaaaaacccatctggagaaaactaaaaagctcagtctttcccctgggcccagaatgcccttcttcccctgccctaggaaagcccagtcacctctgaggaggcagcaacatcctggctcctcccacttgctttcagtgcatccccacgtccattctctcatggaaccctgtgcacatctctatctga

SEQ ID NO: 116497 - DNA, 520 bp, Homo sapiens
  misc_feature (5)..(5): n is a, c, g, or t
  misc_feature (42)..(42): n is a, c, g, or t
caaantaagtagggtcctctagatgagatcatacctgaattnactggttgggtcctttatccaatacagtcccattcacaagttcggagggatacagcttttggggaacaccattcaccccatacacccccttctctcaggcttgtctgggatctagatggaaagccaggggacccggatgcatggtcctcaggccttactttgagaaccacctcttgcggctgtgcctcactggttgggtccctcaccaccagctctgcccatcaggcccacatgggcctccatttgtagatgagggaacaagctcagggctaaggaacctggtgagggtcacaccaggagcaaggatcccagccgggcctcgaacccaagtctctcaacctcaggccaggcccttaaccctgagcctccgggtctgggacccaccacgccctaccctgctctgccctgacccaggtacagctgcagtgtgttcacctgcacgtgaccagtggcccggtgtccactccccacatgacca

SEQ ID NO: 116498 - DNA, 366 bp, Homo sapiens
ctaacaccacccccacccgggacacacacaccacatttaattccactccatttcaacatgtatgttctctagactccctctgtgactgcgcacagcccagcggcagaggcatgtttataaaccattaaaacacgaagcttgcaatcggacagatctgggttgctctctattaaacgttcatttgtgacctcaggcctgttaccgtctttgagcctcagagtcctcatatggtaaatggggacaataccagtacctgccttgtgaggttgttttgaggattagagtgactgaaggtaacgccgttagaacagtgctaggcacgtggcgccaagtaagtacaagtggacggcagtgaggagaaactga

SEQ ID NO: 116499 - DNA, 285 bp, Homo sapiens
ggcagcttcgccgacagagcagggttcaaccatcatgcctattactgacttccagcaaatccaataacctctctatgcccgtttcctcccctgtacaacggggacgatcgggacagcgagctgccaggctagtcggggccccgactagcccgacagacagatatcagctctaataattacttccaccgtagcatcattcatcatgctgcttgttgtccaagatcgactgcagcataatataccagaacaccactcttgttgaacaggagggctgaagtcgtctca

SEQ ID NO: 116500 - DNA, 319 bp, Homo sapiens
ctctctgggcctgagttgccttatctataaaacagaggtgatgataataataatatgtgtttcattgttttgttgtgagccttaatgagctactgaatatcagttgcctagaacaaactcttacatatagcatgtggtcaatcagagttaactaccatttaataaatttttgtcttttaatattttcattcagaagaattagacactggctacctcattacccaatgttttagaaatattgcttatctgggaaatctaaaatctgagaaccatgatttctattgtgggctcatagaattctttgcagttgtgcattatg

SEQ ID NO: 116501 - DNA, 481 bp, Homo sapiens
cgatcttagttcactgcaacctctgcctcccgagttcaagcgattctcctgtctcagccacctgagtagctgggattacaggtgcacaccaccacaccggcgaacttttgtatttttagtagagacagtgtttcaccatgttggctgggctggtcttgaactcctgacttcaggtgatccacccaccttggcctaccaaaatgctgggattgcaggcgtgagccaccgtgcccagccccaaactacagtttttgtagaatgtttcctgcttgaaacagagcacctttggccagtggctggtgagtaatgtggtgttcgcaagatccaggagcaccaaagatgccagtgctcctggaagtggggccacccaggcccagggcagggtcccagctcctttttcttccagaggctaccactgacgttattactaggtacatgttaaataattactaagtttcccatgggggaggagttgcctttg

SEQ ID NO: 116502 - DNA, 263 bp, Homo sapiens
tgactggaggatagaattaatcaggcaagcaatagcacctactatggaatattatctctgcagggtactgtaggaaatgcaagaataaatataagacattgtccttactcccaaagtgctgggattacaggcatgaaccaccacacctggccaacttttatgtttttgatatatattaatatattcctgttgtttaacttttgaaaataatgaatatatattactttttaatactacttttacaaccataatcaaatctgttt

SEQ ID NO: 116503 - DNA, 337 bp, Homo sapiens
atgtgtacattttttatttaactaacactttggtgctccaggtctcacctagactctggaaagacaaagaaaagtgagacaggatctcttatggagctcacagtgggggtgaaccatcatcctggttcgctcagaactgcaagtgtgactttagcagtcacactttatcagggaagaaagacatgtaggccaattaactatatacaattagtgagggcagaggaggagtgatatggcttggatatttgtcccctccaaatctcatgttgaaatgtaatccccagtgttggaggtggggcttagtgggaagtgtttgggtcatggggaggcagccccc

SEQ ID NO: 116504 - DNA, 276 bp, Homo sapiens
caacagagcaagactccgtctcaaagaaaaaaagaaaagagaaaaaggggagtcctagtaagtgtgcccagtctgtcaccatcaagatagtgagggtcagcacagtggcctgcaagtcagagtaagcctgggatgagacttcagagctgctcttctcagactgcagctctgctcctcagtttctacctcccagagtcttgtgcatcccagagtccaggctgaaccgggccctctggcccagcgagtcctttgcattcctaggcaaggctggtgcgt

SEQ ID NO: 116505 - DNA, 277 bp, Homo sapiens
ttttactttcttctctgttaaagctgccttggtccttctgtctcctctgatagtatcgagtcattcagatgtatttgctttagttgattgccatgctttcaaacaggttccataagctacacatccacttttaagactaaattgagcttcattgaatgtccttaatgaccacaactaattcctagcccaaaggagggaagctgcagccaactccctcaatcctcaagaacaacaatgccgatagaacccctgtgtgatccgggagctttggtctggt

SEQ ID NO: 116506 - DNA, 389 bp, Homo sapiens
aaaaaacatataatagaaaatgaaaaattctgtttctattccctgttggtagtttagtgcatagttttctaaactttttagcatgcttatatgtaatgtttcatttttaacattgaaataattttagatgtacagaaatgttgcaagaataatacacaattggtcaggtgcagtggcttatgcctgtaatcgcagcactttgggaggtcaaggcaggtggattgcttgaggccaggagtttgagctcagcctggccaacatggtgagaccccatctctacaaaaaatacaaaatttagccaggtgtggtggcatgcacctgtagtcccagctacttgggaggctcaggctcaataattgtttgaacccaggaggcagagattgcagtga

SEQ ID NO: 116507 - DNA, 613 bp, Homo sapiens
ggaatccatgtgtaagctttccatgatctctcctttctgggatgagtcacacacaacacagttttccctgcagcaaaatgcagcgacacgtgtctcatgtttctgcccagggaagcccactagagactcagtgcccagggtttatactgggggcgggtcacataggcaccctgtgcttggcagttgccaaattccacagtcccagcttacaggaaagcagatgttcaccataaatcacattgttaatctaaggaaagcaaaacacctttgtcagtatatggaacttttacgaagcttaattcccaagtgccagccaagggtcaaccttataagcaggttcttttttattttatttcatttttataaatagagacagggtcttgctatattatccaggctggtctcgaactcctgtcctcaagaaatcctcctgcctcggtctcacaaagtgctgggattgcaggcgtgagctaccacacctagctcaggtgcttctaaagatagcagtttcaagcctgctatgtttactgttttatgaatgtcaacattctccataggatataaacaagacccagagttttataatgctcaaaatatccaagacattaaccaa

SEQ ID NO: 116508 - DNA, 483 bp, Homo sapiens
gctgggattacagacatgcgctaccacacccggctgatttttgtatttttagtagagatggggtttcaccatgttggtcaggctggtcttgaactcctgacctcaggtgatcctcccaccttggcctcccaaagtgttgggattaaaggcgtgagccaccgctcctggtcgcatctttttatttatgtaacaacactgcatacataactgctattctggttgtattaattcccattactttttaggtagcctcattcctcacaaattaattgttaaataaaccgactaaaaacacttctcttatagcatgaatttatatagcatgaatgaaattcagtaacataattcatcattctcttgagtgtttaccattaactttgacgcttgtgttaaagtgttctctgcagtggtatgactgggtacgtgtgtgttgatatggagaacacagaattgaatgatacctgtattgttttgatctcttct

SEQ ID NO: 116509 - DNA, 717 bp, Homo sapiens
agttggaaaattagcattttgcaatcatatagtaaagattggttggagcaagtcacgcacagatgctaaatctatggggaaagtatgaagaagatgatatttgcttgctctcaatgtatcttcctatggattgttactaattacaaaagaaaaatccctaattacacagaagaaagaccttacaataccatgaccgggtaatcaaaattaaaatcaccaatgagggtagatgaatattgtgtgcttctagatgtgataccatgagaaggataaaaacattactgggactgtgtaacctgaatctactcttgaggaaacagataaactcaaattgaggatattctatgaaataactcacttgcattattcaaaaattaagatatgaaagatatagaaaagctgaggaattcctccagatgaagggagaccaaagagacatggcaactaaatacaatacatcatcttaactggatcctgtacctgagggggaaaaatgacataaggggcattatgagaacatttgaaaagattggaacatagactgcagataaggtaaaaatatggtatcaacattaaattctctgaatttgaaaactgttctgaaaccaaatattcttggtcctagaaaatgcacattcatttatcaagaagcaaagggtcatgttgtagcaatctactctcaaatagtttagaaaaataaattacatgcatatacat

SEQ ID NO: 116510 - DNA, 666 bp, Homo sapiens
tacatgatgtaggacagttttcatattagttatctattgctgtgcaacaatattactgcaaactttgtggcttgagacagcacacagttatcactatgtggtttctgtgggtcaggaatccaggcgtgactcagctgggttcagtgcaaggctacaaccataatgtcagccagggctcagttctcatctggaggcttgactggtgattgatctgcttccaggctcatctggttgttggcagcattcagttccttgcaggctgctggactcagggccccaggttcttgctgtcctcagcttcttgccacatgggcctctccatctggccactcatgacatggcagctcacatcttcaaagccagcaagataacctcctagcaagacaacttaacatcctatctaacataatcactacatcccatcacctctgccatattctcttggttataagaaagtcattggtccctttgtcagatgagttgattgcaaaaattttctcccattctgtaggttacctgttcactctgatggtagtttcttttgccgtgcagaagctcttgagtttaattaggtcccatttgtcaattttggcttttgttgccattgcttttggtgttttagacatgaagtccttgcccatgcctatgtcctgaatggtattgcct

SEQ ID NO: 116511 - DNA, 4066 bp, Homo sapiens
gtagttgagggtggctgtgcaagtcagactcctttccaccaggaaacacagaaaacattctatcttcccaaatgttactctctcagatttgcaccaagaccctagaagtttcttaaatttccatatactttatggacactacaaagcaattccaggaaacactgatacagtagcaaaactactgggagtggaaattggatggagatctgggtcccagttcagagtctgacacctgatttgcaacataattaggcacagggcactcaactattcagggccctaaacccttctattgaaagggaaatgggagaacaatatgtgttcctatggctcagtccctataagattctgtactattcagagttgattttaagtgtcacttaactgaaattatccaacaaaccttcatggcatgaaacattaacacagctctttttatatggcatggttcctatggctcaatccctataagattctgtactagttcagagttgattttaaaagtcacttaactgaaattatccaacaaaccctcgaggacattaaacattaacgtggctctttttatatggcatggttcattatcatgccaataaatgattaatcgtaactctctgtcttgaccaataattttgctggacttttgtgattcacaacgtgctctgtgttgtaatgctacctcttgaaactgacatcctagctttattgttttttattacttccctaaggtggctttcaaaagagacaccaagtgacatatttttaggaggggtttaaaagtttgatggggtagaagtaaacgttgcttaactcaaccagcagcagagccagggcccagggaccagcgcttctgtggacttggcctttccagcagcagacccagcaatgaatgatccgaacagctgtgtggacaatgcaacagtttgctctggtgcatcctgtgtggtacctgagagcaatttcaataacatcctaagtgtggtcctaagtacggtgctgaccatcctgttggccttggtgatgttctccatgggatgcaacgtggaaatcaagaaatttctagggcacataaagcggccgtggggcatttgtgttggcttcctctgtcagtttggaatcatgcccctcacaggattcatcctgtcggtggcctttgacatcctcccgctccaggccgtagtggtgctcattataggatgctgccctggaggaactgcctccaatatcttggcctattgggtcgatggcgacatggacctgagcgtcagcatgaccacatgctccacactgcttgccctcggaatgatgccgctgtgcctccttatctataccaaaatgtgggtcgactctgggagcatcgtaattccctatgataacataggtacatctctggttgctctcgttgttcctgtttccattggaatgtttgttaatcacaaatggccccaaaaagcaaagatcatacttaaaattgggtccatcgcgggcgccatcctcattgtgctcatagctgtggttggaggaatattgtaccaaagcgcctggatcattgctcccaaactgtggattataggaacaatatttcctgtggcgggttactccctggggtttcttctggctagaattgctggtctaccctggtacaggtgccgaacggttgcttttgaaacggggatgcagaacacgcagctatgttccaccatcgttcagctctccttcactcctgaggagctcaatgtcgtattcaccttcccgctcatctacagcattttccagctcgcctttgccgcaatattcttaggattttatgtggcatacaagaaatgtcatggaaaaaacaaggcagaaattccagagagcaaagaaaatggaacggagccagagtcatcgttttataaggcaaatggaggatttcaacctgacgaaaagtagacatcaagtggacaaaacagacgagttccaaattacgttcttaaaccgtaactatatttaattatttgttttggtaggacagttggcagaaaagagttaaagtgaaaattggaatttcattggaattcatgtattggtttcagtaccaagtgactggtggcccaattctttaatgggacaaatattgtttcctatatatatgtatatgttttatatatgtatgtatactcatatagatatattgtcattgaaatattcccccaaaatattctcagactaaacctgacatagggaacaccgagaatgaaaacatcgttaacaccaaaactgaattcttatgcagaatttcctagcccatagatgacaacctgagtttctgtatgttaaagtagatgtaatgaattattattattacagtggtcacgattttcttcagtgtttatgattataaaaattgacatgaacatctttcactgacattttaatcattattttaaaagctttgcaacctatatatttatataactttgtaatataacatgggcaaatatctgacttcagtatttttaaaaagttgccttctccagtggcagtccaaaagcagaaatgagaggaaattattacaaaatagaattcaataaccatattggatgcaggctcttaactcagcagggatatcgtacatctattgctctacctcaggggtccagtgatacccactagatcttccaaggaaaaacataattctttcaaacggtgtgtatttggcaaagagctcttcaaatctgggagagggacttcctcaaggttttcctgtgtgcagtggatccacatagctaatatgacagctagtcagttgacagggaccacccacagtaagcaccatggtcagggaggtggcaggaggtgcaaagacagaagtattgagagaaacaccaagactctagtggaggaattaattcaatgggagatagtataaaatacatagaaaacacaagtaacagaaacctggttgaaatgcttaactagagtcaattagatgtgcaggagtaagtagtataagaagaatcaagtccgagagtgatcaggaaatgagtattaaacagtatttgaaacagagaacgtgtcccagggcccaaaagtcagaagggccccaccagccaggaaagttgtttcaatgctgtaagtaggtgtagccaagggaagccaggactatctgatatacggtagcaggggtttacggctgccaggggaaaataactcatcaagtgttggactttcaattataagatcgaatttaatttcctttccctcattctgcagcaatcagaatacacaatcttaaccactcggtccttagtggttttgttccattttgcattgggtattttcactgcctcatagagtctatttcaagtgtttggctgaaagggctttttgcatttgcatgttctgagttcagattctgctggtgcacccaagcattatgggaacaggaactcaacttagctcttccagtagaggggtgagggattctgcttttcaaattcataacattgatctttttatgcaagatttccatttacagttgaataagtacttcatatttttccatcattagacaaatacaaaatggactaaataattttaagagatagtggaggagagggggtacagacttccttcttagagagtgtcagagaatatgctcccaatggtggaaaggaagatttacagtctagcggctaagtacctcctacacatttcccatcaatcagaaaatagacaggtacactaaagggaccctgagaactcctcttgtaatttcaacacacccaaaatcaagggcctggatgccagcagctgcagcaagcaggtttttcctccctgttgagcaagacaggtgagcaagataggacttggctttcttacatgatgcggtaacttgtgacttgagtctttttccctaatttgctagtgggaagaaaaatagctgagctttctaaaatgatagctctctatttttaaatgaatttgaaaagtcgattaaattatgtattttattgcctctgagtatcatattaaatgaatattttattttaaaggcttaaataaatgaaaatgatttttgtaa

SEQ ID NO: 116512 - DNA, 4120 bp, Homo sapiens
  misc_feature (4113)..(4113): n is a, c, g, or t
gtagttgagggtggctgtgcaagtcagactcctttccaccaggaaacacagaaaacattctatcttcccaaatgttactctctcagatttgcaccaagaccctagaagtttcttaaatttccatatactttatggacactacaaagcaattccaggaaacactgatacagtagcaaaactactgggagtggaaattggatggagatctgggtcccagttcagagtctgacacctgatttgcaacataattaggcacagggcactcaactattcagggccctaaacccttctattgaaagggaaatgggagaacaatatgtgttcctatggctcagtccctataagattctgtactattcagagttgattttaagtgtcacttaactgaaattatccaacaaaccttcatggcatgaaacattaacacagctctttttatatggcatggttcctatggctcaatccctataagattctgtactagttcagagttgattttaaaagtcacttaactgaaattatccaacaaaccctcgaggacattaaacattaacgtggctctttttatatggcatggttcattatcatgccaataaatgattaatcgtaactctctgtcttgaccaataattttgctggacttttgtgattcacaacgtgctctgtgttgtaatgctacctcttgaaactgacatcctagctttattgttttttattacttccctaaggtggctttcaaaagagacaccaagtgacatatttttaggaggggtttaaaagtttgatggggtagaagtaaacgttgcttaactcaaccagcagcagagccagggcccagggaccagcgcttctgtggacttggcctttccagcagcagacccagcaatgaatgatccgaacagctgtgtggacaatgcaacagtttgctctggtgcatcctgtgtggtacctgagagcaatttcaataacatcctaagtgtggtcctaagtacggtgctgaccatcctgttggccttggtgatgttctccatgggatgcaacgtggaaatcaagaaatttctagggcacataaagcggccgtggggcatttgtgttggcttcctctgtcagtttggaatcatgcccctcacaggattcatcctgtcggtggcctttgacatcctcccgctccaggccgtagtggtgctcattataggatgctgccctggaggaactgcctccaatatcttggcctattgggtcgatggcgacatggacctgagcgtcagcatgaccacatgctccacactgcttgccctcggaatgatgccgctgtgcctccttatctataccaaaatgtgggtcgactctgggagcatcgtaattccctatgataacataggtacatctctggttgctctcgttgttcctgtttccattggaatgtttgttaatcacaaatggccccaaaaagcaaagatcatacttaaaattgggtccatcgcgggcgccatcctcattgtgctcatagctgtggttggaggaatattgtaccaaagcgcctggatcattgctcccaaactgtggattataggaacaatatttcctgtggcgggttactccctggggtttcttctggctagaattgctggtctaccctggtacaggtgccgaacggttgcttttgaaacggggatgcagaacacgcagctatgttccaccatcgttcagctctccttcactcctgaggagctcaatgtcgtattcaccttcccgctcatctacagcattttccagctcgcctttgccgcaatattcttaggattttatgtggcatacaagaaatgtcatggaaaaaacaaggcagaaattccagagagcaaagaaaatggaacggagccagagtcatcgttttataaggcaaatggaggatttcaacctgacgaaaagtagacatcaagtggacaaaacagacgagttccaaattacgttcttaaaccgtaactatatttaattatttgttttggtaggacagttggcagaaaagagttaaagtgaaaattggaatttcattggaattcatgtattggtttcagtaccaagtgactggtggcccaattctttaatgggacaaatattgtttcctatatatatgtatatgttttatatatgtatgtatactcatatagatatattgtcattgaaatattcccccaaaatattctcagactaaacctgacatagggaacaccgagaatgaaaacatcgttaacaccaaaactgaattcttatgcagaatttcctagcccatagatgacaacctgagtttctgtatgttaaagtagatgtaatgaattattattattacagtggtcacgattttcttcagtgtttatgattataaaaattgacatgaacatctttcactgacattttaatcattattttaaaagctttgcaacctatatatttatataactttgtaatataacatgggcaaatatctgacttcagtatttttaaaaagttgccttctccagtggcagtccaaaagcagaaatgagaggaaattattacaaaatagaattcaataaccatattggatgcaggctcttaactcagcagggatatcgtacatctattgctctacctcaggggtccagtgatacccactagatcttccaaggaaaaacataattctttcaaacggtgtgtatttggcaaagagctcttcaaatctgggagagggacttcctcaaggttttcctgtgtgcagtggatccacatagctaatatgacagctagtcagttgacagggaccacccacagtaagcaccatggtcagggaggtggcaggaggtgcaaagacagaagtattgagagaaacaccaagactctagtggaggaattaattcaatgggagatagtataaaatacatagaaaacacaagtaacagaaacctggttgaaatgcttaactagagtcaattagatgtgcaggagtaagtagtataagaagaatcaagtccgagagtgatcaggaaatgagtattaaacagtatttgaaacagagaacgtgtcccagggcccaaaagtcagaagggccccaccagccaggaaagttgtttcaatgctgtaagtaggtgtagccaagggaagccaggactatctgatatacggtagcaggggtttacggctgccaggggaaaataactcatcaagtgttggactttcaattataagatcgaatttaatttcctttccctcattctgcagcaatcagaatacacaatcttaaccactcggtccttagtggttttgttccattttgcattgggtattttcactgcctcatagagtctatttcaagtgtttggctgaaagggctttttgcatttgcatgttctgagttcagattctgctggtgcacccaagcattatgggaacaggaactcaacttagctcttccagtagaggggtgagggattctgcttttcaaattcataacattgatctttttatgcaagatttccatttacagttgaataagtacttcatatttttccatcattagacaaatacaaaatggactaaataattttaagagatagtggaggagagggggtacagacttccttcttagagagtgtcagagaatatgctcccaatggtggaaaggaagatttacagtctagcggctaagtacctcctacacatttcccatcaatcagaaaatagacaggtacactaaagggaccctgagaactcctcttgtaatttcaacacacccaaaatcaagggcctggatgccagcagctgcagcaagcaggtttttcctccctgttgagcaagacaggtgagcaagataggacttggctttcttacatgatgcggtaacttgtgacttgagtctttttccctaatttgctagtgggaagaaaaatagctgagctttctaaaatgatagctctctatttttaaatgaatttgaaaagtcgattaaattatgtattttattgcctctgagtatcatattaaatgaatattttattttaaaaagacattaaataaaaatgaaaaatcgatattttagtacgcggcgcgcccacgcactcttcgctctccattaagtgnaagaatt

SEQ ID NO: 116513 - DNA, 438 bp, Homo sapiens
ctcccaggttcaagcgattctcttgcctcagcctcccaagtagctgagattacaggcgcctgctaccacatcctgctaatttttgtatttttagtagagacagggtttcaccatgttggccaggttggtctcgaactcctggacctcaggtgatcctcctgccttggccttccaaagtgctgggattacaggcttgagccaccgtgcctggccgttaaagaacttttgagccatatatcagcccgttctaggatctgagaagacagctgaggaaagagcatttgtggcctccaggaacacggtccagtggattagtagtgggctttggagtcccacaaatctgggttggaatcacagcttgcttacttcgtaggtatgttatcttgtgcaggttccttaaccacactaagtctcaagagcttcatccgtaaaataggg

SEQ ID NO: 116514 - DNA, 779 bp, Homo sapiens
caagatgtatacgttgaatatatatagctttatttgtctgacaatcatatctcactaaaaaagtaaataaatggatgtggctgtattccaataaaacttgatttatggacactgaaaaaaaatattcagttagactacaaaatgatgaaagaccatgtagtgagagtcgccgccttcaagccatctatgccaaagccatgttaaaccctccagcttctgcgaactcaccagctggctgcagccccctgagtgagctcaggctagaccagcagagaaattgcccagctgaccccaaaaatgtgagaaatagcaaattactgttttcagccactaagttttgggataatggataactgagacatctgataagtactataatgaaagtaaaaagtgatttggggataaagaagagttagaaattatttcctacccagaggatgcgtggtgatcttatagcagtaacgatttttaatgttttcccatttttttcttttttaggggtattttttatatggtttaattgcaaaaatttaaactgctaaaatttggcaagttctggcataggtaaacacctgtgaacctgttatcacaatcaagataataaatgcggggaggccagacacagtggctcatgcctgtaatcctagcagtttgggaggccaaggcaggtggattggctgagctcaggagttcgagatcagcctgggcaacacagtgaaaccctgtctctactaaaatacaaaaaattagccaggcatggtggtgcacgcctgtagtcc

SEQ ID NO: 116515 - DNA, 298 bp, Homo sapiens
tcttagtctgaagtttaagtagggactttaattgactactgactctaaactgtgcggctctaataaatctactaaaagtaatctaattttttaaagcaccatatgaatagacaatttaggaaagaaatgttaataggcctcaaggaacatgtttttgaagtgagccttgaaaatctgcaaaatgacgaggttgcattgtgcaaattgaagctattatgagaatgttcaggtcaaaaaaattacctgacaaattcacgcacaggatctcacaaggaacacaaatgtgttcgttggcttt

SEQ ID NO: 116516 - DNA, 386 bp, Homo sapiens
aggatctgggattttaacccagttgtgccttggtctgggtggtttcctttttccctcaccatcagagggatattttaaaatcacaaacagaacctggggagaggaggcccaatttgacatctttgaaccttgatggggccactttatagattcagatttacagggattgttgggtggggatttgcaacccaggagagccttttagtgcctttcatagagggacacagaatcagagtttcctgaaatggcgtttttctgtgtgagacctgtcaatagaaatatcaaactgtgaatatacaattgaactttattatcccctttgattttgtaactacataggtatgacagacagaagctgattttaaaagaatctcacaattgccagt

SEQ ID NO: 116517 - DNA, 197 bp, Homo sapiens
aggtcctggatttcactgaaccagaacttgatgggtggttttggtattctgtgacctaggtagtggggagctccttcctttggatgtttcctttatgcccacagtcgaaccatatcctagttgtacagccaagaaggatcttttctgtttaatctatctggaggaatagaaggtccaggtatgccagaaggtccagg

SEQ ID NO: 116518 - DNA, 249 bp, Homo sapiens
actgtctcatcaaacaaagtattcggcagaatcccaataaactaaactgacaaaaagcaccatctgggctgcaacaggcctaggctgtctagggacagcaaacaatttggtcccctttgtcccacagcaggggctgaggctcttctgcacgaccacaaaagactgccaccacgctgaccaaagaacatgaggagaagctaaattagactcttaaccagcactggtttataagcacttctgagacagcat

SEQ ID NO: 116519 - DNA, 6319 bp, Homo sapiens
ggttgttgcgggatctcacaggctttaaaccgcggcgccgcggcgcccgggtgtggatccctagatgggagccggggatgggccgggtgcctggtgggtggcagtcggggctgacggcggcggcactttgccgcctcaggccctggacaccttcaccccgccgcctgcccaggcgggccggccctgcccgtccaccggccgccgagagtccccggccttgggtccccggggccgctgactggcctcggtcacctcccggggaaggctcccgcgcctccatctgcccccgcaggaagggaccctcttctcgcccgcgaggcttctccgggtgggatcgtcctggcccccagccctaagggatccgccccctccgagcatccgccgcccctcggagaccactccagctcggacggacccactccagcccccgctgcacgcggaagcgctcatcctccccgcctgccccgttccctcccccttctcctgtgggacaaccagggaccgcagctccccgctccccaggtgtgggggctccgacacgaacgcctctgctcgcagggcggtgagcgcagatcccacgggtccctcggtcgggggtcgaggctgcttccgtttccatcccggacccgacaatgggcgggaaaaagaaggctttacacgactacgcggcggagttcaccgacctggtggtgaagcacctgattgagcacagtgactctggggacacgtctgtggtggagaccctttactgcagggcctgcgagctgcccgtgcgcgtgcggagggaccgcatcctggaacacctgtcctcgggcaggcagcacggcctgcggacgcccattctcatgtaaatgtcagtgccaacgctggtgtttcaggagtcatcccagcgggctgcgggctattttaggattctctgccctgcaaacgtttccaaagtacgtggacaggccgcctgatgacactacgtttacgggatctgctagtggcttgcctacttagggagtaaaccctgtgaagtctcgcagttttgttaaagtgtgcgtggccacctgaatgctgccttatcacaagccagatacatactggtctgtagggtaactccccactgttgatcctctgagatgattgtggactgggtgctgtgagtcctgccactttgtttaagtgaatgtgtcttttgtccagctcagccgcctcggatctcgctgccaccagccttactgcacacccgtgccacccgcccttgccccgtcagcctcagcctcagctcattctctcaggcagtcccagcattggcacggtacctcctcccgctgtgggccacacgtctctgctccctgtcaaccctcctgccatcagcaccaccaccagcgacttgtctgcccgggaggatgcaacaccatctgcctccaccggccacctttcagtgtttcctgctttccaagtaaagataccagcagtgccctcagagcagaccagccagagtttttctgaagcctcccacagggtgctccccggaggaggcccgagatgctctcgtgactttggagccggggtggctggccaccttggcctgggcatctttggggtgggcttcgggagcccggcactgctgcagagtgtggtggatgagaacagctgctgcttgctgtacgtggtggaggaccagctgtgtgatgtggagcaagccttcagagctgagcatttgggccaacaccagagtggttcgggaacaggatgcagacattgtcctcaacgaccagcggcactttgatccggttttccagttcttgcacaagcaagtttgtgtcagccacgccctggggaggatccactggatcaccgccgtcactgcctgttcccggcggcctctccggcttccctaaagagagcaggtgggactttctacaacgctgctgtgcacgacgtggatgccgtatgcatgttgctgggggaagccactccggacactgtgttttctctgggacatgtcttctgcccagatatggccgccttaaaagatgcagatgctgttgtgatcagcatgaagtttccctgtgaggccgtggttagcgtggacatcagccagcactgcacagacagctgcgaccaggacgtcagccagcactgcacagacagctgcgaccagagactggaggtgacccttgcccttttccacccttcgccagtccactgtgaaaagctgggttgattgtgcgggttagatagaggtcatcagccgggttgattgtgtgggttagacagaggtcatcagccaggttgattgtgtgggttagatagagatcatcagcctggtagattgtgtgggttagatagaggtcatcagccaggttgattgtgcgggttagatagagatcatcagccgggttgattctacaggttagatagaggtcgtcagccgggttgattgtgcgggttagatagagatcatcagccgggttgattgtgcgggttagatagaggtcatcagctgggttgattgtgtgggttagatagagatcatcagctgggttgattgtgtgggttagatagaggtcgtcagctgggttgattgtgtgggttagatagaggtcatcagctgggttgattgtatgggttagatagaggtcatcagctgggttgattgtacgggttagatagaggtcgtcagccgggttgattccgcaggttagatagaggtcgttagctgggtgtgtgggtcccaaggcgtgctgcagatggagaatcagaattccttgggcatcaccgggcggggcatgtccctgtcccttcgctcccagacccaggctagccgctaccaggactcctatcgagagctcttcagacactttgtcagaacccttaaaggtgggtgacgttttcaggaggaacctgggatgtcctgatgctcaatgggtagatgccttccaggctgcagtcagtgcagatgatatgccaatttcaggtggaaaattgcattccagataccgggttcagatttgaaattgtccatctcagtgatcatttacgttgcgtgtacttgagggagattctgagagatgctcctttggggttctgtgcgtgtaccatgttgcctgacacgtcctgagaaatcttcttaaactctgagtttataaaataactacttctgaactcctgagatctagtggataccatgtatcctggaagataggacactttctaccctctgtcagtcctgggggtgactgggaaccagagaggttgagcagaattcctggacctgggtggggcttgtccaagaggggcaggtgggcctctctaggatcagtgtcccacccagaggccagtggccccttcacatgccccaacaagaggaagactgtctggctccgcagtgttgggttttgtcctgaatctgtgcaaatgtgcagggaaataacctcctgaaatcaccaaagagcagttcctcagggccttccgggtgaccgtggccgtggagcagtcgtggtgaaaccggtcagctgtggacctgccctgcgaatcggcagaggcctccgtggtgaagacagaagctccgtgaaccaactcgaggctggagccaagatcctgcctgatatccagttgcctgtttcacttgttactgttactgggagagggagacaaaacctcatggcaatcttgtcctcactggagactcagaaggggaagcattgggaaaccatgtatgtttcatttctggtttaaccaggcttttcaggatgggacttcagaccaaggacacaagttgggcttgcttaggtgttttgtgttgtgcgcaggcctcagagatgctcttccggtcagagttcccttggcagggccttggaggcctctggttggctctctcaggaagagggcaggtcagggattgggcggtgtaaattgactcagaaacctgcggtttcagcttttctgtggcaaacagggccgagggctggtgaagctgttaaggctaaatgtcgcatgcatgaggcgggctgcaggcctccttaggccttttttggggtaattacaccagtatttaaaaacatttttttttgtttgttttgagatggagtcttgccctgtcacccaggctggagtgcaatggtgcgatctcggctcactgcaacctccgtctcccaggttcaagcgattcttctgcctcagccttctgagtagctgggattacacgcgtgtgccaccacgctcggctaatttttgtatttttagtagagatgggatttcaccatgttggccaggctggtctcgaactactgacctcgtgatccacctgccacggcctcccaaagtgctgggattacaggcgtgagccaccatgctcggcctaaaaaacaattttcttgaagaatccgattttgtgcatagtaatgacacagcaccattcctgagaaataggaaatatatgtgtgtggtatgaaaagcccatattctgttcttgtcacctgaatctaggcttcctctttggatgtgaacgcgggaatgaacagtggctgttttccacccaaaggggcgtggagaccttttggaaacgggctttctcctttccattttgcagccgggggcgggtggaaaccttccttcgaagggtagtgccttggggagcagcagacctgctctgagtccagcttagctttccaaaattctgtgtggaacttactggagatgtttttatatatttgaaaataatggcctgtatttctcacgctatacttaaaaaaaataactaaccttttaaacaaagatattcaaactcacccttgtgctgaaagcactcacatttctgtgttcattcctgaaagggcgttttagagtccccgtttctacgttctatgtggcaccctcttgccgagggaacatccagaatccctccacttcctgtctagtttgaggcctcaacaccttcatgatccagagtcctgcggctatgagggggtgggcccaccaccgcccagccctccttggtggacgtggggacaggtaggagcctagggaaaggggtgggcgggctctggtgtgacggcgtgagcgctagccaggaagatggggccagggcttggcatggcacctcacctgtgggggaactcggcggagcttcctggcggcatctccccctcttgccttggtcctttctatctttgttttaggccaatttctaaaaagactgaggcctccttcaaggttgaacagatttctagagccttgtttttgctgtgacaagtccctagtccctgttcacaactctgaaaccaagaaacctgagaaccaagagaactgaaatgaagcccgttggtctcagcctggcttgagccaacatgaggctctctgctgccttttgttttcttaggttttgctgagaaacgggagtgcgttctgtgtcggtgtttgtgacgccctgagaccctgcttggcctagctaaagtccagaaggcctgggccccacagggcttggatgagggctcatgggcctgtacttcaggaggcctgagaggcccggtcagtcccatgaggctactcggcttggcccgcaggtcctccgaggcacagggcagagggacaccccagggacccatcagactcacgacacagagaaactcaagtggggtgccagggccggccacagaggccacgggcttcctgcctgtgacgagccgccctgtttgtctgagccctttggagatttaggttgagtcatgagaaccggtcattggaacatacactttattatgttacaaaaacaaaaatccccactgaaacacagctaaaaaaataacacattttcccaagattacattaccaaaaacagttgttatgtcattggagggcgtccattaatactgctcggagaagcacgatcttacacgaaaaacacggatgggatttcgttttcaccttaaagcattaaagtgctttaactggtaacagaggagtggatgtttgtgcgttggagacactgactgttctgagtgacaagtggctctgtgccaggatactgcgggtcgggctcctgggtacagcaagggcttcccagcagcccaggcctggtgggaacgctgggggaatgggggagagtcgctgtttctgaccagagcgacttggacagatgtgagctgacctgcctggcgagctccttctgccttgcctctctgagcagactcaggaccactgcctgtcccccttggccccaggagtgccagcagcctccctccaacccctgcactgctgggaaaaccatccgccttcaagatttatttgttgatttgtttagttttataaaaacatatcacttaaagga

SEQ ID NO: 116520 - DNA, 5762 bp, Homo sapiens
ggttgttgcgggatctcacaggctttaaaccgcggcgccgcggcgcccgggtgtggatccctagatgggagccggggatgggccgggtgcctggtgggtggcagtcggggctgacggcggcggcactttgccgcctcaggccctggacaccttcaccccgccgcctgcccaggcgggccggccctgcccgtccaccggccgccgagagtccccggccttgggtccccggggccgctgactggcctcggtcacctcccggggaaggctcccgcgcctccatctgcccccgcaggaagggaccctcttctcgcccgcgaggcttctccgggtgggatcgtcctggcccccagccctaagggatccgccccctccgagcatccgccgcccctcggagaccactccagctcggacggacccactccagcccccgctgcacgcggaagcgctcatcctccccgcctgccccgttccctcccccttctcctgtgggacaaccagggaccgcagctccccgctccccaggtgtgggggctccgacacgaacgcctctgctcgcagggcggtgagcgcagatcccacgggtccctcggtcgggggtcgaggctgcttccgtttccatcccggacccgacaatgggcgggaaaaagaaggctttacacgactacgcggcggagttcaccgacctggtggtgaagcacctgattgagcacagtgactctggggacacgtctgtggtggagaccctttactgcagggcctgcgagctgcccgtgcgcgtgcggagggaccgcatcctggaacacctgtcctcgggcaggcagcacggcctgcggacgcccattctcatgtaaatgtcagtgccaacgctggtgtttcaggagtcatcccagcgggctgcgggctattttaggattctctgccctgcaaacgtttccaaagtacgtggacaggccgcctgatgacactacgtttacgggatctgctagtggcttgcctacttagggagtaaaccctgtgaagtctcgcagttttgttaaagtgtgcgtggccacctgaatgctgccttatcacaagccagatacatactggtctgtagggtaactccccactgttgatcctctgagatgattgtggactgggtgctgtgagtcctgccactttgtttaagtgaatgtgtcttttgtccagctcagccgcctcggatctcgctgccaccagccttactgcacacccgtgccacccgcccttgccccgtcagcctcagcctcagctcattctctcaggcagtcccagcattggcacggtacctcctcccgctgtgggccacacgtctctgctccctgtcaaccctcctgccatcagcaccaccaccagcgacttgtctgcccgggaggatgcaacaccatctgcctccaccggccacctttcagtgtttcctgctttccaagtaaagataccagcagtgccctcagagcagaccagccagagtttttctgaagcctcccacagggtgctccccggaggaggcccgagatgctctcgtgactttggagccggggtggctggccaccttggcctgggcatctttggggtgggcttcgggagcccggcactgctgcagagtgtggtggatgagaacagctgctgcttgctgtacgtggtggaggaccagctgtgtgatgtggagcaagccttcagagctgagcatttgggccaacaccagagtggttcgggaacaggatgcagacattgtcctcaacgaccagcggcactttgatccggttttccagttcttgcacaagcaagtttgtgtcagccacgccctggggaggatccactggatcaccgccgtcactgcctgttcccggcggcctctccggcttccctaaagagagcaggtgggactttctacaacgctgctgtgcacgacgtggatgccgtatgcatgttgctgggggaagccactccggacactgtgttttctctgggacatgtcttctgcccagatatggccgccttaaaagatgcagatgctgttgtgatcagcatgaagtttccctgtgaggccgtggttagcgtggacatcagccagcactgcacagacagctgcgaccaggacgtcagccagcactgcacagacagctgcgaccagagactggaggtgacccttgcccttttccacccttcgccagtccactgtgaaaagctgggttgattgtgcgggttagatagaggtcatcagccgggttgattgtgtgggttagacagaggtcatcagccaggttgattgtgtgggttagatagagatcatcagcctggtagattgtgtgggttagatagaggtcatcagccaggttgattgtgcgggttagatagagatcatcagccgggttgattctacaggttagatagaggtcgtcagccgggttgattgtgcgggttagatagagatcatcagccgggttgattgtgcgggttagatagaggtcatcagctgggttgattgtgtgggttagatagagatcatcagctgggttgattgtgtgggttagatagaggtcgtcagctgggttgattgtgtgggttagatagaggtcatcagctgggttgattgtatgggttagatagaggtcatcagctgggttgattgtacgggttagatagaggtcgtcagccgggttgattccgcaggttagatagaggtcgttagctgggtgtgtgggtcccaaggcgtgctgcagatggagaatcagaattccttgggcatcaccgggcggggcatgtccctgtcccttcgctcccagacccaggctagccgctaccaggactcctatcgagagctcttcagacactttgtcagaacccttaaaggtgggtgacgttttcaggaggaacctgggatgtcctgatgctcaatgggtagatgccttccaggctgcagtcagtgcagatgatatgccaatttcaggtggaaaattgcattccagataccgggttcagatttgaaattgtccatctcagtgatcatttacgttgcgtgtacttgagggagattctgagagatgctcctttggggttctgtgcgtgtaccatgttgcctgacacgtcctgagaaatcttcttaaactctgagtttataaaataactacttctgaactcctgagatctagtggataccatgtatcctggaagataggacactttctaccctctgtcagtcctgggggtgactgggaaccagagaggttgagcagaattcctggacctgggtggggcttgtccaagaggggcaggtgggcctctctaggatcagtgtcccacccagaggccagtggccccttcacatgccccaacaagaggaagactgtctggctccgcagtgttgggttttgtcctgaatctgtgcaaatgtgcagggaaataacctcctgaaatcaccaaagagcagttcctcagggccttccgggtgaccgtggccgtggagcagtcgtggtgaaaccggtcagctgtggacctgccctgcgaatcggcagaggcctccgtggtgaagacagaagctccgtgaaccaactcgaggctggagccaagatcctgcctgatatccagttgcctgtttcacttgttactgttactgggagagggagacaaaacctcatggcaatcttgtcctcactggagactcagaaggggaagcattgggaaaccatgtatgtttcatttctggtttaaccaggcttttcaggatgggacttcagaccaaggacacaagttgggcttgcttaggtgttttgtgttgtgcgcaggcctcagagatgctcttccggtcagagttcccttggcagggccttggaggcctctggttggctctctcaggaagagggcaggtcagggattgggcggtgtaaattgactcagaaacctgcggtttcagcttttctgtggcaaacagggccgagggctggtgaagctgttaaggctaaatgtcgcatgcatgaggcgggctgcaggcctccttaggccttttttggggtaattacaccagtatttaaaaacatttttttttgtttgttttgagatggagtcttgccctgtcacccaggctggagtgcaatggtgcgatctcggctcactgcaacctccgtctcccaggttcaagcgattcttctgcctcagccttctgagtagctgggattacacgcgtgtgccaccacgctcggctaatttttgtatttttagtagagatgggatttcaccatgttggccaggctggtctcgaactactgacctcgtgatccacctgccacggcctcccaaagtgctgggattacaggcgtgagccaccatgctcggcctaaaaaacaattttcttgaagaatccgattttgtgcatagtaatgacacagcaccattcctgagaaataggaaatatatgtgtgtggtatgaaaagcccatattctgttcttgtcacctgaatctaggcttcctctttggatgtgaacgcgggaatgaacagtggctgttttccacccaaaggggcgtggagaccttttggaaacgggctttctcctttccattttgcagccgggggcgggtggaaaccttccttcgaagggtagtgccttggggagcagcagacctgctctgagtccagcttagctttccaaaattctgtgtggaacttactggagatgtttttatatatttgaaaataatggcctgtatttctcacgctatacttaaaaaaaataactaaccttttaaacaaagatattcaaactcacccttgtgctgaaagcactcacatttctgtgttcattcctgaaagggcgttttagagtccccgtttctacgttctatgtggcaccctcttgccgagggaacatccagaatccctccacttcctgtctagtttgaggcctcaacaccttcatgatccagagtcctgcggctatgagggggtgggcccaccaccgcccagccctccttggtggacgtggggacaggtaggagcctagggaaaggggtgggcgggctctggtgtgacggcgtgagcgctagccaggaagatggggccaggggccggccacagaggccacgggcttcctgcctgtgacgagccgccctgtttgtctgagccctttggagatttaggttgagtcatgagaaccggtcattggaacatacactttattatgttacaaaaacaaaaatccccactgaaacacagctaaaaaaataacacattttcccaagattacattaccaaaaacagttgttatgtcattggagggcgtccattaatactgctcggagaagcacgatcttacacgaaaaacacggatgggatttcgttttcaccttaaagcattaaagtgctttaactggtaacagaggagtggatgtttgtgcgttggagacactgactgttctgagtgacaagtggctctgtgccaggatactgcgggtcgggctcctgggtacagcaagggcttcccagcagcccaggcctggtgggaacgctgggggaatgggggagagtcgctgtttctgaccagagcgacttggacagatgtgagctgacctgcctggcgagctccttctgccttgcctctctgagcagactcaggaccactgcctgtcccccttggccccaggagtgccagcagcctccctccaacccctgcactgctgggaaaaccatccgccttcaagatttatttgttgatttgtttagttttataaaaacatatcacttaaagga

SEQ ID NO: 116521 - DNA, 5064 bp, Homo sapiens
ggttgttgcgggatctcacaggctttaaaccgcggcgccgcggcgcccgggtgtggatccctagatgggagccggggatgggccgggtgcctggtgggtggcagtcggggctgacggcggcggcactttgccgcctcaggccctggacaccttcaccccgccgcctgcccaggcgggccggccctgcccgtccaccggccgccgagagtccccggccttgggtccccggggccgctgactggcctcggtcacctcccggggaaggctcccgcgcctccatctgcccccgcaggaagggaccctcttctcgcccgcgaggcttctccgggtgggatcgtcctggcccccagccctaagggatccgccccctccgagcatccgccgcccctcggagaccactccagctcggacggacccactccagcccccgctgcacgcggaagcgctcatcctccccgcctgccccgttccctcccccttctcctgtgggacaaccagggaccgcagctccccgctccccaggtgtgggggctccgacacgaacgcctctgctcgcagggcggtgagcgcagatcccacgggtccctcggtcgggggtcgaggctgcttccgtttccatcccggacccgacaatgggcgggaaaaagaaggctttacacgactacgcggcggagttcaccgacctggtggtgaagcacctgattgagcacagtgactctggggacacgtctgtggtggagaccctttactgcagggcctgcgagctgcccgtgcgcgtgcggagggaccgcatcctggaacacctgtcctcgggcaggcagcacggcctgcggacgcccattctcatgtaaatgtcagtgccaacgctggtgtttcaggagtcatcccagcgggctgcgggctattttaggattctctgccctgcaaacgtttccaaagtacgtggacaggccgcctgatgacactacgtttacgggatctgctagtggcttgcctacttagggagtaaaccctgtgaagtctcgcagttttgttaaagtgtgcgtggccacctgaatgctgccttatcacaagccagatacatactggtctgtagggtaactccccactgttgatcctctgagatgattgtggactgggtgctgtgagtcctgccactttgtttaagtgaatgtgtcttttgtccagctcagccgcctcggatctcgctgccaccagccttactgcacacccgtgccacccgcccttgccccgtcagcctcagcctcagctcattctctcaggcagtcccagcattggcacggtacctcctcccgctgtgggccacacgtctctgctccctgtcaaccctcctgccatcagcaccaccaccagcgacttgtctgcccgggaggatgcaacaccatctgcctccaccggccacctttcagtgtttcctgctttccaagtaaagataccagcagtgccctcagagcagaccagccagagtttttctgaagcctcccacagggtgctccccggaggaggcccgagatgctctcgtgactttggagccggggtggctggccaccttggcctgggcatctttggggtgggcttcgggagcccggcactgctgcagagtgtggtggatgagaacagctgctgcttgctgtacgtggtggaggaccagctgtgtgatgtggagcaagccttcagagctgagcatttgggccaacaccagagtggttcgggaacaggatgcagacattgtcctcaacgaccagcggcactttgatccggttttccagttcttgcacaagcaagtttgtgtcagccacgccctggggaggatccactggatcaccgccgtcactgcctgttcccggcggcctctccggcttccctaaagagagcaggtgggactttctacaacgctgctgtgcacgacgtggatgccgtatgcatgttgctgggggaagccactccggacactgtgttttctctgggacatgtcttctgcccagatatggccgccttaaaagatgcagatgctgttgtgatcagcatgaagtttccctgtgaggccgtggttagcgtggacatcagccagcactgcacagacagctgcgaccaggacgtcagccagcactgcacagacagctgcgaccagagactggagggaaataacctcctgaaatcaccaaagagcagttcctcagggccttccgggtgaccgtggccgtggagcagtcgtggtgaaaccggtcagctgtggacctgccctgcgaatcggcagaggcctccgtggtgaagacagaagctccgtgaaccaactcgaggctggagccaagatcctgcctgatatccagttgcctgtttcacttgttactgttactgggagagggagacaaaacctcatggcaatcttgtcctcactggagactcagaaggggaagcattgggaaaccatgtatgtttcatttctggtttaaccaggcttttcaggatgggacttcagaccaaggacacaagttgggcttgcttaggtgttttgtgttgtgcgcaggcctcagagatgctcttccggtcagagttcccttggcagggccttggaggcctctggttggctctctcaggaagagggcaggtcagggattgggcggtgtaaattgactcagaaacctgcggtttcagcttttctgtggcaaacagggccgagggctggtgaagctgttaaggctaaatgtcgcatgcatgaggcgggctgcaggcctccttaggccttttttggggtaattacaccagtatttaaaaacatttttttttgtttgttttgagatggagtcttgccctgtcacccaggctggagtgcaatggtgcgatctcggctcactgcaacctccgtctcccaggttcaagcgattcttctgcctcagccttctgagtagctgggattacacgcgtgtgccaccacgctcggctaatttttgtatttttagtagagatgggatttcaccatgttggccaggctggtctcgaactactgacctcgtgatccacctgccacggcctcccaaagtgctgggattacaggcgtgagccaccatgctcggcctaaaaaacaattttcttgaagaatccgattttgtgcatagtaatgacacagcaccattcctgagaaataggaaatatatgtgtgtggtatgaaaagcccatattctgttcttgtcacctgaatctaggcttcctctttggatgtgaacgcgggaatgaacagtggctgttttccacccaaaggggcgtggagaccttttggaaacgggctttctcctttccattttgcagccgggggcgggtggaaaccttccttcgaagggtagtgccttggggagcagcagacctgctctgagtccagcttagctttccaaaattctgtgtggaacttactggagatgtttttatatatttgaaaataatggcctgtatttctcacgctatacttaaaaaaaataactaaccttttaaacaaagatattcaaactcacccttgtgctgaaagcactcacatttctgtgttcattcctgaaagggcgttttagagtccccgtttctacgttctatgtggcaccctcttgccgagggaacatccagaatccctccacttcctgtctagtttgaggcctcaacaccttcatgatccagagtcctgcggctatgagggggtgggcccaccaccgcccagccctccttggtggacgtggggacaggtaggagcctagggaaaggggtgggcgggctctggtgtgacggcgtgagcgctagccaggaagatggggccagggcttggcatggcacctcacctgtgggggaactcggcggagcttcctggcggcatctccccctcttgccttggtcctttctatctttgttttaggccaatttctaaaaagactgaggcctccttcaaggttgaacagatttctagagccttgtttttgctgtgacaagtccctagtccctgttcacaactctgaaaccaagaaacctgagaaccaagagaactgaaatgaagcccgttggtctcagcctggcttgagccaacatgaggctctctgctgccttttgttttcttaggttttgctgagaaacgggagtgcgttctgtgtcggtgtttgtgacgccctgagaccctgcttggcctagctaaagtccagaaggcctgggccccacagggcttggatgagggctcatgggcctgtacttcaggaggcctgagaggcccggtcagtcccatgaggctactcggcttggcccgcaggtcctccgaggcacagggcagagggacaccccagggacccatcagactcacgacacagagaaactcaagtggggtgccagggccggccacagaggccacgggcttcctgcctgtgacgagccgccctgtttgtctgagccctttggagatttaggttgagtcatgagaaccggtcattggaacatacactttattatgttacaaaaacaaaaatccccactgaaacacagctaaaaaaataacacattttcccaagattacattaccaaaaacagttgttatgtcattggagggcgtccattaatactgctcggagaagcacgatcttacacgaaaaacacggatgggatttcgttttcaccttaaagcattaaagtgctttaactggtaacagaggagtggatgtttgtgcgttggagacactgactgttctgagtgacaagtggctctgtgccaggatactgcgggtcgggctcctgggtacagcaagggcttcccagcagcccaggcctggtgggaacgctgggggaatgggggagagtcgctgtttctgaccagagcgacttggacagatgtgagctgacctgcctggcgagctccttctgccttgcctctctgagcagactcaggaccactgcctgtcccccttggccccaggagtgccagcagcctccctccaacccctgcactgctgggaaaaccatccgccttcaagatttatttgttgatttgtttagttttataaaaacatatcacttaaagga

SEQ ID NO: 116522 - DNA, 4405 bp, Homo sapiens
ggttgttgcgggatctcacaggctttaaaccgcggcgccgcggcgcccgggtgtggatccctagatgggagccggggatgggccgggtgcctggtgggtggcagtcggggctgacggcggcggcactttgccgcctcaggccctggacaccttcaccccgccgcctgcccaggcgggccggccctgcccgtccaccggccgccgagagtccccggccttgggtccccggggccgctgactggcctcggtcacctcccggggaaggctcccgcgcctccatctgcccccgcaggaagggaccctcttctcgcccgcgaggcttctccgggtgggatcgtcctggcccccagccctaagggatccgccccctccgagcatccgccgcccctcggagaccactccagctcggacggacccactccagcccccgctgcacgcggaagcgctcatcctccccgcctgccccgttccctcccccttctcctgtgggacaaccagggaccgcagctccccgctccccaggtgtgggggctccgacacgaacgcctctgctcgcagggcggtgagcgcagatcccacgggtccctcggtcgggggtcgaggctgcttccgtttccatcccggacccgacaatgggcgggaaaaagaaggctttacacgactacgcggcggagttcaccgacctggtggtgaagcacctgattgagcacagtgactctggggacacgtctgtggtggagaccctttactgcagggcctgcgagctgcccgtgcgcgtgcggagggaccgcatcctggaacacctgtcctcgggcaggcagcacggcctgcggacgcccattctcatgtaaatgtcagtgccaacgctggtgtttcaggagtcatcccagcgggctgcgggctattttaggattctctgccctgcaaacgtttccaaagtacgtggacaggccgcctgatgacactacgtttacgggatctgctagtggcttgcctacttagggagtaaaccctgtgaagtctcgcagttttgttaaagtgtgcgtggccacctgaatgctgccttatcacaagccagatacatactggtctgtagggtaactccccactgttgatcctctgagatgattgtggactgggtgctgtgagtcctgccactttgtttaagtgaatgtgtcttttgtccagctcagccgcctcggatctcgctgccaccagccttactgcacacccgtgccacccgcccttgccccgtcagcctcagcctcagctcattctctcaggcagtcccagcattggcacggtacctcctcccgctgtgggccacacgtctctgctccctgtcaaccctcctgccatcagcaccaccaccagcgacttgtctgcccgggaggatgcaacaccatctgcctccaccggccacctttcagtgtttcctgctttccaagtaaagataccagcagtgccctcagagcagaccagccagagtttttctgaagcctcccacagggtgctccccggaggaggcccgagatgctctcgtgactttggagccggggtggctggccaccttggcctgggcatctttggggtgggcttcgggagcccggcactgctgcagagtgtggtggatgagaacagctgctgcttgctgtacgtggtggaggaccagctgtgtgatgtggagcaagccttcagagctgagcatttgggccaacaccagagtggttcgggaacaggatgcagacattgtcctcaacgaccagcggcactttgatccggttttccagttcttgcacaagcaagtttgtgtcagccacgccctggggaggatccactggatcaccgccgtcactgcctgttcccggcggcctctccggcttccctaaagagagcaggtgggactttctacaacgctgctgtgcacgacgtggatgccgtatgcatgttgctgggggaagccactccggacactgtgttttctctgggacatgtcttctgcccagatatggccgccttaaaagatgcagatgctgttgtgatcagcatgaagtttccctgtgaggccgtggttagcgtggacatcagccagcactgcacagacagctgcgaccaggacgtcagccagcactgcacagacagctgcgaccagagactggagatggagtcttgccctgtcacccaggctggagtgcaatggtgcgatctcggctcactgcaacctccgtctcccaggttcaagcgattcttctgcctcagccttctgagtagctgggattacacgcgtgtgccaccacgctcggctaatttttgtatttttagtagagatgggatttcaccatgttggccaggctggtctcgaactactgacctcgtgatccacctgccacggcctcccaaagtgctgggattacaggcgtgagccaccatgctcggcctaaaaaacaattttcttgaagaatccgattttgtgcatagtaatgacacagcaccattcctgagaaataggaaatatatgtgtgtggtatgaaaagcccatattctgttcttgtcacctgaatctaggcttcctctttggatgtgaacgcgggaatgaacagtggctgttttccacccaaaggggcgtggagaccttttggaaacgggctttctcctttccattttgcagccgggggcgggtggaaaccttccttcgaagggtagtgccttggggagcagcagacctgctctgagtccagcttagctttccaaaattctgtgtggaacttactggagatgtttttatatatttgaaaataatggcctgtatttctcacgctatacttaaaaaaaataactaaccttttaaacaaagatattcaaactcacccttgtgctgaaagcactcacatttctgtgttcattcctgaaagggcgttttagagtccccgtttctacgttctatgtggcaccctcttgccgagggaacatccagaatccctccacttcctgtctagtttgaggcctcaacaccttcatgatccagagtcctgcggctatgagggggtgggcccaccaccgcccagccctccttggtggacgtggggacaggtaggagcctagggaaaggggtgggcgggctctggtgtgacggcgtgagcgctagccaggaagatggggccagggcttggcatggcacctcacctgtgggggaactcggcggagcttcctggcggcatctccccctcttgccttggtcctttctatctttgttttaggccaatttctaaaaagactgaggcctccttcaaggttgaacagatttctagagccttgtttttgctgtgacaagtccctagtccctgttcacaactctgaaaccaagaaacctgagaaccaagagaactgaaatgaagcccgttggtctcagcctggcttgagccaacatgaggctctctgctgccttttgttttcttaggttttgctgagaaacgggagtgcgttctgtgtcggtgtttgtgacgccctgagaccctgcttggcctagctaaagtccagaaggcctgggccccacagggcttggatgagggctcatgggcctgtacttcaggaggcctgagaggcccggtcagtcccatgaggctactcggcttggcccgcaggtcctccgaggcacagggcagagggacaccccagggacccatcagactcacgacacagagaaactcaagtggggtgccagggccggccacagaggccacgggcttcctgcctgtgacgagccgccctgtttgtctgagccctttggagatttaggttgagtcatgagaaccggtcattggaacatacactttattatgttacaaaaacaaaaatccccactgaaacacagctaaaaaaataacacattttcccaagattacattaccaaaaacagttgttatgtcattggagggcgtccattaatactgctcggagaagcacgatcttacacgaaaaacacggatgggatttcgttttcaccttaaagcattaaagtgctttaactggtaacagaggagtggatgtttgtgcgttggagacactgactgttctgagtgacaagtggctctgtgccaggatactgcgggtcgggctcctgggtacagcaagggcttcccagcagcccaggcctggtgggaacgctgggggaatgggggagagtcgctgtttctgaccagagcgacttggacagatgtgagctgacctgcctggcgagctccttctgccttgcctctctgagcagactcaggaccactgcctgtcccccttggccccaggagtgccagcagcctccctccaacccctgcactgctgggaaaaccatccgccttcaagatttatttgttgatttgtttagttttataaaaacatatcacttaaagga

SEQ ID NO: 116523 - DNA, 1874 bp, Homo sapiens
ccatattgtgttcggagcacaatgagtgaaaggaatccacatcggaaagtacacgcaggaaaagataaatggctgttttccacccaaaggggcgtggagaccttttggaaacgggctttctcctttccattttgcagccgggggcgggtggaaaccttccttcgaagggtagtgccttggggagcagcagacctgctctgagtccagcttagctttccaaaattctgtgtggaacttactggagatgtttttatatatttgaaaataatggcctgtatttctcacgctatacttaaaaaaaataactaaccttttaaacaaagatattcaaactcacccttgtgctgaaagcactcacatttctgtgttcattcctgaaagggcgttttagagtccccgtttctacgttctatgtggcaccctcttgccgagggaacatccagaatccctccacttcctgtctagtttgaggcctcaacaccttcatgatccagagtcctgcggctatgagggggtgggcccaccaccgcccagccctccttggtggacgtggggacaggtaggagcctagggaaaggggtgggcgggctctggtgtgacggcgtgagcgctagccaggaagatggggccagggcttggcatggcacctcacctgtgggggaactcggcggagcttcctggcggcatctccccctcttgccttggtcctttctatctttgttttaggccaatttctaaaaagactgaggcctccttcaaggttgaacagatttctagagccttgtttttgctgtgacaagtccctagtccctgttcacaactctgaaaccaagaaacctgagaaccaagagaactgaaatgaagcccgttggtctcagcctggcttgagccaacatgaggctctctgctgccttttgttttcttaggttttgctgagaaacgggagtgcgttctgtgtcggtgtttgtgacgccctgagaccctgcttggcctagctaaagtccagaaggcctgggccccacagggcttggatgagggctcatgggcctgtacttcaggaggcctgagaggcccggtcagtcccatgaggctactcggcttggcccgcaggtcctccgaggcacagggcagagggacaccccagggacccatcagactcacgacacagagaaactcaagtggggtgccagggccggccacagaggccacgggcttcctgcctgtgacgagccgccctgtttgtctgagccctttggagatttaggttgagtcatgagaaccggtcattggaacatacactttattatgttacaaaaacaaaaatccccactgaaacacagctaaaaaaataacacattttcccaagattacattaccaaaaacagttgttatgtcattggagggcgtccattaatactgctcggagaagcacgatcttacacgaaaaacacggatgggatttcgttttcaccttaaagcattaaagtgctttaactggtaacagaggagtggatgtttgtgcgttggagacactgactgttctgagtgacaagtggctctgtgccaggatactgcgggtcgggctcctgggtacagcaagggcttcccagcagcccaggcctggtgggaacgctgggggaatgggggagagtcgctgtttctgaccagagcgacttggacagatgtgagctgacctgcctggcgagctccttctgccttgcctctctgagcagactcaggaccactgcctgtcccccttggccccaggagtgccagcagcctccctccaacccctgcactgctgggaaaaccatccgccttcaagatttatttgttgatttgtttagttttataaaaacatatcacttaaagga

SEQ ID NO: 116524 - DNA, 400 bp, Homo sapiens
acattccactttactcctgcagcgtctctggagtagttgtttgctgcccgccggaggcagcttctgaaatcgtgagggatgctctccgagcagctatgggctgggctggctgaggtgatgtctgcacctgtgcccaggtgtctcagggagaatgggcttcggggaataggcttgcctgcttcatctcctgactcctttgctaggcactttgatccggttttccagttcttgcacaagcaagtttgtgtcagccacgccctggggaggatccactggatcaccgccgtcactgcctgttcccggcggcctctccggcttccctaaagagagcaggtgggcatctgcgtttttgggggaatgcacagcgttgtggcatctgtgtccatgtcacgtggttccc

SEQ ID NO: 116525 - DNA, 6409 bp, Homo sapiens
  misc_feature (2634)..(2634): n is a, c, g, or t
ggttgttgcgggatctcacaggctttaaaccgcggcgccgcggcgcccgggtgtggatccctagatgggagccggggatgggccgggtgcctggtgggtggcagtcggggctgacggcggcggcactttgccgcctcaggccctggacaccttcaccccgccgcctgcccaggcgggccggccctgcccgtccaccggccgccgagagtccccggccttgggtccccggggccgctgactggcctcggtcacctcccggggaaggctcccgcgcctccatctgcccccgcaggaagggaccctcttctcgcccgcgaggcttctccgggtgggatcgtcctggcccccagccctaagggatccgccccctccgagcatccgccgcccctcggagaccactccagctcggacggacccactccagcccccgctgcacgcggaagcgctcatcctccccgcctgccccgttccctcccccttctcctgtgggacaaccagggaccgcagctccccgctccccaggtgtgggggctccgacacgaacgcctctgctcgcagggcggtgagcgcagatcccacgggtccctcggtcgggggtcgaggctgcttccgtttccatcccggacccgacaatgggcgggaaaaagaaggctttacacgactacgcggcggagttcaccgacctggtggtgaagcacctgattgagcacagtgactctggggacacgtctgtggtggagaccctttactgcagggcctgcgagctgcccgtgcgcgtgcggagggaccgcatcctggaacacctgtcctcgggcaggcagcacggcctgcggacgcccattctcatgtaaatgtcagtgccaacgctggtgtttcaggagtcatcccagcgggctgcgggctattttaggattctctgccctgcaaacgtttccaaagtacgtggacaggccgcctgatgacactacgtttacgggatctgctagtggcttgcctacttagggagtaaaccctgtgaagtctcgcagttttgttaaagtgtgcgtggccacctgaatgctgccttatcacaagccagatacatactggtctgtagggtaactccccactgttgatcctctgagatgattgtggactgggtgctgtgagtcctgccactttgtttaagtgaatgtgtcttttgtccagctcagccgcctcggatctcgctgccaccagccttactgcacacccgtgccacccgcccttgccccgtcagcctcagcctcagctcattctctcaggcagtcccagcattggcacggtacctcctcccgctgtgggccacacgtctctgctccctgtcaaccctcctgccatcagcaccaccaccagcgacttgtctgcccgggaggatgcaacaccatctgcctccaccggccacctttcagtgtttcctgctttccaagtaaagataccagcagtgccctcagagcagaccagccagagtttttctgaagcctcccacagggtgctccccggaggaggcccgagatgctctcgtgactttggagccggggtggctggccaccttggcctgggcatctttggggtgggcttcgggagcccggcactgctgcagagtgtggtggatgagaacagctgctgcttgctgtacgtggtggaggaccagctgtgtgatgtggagcaagccttcagagctgagcatttgggccaacaccagagtggttcgggaacaggatgcagacattgtcctcaacgaccagcggcactttgatccggttttccagttcttgcacaagcaagtttgtgtcagccacgccctggggaggatccactggatcaccgccgtcactgcctgttcccggcggcctctccggcttccctaaagagagcaggtgggactttctacaacgctgctgtgcacgacgtggatgccgtatgcatgttgctgggggaagccactccggacactgtgttttctctgggacatgtcttctgcccagatatggccgccttaaaagatgcagatgctgttgtgatcagcatgaagtttccctgtgaggccgtggttagcgtggacatcagccagcactgcacagacagctgcgaccaggacgtcagccagcactgcacagacagctgcgaccagagactggaggtgacccttgcccttttccacccttcgccagtccactgtgaaaagctgggttgattgtgcgggttagatagaggtcatcagccgggttgattgtgtgggttagacagaggtcatcagccaggttgattgtgtgggttagatagagatcatcagcctggtagattgtgtgggttagatagaggtcatcagccaggttgattgtgcgggttagatagagatcatcagccgggttgattctacaggttagatagaggtcgtcagccgggttgattgtgcgggttagatagagatcatcagccgggttgattgtgcgggttagatagaggtcatcagctgggttgattgtgtgggttagatagagatcatcagctgggttgattgtgtgggttagatagaggtcgtcagctgggttgattgtgcgggttagatagaggtcatcagccgggttgattctacaggttagatagaggtcntcagctgggttgattgtgcgggttagagatcatcagccgggttgattgtgcgggttagatagaggtcatcagccgggttgattgtgcgggttagatagagatcatcagctgggttgattctgcaggttagatagaggtcatcagctgggttgactatgtgggttagatagaggtcgtcagccgggttgattgtgtgggttagacagaggtcatcagctgggttgattctgcgggttagatagaggtcatcagctgggttgattgtgtgggttagatagagatcatcagctgggttgattgtgtgggttagatagaggtcatcagctgggttgattgtgtgggttagatagaggtcatcagctgggttgattgtgtgggttagatagaggtcatcagctgggttgattgtgtgggttagatagaggtcatcagctgggttgattgtatgggttagatagaggtcatcagctgggttgattgtacgggttagatagaggtcgtcagccgggttgattccgcaggttagatagaggtcgttagctgggtgtgtgggtcccaaggcgtgctgcagatggagaatcagaattccttgggcatcaccgggcggggcatgtccctgtcccttcgctcccagacccaggctagccgctaccaggactcctatcgagagctcttcagacactttgtcagaacccttaaaggtgggtgacgttttcaggaggaacctgggatgtcctgatgctcaatgggtagatgccttccaggctgcagtcagtgcagatgatatgccaatttcaggtggaaaattgcattccagataccgggttcagatttgaaattgtccatctcagtgatcatttacgttgcgtgtacttgagggagattctgagagatgctcctttggggttctgtgcgtgtaccatgttgcctgacacgtcctgagaaatcttcttaaactctgagtttataaaataactacttctgaactcctgagatctagtggataccatgtatcctggaagataggacactttctaccctctgtcagtcctgggggtgactgggaaccagagaggttgagcagaattcctggacctgggtggggcttgtccaagaggggcaggtgggcctctctaggatcagtgtcccacccagaggccagtggccccttcacatgccccaacaagaggaagactgtctggctccgcagtgttgggttttgtcctgaatctgtgcaaatgtgcagggaaataacctcctgaaatcaccaaagagcagttcctcagggccttccgggtgaccgtggccgtggagcagtcgtggtgaaaccggtcagctgtggacctgccctgcgaatcggcagaggcctccgtggtgaagacagaagctccgtgaaccaactcgaggctggagccaagatcctgcctgatatccagttgcctgtttcacttgttactgttactgggagagggagacaaaacctcatggcaatcttgtcctcactggagactcagaaggggaagcattgggaaaccatgtatgtttcatttctggtttaaccaggcttttcaggatgggacttcagaccaaggacacaagttgggcttgcttaggtgttttgtgttgtgcgcaggcctcagagatgctcttccggtcagagttcccttggcagggccttggaggcctctggttggctctctcaggaagagggcaggtcagggattgggcggtgtaaattgactcagaaacctgcggtttcagcttttctgtggcaaacagggccgagggctggtgaagctgttaaggctaaatgtcgcatgcatgaggcgggctgcaggcctccttaggccttttttggggtaattacaccagtatttaaaaacatttttttttgtttgttttgagatggagtcttgccctgtcacccaggctggagtgcaatggtgcgatctcggctcactgcaacctccgtctcccaggttcaagcgattcttctgcctcagccttctgagtagctgggattacacgcgtgtgccaccacgctcggctaatttttgtatttttagtagagatgggatttcaccatgttggccaggctggtctcgaactactgacctcgtgatccacctgccacggcctcccaaagtgctgggattacaggcgtgagccaccatgctcggcctaaaaaacaattttcttgaagaatccgattttgtgcatagtaatgacacagcaccattcctgagaaataggaaatatatgtgtgtggtatgaaaagcccatattctgttcttgtcacctgaatctaggcttcctctttggatgtgaacgcgggaatgaacagtggctgttttccacccaaaggggcgtggagaccttttggaaacgggctttctcctttccattttgcagccgggggcgggtggaaaccttccttcgaagggtagtgccttggggagcagcagacctgctctgagtccagcttagctttccaaaattctgtgtggaacttactggagatgtttttatatatttgaaaataatggcctgtatttctcacgctatacttaaaaaaaataactaaccttttaaacaaagatattcaaactcacccttgtgctgaaagcactcacatttctgtgttcattcctgaaagggcgttttagagtccccgtttctacgttctatgtggcaccctcttgccgagggaacatccagaatccctccacttcctgtctagtttgaggcctcaacaccttcatgatccagagtcctgcggctatgagggggtgggcccaccaccgcccagccctccttggtggacgtggggacaggtaggagcctagggaaaggggtgggcgggctctggtgtgacggcgtgagcgctagccaggaagatggggccagggcttggcatggcacctcacctgtgggggaactcggcggagcttcctggcggcatctccccctcttgccttggtcctttctatctttgttttaggccaatttctaaaaagactgaggcctccttcaaggttgaacagatttctagagccttgtttttgctgtgacaagtccctagtccctgttcacaactctgaaaccaagaaacctgagaaccaagagaactgaaatgaagcccgttggtctcagcctggcttgagccaacatgaggctctctgctgccttttgttttcttaggttttgctgagaaacgggagtgcgttctgtgtcggtgtttgtgacgccctgagaccctgcttggcctagctaaagtccagaaggcctgggccccacagggcttggatgagggctcatgggcctgtacttcaggaggcctgagaggcccggtcagtcccatgaggctactcggcttggcccgcaggtcctccgaggcacagggcagagggacaccccagggacccatcagactcacgacacagagaaactcaagtggggtgccagggccggccacagaggccacgggcttcctgcctgtgacgagccgccctgtttgtctgagccctttggagatttaggttgagtcatgagaaccggtcattggaacatacactttattatgttacaaaaacaaaaatccccactgaaacacagctaaaaaaataacacattttcccaagattacattaccaaaaacagttgttatgtcattggagggcgtccattaatactgctcggagaagcacgatcttacacgaaaaacacggatgggatttcgttttcaccttaaagcattaaagtgctttaactggta

SEQ ID NO: 116526 - DNA, 6772 bp, Homo sapiens
ggttgttgcgggatctcacaggctttaaaccgcggcgccgcggcgcccgggtgtggatccctagatgggagccggggatgggccgggtgcctggtgggtggcagtcggggctgacggcggcggcactttgccgcctcaggccctggacaccttcaccccgccgcctgcccaggcgggccggccctgcccgtccaccggccgccgagagtccccggccttgggtccccggggccgctgactggcctcggtcacctcccggggaaggctcccgcgcctccatctgcccccgcaggaagggaccctcttctcgcccgcgaggcttctccgggtgggatcgtcctggcccccagccctaagggatccgccccctccgagcatccgccgcccctcggagaccactccagctcggacggacccactccagcccccgctgcacgcggaagcgctcatcctccccgcctgccccgttccctcccccttctcctgtgggacaaccagggaccgcagctccccgctccccaggtgtgggggctccgacacgaacgcctctgctcgcagggcggtgagcgcagatcccacgggtccctcggtcgggggtcgaggctgcttccgtttccatcccggacccgacaatgggcgggaaaaagaaggctttacacgactacgcggcggagttcaccgacctggtggtgaagcacctgattgagcacagtgactctggggacacgtctgtggtggagaccctttactgcagggcctgcgagctgcccgtgcgcgtgcggagggaccgcatcctggaacacctgtcctcgggcaggcagcacggcctgcggacgcccattctcatgtaaatgtcagtgccaacgctggtgtttcaggagtcatcccagcgggctgcgggctattttaggattctctgccctgcaaacgtttccaaagtacgtggacaggccgcctgatgacactacgtttacgggatctgctagtggcttgcctacttagggagtaaaccctgtgaagtctcgcagttttgttaaagtgtgcgtggccacctgaatgctgccttatcacaagccagatacatactggtctgtagggtaactccccactgttgatcctctgagatgattgtggactgggtgctgtgagtcctgccactttgtttaagtgaatgtgtcttttgtccagctcagccgcctcggatctcgctgccaccagccttactgcacacccgtgccacccgcccttgccccgtcagcctcagcctcagctcattctctcaggcagtcccagcattggcacggtacctcctcccgctgtgggccacacgtctctgctccctgtcaaccctcctgccatcagcaccaccaccagcgacttgtctgcccgggaggatgcaacaccatctgcctccaccggccacctttcagtgtttcctgctttccaagtaaagataccagcagtgccctcagagcagaccagccagagtttttctgaagcctcccacagggtgctccccggaggaggcccgagatgctctcgtgactttggagccggggtggctggccaccttggcctgggcatctttggggtgggcttcgggagcccggcactgctgcagagtgtggtggatgagaacagctgctgcttgctgtacgtggtggaggaccagctgtgtgatgtggagcaagccttcagagctgagcatttgggccaacaccagagtggttcgggaacaggatgcagacattgtcctcaacgaccagcggcactttgatccggttttccagttcttgcacaagcaagtttgtgtcagccacgccctggggaggatccactggatcaccgccgtcactgcctgttcccggcggcctctccggcttccctaaagagagcaggtgggactttctacaacgctgctgtgcacgacgtggatgccgtatgcatgttgctgggggaagccactccggacactgtgttttctctgggacatgtcttctgcccagatatggccgccttaaaagatgcagatgctgttgtgatcagcatgaagtttccctgtgaggccgtggttagcgtggacatcagccagcactgcacagacagctgcgaccaggacgtcagccagcactgcacagacagctgcgaccagagactggaggtgacccttgcccttttccacccttcgccagtccactgtgaaaagctgggttgattgtgcgggttagatagaggtcatcagccgggttgattgtgtgggttagacagaggtcatcagccaggttgattgtgtgggttagatagagatcatcagcctggtagattgtgtgggttagatagaggtcatcagccaggttgattgtgcgggttagatagagatcatcagccgggttgattctacaggttagatagaggtcgtcagccgggttgattgtgcgggttagatagagatcatcagccgggttgattgtgcgggttagatagaggtcatcagctgggttgattgtgtgggttagatagagatcatcagctgggttgattgtgtgggttagatagaggtcgtcagctgggttgattgtgtgggttagatagaggtcatcagctgggttgattgtatgggttagatagaggtcatcagctgggttgattgtacgggttagatagaggtcgtcagccgggttgattccgcaggttagatagaggtcgttagctgggtgtgtgggtcccaaggcgtgctgcagatggagaatcagaattccttgggcatcaccgggcggggcatgtccctgtcccttcgctcccagacccaggctagccgctaccaggactcctatcgagagctcttcagacactttgtcagaacccttaaaggtgggtgacgttttcaggaggaacctgggatgtcctgatgctcaatgggtagatgccttccaggctgcagtcagtgcagatgatatgccaatttcaggtggaaaattgcattccagataccgggttcagatttgaaattgtccatctcagtgatcatttacgttgcgtgtacttgagggagattctgagagatgctcctttggggttctgtgcgtgtaccatgttgcctgacacgtcctgagaaatcttcttaaactctgagtttataaaataactacttctgaactcctgagatctagtggataccatgtatcctggaagataggacactttctaccctctgtcagtcctgggggtgactgggaaccagagaggttgagcagaattcctggacctgggtggggcttgtccaagaggggcaggtgggcctctctaggatcagtgtcccacccagaggccagtggccccttcacatgccccaacaagaggaagactgtctggctccgcagtgttgggttttgtcctgaatctgtgcaaatgtgcagggaaataacctcctgaaatcaccaaagagcagttcctcagggccttccgggtgaccgtggccgtggagcagtcgtggtgaaaccggtcagctgtggacctgccctgcgaatcggcagaggcctccgtggtgaagacagaagctccgtgaaccaactcgaggctggagccaagatcctgcctgatatccagttgcctgtttcacttgttactgttactgggagagggagacaaaacctcatggcaatcttgtcctcactggagactcagaaggggaagcattgggaaaccatgtatgtttcatttctggtttaaccaggcttttcaggatgggacttcagaccaaggacacaagttgggcttgcttaggtgttttgtgttgtgcgcaggcctcagagatgctcttccggtcagagttcccttggcagggccttggaggcctctggttggctctctcaggaagagggcaggtcagggattgggcggtgtaaattgactcagaaacctgcggtttcagcttttctgtggcaaacagggccgagggctggtgaagctgttaaggctaaatgtcgcatgcatgaggcgggctgcaggcctccttaggccttttttggggtaattacaccagtatttaaaaacatttttttttgtttgttttgagatggagtcttgccctgtcacccaggctggagtgcaatggtgcgatctcggctcactgcaacctccgtctcccaggttcaagcgattcttctgcctcagccttctgagtagctgggattacacgcgtgtgccaccacgctcggctaatttttgtatttttagtagagatgggatttcaccatgttggccaggctggtctcgaactactgacctcgtgatccacctgccacggcctcccaaagtgctgggattacaggcgtgagccaccatgctcggcctaaaaaacaattttcttgaagaatccgattttgtgcatagtaatgacacagcaccattcctgagaaataggaaatatatgtgtgtggtatgaaaagcccatattctgttcttgtcacctgaatctaggcttcctctttggatgtgaacgcgggaatgaacagtggctgttttccacccaaaggggcgtggagaccttttggaaacgggctttctcctttccattttgcagccgggggcgggtggaaaccttccttcgaagggtagtgccttggggagcagcagacctgctctgagtccagcttagctttccaaaattctgtgtggaacttactggagatgtttttatatatttgaaaataatggcctgtatttctcacgctatacttaaaaaaaataactaaccttttaaacaaagatattcaaactcacccttgtgctgaaagcactcacatttctgtgttcattcctgaaagggcgttttagagtccccgtttctacgttctatgtggcaccctcttgccgagggaacatccagaatccctccacttcctgtctagtttgaggcctcaacaccttcatgatccagagtcctgcggctatgagggggtgggcccaccaccgcccagccctccttggtggacgtggggacaggtaggagcctagggaaaggggtgggcgggctctggtgtgacggcgtgagcgctagccaggaagatggggccagggcttggcatggcacctcacctgtgggggaactcggcggagcttcctggcggcatctccccctcttgccttggtcctttctatctttgttttaggccaatttctaaaaagactgaggcctccttcaaggttgaacagatttctagagccttgtttttgctgtgacaagtccctagtccctgttcacaactctgaaaccaagaaacctgagaaccaagagaactgaaatgaagcccgttggtctcagcctggcttgagccaacatgaggctctctgctgccttttgttttcttaggttttgctgagaaacgggagtgcgttctgtgtcggtgtttgtgacgccctgagaccctgcttggcctagctaaagtccagaaggcctgggccccacagggcttggatgagggctcatgggcctgtacttcaggaggcctgagaggcccggtcagtcccatgaggctactcggcttggcccgcaggtcctccgaggcacagggcagagggacaccccagggacccatcagactcacgacacagagaaactcaagtggggtgccagggccggccacagaggccacgggcttcctgcctgtgacgagccgccctgtttgtctgagccctttggagatttaggttgagtcatgagaaccggtcattggaacatacactttattatgttacaaaaacaaaaatccccactgaaacacagctaaaaaaataacacattttcccaagattacattaccaaaaacagttgttatgtcattggagggcgtccattaatactgctcggagaagcacgatcttacacgaaaaacacggatgggatttcgttttcaccttaaagcattaaagtgctttaactggtaacagaggagtggatgtttgtgcgttggagacactgactgttctgagtgacaagtggctctgtgccaggatactgcgggtcgggctcctgggtacagcaagggcttcccagcagcccaggcctggtgggaacgctgggggaatgggggagagtcgctgtttctgaccagagcgacttggacagatgtgagctgacctgcctggcgagctccttctgccttgcctctctgagcagactcaggaccactgcctgtcccccttggccccaggagtgccagcagcctccctccaacccctgcactgctgggaaaaccatccgccttcaagatttatttgttgatttgtttagttttataaaaacatatcacttaaaggattcttgttcctgggaatttgcattttctcctgaccacggcgaagtctcaactctgtctactttcacagctgcttctccagtgcaaggaggctgcatgggctccctagacaggtgcagctggggccatctggctgctccgtgttctggccggcttccttggacatctggctggggttccagtgacagctgcccctgggcctctcccagcccccccagcccccccagcccttcccaggagcacactacaggggctcttgggacagcctcactggactcagggtggacaggtaacgtacctaagaaacaaatcaacaagccctctggaactgaagcacatctgcgctgggctgaggaaccccgggtgtcaggatgggcccccgcggctcctgaagtggaacatgggggaagagtgggggcttcaggaggtggcctcgggtagcaggtgcccagccc

SEQ ID NO: 116527 - DNA, 5712 bp, Homo sapiens
ggttgttgcgggatctcacaggctttaaaccgcggcgccgcggcgcccgggtgtggatccctagatgggagccggggatgggccgggtgcctggtgggtggcagtcggggctgacggcggcggcactttgccgcctcaggccctggacaccttcaccccgccgcctgcccaggcgggccggccctgcccgtccaccggccgccgagagtccccggccttgggtccccggggccgctgactggcctcggtcacctcccggggaaggctcccgcgcctccatctgcccccgcaggaagggaccctcttctcgcccgcgaggcttctccgggtgggatcgtcctggcccccagccctaagggatccgccccctccgagcatccgccgcccctcggagaccactccagctcggacggacccactccagcccccgctgcacgcggaagcgctcatcctccccgcctgccccgttccctcccccttctcctgtgggacaaccagggaccgcagctccccgctccccaggtgtgggggctccgacacgaacgcctctgctcgcagggcggtgagcgcagatcccacgggtccctcggtcgggggtcgaggctgcttccgtttccatcccggacccgacaatgggcgggaaaaagaaggctttacacgactacgcggcggagttcaccgacctggtggtgaagcacctgattgagcacagtgactctggggacacgtctgtggtggagaccctttactgcagggcctgcgagctgcccgtgcgcgtgcggagggaccgcatcctggaacacctgtcctcgggcaggcagcacggcctgcggacgcccattctcatgtaaatgtcagtgccaacgctggtgtttcaggagtcatcccagcgggctgcgggctattttaggattctctgccctgcaaacgtttccaaagtacgtggacaggccgcctgatgacactacgtttacgggatctgctagtggcttgcctacttagggagtaaaccctgtgaagtctcgcagttttgttaaagtgtgcgtggccacctgaatgctgccttatcacaagccagatacatactggtctgtagggtaactccccactgttgatcctctgagatgattgtggactgggtgctgtgagtcctgccactttgtttaagtgaatgtgtcttttgtccagctcagccgcctcggatctcgctgccaccagccttactgcacacccgtgccacccgcccttgccccgtcagcctcagcctcagctcattctctcaggcagtcccagcattggcacggtacctcctcccgctgtgggccacacgtctctgctccctgtcaaccctcctgccatcagcaccaccaccagcgacttgtctgcccgggaggatgcaacaccatctgcctccaccggccacctttcagtgtttcctgctttccaagtaaagataccagcagtgccctcagagcagaccagccagagtttttctgaagcctcccacagggtgctccccggaggaggcccgagatgctctcgtgactttggagccggggtggctggccaccttggcctgggcatctttggggtgggcttcgggagcccggcactgctgcagagtgtggtggatgagaacagctgctgcttgctgtacgtggtggaggaccagctgtgtgatgtggagcaagccttcagagctgagcatttgggccaacaccagagtggttcgggaacaggatgcagacattgtcctcaacgaccagcggcactttgatccggttttccagttcttgcacaagcaagtttgtgtcagccacgccctggggaggatccactggatcaccgccgtcactgcctgttcccggcggcctctccggcttccctaaagagagcaggtgggactttctacaacgctgctgtgcacgacgtggatgccgtatgcatgttgctgggggaagccactccggacactgtgttttctctgggacatgtcttctgcccagatatggccgccttaaaagatgcagatgctgttgtgatcagcatgaagtttccctgtgaggccgtggttagcgtggacatcagccagcactgcacagacagctgcgaccaggacgtcagccagcactgcacagacagctgcgaccagagactggaggtgacccttgcccttttccacccttcgccagtccactgtgaaaagctgggttgattgtgcgggttagatagaggtcatcagccgggttgattgtgtgggttagacagaggtcatcagccaggttgattgtgtgggttagatagagatcatcagcctggtagattgtgtgggttagatagaggtcatcagccaggttgattgtgcgggttagatagagatcatcagccgggttgattctacaggttagatagaggtcgtcagccgggttgattgtgcgggttagatagagatcatcagccgggttgattgtgcgggttagatagaggtcatcagctgggttgattgtgtgggttagatagagatcatcagctgggttgattgtgtgggttagatagaggtcgtcagctgggttgattgtgtgggttagatagaggtcatcagctgggttgattgtatgggttagatagaggtcatcagctgggttgattgtacgggttagatagaggtcgtcagccgggttgattccgcaggttagatagaggtcgttagctgggtgtgtgggtcccaaggcgtgctgcagatggagaatcagaattccttgggcatcaccgggcggggcatgtccctgtcccttcgctcccagacccaggctagccgctaccaggactcctatcgagagctcttcagacactttgtcagaacccttaaaggtgggtgacgttttcaggaggaacctgggatgtcctgatgctcaatgggtagatgccttccaggctgcagtcagtgcagatgatatgccaatttcaggtggaaaattgcattccagataccgggttcagatttgaaattgtccatctcagtgatcatttacgttgcgtgtacttgagggagattctgagagatgctcctttggggttctgtgcgtgtaccatgttgcctgacacgtcctgagaaatcttcttaaactctgagtttataaaataactacttctgaactcctgagatctagtggataccatgtatcctggaagataggacactttctaccctctgtcagtcctgggggtgactgggaaccagagaggttgagcagaattcctggacctgggtggggcttgtccaagaggggcaggtgggcctctctaggatcagtgtcccacccagaggccagtggccccttcacatgccccaacaagaggaagactgtctggctccgcagtgttgggttttgtcctgaatctgtgcaaatgtgcagggaaataacctcctgaaatcaccaaagagcagttcctcagggccttccgggtgaccgtggccgtggagcagtcgtggtgaaaccggtcagctgtggacctgccctgcgaatcggcagaggcctccgtggtgaagacagaagctccgtgaaccaactcgaggctggagccaagatcctgcctgatatccagttgcctgtttcacttgttactgttactgggagagggagacaaaacctcatggcaatcttgtcctcactggagactcagaaggggaagcattgggaaaccatgtatgtttcatttctggtttaaccaggcttttcaggatgggacttcagaccaaggacacaagttgggcttgcttaggtgttttgtgttgtgcgcaggcctcagagatgctcttccggtcagagttcccttggcagggccttggaggcctctggttggctctctcaggaagagggcaggtcagggattgggcggtgtaaattgactcagaaacctgcggtttcagcttttctgtggcaaacagggccgagggctggtgaagctgttaaggctaaatgtcgcatgcatgaggcgggctgcaggcctccttaggccttttttggggtaattacaccagtatttaaaaacatttttttttgtttgttttgagatggagtcttgccctgtcacccaggctggagtgcaatggtgcgatctcggctcactgcaacctccgtctcccaggttcaagcgattcttctgcctcagccttctgagtagctgggattacacgcgtgtgccaccacgctcggctaatttttgtatttttagtagagatgggatttcaccatgttggccaggctggtctcgaactactgacctcgtgatccacctgccacggcctcccaaagtgctgggattacaggcgtgagccaccatgctcggcctaaaaaacaattttcttgaagaatccgattttgtgcatagtaatgacacagcaccattcctgagaaataggaaatatatgtgtgtggtatgaaaagcccatattctgttcttgtcacctgaatctaggcttcctctttggatgtgaacgcgggaatgaacagtggctgttttccacccaaaggggcgtggagaccttttggaaacgggctttctcctttccattttgcagccgggggcgggtggaaaccttccttcgaagggtagtgccttggggagcagcagacctgctctgagtccagcttagctttccaaaattctgtgtggaacttactggagatgtttttatatatttgaaaataatggcctgtatttctcacgctatacttaaaaaaaataactaaccttttaaacaaagatattcaaactcacccttgtgctgaaagcactcacatttctgtgttcattcctgaaagggcgttttagagtccccgtttctacgttctatgtggcaccctcttgccgagggaacatccagaatccctccacttcctgtctagtttgaggcctcaacaccttcatgatccagagtcctgcggctatgagggggtgggcccaccaccgcccagccctccttggtggacgtggggacaggtaggagcctagggaaaggggtgggcgggctctggtgtgacggcgtgagcgctagccaggaagatggggccagggcttggcatggcacctcacctgtgggggaactcggcggagcttcctggcggcatctccccctcttgccttggtcctttctatctttgttttaggccaatttctaaaaagactgaggcctccttcaaggttgaacagatttctagagccttgtttttgctgtgacaagtccctagtccctgttcacaactctgaaaccaagaaacctgagaaccaagagaactgaaatgaagcccgttggtctcagcctggcttgagccaacatgaggctctctgctgccttttgttttcttaggttttgctgagaaactcaagtggggtgccagggccggccacagaggccacgggcttcctgcctgtgacgagccgccctgtttgtctgagccctttggagatttaggttgagtcatgagaaccggtcattggaacatacactttattatgttacaaaaacaaaaatccccactgaaacacagctaaaaaaataacacattttcccaagattacattaccaaaaacagttgttatgtcattggagggcgtccattaatactgctcggagaagcacgatcttacacgaaaaacacggatgggatttcgttttcaccttaaagcattaaagtgctttaactggta

SEQ ID NO: 116528 - DNA, 4959 bp, Homo sapiens
ggttgttgcgggatctcacaggctttaaaccgcggcgccgcggcgcccgggtgtggatccctagatgggagccggggatgggccgggtgcctggtgggtggcagtcggggctgacggcggcggcactttgccgcctcaggccctggacaccttcaccccgccgcctgcccaggcgggccggccctgcccgtccaccggccgccgagagtccccggccttgggtccccggggccgctgactggcctcggtcacctcccggggaaggctcccgcgcctccatctgcccccgcaggaagggaccctcttctcgcccgcgaggcttctccgggtgggatcgtcctggcccccagccctaagggatccgccccctccgagcatccgccgcccctcggagaccactccagctcggacggacccactccagcccccgctgcacgcggaagcgctcatcctccccgcctgccccgttccctcccccttctcctgtgggacaaccagggaccgcagctccccgctccccaggtgtgggggctccgacacgaacgcctctgctcgcagggcggtgagcgcagatcccacgggtccctcggtcgggggtcgaggctgcttccgtttccatcccggacccgacaatgggcgggaaaaagaaggctttacacgactacgcggcggagttcaccgacctggtggtgaagcacctgattgagcacagtgactctggggacacgtctgtggtggagaccctttactgcagggcctgcgagctgcccgtgcgcgtgcggagggaccgcatcctggaacacctgtcctcgggcaggcagcacggcctgcggacgcccattctcatgtaaatgtcagtgccaacgctggtgtttcaggagtcatcccagcgggctgcgggctattttaggattctctgccctgcaaacgtttccaaagtacgtggacaggccgcctgatgacactacgtttacgggatctgctagtggcttgcctacttagggagtaaaccctgtgaagtctcgcagttttgttaaagtgtgcgtggccacctgaatgctgccttatcacaagccagatacatactgccgcctcggatctcgctgccaccagccttactgcacacccgtgccacccgcccttgccccgtcagcctcagcctcagctcattctctcaggcagtcccagcattggcacggtacctcctcccgctgtgggccacacgtctctgctccctgtcaaccctcctgccatcagcaccaccaccagcgacttgtctgcccgggaggatgcaacaccatctgcctccaccggccacctttcagtgtttcctgctttccaagtaaagataccagcagtgccctcagagcagaccagccagagtttttctgaagcctcccacagggtgctccccggaggaggcccgagatgctctcgtgactttggagccggggtggctggccaccttggcctgggcatctttggggtgggcttcgggagcccggcactgctgcagagtgtggtggatgagaacagctgctgcttgctgtacgtggtggaggaccagctgtgtgatgtggagcaagccttcagagctgagcatttgggccaacaccagagtggttcgggaacaggatgcagacattgtcctcaacgaccagcggcactttgatccggttttccagttcttgcacaagcaagtttgtgtcagccacgccctggggaggatccactggatcaccgccgtcactgcctgttcccggcggcctctccggcttccctaaagagagcaggtgggactttctacaacgctgctgtgcacgacgtggatgccgtatgcatgttgctgggggaagccactccggacactgtgttttctctgggacatgtcttctgcccagatatggccgccttaaaagatgcagatgctgttgtgatcagcatgaagtttccctgtgaggccgtggttagcgtggacatcagccagcactgcacagacagctgcgaccaggacgtcagccagcactgcacagacagctgcgaccagagactggagggaaataacctcctgaaatcaccaaagagcagttcctcagggccttccgggtgaccgtggccgtggagcagtcgtggtgaaaccggtcagctgtggacctgccctgcgaatcggcagaggcctccgtggtgaagacagaagctccgtgaaccaactcgaggctggagccaagatcctgcctgatatccagttgcctgtttcacttgttactgttactgggagagggagacaaaacctcatggcaatcttgtcctcactggagactcagaaggggaagcattgggaaaccatgtatgtttcatttctggtttaaccaggcttttcaggatgggacttcagaccaaggacacaagttgggcttgcttaggtgttttgtgttgtgcgcaggcctcagagatgctcttccggtcagagttcccttggcagggccttggaggcctctggttggctctctcaggaagagggcaggtcagggattgggcggtgtaaattgactcagaaacctgcggtttcagcttttctgtggcaaacagggccgagggctggtgaagctgttaaggctaaatgtcgcatgcatgaggcgggctgcaggcctccttaggccttttttggggtaattacaccagtatttaaaaacatttttttttgtttgttttgagatggagtcttgccctgtcacccaggctggagtgcaatggtgcgatctcggctcactgcaacctccgtctcccaggttcaagcgattcttctgcctcagccttctgagtagctgggattacacgcgtgtgccaccacgctcggctaatttttgtatttttagtagagatgggatttcaccatgttggccaggctggtctcgaactactgacctcgtgatccacctgccacggcctcccaaagtgctgggattacaggcgtgagccaccatgctcggcctaaaaaacaattttcttgaagaatccgattttgtgcatagtaatgacacagcaccattcctgagaaataggaaatatatgtgtgtggtatgaaaagcccatattctgttcttgtcacctgaatctaggcttcctctttggatgtgaacgcgggaatgaacagtggctgttttccacccaaaggggcgtggagaccttttggaaacgggctttctcctttccattttgcagccgggggcgggtggaaaccttccttcgaagggtagtgccttggggagcagcagacctgctctgagtccagcttagctttccaaaattctgtgtggaacttactggagatgtttttatatatttgaaaataatggcctgtatttctcacgctatacttaaaaaaaataactaaccttttaaacaaagatattcaaactcacccttgtgctgaaagcactcacatttctgtgttcattcctgaaagggcgttttagagtccccgtttctacgttctatgtggcaccctcttgccgagggaacatccagaatccctccacttcctgtctagtttgaggcctcaacaccttcatgatccagagtcctgcggctatgagggggtgggcccaccaccgcccagccctccttggtggacgtggggacaggtaggagcctagggaaaggggtgggcgggctctggtgtgacggcgtgagcgctagccaggaagatggggccagggcttggcatggcacctcacctgtgggggaactcggcggagcttcctggcggcatctccccctcttgccttggtcctttctatctttgttttaggccaatttctaaaaagactgaggcctccttcaaggttgaacagatttctagagccttgtttttgctgtgacaagtccctagtccctgttcacaactctgaaaccaagaaacctgagaaccaagagaactgaaatgaagcccgttggtctcagcctggcttgagccaacatgaggctctctgctgccttttgttttcttaggttttgctgagaaacgggagtgcgttctgtgtcggtgtttgtgacgccctgagaccctgcttggcctagctaaagtccagaaggcctgggccccacagggcttggatgagggctcatgggcctgtacttcaggaggcctgagaggcccggtcagtcccatgaggctactcggcttggcccgcaggtcctccgaggcacagggcagagggacaccccagggacccatcagactcacgacacagagaaactcaagtggggtgccagggccggccacagaggccacgggcttcctgcctgtgacgagccgccctgtttgtctgagccctttggagatttaggttgagtcatgagaaccggtcattggaacatacactttattatgttacaaaaacaaaaatccccactgaaacacagctaaaaaaataacacattttcccaagattacattaccaaaaacagttgttatgtcattggagggcgtccattaatactgctcggagaagcacgatcttacacgaaaaacacggatgggatttcgttttcaccttaaagcattaaagtgctttaactggtaacagaggagtggatgtttgtgcgttggagacactgactgttctgagtgacaagtggctctgtgccaggatactgcgggtcgggctcctgggtacagcaagggcttcccagcagcccaggcctggtgggaacgctgggggaatgggggagagtcgctgtttctgaccagagcgacttggacagatgtgagctgacctgcctggcgagctccttctgccttgcctctctgagcagactcaggaccactgcctgtcccccttggccccaggagtgccagcagcctccctccaacccctgcactgctgggaaaaccatccgccttcaagatttatttgttgatttgtttagttttataaaaacatatcacttaaagga

SEQ ID NO: 116529 - DNA, 462 bp, Homo sapiens
ataccaaagaacatgattgctggaatgtatgttaagagtatgtttacttatgtaagaaactgccaaactatcttccaaagtggatatatcattttgcattctcaccagtaatgaatgggggtttctgttgctctatctcctagctagcatttgctgttgccagtgttttggattttcaccattctaatagatttgtagtgataacttattgttttaatttgcaattccctaaagaaatatgatgttgaacatcttttcataagcttatttgtcatttgtatatcttttttggtgaggtatctgttcagatcttttgccaattttttctttttttttaattttcaagtcctcatatctcagatgattttgccaatttatttttattttttatttttttgagatggagtcttgctctgttgcccaggctggagtgcagtggcacaatcttggctcactgcaacc

SEQ ID NO: 116530 - DNA, 301 bp, Homo sapiens
gtccgcctctgtgctgaggcagttcctgctccctgagtctctgtcctttcctgggaaaggtggaagcagttcatggtctttccctttcagaggaggaggggatggaggggattgtattagcaactgggattgaagctccccctggcagttatggggtgcccttgggagggctgctttaggggggctttctgagaagaggcaggtcgggctgtacctgagaccaatccccttgataaaatgcagccaggcctgaagcacgttcagaacggaagcagcaaaggtgatgatatcgctcgttgct

SEQ ID NO: 116531 - DNA, 573 bp, Homo sapiens
gagcccgagtgcccggtctgccacaccgcggtcactcaggccatccgcatcttttcttaaaggcagcgggcgctgctagtgcgcaccgtgctgggggaagggggaacccctccccatcctctttccccagcgctcgcctgcctccctgggtgccccccctctcccttctccttcccggccccaccaacactctgagatccgagaggagcttggaaagctgtagtatccgctcatttttaaaatttaatttttaagtaaaggaatttgccaggatatctgcatcaagagtactgtagcctgggaaacctgaacacctgaaatgcatgctctataaataataggaacggcgacattctagtaatgatagtttttacactgtacttaataggaagcttccaaaagaagaaaaccccacaagttttccattttcttaaagtaggaaaaaatgaacagtaataattatgatgaagatgatagtagtgctatgggatgtgtggactgtttagtgtgttcccctttgtgggtgggttcctatgatacttattatagaacacagtggatcctttttgaatg

SEQ ID NO: 116532 - DNA, 376 bp, Homo sapiens
tatactttaagttttagggtacatgtgcacattgtgcaggttagttacatacgtatacatgtgccatgctggtgtgctgcacccactaactcgtcatctagcattaggtatatctcccaatcctatccctcccccctcccccccccccacaacagtccccagagtgtgatgttccccttcctgtgtccatgtgatctcattgttcaattcccacctatgagtgagaatatgcggtgtttggttttttgttcttgcgatagtttacagagaatgatggtttaacttcttttctaaagtgattttgggcaagtactaagcttctctacctcagcttcattatctggtaaattggcataataaaatcttgagattttac

SEQ ID NO: 116533 - DNA, 908 bp, Homo sapiens
agtgagcagttgacccctgaacaacatggaggttggggcactgaccacaggtgcagatgaaaacctgtgtagaagttttgcatttctaacttaagtactaatagcttacttttgactggaagccttagtgataaaataaatagttgattacacttttttacattttatatatattttatactctattcttccaataaagtatggtaaagaaaaaaatgttcttaagaaaaccataaaaatgagaaaatatatttactactgattaagtacttgctttcaggtgacacagaagaaaatataagtgtatctgcaaacttcaaacccaagttattcaagggttaactgtaccatgatgaatgtagcagtccccatctgtagtctagggctttctcctttgctgtacctctgctcacttccaatggccatatatatgtcttatgttctttatgatcttgggcagagaggtctgcctacatgcattgctggccagatgtcctggaatgtgtatctctgaggaaagtgctatggtttgactgtgtcctccaaaatccatctgttgtaaagttcattctcagtgaaatggtttttgccaggtgggccctattgggatgtgtttaggtcatgagggtggagccctctagtggaatacattaatgccagtataaacagggtttatagggctggaatctttctctctcttctgctggtctgtcctgataagacatggccttccttccattgaaggactcaatgccccaggcatcgtcttgaaagcagagaaagctgaccttaacctgcccatgccttgatctcaaactttccgtactccagaagtgtgagaaaatatatttctgttttttatgaattacacagcgacaaggaacctgttatagcagcttgaaagagaa

SEQ ID NO: 116534 - DNA, 491 bp, Homo sapiens
agttctcatcttaaagaggaggaaacaaacttaaagagtctgttagttcctttattcaacattgtgtactatatgctgggtgcgtactgctgtactgatcaaagtcataaaaaagactgaggcctcctcaagaaaattatgctctaaaaaaggaaatagagactcctctctcaagaatcttggctgtgaaaggaggtagttactataatgcagaagacaggaaaaagacattttccttctctgagaccagagggaaggagtcgagaatgaataaagatgcagattaaataatataattgaaagggaagaatgctgaatgaacttcgaactttcacctaattacattccttttcacactgatgtagtagttaggtttcttgaagtaagagcaatttgagaattctctcaagagatagcttaaggacaatgattaaagtttggaatagctcaggcaagaaaggggagaggaagctgaccagggacataaagga

SEQ ID NO: 116535 - DNA, 625 bp, Homo sapiens
ttaaagtatttgtttattataaatactgtggcagttaacatctatgcctgtaatactttatagtaccataacagtgatgttgttatggtgtagtacagtaggtgtatttacactgatatcagttacagcctggtgtaattacagttatgatgtaatgcctttagagagaggttggacagttcagttgctgtcccaaacctggctgagaagattacaaaagatttaaaatatttctactggtctttattattgaatgactacaccctctgaaaagtatgaattgagcattatgattgctcataggtaaaaggttagcaggcatttaatatgtgctaggtattttcttgtgtattctctcatttgagtcttataataatctcataaagaatgtgctgctattcactgtttatctggaactaagactgagaaagactgtggcttgcataaagtgacacagcttctaagaagccagttcaagatttgaaccctcatctgatgatcagtttgttttttctttccccattttctgaagctggttcattctcttaagaactgtaaggagaaaaatgatagaaggcagaatatctttgaactaatgaaatcatcgcatgagcagagaagcaga

SEQ ID NO: 116536 - DNA, 691 bp, Homo sapiens
gtccttattctctagcctagggtgagaaaaattccagtctttatccttaccttgttaaacattgctagagtcaccatggtatttgcttcaacacctaggacacaatatctgaatccttctcaacattataatggatccaaatgagaatgaaacctatttcatgaaacctatttgccaactcagattgtttatagagttcttgatttttatttgcttgcttcaaaacataaatttgaaatgttgtttacaaatctgagttttttgtttgtttttactaaatttcagagcagttttattatgaaaagcataaaaaagatatggtttctatagccagaaatagggtctaattctaagatgagttttgccagtgaattaatactattttgaatgcctttcactttatattcaaaagcagatgagtaaagcttcctgtcacagatactttaagatgttaaaatgattgtgcagcaataatagcacagtaatggaaacttaatttttcgaggctgttattagcacaaagtcatgagttctttagcatctctaccaggacattaggaagctaagtttttagggagggcttggtgcatgggaagctgatacttcactaattttaaaagaagaattgaaacaagattaggagagtctttaccatgtgccagttacttacctaagtattttatatttacta

SEQ ID NO: 116537 - DNA, 291 bp, Homo sapiens
ggtgagactaaactgcatggccagggacacctccccgagaaagggacacccagtcaaggcctgcaggaggagctgggagaacattctagacagaggacactcttctttccaagattctcaattcacctggcagggtggggagcatgaagttccctggggtctccaaatggtattattatcacactgagcacacagcaagtgccaaaaaaacacgttccgcagggtgatttttcaaaccggaggtcccagttgctgagagtacaatacgggctgtttgaacgttcagcattc

SEQ ID NO: 116538 - DNA, 724 bp, Homo sapiens
ccgttgcgacttgtaataatggcgctttgtggtttaacgagaacagggctctattaatccctctttgtctgacctcagccaacctcgccctcagtggaagcaggattcttaggcccttgggaccctattgagctgttgtcatagtgattggtgccaggggcagggtcactgggccagtgtccctaaccagaccatctctgtcttaatgacacccgtagatcacagttgttcattcccaagcgtggcaagaaaagggactaacaggctacaaggccagcatttggtccgactgcacagaggctgggctgttgaagctttctgaggcctggcattactctccccaggaaggaagcttaactgatttggccaaagagcccccaggggtccccctgggaccactctcaggcccctgagggctcgcatctggaatcagctctcactgctgtaactaaggctcacaaggaacgcaggcagacaggctgcctgtgacttcacagagtggaacttcttgtcacttgatggcagggctgaatgaaccttggagattatcaggcctgtctccctggggaacagatggggaaactgaggcacaggagctggacctgatgctggcatatcaagggcacagtgctaatcaggcagtccctccctacctcccacctccaaagaagaacatgtttggagtctcttgtaaaacaattgttatttttactgtagcttttaa

SEQ ID NO: 116539 - DNA, 297 bp, Homo sapiens
ccaacaggaaaatacttcatcagatggctttgcccaccatggcctccgtgccatttgtccctggaatcttcctgtgactgccagagttttcagcaaatggagagaattgttaactgagaatgggtttggaggcctgaaaaagaggttggggtcaatgcagtatcttcaagcagcttatttttcctgaaataaatgattattttactgggaaagagggttgtcacaagaaatccatttacatagcaaatggctggatgtgcccttcatctctttcacgaaatcactctgtgtgtgcgt

SEQ ID NO: 116540 - DNA, 470 bp, Homo sapiens
tttatatcccattatttcttttgctttttccattttccccggcaatgtagggtgggggttagtataggaaatgaggtttttgagttctaaattctagttccgtctttgaaaggaaatttcacaacggcctaagcaaaattttattatttttttaccttcatttttttcttctaagacatgaggtcaacactactcctcaagtaaaattagagattgatatagatatcaaattacggtgtagtataaggggacttcaaaattgattttacctttatcttcactcgcaatctgttcctatattaagatcctaattcttcatcaatatatatgttgaccatatgacttattgcccaaactgggacgctattgagaataaaagggaatgttactaaaactcaagtcagggcaattgccataaaccaggactggcctaagcaaattgggatatacggtcctcctacctacaaagc

SEQ ID NO: 116541 - DNA, 350 bp, Homo sapiens
agccaggagtgtcagggccagcagatcacatctcaagcttccccagagaattagatgggccctggctctacactggaagcactgtgtgccctgggaaaataaagcctgaccttcaattctccacgtccctgtttgtaatgtgagttagtaataacacttccctcccaagactgttgtcaggattacgtgaggaaatgtatggaaagctcctgacacggtgacaagcagggaccattattagatttaacgccactactcttaagaccagcccagggtgatactggactggagagggtcccatcaggccaagacagaattcagttaggaaggaggagttccctcctgccagg

SEQ ID NO: 116542 - DNA, 367 bp, Homo sapiens
agcctaattttgtatttttagtaggggcggggtttcaccgtgttggtcaggctggtcttgaactgccgacctcaggtgatccacctgcctcggcctcccaaagtgctgggattacaggtgtgagccaccatgcccggcctagtcatcatttgtaaccacaagaattattcatgaagcatgaacgagttaggtaagggaggcaccaaaagtccattttgtatttttctttcatatttaagacatgatgagtgtaaggattcccactggaggagattgccaagtacaagaatgtgtgcctgagctgggtgtggtggctcacatctgtgatcccagtactctgggagaccaaagtggtcaagaccagcct

SEQ ID NO: 116543 - DNA, 601 bp, Homo sapiens
catgggtcccaacgtagttattatatttgaccatttgcaaaagctgaaagcaaaacatgttacacattttcagagaggaaaatacacagtagttcctgagtgtaagttgtttttcttgacctcattcttaaattgcttcatgagggtgggagggaagtggtagttaataagtgaacctgtaaaccagcgtttctcaaaatgtagtccagggaattgcatcaaaattgcagttacctacagtgcttgttaaaatgcagattcctgggcccctgccccaggcttatcaaatcaatctggtgagtaggactcaagaacctgtaaattcacatacttctgcagatgattcttcttgcactgcacagcatgaaagcctctgcaatagacagaaagctaccagcattgcgaaagcaacttgagtgcttggcctttgaaggttgagtgggactttaatgagggagagagtaaggcatgagaaatggcagttccactgaggtcagtcagtggttcattgctgacgaagtcacttttaagtcatgttttagaagaactaccaagtgtggcaggtcaggcatgtggcaggactgtttctgagcacagatga

SEQ ID NO: 116544 - DNA, 606 bp, Homo sapiens
ctcctgtcccgtccttccaaaaacaagcatcactgcacaaggctctctgaagacacagagcttcttcactgtaaaaagctaaatagcacgaaaacttaatttaaacaagaccctctcaagaatttgtttggcttaaagctactaaaatgccattctgttggctcatattttcatttatgtaagatgagtgtcatgccaaagtgattttattgccatagaagtcaggcaaatatagagaaaatacattttagaaaataaagtgacatgtggcacatttgaatcctatgttctgcatttagaaatgaactcatgcctctccaagctgaagctttttggttatctaggaagacggtagcctggtctctacagggttccactccagagcctgcactgcacactctctgtcctgccatggccctctgccatctgtgggaggtggatcagttgggccaggccaggcacaggtccatctcacgctgaatgtagcagacgggagctgcttctgctgggtgagggagggggcttgtgcttggctgtgaggacaaggtcactcctttggagctgtagaagggatggggcaagcatgcctgcctctgctgtctgctg

SEQ ID NO: 116545 - DNA, 646 bp, Homo sapiens
tgttccaggcagagggaagagggcgtgaaggccctgagggagtcgtgctgcctatgtggaggccaagccaggagctgcccaggtagttggtgctgagtgaggaagcaggcaggaccagggcgggccgggtgctgtgagccacgtcagggcctttggattgggctttactcaggggtactaaaatccttctcgtttccctgatgatgaaactgaagacgacactatgatatcaatgggcacagacggtacctttagctttgcctgtccaagtttccagtttgcaaatgagtcttagctatacccctgcctagctctccttgggcaagtcacctacttctctgggcctcagtttcttcatctgtcaaacgggagtgaaaacctccaccttccaagagtgttgtaagacgggactaacaactcacctcaaatgctgctgtaagtcaggagctgagcctgggccctggtggacacagagaaggctcagtaagtatagcccatcactgtcactgtcattattaccaggctctgaatgggggcagggagaagtgagggaccaaaacagccattgatagcacatgtgctggcttacggttagagactttcagggctggaagcaaatctgggccaactcctagccagtgctact

SEQ ID NO: 116546 - DNA, 294 bp, Homo sapiens
cctgggtgtctgaagagcaggcgtgggctcagcactgtgggcatgtgaggtgtgcactgccccggcctgtctcagggatgcctgctttctgtgtagggagctgcagttatgcacagccttgcctacaccagaacttcatatttaaagtgaacacatactaaaatcataggcataaagcagctttcccaccgaaagcaactctgattttatccatccattactctacctgtccatctcccctgggggtgagcctgctgtgtgtcggatgcccttccagggactcacagagtgcct

SEQ ID NO: 116547 - DNA, 268 bp, Homo sapiens
caagtagtgcacctctctttaacaagaaaaaccaagttacactaaaacaagcatctaatgtgaacacaatcattcaccccttcctctccagtatcagagatacactaaaatgacatgggtggatgatgatgggcaatgaactcaatgagctatcctcatcctaaggatatcatatccttgcagtctcctcgtgttgccccaacaaaataatgccctgcatgaccacaaaatttatgtaaccctttaaaactcttaataatctcatatg

SEQ ID NO: 116548 - DNA, 273 bp, Homo sapiens
ctcctgatgctaagattctgtgactcggggtgactctattgctcatcatccaggtcacctctaggctcccaccagtgacgcctgcgtgttccatggcagcctctcctcaggctccaccctagtccccagggcatgcacagaaatgaaggagtcatgtcggctcctagagcagcgagttgtggctcttctgccaaacatggccacacatcctttaggataagagtttcagaagttagagccgggggtcagggtggatgcacagaaagcaaaaaa

SEQ ID NO: 116549 - DNA, 545 bp, Homo sapiens
cacaaatagtcgtactttgtggctttgcttagagtggtgctgaaacatactgtttgacttatgaatgattccttttttaaaagcctggtccttttttaaaaacagacagcacagtcctagagcaacaccttcacttttgaggaggaggttgtgatcaagactcagcaggaatcccatgtacaggagagaacagaaaagtcataagcaaggaccacagaaagagacctaggctagactatggaactctccctgatgagcaactgtgtcaataacactatgaagaaggcaataatacacagtgaacagcattcagccagctttaggtaaggctataggataatgcagaggcttttatgtcacttctgcattatcctatagccaaccgtggactagtagccaaccgtggactagtagccaaccgtggactagtagccaaccgtggactagtagccaaccgtggactagtagccaaccgtggactagtagccaaccgtggactagtagccaaccgtggactagtagccaaccgggggctagtggggatc

SEQ ID NO: 116550 - DNA, 198 bp, Homo sapiens
ccccgactagcccgacaggcgttctatgttttatctcatttaatcctaacagtgaccgatgaagtaggaatccttctccatttaacagacaggttccctaaggccattaaggaactggtccgattaagtgacagaacgcggccttcaccaagattcagtgacgcccagccccatcccctgacagccatttctcacggg

SEQ ID NO: 116551 - DNA, 426 bp, Homo sapiens
tcttccctgtctcccccaccccactggtgccacagagatagactctagccctggacaagtgcttcctgtgggtagctcacttccaggagaaagtgagatgaaaagggagggcgctgcaggcccagtcccagctcccaaactccccagtcagatcagtccctacatcctataggaggaaatacgtgaggggtcagagacaggccaggacagtggagcttctccatgtggaaggaaacatcaggagtaaagcaaaagcatttctctaactccttcagcctgtatattactggagttcaagactaaggccacagtattgaaatgaatgtgtggatctgaaaagggagatgcacctgtcaaactgggaaggaagaatgtttgaaaatagaaaaataaaatgacctgggcttggattggggaaatcagtta

SEQ ID NO: 116552 - DNA, 703 bp, Homo sapiens
tagtagagacaaagtctcgccatgttgcccaggctgatctctgtctcctgagctcaagcagtcctcccaaaatgctgggattaaaggcataagccaccgcacctggcttcttagccatttttagagctactttgtgaactagatttactttgtgcatcttaaaaggaaaccaagtgtttgctttgtattgactttttttgttacatttctgcccagtgcggtcagttggttatttattccatttccccttatttgtccctttctacctgttagagtctattaaacgtgtatggatgcgttttctgatctacaattttaataatacttaattttattaatacttttgtgggttactgtaggaaatgagagattcagcaagggaattctgagttagaccatagctgctgcttaaccgctgtcatggtgtctgaacagattcctgctaacagtatttggttcaagaaaataagttatgtctttttaaagctgtcttagtgtgttcaggccactgtaacaaaataccatagactgcttggtttaagcaatagaaacttattttctcacagttctggaggttagaagatcaagatcaggatgtcagtgtgatcaggtcagaagattcccttgctggcttgcagatggctgccttcttgctgtttgtctcacatggcctttcctccgtgtttgccaatgccctttcttt

SEQ ID NO: 116553 - DNA, 383 bp, Homo sapiens
gttggatcaaatggtagatctactctcagatttagattttaatttacttttagattttagatttagaaatctccattctgttttccatagaggctgtactaatttacattcccaccagcagtgtataaatgttaccttttcaccacattcatgccaacatctactgttttttgactttttaataatgaccattctggctggggtaaagcggtatctcactgtggttttaatttggatttttgtgatgattagtgatgtagagtgtttttccatatgtttgttggccatttgtatgtcttcttttgagaaatatttattcatatcatttgcccactttttaatgagatctttttttgttttttgtttgctaatttgtttgagtt

SEQ ID NO: 116554 - DNA, 345 bp, Homo sapiens
accgggaagatggcggccggcggcggcggaggcagcagtaaggcctcctcctcgtcggcctcttcggcaggggctctggagtcctcgttggatcgaaaattccagtcggtaaccaacaccatggagtccattcaaggcttgtcgtcttggtgtatagagaacaaaaaacaccacagtactatcgtctatcattggatgaagtggctccggagatctgcatatccccaccgtttgaatctcttttaccttgccaatgatgtcatacagaactgtaaaaggaaaaatgcaatcatattccgtgaatcatttgctgatgtacttcctgaagcagctgctctagtgaag

SEQ ID NO: 116555 - DNA, 642 bp, Homo sapiens
cccaaatctgcatataaataaaaatcaatttcagtataaaaatctttttagaaagctagacttaaaaattaggaaaataataaaagttagagagctttgtccttagttttgggataatttttcttctcatttggaatgggaaagacccttccctgactcccagcaaccagcccaacgtgcctcggcctcagggagctgtgcaattgctgttccctgcctctcttttggttccaaggaatataattgaccctcacactcccatattcttatttaggcatccttctctttaaagaaaaaaaaaaaggcaccagtgttgatttggctacatatagacctcacttctgagaaaagaatgatgaaatatgttgtccagatgtcccttttagagatatcatgaaggtttgcttaatttgcttacaatgattgagtaaagaaagctcaccaatagcactttaaattatacatcaatattgcgatacaatcccaacattcatattaaaagagtacttaaaaaaagtcaacgaggccagcgcggtggttcaagcctataaccccagcactttgggagggcgaggtgggcgaatcgcttgatcccagaagttcgagaccagcctgggcaacatggcagaacctcacctctgc

SEQ ID NO: 116556 - DNA, 493 bp, Homo sapiens
tgagacggagtgtttctctgtcacccaggctggagtgcagtggcgtgatctcggctcactgcaacctctgtctcccaggttcaagcgattctcttgcctcagcctcctgagtagctgggattacaggcatgtgccaccacgcccagctaatgtttgcatttttagtagagacggggtttcaccatgttggtcaggctggtctcaaactcctgactttgtgatccacccgcctcggcctcccaaaatgctatatctgtagaatccgtagaatccgggattacaggcgtgagccaccacacccagcctagagtatggtatagactcgtgtaagacttcagtgaatcttatcactaccactttgtggtatgggataagatacttattttctgtaagtctcagtttcctcaactataacatgcgagagggacaaaatgagcacttacctcaaggttgttgtgaggattaaatgagacaatacatgtaaagcacttag

SEQ ID NO: 116557 - DNA, 475 bp, Homo sapiens
ttgggcaacagagtgataccctgtctctaaaaaaaaaaaaaaaaattctctctcactcacagaatgagtcacctgaggttgctgcggctctattccatgcatttctttatcctgaaatccaggctgaaaagagaagcccctttctgagtcacgctgttctcaaaagaggcaggctgcttggatggttcagagcacggccttgcattcagataaggctaggcaaaaatgcctgcattatcagagttaatgcttacaacacccctacgagttcggaggtgatattctcaatttacagatgagaaaacctgaaatatcttgcccgaggacacacagggatgtgaagaaatgggagccgaactcaaacatgttttgtgtctggctctaaaccccaggctttccctcaccctgctattctgtccctgcaaagccaattcaggatcagccagttaaacatgctgaattgagagcacctgta

SEQ ID NO: 116558 - DNA, 631 bp, Homo sapiens
accattttccctgggtctgtctgtagatgcacatcagtgccagcaaagtccagtgggggagagtgagagagagagattgattttagaagccaattctaaaatgtacagagaagtacagaaaggctgggagcagcccagaccctcctgaggagcaggtggacggtgcaacagcggatggcaagtgggacgtgttatggggccgcagttgcccagagcacgaggagctgctggcggggggcttggccgctgacccacgaggtaggacaccgcctgggcaccgaggggggcctgtgctcgtgcccacgcacgcggatgtgtgatgaagggagtggcgttgcaggttattgggggaaggttggactcttgttctggtgccaggaaagtcaggtgcccacgtgggaaaaaaggaaagtagactcccacggcattcagatccccccaggtggatgcccagagggcagcacttttgacccagagccccatcctgatgacctcacagacaaggcccccaagagcctttgctgcagcggaagcgggtaacatcagcacacatgactttgtttctcagaagacacgggagagggtgaaggtgcggtcattcataaaactcacaggaactcaaaaccagaat

SEQ ID NO: 116559 - DNA, 1290 bp, Homo sapiens
aatatttaaggaaacaataacaattctacgcaaatccttccagacaatagaaaaggaaaaggtctttcctttatttgatgaagatagcattactttcttactaaatcaaacagacatcataagaaacaacaacagagaccaataaccctcatgaacaatgatgaaaatattcttactaaaattttagcaaatctagttcatctatatcatgacaaagtgtactttattgcaggaagataaagttgatttaacattcaaaaatcaataaatgaactttaccatattagtggactaaaaagaaaaatgcatatgatcatcttaatagaaaaagcacttagtaaaacccaacattgagtcatgattaaaagccctcacaaaaccagggataaaatgaagagtcctcataggatgcaggccatctacacaaaaatctatgtcttcctaaaattgagaacaaggtaaagatatctactctcatcacttttattaaacattgtactggaggttctaactcatgaaataaggcaagaaaaagaaataaatcatctagattggaaagagtaacactttccttatcatttgtgtacaccagtccatggaatccatgaaataaaagctattagaactaataagtgagttagcaaggtggcagagttcaagattaatatacacaaatcaagggtatttttatataaaacaatcagaaattgaaattttaaaaatgttatttccaataccattaacaaatataaaattgttagccataaaccaaataaaacatgtggaagacttgtacattgaaaactgcaaaacattgctgagagaaattaaagaagacctaactaaatggaacatgtaccatgttcatggacaggaagacttgaagttgttaagatgtcaattctcccaagttgagttatagatcaattgaatatcaatcaaaattccagaaggcttttaaaagtgaaaatcaataattgaactttaagttttatatggaaaaaatgaaggacctagaatagtgaaaataactttgcaaaagaagaataaagttggaggacttacttatctgatttcaaggctaaatataaagctatattaaaacagtatggtattgccatacatatagacaaatagatcaatgaaacacaatagagattccagaaatagactcacatatatatggccaatagattcttgacaaagtacaaagacaattcaatggagaaagtattgtcttttcaacaaatgatgctgaatccccaaaaaagtgaactttgattcgtacct

SEQ ID NO: 116560 - DNA, 585 bp, Homo sapiens
aatatttaaggaaacaataacaattctacgcaaatccttccagacaatagaaaaggaaaaggtctttcctttatttgatgaagatagcattactttcttactaaatcaaacagacatcataagaaacaacaacagagaccaataaccctcatgaacaatgatgaaaatattcttactaaaattttagcaaatctagttcatctatatcatgacaaagtgtactttattgcaggaagataaagttgatttaacattcaaaaatcaataaatgaactttaccatattagtggactaaaaagaaaaatgcatatgatcatcttaatagaaaaagcacttagtaaaacccaacattgagtcatgattaaaagccctcacaaaaccagggataaaatgaagagtcctcataggatgcaggccatctacacaaaaatctatgtcttcctaaaattgagaacaaggtaaagatatctactctcatcacttttattaaacattgtactggaggttctaactcatgaaataaggcaagaaaaaaaagtcgagcggccgcgaatttagtagtagtagtagtagagtaggggccgc

SEQ ID NO: 116561 - DNA, 218 bp, Homo sapiens
tcccaagctccctgggctcagagtcctgtgctcgagagctccttccccattcttccggcagccacacccccgagtttgtccctccactcctgaacatcctatggacgcctccttttctaccctcctgggtggaagaatcctttctcttggtccatttccacttcatcctgaagaacagtaaggagaggggattgctgtttgtcgggatgaaccatttg

SEQ ID NO: 116562 - DNA, 331 bp, Homo sapiens
aacataccacataacttgcttatttatcttgctaatggcctgtggtccccaacaaaataaaagctctgtgagatcagattttctctgtcttgttcactgctgcatccccagcacctagaactgtgcctgttatttagtaagcgcttaatagatgtttgtcaatggcatgcacaccatgccacgatcctgcccacagccatatccccacactggctggggatgggcctggaggacagcacctgagctctgttcatctctggggcctagcacagtaagtatcaggaaatgttagttgactgacccacagattcacattcttagtgctgaggag

SEQ ID NO: 116563 - DNA, 983 bp, Homo sapiens
aggcgtgcgccaccacgccctgctgatttttgtatttttggtagagacggaatttcaccatgttggccagtctggtcttgaacttctgacctcaggtgatctgcccaccttggcctcccaaagtgctggaattacaggtgtgaggcacaacgcctggcctaaaaatgctaaaataatttaagccaactttgaggaataactaccttcaaatgatgcattattaagtatatggttatataagttttgacaaatgcatatacctatggaagcatcactaccatcaagataaaagaacattccatgacccctaaacactcccttgagcccttttgcagtcaatcacccttttcttaccaccctaggcaaccactgttctttctataactaaattctatctagaatttcatgtctacaggatcatacagtaggtactcgcgtctatcttcttttactcaccaagtttttgacactaatccatgttgttgcatgtgtcagtttgttcctttatactgcagagcagtatagtccattatatggatataccacaatttgtttatgcattcatctgttgacagacattcctgtaaagctactataaatattaatgtgtatttctgtaaacaaacgttttcctggaattgctgggtcacagggttaagttttcagaaactgtcagttttccaaagtaatgtaccattttactctcccatcagcaatatatgattatttcagtagctccacatccttgctaacaagtggtattgcctattttttcatatatttttattagtgaattgtgcttttaaaaaaaaagcgttatgtaaaagatttgtgaaattctctatatactgatccaagtcctttgttaggtattttctaatagtattttctcccagtctgtgagcttgccttttcataggtgtatttttaaaaccaaaacctttcaatattaatgaaatagaattttttccctttatgattcc

SEQ ID NO: 116564 - DNA, 229 bp, Homo sapiens
aaatcaacaatgaagaagagacatatggtgaagggagggacagaggaactcatcgtgaatcagctctctccactgcaggaatggtatagagtgcttgcacagagaaaaggccatgtgaggacacagcaagaagacagccatctgcaagccaaagtcaggaacccgatgtcaaaccaaatctgctggtgccttgaacttggatttccagcctccagaactatgagaaaat

SEQ ID NO: 116565 - DNA, 302 bp, Homo sapiens
taaaataggttttggaagcttgtttctaggaaagaggcctggagtaatctatttccagtgccttagagaattaatatctgtactaacttagatgagcttcctaagggagagttcttgattcttgattgtcatcacatcaattaaatgcttacttgtgttatttaacgatattaactactgtcattcaaagaatttttttacaggtttagaatttctacagaagttttcaagtactttgttcattttgtttttatccagtaccttttctccccacctgttaagatttcagaaattgagtgtac

SEQ ID NO: 116566 - DNA, 881 bp, Homo sapiens
ggagttcaggagacagaggcctgggttggggacagagatgagaactcatcagcaaatggtgaccaaagagggtgacgagaagactgagaagacacctgtgggaatcacatttcactaagggaaaggcaggggagggggagggagccaggaaaggaggccaagaagcagtgtcttgagatagaataaatatcaggagagaaggagccggaatggcaaggatgaggtgcctggggaagcagacagggtcagcgcttcaaatgctgctgagacgccgggcaagaccagcactgaaactgtcctctccactcgtaaggagttgactggagacttcagtgagaattgtcttcagcagagcgatggagccagggccagagtctggtggactcagccagagtgtgggagggaagggaatgaggctggaacattcttacaggccattcagctgtgacagtgcagggtggggagacgtggtgtccagacactccataggtacacactttcctgcccccagatcaatcagtgtgggtaggaggagagaagaaggggtacctctgggaccctctccatctaatccttaaagtcattttgtagcatttgatatatatgaaaaaagaatacatggaacatacttgtaagccatgaagccaaacaacaaaatgattatctcaaaccttcctcccaacccaagatctccaactagtgtgtttctgccccaaaccatgtccctgcccagccctggggtagacattaccctgaattttatgttgattatttccttgcttttgaaaatacttttattaggcatgaatgtatccctaaacaatatattgttttgttttgcttgtttttgagttttataaaaatgctattataaagtatgg

SEQ ID NO: 116567 - DNA, 669 bp, Homo sapiens
accaattgtacttttattatatcaggctgattcactgtttctaatgcaatgaacttgacacagattttaaattttttctcaatctgtcccattgtgtagacaaattaattcaaagttctttttcttccttctctttttcatctaagcctgtgcttatgagtagaaaaagagaagaggctaccttgaaatgcctcgggcccaaactcagaaggctctgcactcaactgagcctcccttcctactaagaatggaatagtgttgcttataggggtgttggtccaagtatcagctgtggatgattaattcccagggctgctatcacctaaggtaacttcagtaatcttatgtgtttggaaaggaggatgaggattatttttcaaatacataattttgttttattttgaaacaatctcacacctacagaaaagttgcaattataatacaaagagcttccccctcgcctgaactgtttgatagtaagttgccaaactgatatacccacgatccccaaatgcttcagtgtatttcctcccagcaaggacattctcctgcataaccacaatacaaccataaaagtcaggagattaacaccagttcattttgaccatctgaaattcaggtgtcattcatgttttgccagttgttctttgtatgttcttcatagcaaaa

SEQ ID NO: 116568 - DNA, 395 bp, Homo sapiens
ctattacaatttatattaaactgcaagatatcacttcatatcaagactacgatggtggcatcccttccaaaatccatgccttactagtctgcatataaatgcaaataagcattctgaatgctttgatttcctcacgtttacagagaggattcacattcatctggaggagagatccaggcatgtgaatgtccaaaagaaacataagatagaccagaagacaaggtatctgtttttttttttgtagatggagtctcgctctatcacccaggctggaatacaatggcaccattttggctcactgcaacctccacttctcaggctcaagcgaatctcctgcctcagctcctggtcctcttcctcctaaatcactgatctgaggctctaaccttgtctgc

SEQ ID NO: 116569 - DNA, 514 bp, Homo sapiens
agctgcctctccacagtgctttggcctcttacccccctggatgctatttaggaagcatctgcttcagttttagggtgtcccagaggcactgactcccagaacctgctactggatgagtcctatggatgcatccccatggtgccaggagaaaagagaactcacggtcttccagcttcattcttcaccagatacccaagtcccatacccatcttcccaccccccaaataaagtatcttatgagatatcaactggagataaagagaggagcaaagattaggcagggaaaaaatgaaaggctatagaaaggtaggggagagaataggtagagagtaaggtgtttaaatgcagaggaaagagaagtagctaaagaagcatgacagacagaataggagaagggccatgctccacagaagggaaccaggactcagctgggctgccacacgccatactccagggagagtcacttcatttgtaggctaggtgaatggtgcctcctggagttgtgcagtgcacg

SEQ ID NO: 116570 - DNA, 388 bp, Homo sapiens
agctgcctctccacagtgctttggcctcttacccccctggatgctatttaggaagcatctgcttcagttttagggtgtcccagaggcactgactcccagaacctgctactggatgagtcctatggatgcatccccatggtgccaggagaaaagagaactcacggtcttccagcttcattcttcaccagatacccaagtcccatacccatcttcccaccccccaaataaagtatcttatgagatatcaactggagataaagagaggagcaaagattaggcagggaaaaaatgaaaggctatagaaaggtaggggagagaatgaagccggaagaccgtgagttctcttttctcctgcacctggggatgcatccataggactcatccaaag

SEQ ID NO: 116571 - DNA, 151 bp, Homo sapiens
aagcaagcactaagggaatttgttaccactagaccagcctcacaagagttccttaaaggtgttctgtattagtgtgctcttgcattgctgtaaagaaatacgtgaggccaggcatggtggctcactcctgtaatcccagcactttgggagg

SEQ ID NO: 116572 - DNA, 798 bp, Homo sapiens
actcacaccgcctttgccatcaccaccgtcattgccccctctactaccaccaccatcaccaccaccgggtctgcctcagccagacccaccactgcctctaattagactgccaccatcatcactgccaccaccactgcccctccaatgccttcctgatgtcaccatctgctttctctctgctatcctcacacccaactccatcacaaccaccaccttcatctgagccgccatcaccctcacagtacacagccctcaaatgtgtaccaaggaggaggacatttactacacgctgcaccctgaacagtctgggaccagcggtcagggaacaaggaatcgagatgctcacctgcagctcccaggtgagcggctctctagagcttgcctgggagctgctgaggagctcacggtattccaggaagctccccatccatgcctcagcctgtggctcagaagcagggtcttcgcagaagattgccccgagctgttgcaaagctcaccattgtcacctgcctgcaacggcctctcttttccactctccaaatcccttgtattggcaggctctaatctggaattataccggtgatgggattctggaaaatccctcagatttctccaggatgcaaggagaccatggaagaggaacaagcctgcaagggacagcaggtgctaactgctaaccgagacatagtgacaaaaatccagccacagagataaagaatcaggttcatctgtagctacatccagtggagaagttctgctcttcaactcctctgctaagccacatgtgtcagcaggtgt

SEQ ID NO: 116573 - DNA, 293 bp, Homo sapiens
tagttgtgacagaacctgcatggcctgcaaagtgtaaaatattagtatctggcccttgcaagaaaatgtacacatcacttacgaagtattcttgccaaaaatgtttaacttgaacccaatcgtgaggaaacaatcagataaatccaaaaatgtgggacattacacaagacaagtgggctgatgcttcaaaaaaatcagtctaaaactagaaagaaagaacaaccaaatgcaatgcatgaagcctgatgagagcctggagcagaggaaaaaaaaaacacagctgcaaaagacat

SEQ ID NO: 116574 - DNA, 126 bp, Homo sapiens
tcaaggaaacgcattctcccatacagttttaggaaggaatataggctgctgacatcttgattttagctctgtaaggcctactttttacttctgacctccagagctacaataaatttgtgttggatt

SEQ ID NO: 116575 - DNA, 303 bp, Homo sapiens
agtgcctcagaagcaaagggagcagaggatttccaggagggagtgataatagcatcagacccagcagggagagaccagacagtgtccactggatgcagaggaatgcatgatgactttgggagagaactgtttcaaaagagtggtgggggtccattgctgtacttttggaagtgagtggaaggtgagagagtgaatttctccctttgaagccactgtgccaggagttgaagatttcctagccagagaagttctgagtcttgagaaggttgaaggtgttcactgtgtgcatgagtaaagagcagg

SEQ ID NO: 116576 - DNA, 434 bp, Homo sapiens
gaatcgggatcccacagggcagatataagtaagtctggacaaaatctggctcacgtccggctctctctgtaggggaggggtccttacgttcctttgattgattgaagcccgagaaagcctgagagctctaatctctgggacaatctgccttgtttgcagcgtcagtaactgaggcattgggagaccagggggttgcacagtccccagacctgcagacaaaccagccatctgatcatcggaagccattacacattaaagcagaaaagactttccaaaaggacactaagagttagaataaagagacctccagcaggctgtatctgaggctttaagcattagagcaaatattgtgaagcacataactccaaaaaagcctcccttgtaaagaatattcaatatctgtaaatcatcacttagaaatgcagcccagattt

SEQ ID NO: 116577 - DNA, 303 bp, Homo sapiens
agcctggggtgacagagcgagactccgtctgaaaaaagtaagataactacttttcaaataagctttggtagaatcttatgagctcacatcattgttttccaactatgatatgagttcaaaattttcttctttgaccctacattttattagatatatacatttttagatgtatatatttttaaccattttaaaagtttctctatgaaatttgttgtgttcagtttacatagaagactgcatgctttctagtctgtatcatatattggaagcatttactagtacctgataaatgattttaggttg

SEQ ID NO: 116578 - DNA, 434 bp, Homo sapiens
aggcactcgccaccacgcctgactaatttttgtatttttagtagaaacagggtttcaccatgttgaccaggctggtcttgaactcctgacctcaggtgatccgcccgcctcagcctcccaaagtgctgggattacaaggtgtgggagaagtgagttgaccctggagggccagacagagtggggcctctgggtgcttccaaaggaacaagagcccagagctgaggagaccttcggtggcagatggattggatgaagcaagggtgagggtttctggggccctgggctctgtttccatgtggaaatctgaaatgttttctagacagtgatggaaggaggtcagccaaagggctgtttaaaaacaaagcctccatgtaaaccatttctgcaagaatattttaaaataaataaaaataaaactgaagacatgaaatgtc

SEQ ID NO: 116579 - DNA, 397 bp, Homo sapiens
gtgccggagctagctggtaatggacaggagaggattagttccatggacaactggaggcgtgtccctggcagagagagaatgtgttcagtgacaacagctcatatttgttgagtgcgaatttcacaccaggccctatgctgagctcctgacctgcatctcttattcagcaagacaatactgttataaaggaacagttaattatgtcattttatagataagtaaactgaggttcactgagttgccaaaagtcacagctagtaagtggaggggctaggaggaccctgggtgtgtctagagcctgtgattgtaccactgcacctgctgtgcagaggccttggggagcaatgtgggtgcagcaagggggagctatgtgtttacatccccctcgtccccctct

SEQ ID NO: 116580 - DNA, 222 bp, Homo sapiens
tgataacagacttgtatccagaataaataaaaaactcttaggattcaataataaaaatataaataactccatgaaaaaataagcaaaggatctaaatagacatttatacaaaaaatatatacaaattgccattaagcacatgaaaagacggtcatcataggtcactagggaaatacaaatcaaaaccccaatgagatatatcacttcacatgcactaggatt

SEQ ID NO: 116581 - DNA, 258 bp, Homo sapiens
ggggaggggaagatagaaatggaaagagagacgcaggaggcgagttctggccattcccggaagcgggtggagatctgttgggagtgagccttcactgccagaggggtggggcagaaggagaggtgtgattaagtgatgtgactgagacagagttgaggggctcctcctcattcccccaattcccagtgctccagacatctagacaagcctcctcagaggggaaagtggtggatgaagaaggaaaagagacaggtagta

SEQ ID NO: 116582 - DNA, 640 bp, Homo sapiens
tataagattgataagtccctaacaaaactgattaaggaaagaaagaacaaccaagcaagttgccaataccaggaatgaaagagtagacgtcagtatagaccttaaaagaataatatgggaatatatgaatgtcaacaaatgtgatagtttggatgaagtgggcaaatttcttgaaaaatagcaaaccaacacaagaggaaataaaatctcaatatctctatatcttctaatgaaattgaaacagtaatttaaaatcacccagaaagaaaattctagactgtttttactgttacattctaccaaacatttagggaagaaataattttcactaatcttacacaaactctttcagatagctatgcaccatgatgcatgcctgtagtcccagtaactcaggaggctgatgcagaaggatctcttgagcccaggagttcaaggctgcagtgagccatgattgtgccactgcactccaccaaggcaacagagcaaaaccctgtctcttaaaaagtaaaaaaagactgggtacggtggctcaaacctgtaatcccagcactttgggaggccgaggcgggcagatcacgaggtcaggagatcgagaccagcccagccaacatggtgaaaccctgtctctactaaaaat

SEQ ID NO: 116583 - DNA, 288 bp, Homo sapiens
aagaccagcgtctgaatgataagagatttggaccttgtgtggcagcatttggtctcaggccctgctccgcctgcttgatattctactgtgatgaattggctatagctggtttcccaggagctttgtcatatccacattcgactgcagaaaaaaaacaggagttaactaactttcccaaagtgacacagctagtaagtggcagagcttattcattcactcaagaaaatatttagtgatgacctgttttgtgctacatgctggagctggatgaaaaccccaaagtgtctg

SEQ ID NO: 116584 - DNA, 366 bp, Homo sapiens
tcccccagctgagcctagttactgtttagccaagaatttccatttctcacacaaattgtccactaaacaactgttgaatagcgtccatctccatgctccaggataataggacctcatgtctggttccaaagaggaaatttatggcagtaagacaaggatccaccttgtgaacccaaaagtatctgtaacaggtccaaccctgtgaacccaaaagtatctgagacaggtcccagtcaatacagaaagattattttgccaaggttaaggacatgctggtgacacagcctcaggggttcctgatgacgtatgcccaagatggttggggcactgtttggttttataggttttagggagacatgagacatc

SEQ ID NO: 116585 - DNA, 528 bp, Homo sapiens
gaaactactttatacctactgggtgcttaagcaatatttgttgaatgaatgaataaataaaatacctttattaaaggaggtgtgtcgaaacttcacctgttggcttgctagtttatgtcaggttgttctctctgtaatcgttaaaaacaagcacttaaatccacatttgtatttggtcagtaaaattacaaaaataatcttacttttaagattaagctgtgaacaacgctgtgtccagcaggaacatctgtgagccgtttcctttgcccagaaaaagagagttgctgttgtccactctcagtgatatctcagaaataatggcttgtagctcaaagatgctttctctctttttacaaaaccataagacccacaaaaattacattagagccaggatttgcttaagtcccactcacattaaccattattactcacctccctacaagagtacaaaagtaaccaaatgttcccttcatgttagtcaaagttttttgttttttgctttttggttttttcagacaaggtctctgt

SEQ ID NO: 116586 - DNA, 523 bp, Homo sapiens
tgttaccatggttcttaatcatcaatgcttgttataataaccgggattgaatgcaccttcttcagttacagggatttggatttagggagttggaggtggggcccgtgaatctacttttaacaagtaccccaggtgattctgatgaaggtggatcagccaggcatggtggctcatgcctgtaatcccagaactttgggaggctgaggcaggaggatagcttgagcccatgagtctacctgggcaatatagtgagacctcgtctctatgaaaaaaataaaaaaattagctgggcacaatggtgtatacctgtagtcccagctattcaggaagctgaggtgagaggattgcttgagcctgagaggtggaggttgcatgaaccatgatcatgctactgcactccagcctaggcgacagaacaagaccctgcttaaaaaaaaaaaaaaaaagtagatcgtgatcaacatttaggaaattttgctcccatcactgttgctttctccagtagttttctaagtgaatcttt

SEQ ID NO: 116587 - DNA, 257 bp, Homo sapiens
ggatttcttctgggtaaaagctcgtttcctgcctgcacttgaggctgcgttccaccatgcttgtgctggctctgagttttgcctcccaccctcaatttcaaccattattttatcctattctctgggttgcttcagttcagtttcttcctctctgtagtttttttggaccagtaatttctaattatcctgtaggtctcagtttaaatgttgcattttcagggacgtctttgtagattcctttctagtgcattgggtcc

SEQ ID NO: 116588 - DNA, 646 bp, Homo sapiens
atttcatggatacagacccaccacaggtgaaggaagcactccatctcatcggccgcctttcctttacaaaggctttgttctgtgagtgtctgcacatcctcctttctcaggaataacagccttccatatatgtggttccctcacatacatgccaaggagcttctgccctctgctgtacataaaagatgctacagtgatgaggagaccaactatctcagcaggatactaacagtgaggttgtgaacaactgtgcaatcctttatcatcctcacttccattgccatagcttgatggacattattcatctttgaaacatttttcatgtcagtgagaaaataggtgttccacaaaattttctttgagacagagtcttgctgtgttgcccaggctggagcgcagtggcatgatcccagcctactgagaccttcctgcttccagattctcctgcctcagcctcccaagtagctgggattacaggtatgtgccaccatagctggctaatttctttatttttagtagagatggggtttcaccatgttggtcaggctagtcttgaactcctgacctcaagtgatccacccacctcggcctcccaaagtgctgggattacaaacttgagccaccatgcccggcccaaaattttctt

SEQ ID NO: 116589 - DNA, 221 bp, Homo sapiens
  misc_feature (201)..(201): n is a, c, g, or t
gttctgggggtggctttgtggtgacggtgccggtacttgagcctgtgagtgtgtggcccacttcctagcagagtggaacttgccttatctcagatgagactttggactgtggacttttaagttaatgctgaaatgagttaagactttgggggactgttgggaaggcatgattgggtttgaaacatgattatgagatttggngagggggcagggcacaatga

SEQ ID NO: 116590 - DNA, 326 bp, Homo sapiens
taagcggggactacttgtacttggaaacagactggtactaggatttattccggcaaattaggcataatcattgactggcactttcttctttactcacaggcctggataagcaaatgcaagcctgtgattctgctggatttactctataataattactttgagatgctgtatttcttttaaattaacaatgtcatgatttctatttcaacagtgagaaaatggaaactctgagaagttaagtgcagtaacttgcctaaggtccatccacaaagagctaggattcaaatccctgtcaatcagttatcaaacccagtacttttccactg

SEQ ID NO: 116591 - DNA, 155 bp, Homo sapiens
agtctggagacatttttgattgtcacaactgggaaaggtgggaagtgcttccggcatctagtggttagagggctgggatttttatagttattctaaaacatacagtccccacaacatatccatatggaattatccatatggaaatatcagtagtg

SEQ ID NO: 116592 - DNA, 373 bp, Homo sapiens
ttcgcctcccaggttcatgccattctcccgcctcagcctctctctacaggcctcagcctcactacaggcctcagcctctcagtacaggcacctgccatcacgcccggctaattccttgtttttgtatttttagtagagacggggtttcaccgtgttagccaggatggtctcaatctcctgaccttgtgatctgcccacggtggcctccctaagtgctgggattacaggcatgaaccactgcacccggcccagttccacatcttaaaaccagagcatttaatccaaactaaatatagttcttaataatagaattgcattggaagtatctgtgctttactaaaccttaataaaattttgtgctgtgtatacatga

SEQ ID NO: 116593 - DNA, 399 bp, Homo sapiens
tctagctttctgtctgcacggggcctgatgcctggtaggtccttggtaaggatttgttgaagggaggagagaaggaaggagggaaagagggaggcgaggattgttaaaaaggagaggaaggccgggcgcagcggctcaccccagcaatcccagcactttgggagccgaggctggcagatcacgaggtgaggagatggagaccatcttggccaacatggtgaaaccccgtctctattaaaaatattaaaaaattagctgggtgtggtggcatgtgcctatgatcccaactactcaggaggctgaggcaggagaatctcttgaacctgggatgtggagattgtagtgagccgaggtcgtgccactgcactccagcctggcgacagcgagactccgtctgaa

SEQ ID NO: 116594 - DNA, 724 bp, Homo sapiens
ggctcaaaagtgaatccctagctcatagcttatttctcaaatcacttagcattttaattacttttcaatttttgagatacaagtcacatattttctttttaaaattaatatatgtactttctcattgtaaaagacctgaactatacagaactgtaagaagtaaaagtcttagttttccttccagagagaacatgttaggaaaatctcttggcatctgaggagctggctgtctatttttacttctatattgactagctctttttccttctaataaagagtgtatattggtttaaattataccaacttcctctgggttttagaggttagcttatttgtagacgagtctacctaccacatctatttctccttatggcttagagcattttctgatcatcagcataaaattttaggtgccttattcattttgccccaagaatgttcaaactcctcaacctcagaaatgtttctagtagttgaaagactgttttgcgattacttttattggattctacacagaagtacccatagcatcattgaactagctctgttgcataactgtcctgtgtctaaaaatacactgctgagtagcatcagctcttgcccagggatatgaacccacactctgggttatttgtactgactctgaccacagactatcttccaatatatcctgcaaaatgatcctttatggaaaacaccaaacttcttccagtgaagtctgata

SEQ ID NO: 116595 - DNA, 305 bp, Homo sapiens
taagactatctggaatttacagtgctctcctaagggattacagaccttcagtcaaccaaccaatttatttccttaatcctttgagggtaaaacttagactaagcatttcaaggggagtagtttgagggccaaagtaaagaaaacttttcaaagaatgagaactatccacagtgagatggagtgccttgtgatataagaagttccccaacataaggcattcaggctggacagctgactgaacagaagattcctgcactagaaggcaggtgagacctaatcaagccaggagacctgagcaagccagg

SEQ ID NO: 116596 - DNA, 341 bp, Homo sapiens
ctccatcatcaagtacttgaccagcccttttgctactttacgttatttaatcccacagcacatggaggggcagatgctatttggggctcagagaaggtatttggggctcagagaagttaagtaacttaccaaggttctaccacaaattaaatggcatgtctgggatttgtgtccagctttgcctgactccaaagctcatgctctttcattatataccatgcctctttttttgctggtatttttcttgaaatattctttcccatagtcttgagaagcattgcagcacaggctgatgcatttgtagcttatggtcaacagtgataactgggcttgttttgtta

SEQ ID NO: 116597 - DNA, 259 bp, Homo sapiens
gggcacatagcgcagggaggtgcagatgtcgcccagcttctccggctgtccaggggaagagcaggacttgggtcatctcacccatcctagtgcctctctcatggctgacctctttcttgccaaaattagcaaggcagtgatgtgtccctgcctccctcatcaccagtccccatatatgtgatggccgagaaggtcttccagcatctgaccttgggtccccctgatgcagtgcaacaaagtccctgaaagtgacaggttg

SEQ ID NO: 116598 - DNA, 284 bp, Homo sapiens
agctggtaaatgcctggcgttgtgttgtgttctcccagcttcctttttatatgatgcctatgatgctgtctgatgttagatgaaaagctcctggcattgaagtctatcagcagaggacaaggggagggaggccgtggctcattcctgcaagaacagactgtaagaatggagagggcagaggtctgtgtgtcgggcagaaagggcgtcaggatacgatgttctttagcggactggctactcagcaaatttgattgttagtcattttcacactgtcaaatatgagc

SEQ ID NO: 116599 - DNA, 306 bp, Homo sapiens
aaaacactacagaccgatattcctcataaacatagaagcaagtatctgtaacaaaatattagcaaatagaatgtagcaatatatagaaataattataataccatggccaagcagggtttactccagagacacaagtgtagtttaatatttgaaaactgactgatgtaatcaaccatattaactaaagaagaaaaattacatgatcacatcaactaatgcagaaaaagaatttgacaaaattcaagagggctaccgcacctgacctgaattagcatcaattctatacactctgttttagggattaag

SEQ ID NO: 116600 - DNA, 737 bp, Homo sapiens
gttttttaacaaatgttgttgatcatttattatttattattttgagaagcttaaaaattattctgtcatgaagtatgttttaactaggctactttggaaagtgtttgtaggataaatttatgattggctagattagtttatagcattccttttattcagataactctagtgaatatagctctaatggttcagagcagtgtttctcaaactactagtgatgatggaccagttttttaaaaaaattatcatctgtcacagacaaatatgtgtatctgaaatacatgactaacatgaactcacaccatgtgtgaggcaccacacaaatttgatattccctaactgatgtatactctgataaatctgctaatcactcacttggatcttgtaacaatattaagttgctataaaagtttataaatatttcctctcaatttctatatttatattgttggagattgataacagtttgtggatgatcctcaggaccacactttccgaagcattggttctggtcttgcatgttagtttcgtgcttttattctggttcatgtggtgaagactgtgtgtattctgtattcttaaaaaaaccactcgctctttcagatatatttggaagtgcttctaaaatataacagtgtaatctactttaacattttaacctcccttttgctgtttagaatattttgtgtctaaatttgaaaatattcctaacaagttgatattattattttccagaa

SEQ ID NO: 116601 - DNA, 276 bp, Homo sapiens
tgtgttctagaatgctctaaaggcatggacttctgtagcatgttgtgttctctgccttgtgcttggcatatagctgcactccatatatagtggttgaatgaatgaaaaaagtctgcctatctgaataatcatggcagtggtgtttttttcttgctctatttctttatatattgattaaatataaatcacatgttcactacccaaaaaaccccaattgtccttaaactctagcaaccagaaataactaatgtaaccagaaatatatcctacaatatt

SEQ ID NO: 116602 - DNA, 605 bp, Homo sapiens
aggccagtccttgaacatgaagtacttgcttcttaaatatttgttggaaaagaggatattgtgtaaaatgcatgaaccgtggtatacttaactgtcccagttactggacaggtgggcttttgagttaatcaacggcagcaaggctgtagtgaagtctttggatctggggtgcatctctgaggacagcgtgttaggatcctggcagcttgaagcatgttgagtgacaggtggtctcagagggctgaacagaggagttgatgagggcctgtcaattacggggggaagggtagagttaagggaaccaacattgaaaggattaaggggagggactctgcagagagtgacccaggccaagaagctggaacccgagaggcagcctcggcctagaacccgagtgacacaggccaagaagctggaacccgagaggcagcctcggcctagaaccgcagccaggggccggagtgggaggcagggccagaattgggtcccccggcattcccttttcaccaaacaccctgggagttccccgccttggccttggaaagcccaaaagcccaggaaaagctcatttgggggcgcgaaactgggcaaggtgcttgtcgggg

SEQ ID NO: 116603 - DNA, 330 bp, Homo sapiens
actaaaatgagattctaaagtcttgagtaccgaatctgggctccattaaaaaaacagcctgagactttgagcaagtaataaatgaaatgatctctaaagtatctttcatcactaaaaccctttgattcaaagggatctatattttctttccttgcaaaatatgttacagaaccatagaattttaggtgggagggagacctgagaattggtgtagatgacctccaaagtcaatttatgctgaaaacaccatcacatagcccttgcacgagggcttaggaaatttggtctaacttcatgttactgctacatttcttcagcctcgtagagctg

SEQ ID NO: 116604 - DNA, 259 bp, Homo sapiens
ccagagtctccttacaaagtcatcctgctcttaccatcaggacaaccttagtgaagcaccaaatgcctcctctggtgtcctctgggtcctgattctctatctggtaaaggagcgggttaagtaaggttctgtgtcacatattaggtccaagtctgattttctttattctagatttcccaatgactagcatgcaaggtaactctttcaagaagttcatcctgacttccctgtgaatagtgattattctcttctttgaact

SEQ ID NO: 116605 - DNA, 390 bp, Homo sapiens
tagtgatgccggaaggctagggtggctattgcaatttcttaaagtcaacaatgaagtttgccacgttgattgactctttccttcatgaaagatttctctgttttatgtgatgctgtttgatggcattttgcccatagtcaaacttctttcaaagtgggagtcaattttacctttcgacccagcaatcaaaaaataaaaaatttaaaaaaaattaaagtcagtcctcttaaaccttgccactgctttatcaactaagcttatggaatattctaaatcctttgttagcatttcaacaatgcccacagcattttcagcattagattccatctcaagaaactactttcgtaagaagaaacttgttcatcataagaaactccttatttgttcaca

SEQ ID NO: 116606 - DNA, 253 bp, Homo sapiens
agccttatggtgactgcatcataatgggccatatcaagtgcccatggtaagtgcagaaaacctacccccacttcagatgatgcaaaataaggaaactgaaaaaggtactactggccgggcgcggtggctcacgcctgtaatcccagcactttgggaggccaaggtgggcggaccacaaggtcaggagatcgagaccatcctggctaacatggtgaaaccccgtctctactaaaaatacaaaaaattagctggg

SEQ ID NO: 116607 - DNA, 354 bp, Homo sapiens
gcacctgtaatcccagctacttgggaggctgaggcaggagaaatgcttgaactgtgggggcagaggttgcagtgagctgagatcctgccactgcactccagcctgggtgaaagagcaagactctatttcagaaaaaaaaaaacaaatagtctctctgaatccatattatgttgtgctgaacctatattagctccagtggggatggcaccaggttcaagaggctgaagaacagccccagagccagcagatgagacatggggttttactgggggcttccatgtggcaacagagtccaatggcagtgggctgcacaggggactgcaaccctgcaactgcttgcaaaaagcatgcact

SEQ ID NO: 116608 - DNA, 617 bp, Homo sapiens
ttcccagttcctgagaaaaccaacaaaaataggcaagcattttccaatgataccgataaagaggccaacaacctgcttacttcagagaaaaaattttccttccgtcactgcgaatgcaagaatgatttctctgccagatgtttcccacgtttccaagctgttttatttttaagacttagttttaaattctgattaatatgcatacgtgtgagaagtaaaaacttgtcaacaaggatgaatcagtatttgtagacctttaagcagtagtagccaattaagaatccattcattaagtcaacaaatatttaatgaatgccaactgcgtttcaaatcatttcagaattcggaggcaaagaagcagatgaggcacctgtctgccctcatagagctttcgtggcagaaagggggaccaattaaataagcaaatgaaaaaatatcaaggacaaatgctacaatgaaaataaaacaggttgatgtgatggcagctggtgaatgactacttcagatgagatggttaaaagaggcccctccaaggaggtgctcgttaagttgagacatgcatggcaagcagccagccatgaaaagatcagaggcccattgcaattggatgaaagaaa

SEQ ID NO: 116609 - DNA, 136 bp, Homo sapiens
gggcagtgctcaatatcgagcatttcttacaacaattaggacttattcccattcagataatgttgtcctagttaacccctttgtggtttttggagatgtaggtttattctttaaactttttttttttttttttttt

SEQ ID NO: 116610 - DNA, 629 bp, Homo sapiens
atatagaattttgataattactaaaaatcattttgtcaatttttttccagcaactttctgatgtagcagtctcttgatatacaagagggatatggtgagaccttgaacttcagctttctgtaattccactggtatatgttataacttcacaggctaactttctctatacataaaaggggagtaattgtatccactgtcaacttgtgaggaccgaaggataatcaaatgggaaatggggagtgtgtggttaacactttgtccactgcctggtaatggcgattcagtcactgctaacacagaattagaaatgacacgtgttatgtattttctggtcacctgagaatagtcagaaccattagcattgaaagccatgagtgccttgggtcaagagtagcttatgatgacatttatttttatagttaaagaagtggagacagaatagatagaatggttacaggtaagtgtaaacacattattttctttattaaagaggcttttcttgcttgaaaacatttttgaaaattgccactggccaggtgtggtggctcacacctataatcctagcactttgggatgctgaggtggaagcttgggcaacatagcaagaccatatctcttaaaaaaaaaaa

SEQ ID NO: 116611 - DNA, 448 bp, Homo sapiens
tctttttttttgagatgaagttttgctcctattgcccaggctggagtgcagtgcgatcttggctcactgcaacttccgccaaaaaaagaaaaagaaaaattcatttatcaccatgggaggatattggaaaacccaactcattttgaaaactgtcaaagaaagggaaagaagcatttatcctttttggtacaaaccatactttttggtagccaaatagttgataaattgataccttttatagacatatgtccactaccaaagacagaatcatagaattagtatgccaccatgttgtaatatctaatgaaataatgggccaggtgtagtggctcatccctgtaatcccaacactttcggaggccgagatgggaagattgtttgaggccagaagttcaagaccaccctgggcaacacagacctgtctatgcaacaagatcctgtctctaca

SEQ ID NO: 116612 - DNA, 209 bp, Homo sapiens
ttgaagtataatgcattgaagatatggcctgtacaaaggcagaacagggatgttaattagaattctgacaagcctactccaataaaatgatgagattatttgtaattgatgtcacaatcaattaccatttagttcatcatgagcattctaataggtttggctttggtattggccccaggatgttgctgagtgagtggctgccctgctta

SEQ ID NO: 116613 - DNA, 224 bp, Homo sapiens
ggggggtccttcagacttgaagcctcctgggcttacctcagccctaatgaattaactcccgtgggcagggtcctcacacccatgactctggttccagcaactgctgctacgggggtaacctccctactcagcacacaagggccgtctgacctgccccccacccccctacctccataccagggagcaggtgagttgcccaagtcaccctcagcaaggcctcctct

SEQ ID NO: 116614 - DNA, 460 bp, Homo sapiens
gagagatttttaattcagtccttgatttatgcaggacttacagcttggctttcaggctctaaactgtctttgatttgaaggtcatgtttcactggggacccacccctatctacctaggcatttgactggctcatttgactgccttctgcagctatcacaataaactctctaaaaatctttggtcatctctgtctatcccccaaatttcactcacaatagttactaaaaatcagccattctttccaaccttctctccagtgtcttcagaaccatgctgttctctgcttggctcctccttgccagcctgacccatcagccccttcattgcccttttctaacagcctgtcccagaagatgtggaaacttcccaccactcttgggaaaaaatggaatttctcaagaagagcagctcccaccaaaattgtagcaaataaatcctttcatcacttcaaattattct

SEQ ID NO: 116615 - DNA, 404 bp, Homo sapiens
gcttgttcaattctggagcttctctggcccctgggtacttactgctgaggcattttggtgccacaggatcagatctgctgggtggtaacttggtgatgtgtatttggaatgtggctttagtggacagtggctgagcagaggagaaacactgctagctcctgagcaacataccacagtgactcttgatgttccatgtaaggaattttttttcccccagttacataagttggagcaccctaatccataattactctgaattggttaccattaccataattaaaaataaaagaactagttctttcaaaaaagtggaattggccaggcgcggtgggtcacgcctgtaatcccagcactttgggaggcctaggcgggtggatcatgaggtcaggagattgagaccatcc

SEQ ID NO: 116616 - DNA, 306 bp, Homo sapiens
cctagttttagaagtttcaatagcagcacctcatgcagagagagcacccatccgcattagccaggaatgttcattatgactgctgtgtgccaggcacggtttaaggctctggatgtacagcaggagccacacagatgtggcatccggtctcctggagctctcaccttcatctgggaggcataaattaaccaaataaacaccaccgtgaatataactaccaattagagtacatgctctgaaggaaaaatagtacttgctattgaaacttctaaaactaggggtaccggctcgattctatctgtctcc

SEQ ID NO: 116617 - DNA, 387 bp, Homo sapiens
tgctaggattacaggcatgagccaccatgcctggcccctacctcctccttctataggtgtccagtacccttggtatcgaagcaccataactattaatacctaaagctttcctccaataataatttagtctgtgtccctgtttttctctaaaatgaatgttgccatgaacatcactgtgcacatatatctttgggaacttatatctacatgtgtctgtaggacagagttctagaggtgggatttctgggcaaattatatacatgttttaatttttgacaggtactgccaaattaccttctagaaatgccttacacactagagttttttcccccatcttctccccatactctcaccaacactgagatagtcagtcactttaaatgtttg

SEQ ID NO: 116618 - DNA, 410 bp, Homo sapiens
cctcctgggttcaagcgattctcctgcctcagcctcctgaatagctggaactacaggcgcgcaccaccatgcccagctaatttttgtatttttagtagagacggggtttcaccatgttggccaggatggtcttgatctcttgaccttgtgatccgcctgcctcagcctcccaaaatgaatgttgccatgaacatcactgtgcacatatatctttgggaacttatatctacatgtgtctgtaggacagagttctagaggtgggatttctgggcaaattatatacatgttttaatttttgacaggtactgccaaattaccttctagaaatgccttacacactagagttttttcccccatcttctccccatactctcaccaacactgagatagtcagtcactttaaatgtttg

SEQ ID NO: 116619 - DNA, 672 bp, Homo sapiens
ccaactccacccctctcacgtacaggaataaatcacctcccaccaggccacacctgcaacatttggaattacaatttcccatgtgttttggtagagacacacagccaaaccatattattctgaccctgatcccccgaatatcatatccttctcagcgagtaaaatacaatcttgccttttcaaaagttgccaaaagccttaactcattccagcgttaacacaaatgtaaaaggttcaacatctcatctgagaaaagtctacagtcccttttgcctatgagtccctgaatttcaaagggaggtctttttttcaaggtacgatgatggtacaggcattgggtaaattttctcaatccaaagggaagatatttgtcaggaaagtaacacaaatgggatcacaggcccagtacaagtccaaaaccaagcaggacagtatctattcaatcttacagctccagaatcatcacgagaactcaccatcatgaggaaagcattaaggagacggtgtttaaccatttgtgagggatcctccatgattaaatcatcttccacctggccccacttttaacgtttccaattacaattccaaatgagtttctgtagggacacacagccaaatcttattctgtccctgcctcccccaatctcatgtacttctcactttgcaaaatac

SEQ ID NO: 116620 - DNA, 185 bp, Homo sapiens
ccccgaggttctgatgaagggatatcctgcatgatcgagggtccctgtggttctgatgaggggagatcatcctgcatggtggagggtccccgaggttctgatgaggggagaccactccatatggtggagggtctctgcagttctgataatgggagatcatcctgcatggtagaaggtccctgagg

SEQ ID NO: 116621 - DNA, 564 bp, Homo sapiens
gaccttgtctggcagtctcctttaatttattttttattatttttttctttttgagatggagtcttgctttgttgcccaggctagagtgcagtggcatgatctcggctcactgcagcctccacttcccaggttccagcgattctcctgcctcagcctcccaggtagctgggatcacaggcaagtgccaccacgcccagctaatttttgtatttttaatagagacatggttttaccatgttggccaggctggtctcgaactcctgacctcaggtgatccacccatctcagcctcccaaaatgctggaattacaggtgtgagccaccgcacctggcctattttttttcagcaaattctttgtttttctctctgttcccaaatgcagggtactgagaccacagatgtattctgtttcctgttgaaaaaatgtttctcacttagctgggtgtggtagcatgcactgcagtcccacgggaggctgaggcgagaggattgcttgagcccaggagttcgataatcatgccattgcactctggtctgggtaacagagcgagaaactgtctctt

SEQ ID NO: 116622 - DNA, 668 bp, Homo sapiens
ttacaccagatgctcccacccttaagaaatctcattatgtatatgcaaatattccaaaatctgaaaaaacacaaaatcctaaatacttttggtctcaaatattttggataagggatactcaacctgtattgggaatgtttcccagcagccacttccctccctcttctactgtgaactagctatatagttttcatcccaaattagtctcagtaatcagtttaatcccattttacttgccacactgatttgttaaaggacaggccacagcaaacaccgatatttttgtttcctgacaggagtgaaggctagaggaggaaggttaaatctcttctaaggaaggtgtgatgtgcgaatacaaactcttaacttctgctgccacttaataactctgagggaagccacctgaagagaagtcaacagtgcataaaggttgcgcctaaacagctgcagtgaaatgaagctggagccacgttcaaattacaccctgaacacatgcccccaaaaactccttttaaattttgtgaaccagccaaattcctttatctcctctttgacctataaaccacagcattctaactgatagagaactccaaaggctgattcaacctcttttcccaagtcatctcccaccacttcataaaatgttgaagtggtgggagcatctggtg

SEQ ID NO: 116623 - DNA, 342 bp, Homo sapiens
accaggagttggaaaccagcctgggcaacatagtgagatcctctccctgccaaaaagaaagagagagagacagggtctcactctgtcacccaggctggagtgcagtggcacaaccacagttcactgtagccttgacctcccaggctcaagcaatccccctgccccagcctccctggtagctgaaactactgggtgtggtgcctgtggtcccagccactcctgagactgaggcgccatcagtcacttgagcccaggatgtccaggctgcagtgagccaagttcatgccattgtactttagcctgggtgacagagtaacaccctgtctcaaaaaaatatttaaa

SEQ ID NO: 116624 - DNA, 320 bp, Homo sapiens
gtcttggccatatgctacactaagctaaacagaatgttatttgcaaacattctggatttaaaattgatcaagttggctgtaacccaggagtagggtgataaaaagcgtgagttagaatagtagcagcaggaaaataaaaagcaagaatggaaaagttctgatcaaggctgagagcaattatttatagcttttcgaaaatagacaaactcacaaaacactatgcaagatacctgtcagctcttggccatatgctacactaagctaaacagaatgttatttgcaaacattcgggatttaaaattgatcaagtgggctgtaac

SEQ ID NO: 116625 - DNA, 571 bp, Homo sapiens
tgcttgcactgggggaaagggagagtatcatggttacagctggatcacctaaggcagagagggaaggaaccaacaggtatatgaagaagactgtatttcctcctcaggaagaaaaaatcacctataacactctcaaaaccatttctatcttacaccttcagagaagccagccttcattaaagactgaatgaagtaaaataaagacttaacacagactggcaaattggataaagagtcaagaccaatcagtgtgttttattcaggagacccatctcacgtgcagagacacacataggctcaaaataaagggatggaggaagatctaccaagcaaatggaaaacaaaaaaaggcagaggttgcgatcctagtctctgataaaacagactttaaaccaacaaagatcaaaagagacaaagaaggccattacataatggtaaagggatcaattcaacaagaagagctaactatcctaagtatatatgcacccattacaggagcacccagatttataaagcaagtccttagagaccaacaaagagacttagactcccacacaataataatgggaga

SEQ ID NO: 116626 - DNA, 464 bp, Homo sapiens
tctcccacccacactgtcccatgcctctaggctccagccatactgagctctttcactttcactaccacgcctgattctccctctctctgggcctttgtccgtggggttttctctgcctgaaacactgtcttctcttattttaactatttttctactctgcatccttcaggtctcaggtaggagtcacttcttccaagaagctttcttaacccttcatgcttctctgacaggccttttctaagcactcggtgctagtcttgcactgtttccaccacagcacttagcatattgtatggcaaatgcatctgaattttttctactgatccatgatctctataattcagtaactgtcatgttcatcacctcgtgtccccagagcctttcatagattgaggagtaggtgcttggtaccacactactgaatgaatgagtctatcttcaaagtcaactccaatagaaaggag

SEQ ID NO: 116627 - DNA, 598 bp, Homo sapiens
aagggacacccgacttgggtcctcttgcacctgcccacacacaaggacttcaatttgtgctgtcagtggctcttttctggactgtgggcaccaccacagctttgtccctgctgtactgtgtatccccttgcctttctggcttgtggctctgaacaaagcaggtcacccatcccaatttctagagcccccccaccgccacccccaccctcatggagcctctatcgtgcaagaagggaggtggggacctggcaagtcatccaggacaggcatttgaagagcaggagccaaaatctgagactcgggcaagtggttcctaaacccagctcatcagcaccattaaggggagcaaaaaaccagaccgggccaagcccccagcccagaagatcccgactcctgctgcccacagacaggcacatgagcagctttgctgagactcctttccatcccagacccctgcccttggggcctgccagggacctctgccctcatggttggatctggacactcccgggatgctgcggcttctctacctgctgcaactgcctcacctcacgggagggtctctctacgcaacttctgagtcgaggtgcataagcag

SEQ ID NO: 116628 - DNA, 438 bp, Homo sapiens
cccccagcagtaaaacaatcccaatgacgatacttcccacttgagtgtgtgaccctcctaacactcactccgcctctctgttttcgttttgtttttaaagatcccttttagaaaatatcacacgattttgttttacagttgagtaatgcgtaaaaaagacatcaagtttttaaatttctatgcaaatatttgtaatgttaatattttaatagaatgtctgcagtgtcttcaacctcttcttttcttaggcactttgcattcagcgttcaaacatgccgacttcctcctgcggaaacaccaaacgaaagggaacttctcccacctcagcctccgtccagtaacaaccgggctatcctttccctccggttcaccgccaaacttcttgaaagattctcatctatactttgtttaaacaaggccaacttaccttttcacacg

SEQ ID NO: 116629 - DNA, 675 bp, Homo sapiens
gccttcctccggctcagccgccgcgccgccgggctgctccttcttcctcctcgggcgcccgcggcgatgttcaaccgcgccgtgagccggctgagcaggaagcggccgccgtcagacatccacgacagcgatggcagttccagcagcagccaccagagcctcaagagcacagccaaatgggcggcatccctggagaatctgctggaagacccagaaggcgtgaaaagatttagggaatttttaaaaaaggaattcagtgaagaaaatgttctgtttgggctagcatgtgaagattttaagaaaatgcaagataagacgcagatgcaggaaaaggcacaaggagatctacatgacctttctgtccagcaaggcctcatcacaggtcaacgtggaggggcagtctcggctcaacgagaagatcctggaagaaccgaccctctgatgttccagaaactccaggaccagatctttaatctcatgaagtacgacagctacagccgcgttcttaaagtctgacttgtgtttaaaacacaagcgaaccgaggaagaggaagacagattgtgcctgatgctcaaactgcagctaaaagagcttccagaatttataacacatgagcccccaaaaagccgggactgggcagctttaagaagcaaaggaatgtcctctcaggaccg

SEQ ID NO: 116630 - DNA, 191 bp, Homo sapiens
ggtggtgggcagggtcagtgacccctaccctcacagaaccagttgcagctgtggggatgggggaaggccaaaggccgaggtgattgaaagccagagtaaggccaacccagccttgggggttcaggaagccttggggctctggcccagatgcctgtctgtctcccctacctgccccctgttccgatcctggg

SEQ ID NO: 116631 - DNA, 281 bp, Homo sapiens
tacatccacgctttccttccactcccactcaggctgccccgctccagacctcatccctgcactgcgggccccgctccctccagtctctgcgcggcagggaagaggtcctaaaaagtggtcattccaaccgggcgcggtggctcacgcctgtaatcccagcactttgggaggccgaggcagggatcacctgaggtcaggagtttgagactagcctgaccaacatggtgaaaccccaactctactaaaaatacaaaaattagccgggcgtgatggcaggcgcc

SEQ ID NO: 116632 - DNA, 315 bp, Homo sapiens
aaacatggaagacataatgtaaatgagttgccttagttaatttgatggataaaattcaagccaagtcccttctctctgcagagcattcattgcccttaccttgactatgaaggagtgaagatggagtagtgtaatggttaaacacacaagctcgaaagtcagattgcctgaggtcaaacctataccatttatcttgtatgacctcagccaattaacccccctttctcagttctccattggtaagatggggataacagtatctactttatagagttgtaaagattaaatgagataatggtacatagtaaacactca

SEQ ID NO: 116633 - DNA, 604 bp, Homo sapiens
gctgtaagatatgacttgctcctccttgccttccatcctgtttgtgaggcttccctggtcacatggaactttgcttgttgcatgccttctaaacagcctaccctgccaagtgccatgattactgtgaccacatcttcagaaccagaaaacaggatacctggccctaagcatgcactcatggagcagaagagttttaaatctggaatgccacagaagacagaagataacatgcttactacacttgtaaagcaacatgcagccagccatttccagtgcaaattatctcattgcatagtgtgacaactaaaggtcataaccataatacaaatcgtgtttttcttgtaatctatccttgggttaaatgtgaactccaggagagcaaagactttgtgggtatccccagcactgacatctgtgaccagcatatgataaactgtagttgtacataggagagaatcaataactatttgtagaactgaatatattttattgcaacccttttcataatgttaagataatagacatcatagtgtaactaacagtgccttagaagtggatatcagagacttggctaccaccaacaagcaactgtgaatgagtaact

SEQ ID NO: 116634 - DNA, 328 bp, Homo sapiens
catgttacactcatgtggcttcggaagctgcattctggtcacagctgagcgtctttcgtggtgcttgcctcatgggccagctgcttcatcagctcaccctgtgtttcccattttgaataatgccgtaattcataggttgaattgatgtaattcactgttgcaggcaccagagttgtacagattgttgacaagtgtcctgtccttgtgagttcgaccttatcttagaagcacaattattttatcgtcagaggtcaggctgtgtagaagaaatagcagggctttggagctggacagattgaagtcacccaacctctggtacatctgtgtc

SEQ ID NO: 116635 - DNA, 445 bp, Homo sapiens
cctcccttttgccttgatttaatgaaaggctgacataactaggtttgattttagtataagaaaaagaatctcctgaagtcacaaaagggaggttaaacataagagacaactatccagatggtttatcctcgcaggtctaataattctaactcatccttaaaacattgctaacctgattatcatggctgatgtaagcaaagtacttaatggagttgtgtttttgcagagaagcaaaatgttatcaacaagtgtcatttgaggtccttttcccaaaaacaccagagtatgaggttataggctgcctggagggcggagatattttatcacagagttaagggtggagaaatggggagaagaaattgataggttttccaaaccttgctttgccttctggtgtcagatgataattgtttttgcaaaatgctgcagggtgagagagagtgag

SEQ ID NO: 116636 - DNA, 332 bp, Homo sapiens
gagttaaaggggaagaaccccttataaaaccatcagatctcatgagaactcgataacacgagaacagcatgggggaaactgcccccgtgattcaattacctccgcctggtctctcccttgacacgtagggattacaatttttaagatgagatttgggtagggacacgaagcctaaccatatcaatggcacatgactatataaggaaacagcaagtcaaaataacaacaggtgacttttcatcagaaaccatggcagccagaagaaaatgaaatgacatatttaaaatgataaaaaaaccacaattatcaaattagaatcctatatacaattt

SEQ ID NO: 116637 - DNA, 523 bp, Homo sapiens
gtaactggggaagggtactcaaagcagaggtaacagtgtctgcaaaggccccgaggtgaagatgtgcctggattccagggacagctatgaggccagtgtggaagaagcacggagggtgaagggaacaaccagtaggagatgagtcaaagaaataactgaggatcagacatgtaggcagggaatagactttagattttattccaaattatacgggaagcatttggaggattctgaatacagaaatgacttgatctttttaaaatggccactctggctgttgggtagaaaacagactatgggagtgaatacttggaagtaagaagatcagccaggaggctgttccaaccatccaggcagggaatgatggcagtttacatcagggtggtgatggccgaggtggtgagaaacagcaagactctgtatcttctgaaggtagagccagaaggctttgctatggactgatgggtgtcatttaatggtacaagaatactgaaagaaatgcatgcttgtggggatggagaat

SEQ ID NO: 116638 - DNA, 161 bp, Homo sapiens
ggacacccgacggggtggggtgaggttactttaattatgatgatagaggcaagtctctctgaggaagtaacatttaagcagagactaaatagaacagtttagggatgttcttaactacatgcagggatgtagttagaattaaaatatgtgtagccagtttt

SEQ ID NO: 116639 - DNA, 277 bp, Homo sapiens
acggtcctttctctctttctaaaggtctagtttctgcccgtcgggggcatcacggcctccatcccaggaagctagaggcaagactcacactcttcagaaaggagcggctcattaacccccaccttcctccagctttgctggaacagcaccaaggacaattcccttcccccaggtcaggaggaagggtgttcatcctcaccttggggagaacctcagagcagcccactgcaaggccgacctcgggagaggaacaaggcctcagaatcccaagagtcct

SEQ ID NO: 116640 - DNA, 212 bp, Homo sapiens
aagttcttcaaaaggtggactccatctgtttgctggtgggaagctggggagaccctgtctgacagcttctgtttgctctgtgatgtagaaggccaggcctccactgagagtggagagtcagaagttcaagggaagggtaagaatctgaactagtgattgagtagtgagtagtatgtgctaactagagaatgtggttatgatttatgggtggt

SEQ ID NO: 116641 - DNA, 327 bp, Homo sapiens
gaatcacttcactgggaggactaacctcacccagacaagttgccatctccttttttatttgttctaatgcctaacttttatcccactgcatgacactgaacttcctggctcttatagtaaagaaaaagataaaacgaggccgaagcaggcacaaggtcaggagatagagaccattctggctaacacggtgaaactccatctctactaaaaaaaatacaaaaaattagccaggcgtggtggcgggcgcctgtagtcccagctactccggaggctgaggcagggaaatggcatgaaccccggaggcggagcttgcagtgagccgagatc

SEQ ID NO: 116642 - DNA, 1438 bp, Homo sapiens
  misc_feature (1160)..(1160): n is a, c, g, or t
cttattttcaatagttttcctctgatgttctgctgggtatgtaggattttacctcgatttttcttttttcgttcatgcaagtgtcccctttgtttttcattataattatcattataatgataattgaaaatgaaacttccccatctatttctaattatttaatggtcacagagctatgtttattactgaagctaaatgtaacaactatgaaatgtataattgccactctgaagtctaaacttgcaaatgaaatttgatatctgagaagatatagcaaaccaaaaattgctaactgtagaattaacattttatagctaagacagactgtaagtggtatagtttctgtatagtttcttttttgtttaaaaaaaatgtacttactcatttggaaaaaatttttaaaattcacattaaaaagttcttataaaatacccttcataaataaccactgttaaaattttgctatgtatcattctcttatgtttttctatgcatttaaattcttatcataccaagaaggcagtgattaagagctcagtttctggagtctgacaggcctgatgatgaatcacttaatacatgtgtggctttcaaaaagttacttcacctctataaccttaattatctcatctgtaaaatgaaaaataatgatactatttgcttcatagggttgtcttaagaatttaagttaaaaatgtatataaatcacagcacaatgattaaaatataagtactcattaaacagtagccattattattaaattgtctatagcttttaacctatcttgcttacttagtaatatgagcatctttctatgtcatgaacatctttatatgttgtaaattaccttctacaatattacttggatttttgatattctaattgatagatgtgacatagttttttcaccaacccgtattttggatatttttgttgtgtcttattttctagttttaaaaacaatgctgtagatgatccttcagaagttaaaggttttggagtcatctcttaatcaaactcagtaacttctgttatttctacttttattgaaagtatatgcagaacttttaggtctaagatttctatattttatattgacagcaggaatagatcatttttatgtcttcatgagtttaatgatatattggaagaagcagtntttagcatttgcatttgactgatttactggcagacatttaaaaactataaacccaaagtcgtctgaaaagctaacaagcttgagtgtgtaaaaatattatactgcgaggcacagcatattgagtaccagccctaggctaccatattataactttatgagggctgggcacagtggctcatgcctataatcccagcactttgggaggccaaggagggaggatcactgaagcccaggagttcaggaccagcctgggcaacatagtgagaccctgtctctac

SEQ ID NO: 116643 - DNA, 458 bp, Homo sapiens
agagagactctgcctctaaaaaaaagaaaggcacagggcaaacagcgaaggtagcagttagcaatcagtaatctgccatgtcgccgtgtgaagtgataagcaggagtgagtgggtgatgtttgctgacactccacgtctttcaatgcccttcctctgcctcctgagcactgctgtagagtatctctcatggactcttgtgatggtctgcttggtctgctctcttccctccaattcatctgctatcccacaactacagttatcttttccgaacatggatctgatcaaggcactctccagcctcacagcctctttgagtccaggcctgcccgctttgctggccatcctgttggccgctcctccccttggcaccatcactgcccccttcactctgccctgcaggctttagacttcacagccatgcatgtgcacatcttgttctctcccacagaaatgtcca

SEQ ID NO: 116644 - DNA, 515 bp, Homo sapiens
ggaagctcctgcccctcctaaagctgaagccaaagcgaaggctttaaaggccaagaaggcagtgttgaacggtgtccacagccacaaaaaaaagatccacacgtcacccaccttccggcggcccaagacactgcgactccggagacagcccgaatatcctcggaagagcactcccaggaaaaacaagcttgaccactatgctatcatcaagtttccgctgaccactgagtctgccatgaagaagatagaagacaacaacacacttgtgttcattgtggttgttaaagccaacaagcaccagattaaacaggctgtgaagtagctctatgacattgatgtggccaaggtcaacaccctgattcggcctgatggagagaagaaggcatatgttcgactggctcctgattacgatgctttggatgttgtcaacaaaattgggatcatctaaactgagtccagatgcctaattctaaatatacatatatatatcttttcaccataaaaaaaaaaaagaa

SEQ ID NO: 116645 - DNA, 561 bp, Homo sapiens
aattcgggggcggcgtcgaccaaacaccacacatcgataaggatttggggacattggcttgtgtgtgtcctgccgagagtgtagatggtcacccatttggggaatgaaatggccttccctggggagatcagagtcatgcaggatacatgactggcagttccgttctaggcgcttccttctccacccgcaaggacacgtgaagttgttgactgtgacatggttcacaaagccaggggcagctcaaatgacggggttagttgtacagtggaaggtaacgcaagattaaatgagttaaccagagctgtgtgtcttgggccagataaatcctcaaagcctaacattaaagaagcaagttgctagaaaataggccccattttgacactgaagaggttttttgaaatgtggaaggcatgttacgttgttgatgagcgtgcgtaagcaggaaaacctcagcagcccctgggaggcgccctcagcccaagggacagccctcccaggcaggtgcaggggcagacgatgcttttactgtgtctaaaattatgcttctctatgaaaaaaaaa

SEQ ID NO: 116646 - DNA, 350 bp, Homo sapiens
ctcaaattgggatcctatgatgtggcttgggagtcctagggaatgccatggaatattaaaatgacacattttcctgagcagcaattttaccccaaaatttgagagtaaataataattttctattcaaacaaagaatgaagcagaataaaaagttctcatatatttagacagtaaaagacaagctttaacagaaattaagtacttgcaagaagccactttaaactactccttgactcgccagagggtatatactttcccttaccattagaagaagtagaattatttgagaagcactatgtccaggtaaacttctgaactgtgaggggaacagaggagattagaaataaaga

SEQ ID NO: 116647 - DNA, 599 bp, Homo sapiens
cacatgttccagaggagaaaaagaggaggaatggcaaaggctgattgactttgtcagctacttactttaaaaaacatttgagaaagccagaaagcagaggggaggaagctccaccgtcatgagaatgggaagcagaggcagcggcagcgtgcacagacatcctttgaaggtttgttataaacacagaaactgatgtctgggaaaaggctggagtgcaatggcgcgatctcggctcaccgcaacctccgccacccaggttcaagcagttctcctgcctttgtctcccgagtagctgggattacaggcatgcaccaccacgcccggctaattttgtatttttagtagagacagggtttctccatgttaaggctgttttcgaactcctgacctcaggtgatccgcccgcctcggcctcccaaagtgctgggattacaagcgtgagccactgtgcccagcccaagctgtacttttatttaagtataatttagttagatatgtgaactcactgaaaatgtatacacaattttctgtgtatgtataaaatttgatatttaaatgtatttatggcaagagtatctgtaacttttatgaacatatca

SEQ ID NO: 116648 - DNA, 523 bp, Homo sapiens
tggggtccctgatatagagcagaacacacataggagacgcctgtccatctgtctgcctgtctgtctctctgtccacctagtcctatgtccctgagtgggaaagatggccaggaggagctgacgatctgagcagagtctttggctgcacccatgctagggagacccaggcccatgacaaggtccaggagaccaccctggacctgaggtggtgggtatcggggccaggagagggagtggggatggcttccagcagcccctcccactgagcggcccagctcggagctgtgctggcattgctggggtgaagggtcatttgtttctctctaaattgctagaagaagagttgggatattccccttctctttcatcctgacttaacattttaaataaatgtaggtctgggtgtggtggctcacgcctgtaatcccagcactttgggagactgaggtgagcagatcgcttgagctcaggagtctgagaccagcctgggcaacatggcaagaccctgtctcaattaaaaaac

SEQ ID NO: 116649 - DNA, 401 bp, Homo sapiens
cctggtggcaggtggtgatttggtgctctcattgtaaccaatgtctgtgttcgacatgtcttcttgctaggcctcactgttctggactaataggaataatgttgcattgccattttttttttaatcctgcaattctagttttttattatactgattgtgacttgccctccccctcactccctggctttacccacattttcagggtacactgtcctatagtgtggaaatgaggcttatgttgctgtggagaggggaggcacccaggctgcagatgggacaaggagtgacagagcaagtcgggtgtcccggctgcggcacggctgtggggagagaactgtctggagaggagggccagttttcctcaccctcttccccgccatctcctgtggcagcacatggct

SEQ ID NO: 116650 - DNA, 377 bp, Homo sapiens
ctgagtttttgatggccttttaaacaagactccagtatgtgaaggttaattgctgtgctccacagatcttgtctattggcccctgtagaaagttaacctttgttgttttccttttataatttgcttattgcacaattgctttagggtaagtgaattatattaagatgccttgaaattatagcactccttgattaagaagctaaaatgtttctctcatttactccttaaacaaaagacttaaattagtttgggtcattattacttttattttgcagcatttggtttgttattagtgtaagagcaagtataggatatggagaggcccctggcttcatgagaacaaaggcaggcccaggttataattacagctttctcct

SEQ ID NO: 116651 - DNA, 837 bp, Homo sapiens
caaaaaacaaaaaagatattcactgtctatgcatcccaggatctccagaacaacaattaaaataaataaataaaaaagatggctgggggcagtggctcatgtctgtaatcccagcactttgagaggctgaggtgggtggatcacctgaggtcaggagttcgagaccagtctgactaacatggtaaaacctcatctctactgaatataaaaaattagccgggcatgatggtgcatgcctgtagttccaggtacctgggaggctgaggcaggagaatcatttgaacctgggaggtggaggttgcagtgatccaagattgtgtcattgcactgcagcctggtcaacaagagcaaaactctgtctcaaaaaaaaataagtaaataaaattaaaaataaagatattcactgaacctgttactatgatatatttaagcaagacacggtgaccctaaaaattagagatcattgaagaccaaagtaacaacatgtggtcattatttctcaaattgaagtatataaaatatataaaataagtaaatttaattgcatgcttaggtaagaaaatattgataaaaatgattgaatattttatcttatttcataattctaagcagggctttagcacaatatgaaaactagattattcatgtaatccaaataaaagacaatttttattctaattttaactcagaaattattttgcttatttaacaattttactgaaaggtaaatgagataaataggacagattataattacctaacattgctatggtaacttatgtacaaatagctgttcgtcaccgaaagtcaaaaaagtaaccagcgctgcaacttaag

SEQ ID NO: 116652 - DNA, 298 bp, Homo sapiens
tgcatgtcaaactgactgtggaagcaaaacaatcaagaaatatatttcttgagtattatttatttatttatttattttattattattatactttaagttttagggtacatgtgcacaatgtgcgggtttgttaaaatgtaactgtcgataatcatggcaaatattttgatatataaaaggtgattaacatgaaaaaagcctctgatgtttcaaatattttggttagatttgttttatgggaatctaattacacattaggtatttggagtgtaatgtatacgttttttgcataagtgaa

SEQ ID NO: 116653 - DNA, 212 bp, Homo sapiens
caatgtcttcctcttacacaaacacacattcaccctgtctctcactcacatacctactaaatagcaaatacttcaggctcacttcatctaacctgtgggtgtctgttagtcaggggaggcaactgctgttgcaaataattgccataatgtaaagcctcaagcagaatcaaatttgatttctcactttcctaacagtccagagcggtgtgcca

SEQ ID NO: 116654 - DNA, 295 bp, Homo sapiens
tagaattccagtcgataactactagatataaataacagttcaggacaggaaccactgaaaataaagtaataaatttaaattactctgattattagtctcattaaatggtcatatatgctattcttttaatgttttgtacactggttgagatagcttggtttctcttcatggttactttttgtttttaaatttgtggacagatattctggtaaatttctcacaaaaggcctggtttcttacatttttcagtgctttatagaaagtgccaaggcctatatgtccagtctattctctc

SEQ ID NO: 116655 - DNA, 202 bp, Homo sapiens
aggaggagttttaaaaaggaagcagcagagtcctgggtaatacctcagcttagacatttagatactgaaaagatgagctaacgaaagagagactgatctgcaacataggtaaggatcctgtcttattcaccttcatatctgaggcacatcaatggtactcaacagttgtttaatggctaaaagaaggaacagggaaatagga

SEQ ID NO: 116656 - DNA, 398 bp, Homo sapiens
gtgttggtggctggtgagcctgggctggctgtggggacccttcgcttacaggcaaggtgtgccctgggcagtgggcagagatctcaagagaagctgaaatgggggcagagcagcctgactcaaaggtcctgggggaagggggatggagaatctggttgcctgatgggaagtagccaattaggagggtcctgaggatggacgcagagggtgggaggtggagcctgcagagattccccagccacagttttcaaaaccagctgttgtctcgcaaggcactggcaggcaggcgcagggctctgcaggtgtgcaagaggttccaggcagctgctgggctcaccctcctaggaagacatttgtcccaccatcccatgctgaaaatgacccaaggcagggacccc

SEQ ID NO: 116657 - DNA, 583 bp, Homo sapiens
tgtgtcttcacatggtagacataaagagaatgagagagctgtctggggtcccttttaaaagcacactaatcccgttcatggggactccaccctcatgaccgcattacttcccaaagaaccccacctccctatattatcacattggggattaggatttcaacataagaatttggggaaacaggaatattcagtccattgcatatgcataaggacatctgaaaagtggactagctgctggatcatgtggtaggtataggttgaacattttcagaagctgcccaactgtcttccagactggctctaccctgtcactttaccaccagcagtgaaggagaattctagtccttcatatccttgccaagaccatgtggtcagcctctagacaaggtagagccgagctcggctctaccttgtctctcggctctaccttgtctctcggctctaccttgtctctcggctctaccttgtatctcggctctaccttgtctctcggatctaccttgtctctcggctctaccttgtctggggttaatcgtgtgaacgcggtggctggcacgaaattgacaagccgagacaggtagag

SEQ ID NO: 116658 - DNA, 380 bp, Homo sapiens
tgggcctgtgggcccatttgtgttatttttctgggaggtttcttccctttggactgagaaagcttacacaatgcctgtaccatcattgtaccttgaaagaaaagaactccgttttaaattcagggactcataggcagaagggactgtggccttatctcaaatgagactgaagtttttacatttggaatgagttaagacttttgcaaacttttgaagagttatgattgtattttgctctgtgataaagacatgagattgtggaatatcagggtcagaattatatggtttgcctgtgtgtccctatgaaactcatgtggaattgtaatccctaatgttgaagcaggtgacttaattatggacaggagtttggtggtggtgga

SEQ ID NO: 116659 - DNA, 250 bp, Homo sapiens
ctgtaatgctagctactcgggaggctgaggcaaaagaatcacttgaacctgggaggcggaggtttctatgagctgagatcgcgccactgtactctagcctggatgacagagcaagactctgtctcaaaaaaaaaaaaaaaaagaaggaaaatcaagaatatattggtcttttggtgaactagattagtgataatttaataatcatgaagttgtgaagccaggggcttttttttttaaactcttaattaat

SEQ ID NO: 116660 - DNA, 229 bp, Homo sapiens
aaaaaaaaaaaaaaaaaaaaaggcgagggtgtggggagagccttcttacaattagattggaaagtaaagaataagagcagatcactgaacaatagacactagatatgggtgttagctaaagagttaggactaaaggaattagaaaaaggagttcattgaaatagataaaagaagagagagctatatatttttttctttttctgatggagaaatcagaaaagttcagtgg

SEQ ID NO: 116661 - DNA, 301 bp, Homo sapiens
tgctgggattacaggcgtaagccaccgtgcccggcccttttttcctttttagtttatttttttcttttttgagacagagtttcgctcttattgcccaggctggagtgcaatggtgcgatcttggctcaccgcaacctctgcctcctgagttgaagcgatactcctacctcagcctcccaagtagctgaaattagttatcatttttgtatttgattagttcactcattaaacagatatatttgagtgtgttcttggccaaaggcaacaaacagatgagttagaaagaggcctggcctgagag

SEQ ID NO: 116662 - DNA, 361 bp, Homo sapiens
taaaaacctgtcacacgtgtacttaattttatacaataagcaacaaggaatgtttaatgtatattgtataaaaaatttttcaggccgggagtggtggctcacacctgtaatcctagcacattgggaggcccaggcgggcggactgcctgaggttgtgagatcgagaccagcctggccaacatggcaaaacgctgcctccactagaaatacaactctctagtggcaccaagcctatgggatgtgccagtgtggtcactgccctcccaattctcacttggaggggtgggaggtggtcagttatgtgtttattagctggctactcactgtctgattctactttgaactatattttcttttttga

SEQ ID NO: 116663 - DNA, 853 bp, Homo sapiens
gagggcagagcccccatgacctaaacatctcccattgggcccatctcccatcactgttgcattggagattaagtttccaatacatgaattttgggtgacacattcaaatgatagtatctgggccccacctcagatccacagaatttgatttcctggagctgggacccagaaattttcatttcaaacaagtttcccaggagatttttatgcacactaatgtttgaagaaaaatacatccaaaatgtaagtgcaaatcttagctattaggacatatgaatttaatatttcaaatctctttttccactggggataattttagaagcgatatttcattttaaaaacattgcttgataggaaaaattacaaagatgttagaacatgggtcgctgcataagtggtatttttgtggggagaaaagttttcaagtgaaagcagttttatatttgtgattaaattatacatcagatcaatgattggaatgggtttaggcagagtatttctcctttggggaagaatgaaagaatcatttagcattataattttcactcctctacaaaaaaaaaaatttaaattgaaatagaaaaatatttgattaagaatttatagatccctcctttcccaccaaaggatcctatttatagtattctttgacatataatcttcattgttcatatatataatcttttcagattttgtttaaaatctgaataaaactctcaagtgacttgaaattttatttcacattttaaatctagtgtttaatgctgtgctttctgctgtttaactacgagcaagtctggtaacagacttagggcctccagccataagggccagagaagagggaaatctcaag

SEQ ID NO: 116664 - DNA, 335 bp, Homo sapiens
ccaaagcgtggggagaagtatatctgaagatatctattgcatacatatgcacgagcagagaaaattgcactccgaaaaatctcagtgctgtttgttaggaaaggcaacattttcattttaagtactcagtagcaattgatgaaggtcccccccgacctccactcagagtgagttttcattttttgttatttccacagctgtacgtattttattccagcagatgcaaatagcacttccaaattggtcacaattaaagtgagtgcgaagtgtgagggagggtgaaggcttgaaaacaacaatcgctccctagagctgagcgatcacaaagctcatct

SEQ ID NO: 116665 - DNA, 271 bp, Homo sapiens
cctcagcctcccaaactgctgggattagaagtgtgaggcaccacactgggcccacgatgtttttagtggacaagtacatctctccctaaatacttcagcatgtatttcattaactagtgttcaatatttatttagtttcctttctgctgaagtaaaatttatatacactgaaattttcaaatcttaaattagcatcccctgagtttgacaaactgtattattaaaccaaaactcatcaagatatagaaaactggctgggcccagtggctca

SEQ ID NO: 116666 - DNA, 365 bp, Homo sapiens
aaatgctcattgctgctgagcatgcagagagaagacaggccccccttttacttctgctgggagcactaatggttttactgtgtggaggaagaaatttgataacatatagtaacagatttaacaatatttatgccctcggactctgtcatccgacttctaaaatccttctaaataaataacccaataaattttaaaagtctaggttctgggatatttgttgcagcattatttaccctatcaaagagttggaaacaacctaaatgaaccaaaataagtagtttactaaataattatggtcaaccatcccatacaatgtttggcagtcattaaaaaccgaactttaaagaatagacaactacatagtg

SEQ ID NO: 116667 - DNA, 417 bp, Homo sapiens
attctcaagggctgccacaaccaagtaccaaaagctgggtgacttgaaaccagagaaattgattgtcttgtggctctggtggccagcagtctgaaatggaggtgccagcagggccacactccctcctgcacttgtcggggagtcctgccttgcctcttcctagcttcctgtggtctcctggcagtcttcagtgtttcctggtttgcatacacatcagtccaatcttccatccaatccatggccttcttacctgtgtctctgtgactcggcgtgtcctctccttttttataaggacaccagtcattgacttaggccctccctactccaggatgacttcatcctaatcaacagcatctacaataaccctctttctttctttctttctttctttctttctttctttctttctttcttttt

SEQ ID NO: 116668 - DNA, 728 bp, Homo sapiens
ggtgacaggtggactgaggatagcaggcgcatgggcttggaggcgggacacgcgtcagtagcaggtggcggcggggctatggagctcaaggatggagcaaatgtcaacaggcacagatgatgggaggtttaactgacgctgctgcactggataccccaccccggtgccgggcacataggtgcagcctgagagtaagcagacctgggttggaaggtcccgcgattcaccaccgacaggatgggcggcttggcaacccccgacccctcgcaggcctgttcccttatccatgagatggaactcggacaaggtggccacaggaaggctttgcaaactgtgaagtgcagtgcctacgtgggcgtgccagtggcctcgccggagccggtagggaacactctgcagtccaggccaggccccggtaggacacccagctgtgcatcccgcccgtggccgcaaggcccgcaccttggccaacaggagcagggtgcggctggtgcgggcgtccgcgtggcgctcccgcaggtggaagagcttgggcgacatgatggcgggagagaagaagcgcaggcacaggaagctggtgacggcgatgaacggtacattctggaggggtgcggaagagcgcgggctggagtcccccagaccagggctcctgggcagccccctccccttaggctccgtccctgaccctcgccgggacaacagctccctgggtcctccccagcgctccc

SEQ ID NO: 116669 - DNA, 1888 bp, Homo sapiens
acaacatcagaaacattttacctagagtgaattctacatataatcattcagggggaaaaatgtgaaaccaagtaaggattataatacttagtttattcttctcctttggcaaactttataaaggctctcaaactttgctctgaaacttgattcaaaagttgaaagatccaagcctgagttatttttgcaactactctttttgcaacatcagggaatgtttctctgtttttaatagggaaatgttaaatttccctcttaatatttaattaattttaacagagcattaaaaaaggatcttaccgattccaaattggagattgcatctctgtgctcccacaaaacccctgtgttggtttctatcacaggacacattgctcttgtcttagtgtatcaatctgtgcccttgtttgtgccaagtaccagatgataaactcctcgaaagcaggaagagtgaggtgcctacctttatgtcctagtacccagcacagtgcttggcaggtagaagttattcactggatatgtttttgctgaatgaatacatcaatgaaaggagatgcagactttaaatctacggtataaaaagggttgtaaaatacagaagcaatacaaattaattagaaaataaagtgttgacacactggatcccatttaagtgtgcctatctccatttcatttttgaagttctttgggttttgcttgagatattcattcctcctttcccagaggttccctgctctccaagcaatctgagctggatcgggctgcgttggacaaggtgacttctaagctctattcgtacgttcattcagcaaatacttccaaagcgttttctccagacccccttgtgctactgaacggtgaacgctcatttgtaagaaacatgcatcagttacagcacttgaggatgtcactgtgcccattcaacaccacaaagagtaggaagccaggaagtaccaagtgaaagtgtggggctgtctttgcgtagtatcctgctttttatttcctgcaatgctgaacccctttctaatacattttctagcaaaatccatagttcccttctttgcattctcatgactcttcagtcatttgcaatcatggagcccttctcatgtgccagggactactctagtaagcattttatgtttttcattcgtttaatccttaaggccctttaattctacaaggtgagtgcagttaatatcgtgctttaaaaataaataaatgaagcacagagaggtgaagccacttgctcaagctgtcctgctggcaagtggcagagccaggatgtggagcctggcacctggctccagaatgcagtaccctgtgccccctctcttttgacagaggatgtgctttgttcaacttctaatctcaagcatctgccatgcatctgctatgaccctctcttggtggactctaatagaagaatggaagaagaagtcttcataattaagatattaaagaatggtttattctcctgctgttgtccctgccacattatttccattcttctttctgtagtctgtcctgacacccctatcttaattaagtctccccattatgttctctgagcatccagggcttctcttggtagcttttgttacaattaattactatatattaatttgtgcaacatctgcttgttgttgagtccgttttaaaccccaagaggacagatggggagcactggttgaccacgtagccagccctgcacttggctcagagtgggtactccgtaaagacttgtggaattaatgaatgagtcatcattgactttactatgtggccacatcatatcatttaagcacccacataattgcttatgaataacagctctctttcaaccacttagaggaaaagacacctgctctatgaggagaggaaatgc

SEQ ID NO: 116670 - DNA, 215 bp, Homo sapiens
gtcctggcatgatagggagagttcaaagcaagtatttataggttattagaattgattttcttagttgtgaaactgtcttgttccacagctcttggataagcacaagaatacagagagcatggtggagcttctggacttgtatcagatggaggatgaagcctacagcagccttgcagaagctacaaccgaactctatcagtatttactacagccat

SEQ ID NO: 116671 - DNA, 116 bp, Homo sapiens
cagaagtgtgcaggtgccagaggatgcaaatcatcttacacttttgcagcccaatgtcactggcaaaagaccttagaaatgagccataaccttcattttgtaggaaagaaaacaga

SEQ ID NO: 116672 - DNA, 334 bp, Homo sapiens
cggtgcagagagagtgagctgccgtgtggtgagagtgagctgccgtgtggtgagtgtgagctgccgtgtggtgagagtgagctgccgtgtggtgagtgtgagctgccgtgcggtgagtgtgagctgcggcgtggtgagagtgagcttactcaaacaatgctgagtgacagcgggcaggcacaaagactacaccctgcgtgactccacgcatccaagcacaaaactgggcaggaaagcggccactgctggggaagggaggagctaagaggggcgccgagggggctcatggggctgcttgatttgggtgtgattacacgagtatgtgcagcttgtg

SEQ ID NO: 116673 - DNA, 898 bp, Homo sapiens
ggaagagggcgagtgttttgtcatgatccattgatttgagggcttggggttttgctttgtcttcctctgaaccaaagcctagcacaaagtgaacccaagtgcggcaaggagctttaaattttttaaattttaagtgtgtttctggcagaatgagaggccttgaaaacctttctggttctcatcccgaagccatttgtttcagttgctcaggccttgggctcaggagaggcttaaaataactcgccttttctggagggtcctaagacatcaggaagcagtgctttagggtctgcttagcaaatggatgttccaccgtctcccagtgctccccagtcagggcagagatgtttggggccaaggagagacgagccaggctctcccgtctcatttgtccagggagaattcagttgagttgcagggagtttggtggcctcccctgggaactgatgaaggagagcagtgtttccagggatgtgagtgtggtggggagccctggctgcctagaaacaggcctctctttgcttcactgtgttcaccctcatctagggtggcagagctggattgcccagaaggattcgaacataaacttgatttttccccaagtgccactcagggatgagaaagcagtggctctgatttcagactatctgttttctttctgaaatccctttgcaaggctaggcagtattatccctatttacagaggaggaaactatgggtcagagaggtcaagtaacttgtctgaagtcacacagccaggaaatggttgagcagagatttgaacccagcatcatctgactccagaattccttccccttctcctcttccttcttttacttcttcagctgctcctccctctccttttttcttcatcacccttaataaatgtgagcacagg

SEQ ID NO: 116674 - DNA, 620 bp, Homo sapiens
cacgaggcttcgcagaccctccacaagggtccccacgacgctgggcgtctgaggcagcagcacacaccagcaaggggtcactgggcccaaggggtcgggggagggtccaccctgagcatcctcgctacagcttgacagagactgacttgacagagactgacacgagggggtgacccaccaggaggcctccaggaaccaaagggatccagcctcactcagcccctccttagactgcctgaggaagttccgcccaccagagtccaggccgtggcgtccccacccctgttccgtgggggagtctatccccgccgctgctccacgctgcccctccacatcgcggcttttgggatttggggattggttgtggatccccagctgctaatccaaagccgcttagagtcagcagacagcttaggcggggactcccgcgggcagggcggcaggaagccctcaccgcactgctctccaccccatgtgcatcttaagtccagaatccagcccctcgcagccccaggccaggctgtccggcaggggctccaccccaacccgctgagagtcccaagcagccaccagagcgacctcccccgtcagacggccgcccctacctccttgcctgccgg

SEQ ID NO: 116675 - DNA, 689 bp, Homo sapiens
aatggatacgtgaataaatgaacgaataaatttattttaagagttgattttggaaaaatggcaaactgcaattaatctcagtactttttgtggaaatacacagcttaataaaaagtagtttggatctcttcaaatgttttctctggtgttaaagcaatacaagatagatcatcattaaacaatgctgtttattccaggaagtaagtcttgatgcatctttaatatacaaaggatttaactcacgccattaattttctcgtttcaggctatgtgacccttttcttaactagatgaagaatttattttgcctgcaggcaaagagtaataatttgttggtaaggcttcaagtctggactatcatgaaattttctgtaaagtataaaaaacagaactaaatcacagagattagaactccttctagtgcttatcacggactgatgaaagctgtgataattaaagaactgagtgtggcataaaagtaggaagataaatggggcagaggggttggcacaaagtatgacagacccgagacaggcaatctgagttgggaagcccaatcttaaagcctgaaggagggcagtggtgaggggaagagctaggaagtgacagcactagggtagaaataaggcctatgaaaatgaatttcaggaccataacatatgaggatcagggatttaaataggcagggc

SEQ ID NO: 116676 - DNA, 589 bp, Homo sapiens
tcaaattttaaagcaactcttacaggcagctatacagctatttccttgtttttaaagatgaggaaaccaaggtacagacaagttcaataactagttccagttacacagtctgatttcatagtccatgcttttaactactgtaataaactgaatctttagccttcttgtttgagcttttgatatcactaatacctcttataagattacctcatttagaaaaattgccctgaatttgacatttgtttttgtttttagacagggtctcagagtcttactctgtcacccaggctggagtgcagtggcgatcatggctcactgcagcctcaacctccccaggctcaggtgattctgtcacctcagcaccctgagtagctgagactacacgtgcatgccaccacacctaactaatttttgtattttttgtagagatggggtcttgctgtgttgccctaggctggttttgaactcctgggtccaagcaatccacccgcctcagcctcccacagtgctgggattacagacgtaagccaccgtgcctgacgatatttgttacctatgttcatacacaaatccccttgaaacaccatag

SEQ ID NO: 116677 - DNA, 385 bp, Homo sapiens
acgctacccggcagctatatggctattgcccatcctgggcattaaactgggaatacaggaaaaagggaattatggaagaaattgttaactgtgacgcagatatcattagtcttcaggaagtggaaacagagcaatacttcactctctttctgccagcattgaaggagcgtggatatgatggatttttttctccaaagtcacgtgccaaaatcatgtctgagcaggagagaaagcatgtagatggttgtgcaatattcttcaaaacagaaaaatttacattggtgcagaagcatacagtggaatttaaccaagtggcgatggctaattcagctgttcaggcctgactggtcttcctgcacttcctagtaagatgacattataccgg

SEQ ID NO: 116678 - DNA, 3697 bp, Homo sapiens
tcaaattttaaagcaactcttacaggcagctatacagctatttccttgtttttaaagatgaggaaaccaaggtacagacaagttcaataactagttccagttacacagtctgatttcatagtccatgcttttaactactgtaataaactgaatctttagccttcttgtttgagcttttgatatcactaatacctcttataagattacctcatttagaaaaattgccctgaatttgacatttgtttttgtttttagacagggtctcagagtcttactctgtcacccaggctggagtgcagtggcgatcatggctcactgcagcctcaacctccccaggctcaggtgattctgtcacctcagcaccctgagtagctgagactacacgtgcatgccaccacacctaactaatttttgtattttttgtagagatggggtcttgctgtgttgccctaggctggttttgaactcctgggtccaagcaatccacccgcctcagcctcccacagtgctgggattacagacatttacattggtgcagaagcatacagtggaatttaaccaagtggcgatggctaattcagatggatccgaagctatgctgaacagagtgatgacaaaagataacattggtgtcgctgtggtattagaggtccacaaagaactatttggagcaggtatgaagcctattcatgctgcagacaaacagctgcttatagtggcaaatgcccacatgcattgggacccagagtattctgatgtgaagctcatccagaccatgatgtttgtctcagaggttaaaaacattctggagaaagcctctagtaggcctggaagcccaactgcagatcctaattccatcccgctggtgctatgtgcagatcttaactcattgccagattcaggtgttgtggaatacttaagcaatggaggagtagctgacaaccataaagacttcaaggaactaaggtacaatgagtgtcttatgaacttcagctgcaatggaaagaatggaagctcagaagggagaatcacacatggcttccaacttaagagcgcctatgaaaataacttgatgccttacaccaattacacctttgatttcaaaggcgtgattgactacattttctattccaagactcatatgaacgtgcttggtgtcctggggcctttagatcctcaatggctggttgagaacaacatcactgggtgtccacaccctcacatcccttcagaccacttctcactgttaacacaacttgaactccaccctccactcctgcctcttgtcaatggtgttcacttgcctaatcggaggtagtggagtactgccccgccaagacggggatctgttgctatggacctgtacagttgtaaatcaaagtatgtaggagtgaagtatggccatccttaagctgcttcttcaggtttctttcattatgtgtttgctgtaagactttgtacatttttgtgcatattggtatcatttggcagtagggctggaaccaaagtattactctctttacaaaattttaatttaacatgtttttaaattggaccttctttatattgtattaacagccagcattcaaaattgataaattaccaatttgaggcccaataacagtgtatttgtttttccaaaacaaatactttcttttgaatggtttcagtgagccaaccattttataaaaggcaatttttaaaaactataaatacagtattttaaactgaatgatgatatgccttccagggaaaaccttgaatttttcctttataactgacttttggattccaaagtcatttgcacattaacagagtacttaaatttacttgttcagtccataaactatgatatagcctctatacatggtaagaaaatttgaaaaattaaagatggttgcacagtatacttttataatccagcatgtaacaccacatgacaatttgttggccaaatgctggtttggagtttttttgaggaatcactttggtttttttgtcctttatatataaccttattggaagtattaattctaagcctgtctctcaagtttatttatagagaaaaagtaagtaatctgtattgccacataccttgaaaatagaatgtggtatgtttaggatgcccacggaatgaatttttccttattccaattcaaccttctgtctggttgtgccaggaaaacagatgttatatgacctatgtcatttttgccattatagtcaaatgttaaaagaagaaaaaagtctgctgaataaaaaggccttgatcaaagtttcagatggggaaaatcatacagatattttatgtgtttccaacatagattatgtggctgttggtttcttgagatgacagtgcaaaggatttgggagagagaacaaatttggggcagtagttgaaaacgttgggtcattttcctgactctagctgccaaatggccatcatatgcttttaatctttgtttcagttgtctgtcagggttgaattaagaagctactggtttattcccaattgttgatgcctttaggtatgttggaatcttttttttgcctaggaggggccagttgaaaatctgtgactcaagaggcagtgaacagaatactgttttctggggaaaaattggttggctacttgatgttaattatggcacagtaacaggaaaaggttgtgtctgtgtttttaagtttttctttattctgcttttttgctgctataagagttttctgaaatttatattttaaacttttcatgcactttactgtttctagtctcaaaatgtgatatttttaataaacaagaaattttccattatgtgaatgaaattttaaaagacaatagcctatatttgtgtctcactaatatataaagtataggtcaaatttaaattatttaattagttttaaatatacacaatttgtctcctctttcaaacctgacatcttcggctgttttattagtcttaaatgatgcatttactttggtcattttatgctaatttcttccatagtaaattaatcaggctatataaggtaatatttccccagagggtaattttagtgggacgagggtggtgggatgatgtcatatcatacatgggattgcatcagaagggttctgtaaagcctgaactcccttttaaaagtgcctagtgatagaggcgttgtttgtcatctattataattggaatgtcattgtagttcagtgaattttgatgtaaataaaatatcttttaaaaatgttaaagtaccaggataaacaaacaaaaagaaacaacccttaagatgacagattttcctcaacatgcaggtttcccttcttatatacctcaagtatccaacatctagccatgcaaattgattacctgaagcatagtactggaaagtagaatagcatgaaaaacttaattttgtggacattacctttttttgtaatcagctactgtatgttttattttagatcttttgttttgggtgggttttctgctctggaggtatatgcactaacaaaacattttcctcctttcatatacgcatgttaattagcaatgtgagcaatatttcctaccatacttcactcccaatattttttgagatgtttgtataaaatggaatttaaagttcacttatgattgtatatgaaccacagaggagcccatttattaataaaaaacttttttaatagttaaatgtagaggga

SEQ ID NO: 116679 - DNA, 4762 bp, Homo sapiens
acgctacccggcagctatatggctattgcccatcctgggcattaaactgggaatacaggaaaaagggaattatggaagaaattgttaactgtgacgcagatatcattagtcttcaggaagtggaaacagagcaatacttcactctctttctgccagcattgaaggagcgtggatatgatggatttttttctccaaagtcacgtgccaaaatcatgtctgagcaggagagaaagcatgtagatggttgtgcaatattcttcaaaacagaaaaatttacattggtgcagaagcatacagtggaatttaaccaagtggcgatggctaattcagatggatccgaagctatgctgaacagagtgatgacaaaagataacattggtgtcgctgtggtattagaggtccacaaagaactatttggagcaggtatgaagcctattcatgctgcagacaaacagctgcttatagtggcaaatgcccacatgcattgggacccagagtattctgatgtgaagctcatccagaccatgatgtttgtctcagaggttaaaaacattctggagaaagcctctagtaggcctggaagcccaactgcagatcctaattccatcccgctggtgctatgtgcagatcttaactcattgccagattcaggtgttgtggaatacttaagcaatggaggagtagctgacaaccataaagacttcaaggaactaaggtacaatgagtgtcttatgaacttcagctgcaatggaaagaatggaagctcagaagggagaatcacacatggcttccaacttaagagcgcctatgaaaataacttgatgccttacaccaattacacctttgatttcaaaggcgtgattgactacattttctattccaagactcatatgaacgtgcttggtgtcctggggcctttagatcctcaatggctggttgagaacaacatcactgggtgtccacaccctcacatcccttcagaccacttctcactgttaacacaacttgaactccaccctccactcctgcctcttgtcaatggtgttcacttgcctaatcggaggtagtggagtactgccccgccaagacggggatctgttgctatggacctgtacagttgtaaatcaaagtatgtaggagtgaagtatggccatccttaagctgcttcttcaggtttctttcattatgtgtttgctgtaagactttgtacatttttgtgcatattggtatcatttggcagtagggctggaaccaaagtattactctctttacaaaattttaatttaacatgtttttaaattggaccttctttatattgtattaacagccagcattcaaaattgataaattaccaatttgaggcccaataacagtgtatttgtttttccaaaacaaatactttcttttgaatggtttcagtgagccaaccattttataaaaggcaatttttaaaaactataaatacagtattttaaactgaatgatgatatgccttccagggaaaaccttgaatttttcctttataactgacttttggattccaaagtcatttgcacattaacagagtacttaaatttacttgttcagtccataaactatgatatagcctctatacatggtaagaaaatttgaaaaattaaagatggttgcacagtatacttttataatccagcatgtaacaccacatgacaatttgttggccaaatgctggtttggagtttttttgaggaatcactttggtttttttgtcctttatatataaccttattggaagtattaattctaagcctgtctctcaagtttatttatagagaaaaagtaagtaatctgtattgccacataccttgaaaatagaatgtggtatgtttaggatgcccacggaatgaatttttccttattccaattcaaccttctgtctggttgtgccaggaaaacagatgttatatgacctatgtcatttttgccattatagtcaaatgttaaaagaagaaaaaagtctgctgaataaaaaggccttgatcaaagtttcagatggggaaaatcatacagatattttatgtgtttccaacatagattatgtggctgttggtttcttgagatgacagtgcaaaggatttgggagagagaacaaatttggggcagtagttgaaaacgttgggtcattttcctgactctagctgccaaatggccatcatatgcttttaatctttgtttcagttgtctgtcagggttgaattaagaagctactggtttattcccaattgttgatgcctttaggtatgttggaatcttttttttgcctaggaggggccagttgaaaatctgtgactcaagaggcagtgaacagaatactgttttctggggaaaaattggttggctacttgatgttaattatggcacagtaacaggaaaaggttgtgtctgtgtttttaagtttttctttattctgcttttttgctgctataagagttttctgaaatttatattttaaacttttcatgcactttactgtttctagtctcaaaatgtgatatttttaataaacaagaaattttccattatgtgaatgaaattttaaaagacaatagcctatatttgtgtctcactaatatataaagtataggtcaaatttaaattatttaattagttttaaatatacacaatttgtctcctctttcaaacctgacatcttcggctgttttattagtcttaaatgatgcatttactttggtcattttatgctaatttcttccatagtaaattaatcaggctatataaggtaatatttccccagagggtaattttagtgggacgagggtggtgggatgatgtcatatcatacatgggattgcatcagaagggttctgtaaagcctgaactcccttttaaaagtgcctagtgatagaggcgttgtttgtcatctattataattggaatgtcattgtagttcagtgaattttgatgtaaataaaatatcttttaaaaatgttaaagtaccaggataaacaaacaaaaagaaacaacccttaagatgacagattttcctcaacatgcaggtttcccttcttatatacctcaagtatccaacatctagccatgcaaattgattacctgaagcatagtactggaaagtagaatagcatgaaaaacttaattttgtggacattacctttttttgtaatcagctactgtatgttttattttagatcttttgttttgggtgggttttctgctctggaggtatatgcactaacaaaacattttcctcctttcatatacgcatgttaattagcaatgtgagcaatatttcctaccatacttcactcccaatattttttgagatgtttgtataaaatggaatttaaagttcacttatgattgtatatgaaccacagaggagcccatttattaataaaaaacttttttaatagttaaatgtagagggaaaaaataaaaaaaaatgggaaacattgtaaacagcttaagtttattttgtgtatgatcgaggcactctgttgcaggaaggtgtgtaattgggttctctctgcttcaaatgcgctctttcaaaccattcattatcctgtgtatttttaatgtggttttagtaaatgttggtagtagctctgttgaagtaggtaattgtgttatgttttgggtggtacacacttggggcatggtaacccaaatttcatgtgcacggtttccctttagcccactgcccaaatttcacatacccttcaccctttgttccctttgtaaaaggagtggtatctgttttgagctgccaattcagatgatcagaaatgctgctttcctcagcattgtcttgttaaaccgcatgccatttggaactttggcagtgagaagccaaaaggaagaggtgaatgacatatatatatatatattcaatgaaagtaaaatgtatatgctcatatactttctagttatcagaatgagttaagctttatgccattgggctgctgcatattttaatcagaagataaaagaaaatctgggcatttttagaatgtgatacatgtttttttaaaactgttaaatattatttcgatatttgtctaagaaccggaatgttcttaaaatttactaaaacagtattgtttgaggaagagaaaactgtactgtttgccattattacagtcgtacaagtgcatgtcaagtcacccactctctcaggcatcagtatccacctcatagctttacacattttgatggggaatattgcagcatcctcaggcctgacatctgggaaaggctcagatccacctactgctccttgctcgttgattttgttttaaaatattgtgcctggtgtcaacttttaagcaacagcactgcctaaaagcaagcagagaacagaatcccagcaccattctataggcaactttttagaattcagatatagtaaatctgttccagatttatgatgttttatgtaaaaaaaattttgtataataacatagctgaatatttttgtttcatttctttgatgtaaggcgtgtgaacattcgtttgaatatcacatgttgaagtcaggtatggcacaatgggttctgagaccagcttttcctcccctcccatttgccttgttccaagctctttcttttcaaattacttttctgatattcataggcaggtatttaattttactaattagcatcctgtgtgaatgtattaaagaagccactgtgttttagtgtagttggcaaaaatataaaagctgtttcttatttgcccctatttt

SEQ ID NO: 116680 - DNA, 5013 bp, Homo sapiens
tcaaattttaaagcaactcttacaggcagctatacagctatttccttgtttttaaagatgaggaaaccaaggtacagacaagttcaataactagttccagttacacagtctgatttcatagtccatgcttttaactactgtaataaactgaatctttagccttcttgtttgagcttttgatatcactaatacctcttataagattacctcatttagaaaaattgccctgaatttgacatttgtttttgtttttagacagggtctcagagtcttactctgtcacccaggctggagtgcagtggcgatcatggctcactgcagcctcaacctccccaggctcaggtgattctgtcacctcagcaccctgagtagctgagactacacgtgcatgccaccacacctaactaatttttgtattttttgtagagatggggtcttgctgtgttgccctaggctggttttgaactcctgggtccaagcaatccacccgcctcagcctcccacagtgctgggattacagacatttacattggtgcagaagcatacagtggaatttaaccaagtggcgatggctaattcagatggatccgaagctatgctgaacagagtgatgacaaaagataacattggtgtcgctgtggtattagaggtccacaaagaactatttggagcaggtatgaagcctattcatgctgcagacaaacagctgcttatagtggcaaatgcccacatgcattgggacccagagtattctgatgtgaagctcatccagaccatgatgtttgtctcagaggttaaaaacattctggagaaagcctctagtaggcctggaagcccaactgcagatcctaattccatcccgctggtgctatgtgcagatcttaactcattgccagattcaggtgttgtggaatacttaagcaatggaggagtagctgacaaccataaagacttcaaggaactaaggtacaatgagtgtcttatgaacttcagctgcaatggaaagaatggaagctcagaagggagaatcacacatggcttccaacttaagagcgcctatgaaaataacttgatgccttacaccaattacacctttgatttcaaaggcgtgattgactacattttctattccaagactcatatgaacgtgcttggtgtcctggggcctttagatcctcaatggctggttgagaacaacatcactgggtgtccacaccctcacatcccttcagaccacttctcactgttaacacaacttgaactccaccctccactcctgcctcttgtcaatggtgttcacttgcctaatcggaggtagtggagtactgccccgccaagacggggatctgttgctatggacctgtacagttgtaaatcaaagtatgtaggagtgaagtatggccatccttaagctgcttcttcaggtttctttcattatgtgtttgctgtaagactttgtacatttttgtgcatattggtatcatttggcagtagggctggaaccaaagtattactctctttacaaaattttaatttaacatgtttttaaattggaccttctttatattgtattaacagccagcattcaaaattgataaattaccaatttgaggcccaataacagtgtatttgtttttccaaaacaaatactttcttttgaatggtttcagtgagccaaccattttataaaaggcaatttttaaaaactataaatacagtattttaaactgaatgatgatatgccttccagggaaaaccttgaatttttcctttataactgacttttggattccaaagtcatttgcacattaacagagtacttaaatttacttgttcagtccataaactatgatatagcctctatacatggtaagaaaatttgaaaaattaaagatggttgcacagtatacttttataatccagcatgtaacaccacatgacaatttgttggccaaatgctggtttggagtttttttgaggaatcactttggtttttttgtcctttatatataaccttattggaagtattaattctaagcctgtctctcaagtttatttatagagaaaaagtaagtaatctgtattgccacataccttgaaaatagaatgtggtatgtttaggatgcccacggaatgaatttttccttattccaattcaaccttctgtctggttgtgccaggaaaacagatgttatatgacctatgtcatttttgccattatagtcaaatgttaaaagaagaaaaaagtctgctgaataaaaaggccttgatcaaagtttcagatggggaaaatcatacagatattttatgtgtttccaacatagattatgtggctgttggtttcttgagatgacagtgcaaaggatttgggagagagaacaaatttggggcagtagttgaaaacgttgggtcattttcctgactctagctgccaaatggccatcatatgcttttaatctttgtttcagttgtctgtcagggttgaattaagaagctactggtttattcccaattgttgatgcctttaggtatgttggaatcttttttttgcctaggaggggccagttgaaaatctgtgactcaagaggcagtgaacagaatactgttttctggggaaaaattggttggctacttgatgttaattatggcacagtaacaggaaaaggttgtgtctgtgtttttaagtttttctttattctgcttttttgctgctataagagttttctgaaatttatattttaaacttttcatgcactttactgtttctagtctcaaaatgtgatatttttaataaacaagaaattttccattatgtgaatgaaattttaaaagacaatagcctatatttgtgtctcactaatatataaagtataggtcaaatttaaattatttaattagttttaaatatacacaatttgtctcctctttcaaacctgacatcttcggctgttttattagtcttaaatgatgcatttactttggtcattttatgctaatttcttccatagtaaattaatcaggctatataaggtaatatttccccagagggtaattttagtgggacgagggtggtgggatgatgtcatatcatacatgggattgcatcagaagggttctgtaaagcctgaactcccttttaaaagtgcctagtgatagaggcgttgtttgtcatctattataattggaatgtcattgtagttcagtgaattttgatgtaaataaaatatcttttaaaaatgttaaagtaccaggataaacaaacaaaaagaaacaacccttaagatgacagattttcctcaacatgcaggtttcccttcttatatacctcaagtatccaacatctagccatgcaaattgattacctgaagcatagtactggaaagtagaatagcatgaaaaacttaattttgtggacattacctttttttgtaatcagctactgtatgttttattttagatcttttgttttgggtgggttttctgctctggaggtatatgcactaacaaaacattttcctcctttcatatacgcatgttaattagcaatgtgagcaatatttcctaccatacttcactcccaatattttttgagatgtttgtataaaatggaatttaaagttcacttatgattgtatatgaaccacagaggagcccatttattaataaaaaacttttttaatagttaaatgtagagggaaaaaataaaaaaaaatgggaaacattgtaaacagcttaagtttattttgtgtatgatcgaggcactctgttgcaggaaggtgtgtaattgggttctctctgcttcaaatgcgctctttcaaaccattcattatcctgtgtatttttaatgtggttttagtaaatgttggtagtagctctgttgaagtaggtaattgtgttatgttttgggtggtacacacttggggcatggtaacccaaatttcatgtgcacggtttccctttagcccactgcccaaatttcacatacccttcaccctttgttccctttgtaaaaggagtggtatctgttttgagctgccaattcagatgatcagaaatgctgctttcctcagcattgtcttgttaaaccgcatgccatttggaactttggcagtgagaagccaaaaggaagaggtgaatgacatatatatatatatattcaatgaaagtaaaatgtatatgctcatatactttctagttatcagaatgagttaagctttatgccattgggctgctgcatattttaatcagaagataaaagaaaatctgggcatttttagaatgtgatacatgtttttttaaaactgttaaatattatttcgatatttgtctaagaaccggaatgttcttaaaatttactaaaacagtattgtttgaggaagagaaaactgtactgtttgccattattacagtcgtacaagtgcatgtcaagtcacccactctctcaggcatcagtatccacctcatagctttacacattttgatggggaatattgcagcatcctcaggcctgacatctgggaaaggctcagatccacctactgctccttgctcgttgattttgttttaaaatattgtgcctggtgtcaacttttaagcaacagcactgcctaaaagcaagcagagaacagaatcccagcaccattctataggcaactttttagaattcagatatagtaaatctgttccagatttatgatgttttatgtaaaaaaaattttgtataataacatagctgaatatttttgtttcatttctttgatgtaaggcgtgtgaacattcgtttgaatatcacatgttgaagtcaggtatggcacaatgggttctgagaccagcttttcctcccctcccatttgccttgttccaagctctttcttttcaaattacttttctgatattcataggcaggtatttaattttactaattagcatcctgtgtgaatgtattaaagaagccactgtgttttagtgtagttggcaaaaatataaaagctgtttcttatttgcccctatttt

SEQ ID NO: 116681 - DNA, 4838 bp, Homo sapiens
ggcagtccagaactggttcagctgcttccccatttttagaaggttggcttttgccttcctgcttcttatttcatggtcacaagatggttattatttctccgagcactagctgtaaggggcaaggtataaaagcatgaagggatatatatgctgtctttgttaggtggggcctctgagaaactttttacaataatcagacttcttgtgtcttagtggccagaactgtatcacatggtcacttgcagctagaaaatgacaagggagacaatgcatgtcatgtttctttcatttaatatctttcagcatgatagtctaggtacctaaaattataataatgtaccttttagatttacattggtgcagaagcatacagtggaatttaaccaagtggcgatggctaattcagatggatccgaagctatgctgaacagagtgatgacaaaagataacattggtgtcgctgtggtattagaggtccacaaagaactatttggagcaggtatgaagcctattcatgctgcagacaaacagctgcttatagtggcaaatgcccacatgcattgggacccagagtattctgatgtgaagctcatccagaccatgatgtttgtctcagaggttaaaaacattctggagaaagcctctagtaggcctggaagcccaactgcagatcctaattccatcccgctggtgctatgtgcagatcttaactcattgccagattcaggtgttgtggaatacttaagcaatggaggagtagctgacaaccataaagacttcaaggaactaaggtacaatgagtgtcttatgaacttcagctgcaatggaaagaatggaagctcagaagggagaatcacacatggcttccaacttaagagcgcctatgaaaataacttgatgccttacaccaattacacctttgatttcaaaggcgtgattgactacattttctattccaagactcatatgaacgtgcttggtgtcctggggcctttagatcctcaatggctggttgagaacaacatcactgggtgtccacaccctcacatcccttcagaccacttctcactgttaacacaacttgaactccaccctccactcctgcctcttgtcaatggtgttcacttgcctaatcggaggtagtggagtactgccccgccaagacggggatctgttgctatggacctgtacagttgtaaatcaaagtatgtaggagtgaagtatggccatccttaagctgcttcttcaggtttctttcattatgtgtttgctgtaagactttgtacatttttgtgcatattggtatcatttggcagtagggctggaaccaaagtattactctctttacaaaattttaatttaacatgtttttaaattggaccttctttatattgtattaacagccagcattcaaaattgataaattaccaatttgaggcccaataacagtgtatttgtttttccaaaacaaatactttcttttgaatggtttcagtgagccaaccattttataaaaggcaatttttaaaaactataaatacagtattttaaactgaatgatgatatgccttccagggaaaaccttgaatttttcctttataactgacttttggattccaaagtcatttgcacattaacagagtacttaaatttacttgttcagtccataaactatgatatagcctctatacatggtaagaaaatttgaaaaattaaagatggttgcacagtatacttttataatccagcatgtaacaccacatgacaatttgttggccaaatgctggtttggagtttttttgaggaatcactttggtttttttgtcctttatatataaccttattggaagtattaattctaagcctgtctctcaagtttatttatagagaaaaagtaagtaatctgtattgccacataccttgaaaatagaatgtggtatgtttaggatgcccacggaatgaatttttccttattccaattcaaccttctgtctggttgtgccaggaaaacagatgttatatgacctatgtcatttttgccattatagtcaaatgttaaaagaagaaaaaagtctgctgaataaaaaggccttgatcaaagtttcagatggggaaaatcatacagatattttatgtgtttccaacatagattatgtggctgttggtttcttgagatgacagtgcaaaggatttgggagagagaacaaatttggggcagtagttgaaaacgttgggtcattttcctgactctagctgccaaatggccatcatatgcttttaatctttgtttcagttgtctgtcagggttgaattaagaagctactggtttattcccaattgttgatgcctttaggtatgttggaatcttttttttgcctaggaggggccagttgaaaatctgtgactcaagaggcagtgaacagaatactgttttctggggaaaaattggttggctacttgatgttaattatggcacagtaacaggaaaaggttgtgtctgtgtttttaagtttttctttattctgcttttttgctgctataagagttttctgaaatttatattttaaacttttcatgcactttactgtttctagtctcaaaatgtgatatttttaataaacaagaaattttccattatgtgaatgaaattttaaaagacaatagcctatatttgtgtctcactaatatataaagtataggtcaaatttaaattatttaattagttttaaatatacacaatttgtctcctctttcaaacctgacatcttcggctgttttattagtcttaaatgatgcatttactttggtcattttatgctaatttcttccatagtaaattaatcaggctatataaggtaatatttccccagagggtaattttagtgggacgagggtggtgggatgatgtcatatcatacatgggattgcatcagaagggttctgtaaagcctgaactcccttttaaaagtgcctagtgatagaggcgttgtttgtcatctattataattggaatgtcattgtagttcagtgaattttgatgtaaataaaatatcttttaaaaatgttaaagtaccaggataaacaaacaaaaagaaacaacccttaagatgacagattttcctcaacatgcaggtttcccttcttatatacctcaagtatccaacatctagccatgcaaattgattacctgaagcatagtactggaaagtagaatagcatgaaaaacttaattttgtggacattacctttttttgtaatcagctactgtatgttttattttagatcttttgttttgggtgggttttctgctctggaggtatatgcactaacaaaacattttcctcctttcatatacgcatgttaattagcaatgtgagcaatatttcctaccatacttcactcccaatattttttgagatgtttgtataaaatggaatttaaagttcacttatgattgtatatgaaccacagaggagcccatttattaataaaaaacttttttaatagttaaatgtagagggaaaaaataaaaaaaaatgggaaacattgtaaacagcttaagtttattttgtgtatgatcgaggcactctgttgcaggaaggtgtgtaattgggttctctctgcttcaaatgcgctctttcaaaccattcattatcctgtgtatttttaatgtggttttagtaaatgttggtagtagctctgttgaagtaggtaattgtgttatgttttgggtggtacacacttggggcatggtaacccaaatttcatgtgcacggtttccctttagcccactgcccaaatttcacatacccttcaccctttgttccctttgtaaaaggagtggtatctgttttgagctgccaattcagatgatcagaaatgctgctttcctcagcattgtcttgttaaaccgcatgccatttggaactttggcagtgagaagccaaaaggaagaggtgaatgacatatatatatatatattcaatgaaagtaaaatgtatatgctcatatactttctagttatcagaatgagttaagctttatgccattgggctgctgcatattttaatcagaagataaaagaaaatctgggcatttttagaatgtgatacatgtttttttaaaactgttaaatattatttcgatatttgtctaagaaccggaatgttcttaaaatttactaaaacagtattgtttgaggaagagaaaactgtactgtttgccattattacagtcgtacaagtgcatgtcaagtcacccactctctcaggcatcagtatccacctcatagctttacacattttgatggggaatattgcagcatcctcaggcctgacatctgggaaaggctcagatccacctactgctccttgctcgttgattttgttttaaaatattgtgcctggtgtcaacttttaagcaacagcactgcctaaaagcaagcagagaacagaatcccagcaccattctataggcaactttttagaattcagatatagtaaatctgttccagatttatgatgttttatgtaaaaaaaattttgtataataacatagctgaatatttttgtttcatttctttgatgtaaggcgtgtgaacattcgtttgaatatcacatgttgaagtcaggtatggcacaatgggttctgagaccagcttttcctcccctcccatttgccttgttccaagctctttcttttcaaattacttttctgatattcataggcaggtatttaattttactaattagcatcctgtgtgaatgtattaaagaagccactgtgttttagtgtagttggcaaaaatataaaagctgtttcttatttgcccctatttt

SEQ ID NO: 116682 - DNA, 4534 bp, Homo sapiens
tcaaattttaaagcaactcttacaggcagctatacagctatttccttgtttttaaagatgaggaaaccaaggtacagacaagttcaataactagttccagttacacagtctgatttcatagtccatgcttttaactactgtaataaactgaatctttagccttcttgtttgagcttttgatatcactaatacctcttataagattacctcatttagaaaaattgccctgaatttgacatttgtttttgtttttagacagggtctcagagtcttactctgtcacccaggctggagtgcagtggcgatcatggctcactgcagcctcaacctccccaggctcaggtgattctgtcacctcagcaccctgagtagctgagactacacgtgcatgccaccacacctaactaatttttgtattttttgtagagatggggtcttgctgtgttgccctaggctggttttgaactcctgggtccaagcaatccacccgcctcagcctcccacagtgctgggattacagacatttacattggtgcagaagcatacagtggaatttaaccaagtggcgatggctaattcagatggatccgaagctatgctgaacagagtgatgacaaaagataacattggtgtcgctgtggtattagaggtccacaaagaactatttggagcaggtatgaagcctattcatgctgcagacaaacagctgcttatagtggcaaatgcccacatgcattgggacccagagtattctgatgtgaagctcatccagaccatgatgtttgtctcagaggttaaaaacattctggagaaagcctctagtaggcctggaagcccaactgcagatcctaattccatcccgctggtgctatgtgcagatcttaactcattgccagattcaggtgttgtggaatacttaagcaatggaggagtagctgacaaccataaagacttcaaggaactaaggtacaatgagtgtcttatgaacttcagctgcaatggaaagaatggaagctcagaagggagaatcacacatggcttccaacttaagagcgcctatgaaaataacttgatgccttacaccaattacacctttgatttcaaaggcgtgattgactacattttctattccaagactcatatgaacgtgcttggtgtcctggggcctttagatcctcaatggctggttgagaacaacatcactgggtgtccacaccctcacatcccttcagaccacttctcactgttaacacaacttgaactccaccctccactcctgcctcttgtcaatggtgttcacttgcctaatcggaggtagtggagtactgccccgccaagacggggatctgttgctatggacctgtacagttgtaaatcaaagtatgtaggagtgaagtatggccatccttaagctgcttcttcaggtttctttcattatgtgtttgctgtaagactttgtacatttttgtgcatattggtatcatttggcagtagggctggaaccaaagtattactctctttacaaaattttaatttaacatgtttttaaattggaccttctttatattgtattaacagccagcattcaaaattgataaattaccaatttgaggcccaataacagtgtatttgtttttccaaaacaaatactttcttttgaatggtttcagtgagccaaccattttataaaaggcaatttttaaaaactataaatacagtattttaaactgaatgatgatatgccttccagggaaaaccttgaatttttcctttataactgacttttggattccaaagtcatttgcacattaacagagtacttaaatttacttgttcagtccataaactatgatatagcctctatacatggtaagaaaatttgaaaaattaaagatggttgcacagtatacttttataatccagcatgtaacaccacatgacaatttgttggccaaatgctggtttggagtttttttgaggaatcactttggtttttttgtcctttatatataaccttattggaagtattaattctaagcctgtctctcaagtttatttatagagaaaaagtaagtaatctgtattgccacataccttgaaaatagaatgtggtatgtttaggatgcccacggaatgaatttttccttattccaattcaaccttctgtctggttgtgccaggaaaacagatgttatatgacctatgtcatttttgccattatagtcaaatgttaaaagaagaaaaaagtctgctgaataaaaaggccttgatcaaagtttcagatggggaaaatcatacagatattttatgtgtttccaacatagattatgtggctgttggtttcttgagatgacagtgcaaaggatttgggagagagaacaaatttggggcagtagttgaaaacgttgggtcattttcctgactctagctgccaaatggccatcatatgcttttaatctttgtttcagttgtctgtcagggttgaattaagaagctactggtttattcccaattgttgatgcctttaggtatgttggaatcttttttttgcctaggaggggccagttgaaaatctgtgactcaagaggcagtgaacagaatactgttttctggggaaaaattggttggctacttgatgttaattatggcacagtaacaggaaaaggttgtgtctgtgtttttaagtttttctttattctgcttttttgctgctataagagtttttgaattttgatgtaaataaaatatcttttaaaaatgttaaagtaccaggataaacaaacaaaaagaaacaacccttaagatgacagattttcctcaacatgcaggtttcccttcttatatacctcaagtatccaacatctagccatgcaaattgattacctgaagcatagtactggaaagtagaatagcatgaaaaacttaattttgtggacattacctttttttgtaatcagctactgtatgttttattttagatcttttgttttgggtgggttttctgctctggaggtatatgcactaacaaaacattttcctcctttcatatacgcatgttaattagcaatgtgagcaatatttcctaccatacttcactcccaatattttttgagatgtttgtataaaatggaatttaaagttcacttatgattgtatatgaaccacagaggagcccatttattaataaaaaacttttttaatagttaaatgtagagggaaaaaataaaaaaaaatgggaaacattgtaaacagcttaagtttattttgtgtatgatcgaggcactctgttgcaggaaggtgtgtaattgggttctctctgcttcaaatgcgctctttcaaaccattcattatcctgtgtatttttaatgtggttttagtaaatgttggtagtagctctgttgaagtaggtaattgtgttatgttttgggtggtacacacttggggcatggtaacccaaatttcatgtgcacggtttccctttagcccactgcccaaatttcacatacccttcaccctttgttccctttgtaaaaggagtggtatctgttttgagctgccaattcagatgatcagaaatgctgctttcctcagcattgtcttgttaaaccgcatgccatttggaactttggcagtgagaagccaaaaggaagaggtgaatgacatatatatatatatattcaatgaaagtaaaatgtatatgctcatatactttctagttatcagaatgagttaagctttatgccattgggctgctgcatattttaatcagaagataaaagaaaatctgggcatttttagaatgtgatacatgtttttttaaaactgttaaatattatttcgatatttgtctaagaaccggaatgttcttaaaatttactaaaacagtattgtttgaggaagagaaaactgtactgtttgccattattacagtcgtacaagtgcatgtcaagtcacccactctctcaggcatcagtatccacctcatagctttacacattttgatggggaatattgcagcatcctcaggcctgacatctgggaaaggctcagatccacctactgctccttgctcgttgattttgttttaaaatattgtgcctggtgtcaacttttaagcaacagcactgcctaaaagcaagcagagaacagaatcccagcaccattctataggcaactttttagaattcagatatagtaaatctgttccagatttatgatgttttatgtaaaaaaaattttgtataataacatagctgaatatttttgtttcatttctttgatgtaaggcgtgtgaacattcgtttgaatatcacatgttgaagtcaggtatggcacaatgggttctgagaccagcttttcctcccctcccatttgccttgttccaagctctttcttttcaaattacttttctgatattcataggcaggtatttaattttactaattagcatcctgtgtgaatgtattaaagaagccactgtgttttagtgtagttggcaaaaatataaaagctgtttcttatttgcccctatttt

SEQ ID NO: 116683 - DNA, 530 bp, Homo sapiens
gattacttattgtccttatgttcagataatctcgccatgaatgataatatatgtgccctgtatttaaaagcagtaactatctaaagcagccctttactgacatgaaagactaaagaatttcatttcaaaagttgcttggtttcccaatttgtgccagctgccctcctgccccaaatgtgcctgtcttgaacttttgcatttttggaagcagtgtggggtctttgctgactgctgtgattctctacccaactcttagttatttaatacgttgtgttacttttgggctgggcccagtggctcacacctgtaatcacagcactttgggaggccgaagggggaggatcccctgagcccaggagttcaagaccagcctgggcaaaattttagccaggcacagtggcacacacctgtggtcccaactcctcaggaggctgaggtaggagggtcacttgagcccaggagatcaaagatgcagtgagccataatcacaccgctgcagcctgggtgacagagcgagaccttttcccaaa

SEQ ID NO: 116684 - DNA, 276 bp, Homo sapiens
tgttccttcttttaaaaacacttggagtggcatctgtgttcctgactagaacctcactgatgaatcttctactggagaaagaagtttcaaagtttcttaggccatagaacctgtggtagtgactcctggttgtcctcaatatataatccatctaatatgaatatttagctgtgattctgcctctcagcctcttttgtagtttagcatggccatgtgaacaagttctggcaaaagtgatggaatcagatgtgctggatggatgactctaaaccttct

SEQ ID NO: 116685 - DNA, 1107 bp, Homo sapiens
  misc_feature (132)..(132): n is a, c, g, or t
tgatcagccgggggaactctgtgaccatccggtgtcaggggaccctggaggcccaggaataccgtctggttaaagagggaagcccagaaccctgggacacacagaacccactggagcccaagaacaaggccngattctccatcccatccatgacagagcaccatgcagggagataccgctgttactactacagccctgcaggctggtcagagcccagcgaccccctggagctggtggtgacaggattctacaacaaacccaccctctcagccctgcccagtcctgtggtgacctcaggagagaacgtgaccctccagtgtggctcacggctgagattcgacaggttcattctgactgaggaaggagaccacaagctctcctggaccttggactcacagctgacccccagtgggcagttccaggccctgttccctgtgggccctgtgacccccagccacaggtggatgctcagatgctatggctctcgcaggcatatcctgcaggtatggtcagaacccagtgacctcctggagattccggtctcaggagcagctgataacctcagtccgtcacaaaacaagtctgactctgggactgcctcacaccttcaggattacgcagtagagaatctcatccgcatgggcatggccggcttgatcctggtggtccttgggattctgatatttcaggattggcacagccagagaagcccccaagctgcagctggaaggtgaacagaagagagaacaatgcaccattgaatgctggagccttggaagcgaatctgatggtcctaggaggttcgggaagaccatctgaggcctatgccatctggactgtctgctggcaatttctttttttctttcttttcttttctttcttttttttttttttttttttttgagatggagtcttgctctgtcaccaggctggaatgcagtggcgcaatctgggctcactgcaacctccgcctctcgggttcaagtgattctcctgcctcagcctctggcaatttctagagggaggaatgggtgtttgagtgcagagacactggtctggggtgatccatggaggaccattaaaatgtgacacctttcctttctatta

SEQ ID NO: 116686 - DNA, 1255 bp, Homo sapiens
  misc_feature (132)..(132): n is a, c, g, or t
tgatcagccgggggaactctgtgaccatccggtgtcaggggaccctggaggcccaggaataccgtctggttaaagagggaagcccagaaccctgggacacacagaacccactggagcccaagaacaaggccngattctccatcccatccatgacagagcaccatgcagggagataccgctgttactactacagccctgcaggctggtcagagcccagcgaccccctggagctggtggtgacaggattctacaacaaacccaccctctcagccctgcccagtcctgtggtgacctcaggagagaacgtgaccctccagtgtggctcacggctgagattcgacaggttcattctgactgaggaaggagaccacaagctctcctggaccttggactcacagctgacccccagtgggcagttccaggccctgttccctgtgggccctgtgacccccagccacaggtggatgctcagatgctatggctctcgcaggcatatcctgcaggtatggtcagaacccagtgacctcctggagattccggtctcaggagcagctgataacctcagtccgtcacaaaacaagtctgactctgggactggtgagtgaggagatgctctcagttatggaactggcacagagggtcaggtcctgtcaagatgatatgggtgccctggggagacatccaggggtcctgggtgatactgatctgccctgacctctgtgacctctttgtccaccatccccagcctcacaccttcaggattacgcagtagagaatctcatccgcatgggcatggccggcttgatcctggtggtccttgggattctgatatttcaggattggcacagccagagaagcccccaagctgcagctggaaggtgaacagaagagagaacaatgcaccattgaatgctggagccttggaagcgaatctgatggtcctaggaggttcgggaagaccatctgaggcctatgccatctggactgtctgctggcaatttctttttttctttcttttcttttctttcttttttttttttttttttttttgagatggagtcttgctctgtcaccaggctggaatgcagtggcgcaatctgggctcactgcaacctccgcctctcgggttcaagtgattctcctgcctcagcctctggcaatttctagagggaggaatgggtgtttgagtgcagagacactggtctggggtgatccatggaggaccattaaaatgtgacacctttcctttctatta

SEQ ID NO: 116687 - DNA, 186 bp, Homo sapiens
ccagggtgaggggacaggagagaagctggaacaagaagtaatgggctaggagagcaagggatgtggggggtttttgaagaaagccagaaaaaaaccaggatgcagctggtgccagagaagaaggaagggctgtcgggctagtcggggactgtcgggctagtcgggggctgtcgggctagtcggggg

SEQ ID NO: 116688 - DNA, 287 bp, Homo sapiens
aatacccacatgtagttgtttaccagtacattttgtgccttcctctcgattgttccttctgtaatctcatagtcatcttctcatttctatccatgttaccacagcagtctcctaactggcttattagcctccagcactcccatcctcagagagcctgtctatcttccaaactgttgagctaggctagtggtttcacctggggataattttgccccgaggggacatttggcaatgtttggttttagttgtcataactagggtagggtgctactagcatctagtgggta

SEQ ID NO: 116689 - DNA, 531 bp, Homo sapiens
gcagagaactgcttgaacctgggaggtgggtgttgcagtgagctgagatcgcaccactgcactccagcctgagcgacagagtgagactccatctcaaaaaaaaaaaagaaggaaagaaaagaaaaatttcaaacttacatagtgaacaatacaataaatcttcacatatgtatctatgaaccagtttaattaacttgctcatggctgtttcatcaatgaccttaccatgagaagaaattttgaagtggaataaaagattcaactaacagaaaaatatatgagacaccattgactcctttttccacgatgagcatcacttattgggctgggcatcacacgagacctactgaataagaatctcgtaggtgggcccagaaatctgtcctttatgaatctctgatttttgtttgtttgtttgtctgtttacttttcttttttcactccccatgatatagagcttgaaagaatctctgatttttgtatatactaaattagagaagcactgctcagactacggtgcttggcagcatg

SEQ ID NO: 116690 - DNA, 337 bp, Homo sapiens
gtccaggacagtgtcagggcagggccaaggcagggtctgggccatggtaagatcagcaacagggctggggctaggccagtgacaggaccagagtcagggcaagggccagagcagtgcaaggccagggtagggccaggcatttcagggtcagggccaggggagaaccagggcaagttctcaagcagggaatggccagggccaggacaggtccagggcagggccatgacagggccaggggctgcgttagggcaagggcagggccacagcaaggtaagggtcagggccaaggccagggtagggacagggcaagaaatatggcatgaccaggggcaatgcc

SEQ ID NO: 116691 - DNA, 731 bp, Homo sapiens
agcggcctgtgaagaacattgtcattatatgttcttcctttatgatgaaatgtgcctaagccattcttagcaaaagcagggatgattgctggatgtgtgtgtgtgtgtgcatgcatgcgtgtgtgtgtgtgtgtgtgtgtgtgtgcacgcgtgctgtttctgtggtccaaaggcaagatttatgattatgggatagacagtagcttgctctctctattttattttttaaaaactgttttcctttgaaattcctgagttaatgttctgtctgctttctatctgaccctcttcggagagttgcattttttttttttccacgagagagagattaagagagagagagacagagagagagagagaaagaacgagggtgacagagagaaacagagatcgggggaggagggagagcgagagaactggaaacaaagactcgttgtctctaagctggagcaggcaggaaaccccaatccctcgggaacttagccagcccgccctgtcctggagtcagactccagctctctgaattcaatttgacagcttgtctgggacactttctaagtaaccattatccttcctttctctaagtaaaaggactgttatttcttttcgtgggtgtgctgtgcgaactgctattgcacacgtgtggctcacacagtgactaggacacactttcctcaaattattggaaacagcccgtttcctaagacaagtgtaaatttgttccaggataa

SEQ ID NO: 116692 - DNA, 370 bp, Homo sapiens
aagcaagacacactctctctctctctctctctgaaacaagaaactctctctctctctctcacacacacacacacacacacacacacacacacacacacacacacacacacacaccccctatctccctttcctgccttattttcctccgtcacacttatcactaatacactgcaatggtctaaatgtttctcccaacattcatgtgttggaaatatatttcccaatgcaacagcgttgggaggtggagcctaatgagaggtgttgaaagcatgatagtaaaagtaaaatagtgcttatcggagaaaacattcacaagcagagaagtggcagagtacacatgatccatgtgccttattagcccacagagtgg

SEQ ID NO: 116693 - DNA, 827 bp, Homo sapiens
ggcccaagagcggaggtagagggaacgacgcatgcttgagaaatggcgggaaacagaggaggctcgaggcttgctcacacgcacacagccaactgcttctggaccgccttgctcacacgcacacagccaactgcttctggaccgcctgaaaggcaacctcgcccgccgcggtggtgtggggcgggcatcccttgagactgtgctctggaggcctggagaaacagctttctatcctcagcactggggagagcaggcctcaatccctgcctttgcctgccgcccctcttccttccctctcaaagcatacccagcagccccggcgctgagaaacgcgttactctcttatcagctgtgggagagacaagacagactggcctctgggcggaggggccgccattgcctgccctctggaccagggcctcacagataccctcagcttcaggattagggctgcgttggtttttccccccacatcaggggacttcaacaagtaacctccagttccatagataaaacttgtattccccccttctccatggcaggggttttgagcctagagaaggaagatcggagcttcctggggctcctgtgaagcaggcagggggcagcactgggccccgggaagaggcggagaaggcgagggagtgcctgcggtgagcccagagccttgggcccgttatcctctgatgctgctcccccaactttcctgccgtcagtccctgaccttgcctgagaccttggcggctcccgcacctctctcccggctcctccttgctgagaacacaacccgcaaggcccttccgcctggctggactgagtcccctatg

SEQ ID NO: 116694 - DNA, 840 bp, Homo sapiens
tgcccataggggatgcctttttctaattctcacaaggactagcaccatacgagagattcaaattgtcactgcaatgctgagcctagtaacagcagttccctgatattagcatctcttgtgcaatccacaaaaccaaacaccctggctcattctgatcattacttctttccctcttgctacattaaatcatttataagcctgtcatgaaatctctgtgttctaagttcagctcagtgactttgtgagctggaaactctctgctcctgcagattactcttttctgctgtctatatctcaagagactgaccttcaagggtggcattaaacaagcttacttgcctctgacttccatctggtttggccaatgagagatgctggcagaccagtaggctgccaggtgggctagagcaaagatcaattaacacttcctccctgtgggccacaggttggcagtgtccatgtcatgggctgaattaagtccccccaaattaatatgttcaattcctaacccctagtacttcataatgtaactgtatttaaagatgggaccttaaaggacgctacccattttaaaatgaaacatttagtgtgccacacctatagcaaactacgcggtgtgactatcactactcggaactgtgcactcccgatccccccacaaaacgttattccttcgcaaagatcgttatgactaatgtcttataaaatagcaacctgccacgtaccactcctaggcctaaacgagagacccactctctctaccctccgacctgtcctactcatctggcactacacccacacgctggactacaataagacactaattcagaaaacaccctc

SEQ ID NO: 116695 - DNA, 340 bp, Homo sapiens
gctgtacatctggcctcaaaaatgttaaacgtatgaatcaatagattacagcttaatacagaaagagcgtggtatcaaccaaactagcaaagaaatgaagacagcattggtgaataaaacccactaaatggtgagccccaatgtcaccattaggcattcccaattcctttatcgtcatcaagtatgttgccttccaacccagaagcagttgacagatttccattttaccacattttcctccaaacatgactgggggaaaggcaagaccaagaactggtaagagagtgtatagatacagaaaacccaaatcttaacaaagcactgaggcactggtaactgt

SEQ ID NO: 116696 - DNA, 369 bp, Homo sapiens
cttgaatattttccattcccatttggttgaatctgcagatatggaacctgcaggtatggggagggctgatgtacattaatctctggaaattctttacaaccctggtcagattcatggtcataaactgaagcctttggcctctagcctgttagcttgttgctgggattggagcagcgaaggtggtaaggtgcagggcatggttaccagggttgtgaatctgggtggtatttgggtgaatacacatgactgtatacagtcccagctattgttctttccttatttaaggcccctttcctttaccctctctataccttgagtttttacagtctcccagaaagcttgagattgacagttcatgcaaatattcca

SEQ ID NO: 116697 - DNA, 392 bp, Homo sapiens
ttcctctgaggactgcgttttaacctgaacgtttttcttgcctgtctgtttatagaaaacaaagccgattccctgttgcgctgttggagactgtggagttcttagtctctgcttatcagttgggttttcagccaggtaaagagtaggggtagtccagtcggcttcacatttcccacgtgtaataacagttactaggctagggaagtagtagccaccgagcttgggagcgaagtgctgtgtggaggcaggaataccctgtgactgacttctctgcagagtagtgaggatcacatcccctggggacaggcctttggggaggctccacaaatgtcttctcaggaggaagtcttttgacctacatgaagtatatactagggacatagggagatgtt

SEQ ID NO: 116698 - DNA, 485 bp, Homo sapiens
acccacatcttcgaaagtgagggaagaattcattcacagctgttttcttttttcctcgcgtagcgtgtatcatttctttcctaaggaaggagttttacaagtagcctcctgccagcttcagctcatataggataaaagccagctcaaatattttggtagataactccggagactcagaaagccaactgctgaacttgagatacagtttccagtttgagagtggacaggctgcgagtgtttgaggccctgccccctgcctatctgctgcctgccctctctcatccaggtgtccatgcagcagggggtttcacagcagccactgtctgactggcttgctcctgcatttagcccactctgatccattccccgcaaagcaagcagactgcatttcacctctcagtcaggtctcagtccttgcccagaactctctaggattttaggcttaactcagaatatagtccacatccttaccaaggcctgcttag

SEQ ID NO: 116699 - DNA, 344 bp, Homo sapiens
ttttaaaaccatgatgttttaacttgtgatgctttatgaatatctgttgaatatcttctctatgcttataaacagagaaagcctttgaagcttataatgcaatggaagatacttagaagtaaacaaaatagagaggtatatgtagattttcttaggtcattagtttgtgtctttgtctggtaggctgaaactactgtcatatgactctctccctggccagattttaatagtcatactaatactgatgtgaatcctgataattaaactatcttgtcattacatttgtagataaagttttggttagaaatgattttgtatgtgttaggtatggtaatacagtctca

SEQ ID NO: 116700 - DNA, 358 bp, Homo sapiens
ctgcatgtgaatctagcaaactaccgctctgcatttccctctccttgtctagcagcaggactcagggccacacccccgcgggctcgtattccttcattcccacatctcttcaatcggctccaggatgccacctgctgaagtcagaagcccttctgctatcaggtgccattgaggagcatcactccatcctcaacagcaccagctatggacctaaaggtttcagggattctatgaccccaccgtctctcacaaagttgtccaagtttcctactctacatctaccagctccacctggctacctctgctcagtagagttatctatgtctcacttgtttaccaatctttggtcaaaagtgtg

SEQ ID NO: 116701 - DNA, 495 bp, Homo sapiens
tgtcatgactccacatagcccaagtggttcttgctactttcccatagatgcccttcctctccattgcttttcccctgccctgcccgttcctctgttaactctgttgcagtttctcctgaatgaatacctcacgtaattagctataggtttgggtctgtttctctcagcacttgggccgctggatccctggttaataccctgatcccttttgtgggagaatggaggaaagagaaaataaggtcatctgggagagcaagatgaagggctttgaaactagtgaagaagaatgtgtttaccttttctcccttgtgaccagttcttcagccctctcgacaagttcatcgcaggcatcccctggaagattcatcactgccctagtcccgcacatctggtctctcactgagttactgctttttgaaaattcttcagaatgtctactgcatttcaccctttcctctccatcccagtggctgtggctcaagttcactctgcaat

SEQ ID NO: 116702 - DNA, 385 bp, Homo sapiens
ctataaatgccacactaatgtgaagattcagtattttttagttaagacatagttcattcaattggattctaatatgtggtctcttagtttatactctgatctaatgcagtggctttcggactttaggatgcatgagaatcacctggagaacttcttaaaacagactgctgggccctcctcacagagtttctgattggtagatgtgagtaggagccaaaagcctgcatttccaacatggccctacatgataccatgctgctggactgagactgcattttgaaaaccaatgaactaacagacacattaagacttaaaagagaggccaggtgtggtggctcacacctgtaatcccagcactttgggaggccaaggtggatggatcacc

SEQ ID NO: 116703 - DNA, 468 bp, Homo sapiens
ctgcactgcccatacgaagcaaaatccctccacccgaatatttgtgaccacaatgatagatgaaagtaccaaacaggtacaacttcctgaataactagtcctacacctgggcatatgatgcaggcaaagagaaatacacatcacatcaaaagcagttcccacccctacctatgggtccaagaccacaataaagctcattgcttcaattcaaacttcagctcctccacttacttgctacatgaacttgggcaagtcattgagctacctgtgtctgtttcctcatatgcaaaacgtaggtaataatggtacctacctcaaagggttgatatcagaattgaatgggttaatacaggtaatgagacaagtaaaggcaggccgggctcacagtagacatcatgtaagtagtggctagcaccctcatcctgccctcgtcattgtcttgatatgattgtcatcttgttgcttctc

SEQ ID NO: 116704 - DNA, 743 bp, Homo sapiens
cagagatctgctgtgattattccttttcacaaaccacaatgactctggaaaacctggctgtaaacaccagcactgccaccagctaaggatctgtgatcaggagtgccatctcacggtaacaggcagaagacaaaagtgaaaccgggctgatgcgaatcactgggaaactggctttggcacctccagagaatgaactgtttcatagcctagctgaccatccatgaaaatggctgcctggagaggcagtgatcagcccatccctgcagggtgaagataagcttgtgcaggccactggctaacacagttcatcccatgcctcctacataccaagcactgtgccaggcacttttcacgtctggcatcctcagaatcctccaaaaggtcggattcagacaatccggtggagcactctgaaatttagaggaagtggtcaaatagaattttctggaattatggaaatcttctattctgtgcatctagtatagtagaatctagtcacatgtggcttttgagaactggaaatatggctaatgcaacagagaaagtgaatttttacttttgattcatttaaatataaatggtcacatatgacatcactgccatattggacattgcagttctggaagatggcagatgcagccctcagaagaattatcagcctgaatgtctgggcggagcagagcactaccttcccactcactcttcccctcctctcgccccctcccctgcctcacttgcatcag

SEQ ID NO: 116705 - DNA, 477 bp, Homo sapiens
acattttaaagatttaagtagatagacaaagcaactagggtgtatcaaagatctctttcatgttgtattagtttgctggggttgctgtaacaaagtaccacaaactgcatggcttgaacaacaaaatgtattctctcagttctggaggctagaagtccaagatgaaaatgtcaacaaggctgtgctccttcggaaggcattagagacactctcctagcttccagtggcttgctggcagtctttggtgctccttgtcttgtagacgtaccacccttatctccgccttcatattcacatggcattctccctatgtgcatgtttctgtgtctaaatttaccctttttataaagacagcagtcatattgaaaaaaggaacccagtctactcctgtatgatttcatcttaactaattacatctgcagtgatcctgtttccaaatgaagtctcattctgaggtagtggggggttagtacttca

SEQ ID NO: 116706 - DNA, 789 bp, Homo sapiens
cagccgttgctcagctcttccagcccgggggttggggctgtggtggaaacagctgggacttctgaatagacaggtctaggcttcagtccttgactttggcagctgtgtttagagctttgatttctttttacttttcttttcttcttccctgcctcccctccctcccccctccctccattcgttcgttccttccttccttcctcacagcatctctgttgtccaggctggagtgcagcggctcgatttcgtctcactgcagccacgacttcctgggctcaagggatcctctgtcctctcagccttctgagtagctgggactacagacgtgcaccaccacgcctggctagttttttaaattttttgtagaaacggggtcttgctatgatgcccaggttggtctccaactcctgggctcaagcgatccgctggcctcaccttcacaaagtgctgagatttcaggcttgagccactgcacctggcctagagccttatctccctctctgtcaggtgagaatggtaattcttcttgcccactgttgtgaaggattcaagattgaatagttaaatggtctcagtgtggtctgtggcgccagctgcagtgtccctgtgttccccggaccgttcccctagttcattctttcatctattaatttacttggagaacttgtgctgtttcctggtcctcctccctgccccctacttctctgccaattcctgcttgtccttcatgccttagatgtcacttcctctgggaggcctccgctcctcctgggactgacatggacccct

SEQ ID NO: 116707 - DNA, 804 bp, Homo sapiens
gagttttgtggcatcagagacttccttgggaattcaccgaactttgttttggggactttagaattgtcacaaatagcactatctctgaaaatccctaagggggacagacagcccctatcaaatataaacatgaattctggctcacataactgaagtccagcattggttagcttcaggtaacagcttgatctaggtgacacgatgtcctcaggaccctgtcccttttcatcccttggctctgccatctttcacagggtcttggtgtgttagcaggaaggaagccggtgactccaggccttcctccaggttcaaggccagcaaaaagagagaactcttcctcctcctctccgcatttctagccccaaactgcttttcctcctcaccatgagtgggcccatgcctgtcctagaacctgtcattgtggccggagtagggggtgtattgggagtgcgtgaagctgggccctgctttttcctggagctggcacaggggagcccaggggcttttctgcctctctgtcttcagttttgcataataaacttttctctttcacgctagcttgaagtttacaccaggggcatctgatgagtaagaggtacccactgccccctggcaacttgtgcggggtgtattagtttgttgttttgttccctgcagctttgggtgagtgggaaggtggacagtcatcaggagtgcacctgcaggcctgaccgccaggctccctcagcccccgtcctgggaaacccagcaccaggggaagcgctcttggcaatccgggtttgcctcttctttttcagttgaggg

SEQ ID NO: 116708 - DNA, 433 bp, Homo sapiens
taaatcccattcaacctcaccaaataaagatcattgccccaaaaccgaatcctctcttctgcatccccctctaagtgatctctcccagtcctggggctttaaaaactatacacttacaacacccacattttaatctccagacccaacctcttccctgaatgccaaataaaactggcatacaatttaactaatttcctatgaagcaccttcatttggatgtgtcattggcatctcaaacttgacatgttcaccaatcaatacacagtattcctcttattcatggtttcattttccttggttttagttacctgcgattatctgcagtctaaaaatattaaattgaaaattccagaaataattcctaagttttaaattgtgcaccgttatgaatagtgtaatgcagtcttgctccatcctgctacaccccactcag

SEQ ID NO: 116709 - DNA, 501 bp, Homo sapiens
ggtggtacagacaccaccacattgggccatcaggcacaaacctggactctgccactatctgcacatgtcatttggagggggaactcagcctccctgagtttgttttcttacctgaatctggcaaaaagaaaaaaaaaaaatcaatcatacatcagatattgattaaacactgtgacaatccagacagaatcagtttttaaggaaacatagtgtctcttcctctaggagctcatgataaagactggaatatacagcatgccagagtggtatgcgtgggtcagggacgggcattttacagagggcccagggacgacctgaaaaaggaggtgatttgtgattaaagacctgaagcaggggaaggagggagcgctgtggacatctggggaaagagccctccaagggaaggaatgaccctgacaggaacaggctgggtgtgtgggagaaacagtgtgatcagagcagggagaaggagaggcagtaggaggagatgaggtcagagag

SEQ ID NO: 116710 - DNA, 758 bp, Homo sapiens
ctctcaaatgtaaaactgttcagtccccccaggcccaaagacaatcatggaagaggtgggcgtgtgagattataaggaccagattttgagagataaaattaactgagatcctccaaatcaaagacaggcacatagatgcctaaacaaaatgtttgtgttttgtataactaattactacaagccaagattatagcaactcaacacacataagtcagttttataaccttattttttgacttttagttttgactcttatattgcttaaaagaggtttaagagctaataagtgtctgcccaccttcattcctggctggcctaaaacaattaattagctataagtctttttaactctaactcccttgaccataaggatcccaccaaagggacataatggacccggggcagatagcacaccaccccagcatcggggtgagacaagaggaaagcttggctattaatactatttctgtagtgccttgacaaaaagggaaaacgtaaactgaaaaaaaaatccatggcccctctacagactgagtagatcccccacttggccaaagggaatcccctccaaatgctaaaaaatctaattcaagcctgatgagaaataaagggtcagacacacctcactatgctccaaacccctaatgtttaagccaggatcagaggccattccaaattataaaaataaagtattgccctttccgatgcaaaaaagaatactttttctcttcaattgggagacttagccttactgggag

SEQ ID NO: 116711 - DNA, 595 bp, Homo sapiens
ggagagagagagaggaatctagatcctagaacaatgctgtggagtcagaaggctgtgccaacagaacctttagctactacttctttccacagcattgttctaggatctagattcctctctacttaactcggtttcattgcttcctataaattctatgtaaatctcagaccctcagtaacatatcccaagacacatgatgagcaacacttggtattcagttttctccagcgctgtgaaagagtcccaccaggaaacaataaggccttttagcctattaattcatgagcaatttgatgcctcttaggcgataagtgcaagttgagaaatgaatttcctgctgctaaaattccaacgctttagaaactcttcagtgaacaaataaaagtttattctttgcaataatgatggaaacaaagactttcataaaaccaaacaattgaaatgtcttgataaatgcctgcagagttggctaggtttctaaactatcaaataatgagtttacctcttcttacactttttcaagaatccattgaagaatcaagataggaaagagtatgattcttcatttttcctagccatgctccactgctctatg

SEQ ID NO: 116712 - DNA, 702 bp, Homo sapiens
actttaaaaagaaatgcagactgggcgtggtggctcatgcctgtaatcccagcacttcaggaagccaaggctgtagatcacttgaagtcaggagtttgagaccagcctgaccaacatgttgaaaccctgtctctactaaaaatacaaaaaaaattagctaggttttgtggtgcgctcctgtagccccagctacttgggaggctgagacagcagaatcgcttgaacacgggaggaagaggttgcagtgagacgaaatggcatcactccattccagcctgggtgacagagtaagactgtctcaaaaaaaaaaagaaaaagaaaaagaaatgcaattgtactaatgttctgcaaatggcttcttgtaattggagatattatttcctgtgatagcatcatacaaagatttaaaaagtattacatcttaaactgttcagatggaataaagatgatatactgtggtgggcaggataatagcctcccaaagatgtccccagaacctctgattttgctaggttacatggcaaaggggaattagaattatagatggaattaaggttgctaatcagctgattttaagattgggagagtatccggtttatccagttgggctcagtgtaatcacaagaatcattagaagtagaagctaggctagacgcagtggctcacacctgtagtcccagcactttgggaggccaagtcgga

SEQ ID NO: 116713 - DNA, 842 bp, Homo sapiens
ggagaaggtagggtgacatcagctgggtgatgtctgctgccctgtcctggctttgtctctttcctgggagccccctgtcatctctaacacattcgctttccctcaacttgggcattttactgggcagcactggtgctatggcctgaattgtggcctccaatgtttgtatgctgaagccccaacccccaatgtgattatttgtagggaggacctttaaggagacagttaaggttgaatgggttcatacgggtggggccctaagcccatggggaccagtgttcctatacgaagaggaagagaccaggagtgtgcagagaaaaggccatctgcaaaccaaggagagcggcctcaggagagacaaacccactgatgccttgaccttggacttgcagcctccagcactgtgagaaataaatttctgtggtttaaaccgcccagtctgtggtccttggtgatggcagcccagcaagctcatgtaactgggataccctagtgacccttttcatctgatgaactgcgggtgctgactttgtcatcagactgagccagaaacctggagcctgtgtgcaaggcactgttctctggggcattgcccagatctgtgtcagtggagacatgaggtggaggaagtgttgtgtatgtattcatctgggttcctatccttccttacctctatgtcctcggcacaccccccagtggctgatgtatgggaggcaccccaggttatttgtggaatgaacaaatgaatcacacagttgattgtgtctgcattggtcttcatgcagatatgccgtgtggatgtttagaaatccagtaggggagcagggaggctgggtgtggtg

SEQ ID NO: 116714 - DNA, 301 bp, Homo sapiens
gacagggtctcctgtgttgcccaggctggtcttgaacttaagtgatccttccaccttggcctcccaaagtgttggggttacaggcatgagcctggccattgggcctttttaataagggctctaatcccattcaggagggctctgccaccatgatctaatcaccttctaaaggccctatctttcaatataatcactttggggataggatttcaacatatgaatttttttttaattgggcctcactttgtcacccaggctggagtatggtggtacaatcatggctcactgctgcatcaaattc

SEQ ID NO: 116715 - DNA, 981 bp, Homo sapiens
  misc_feature (13)..(13): n is a, c, g, or t
ctagtcactctanaggatctccacactgggttcgagttcagagtgtggatccaattccagtgcagttcttaagagtctctgagaaaagaaaaacaaaatgtccctggccatgtggaaaattaatgtttaaaatttggggcttaggtaggaaggacaaagtaacttaccagcactcgtacggtaatgtggtagataattgaggcacttgtcaaaatgctcatcaaaatcaaatggatcaatgatccacatatctcttaactacagaaaggaaactgtttaattctgtgcccccacacaagaaaggctgaggattctattgcccttgtttgccttttatctcctcagcctcactgttctacctcatctatcttcataggagaatattcccagcctccctcctaaattgagttccaatggtcattggtttggccaggcaatatgtgaacactaccagagcattgcgctgtgtactaggaaggccttttcagaatggcagtacaggaagctagcctcctaccttcacagcttcatcctccctcatgattgccacttcaaacatatactgcttgcaaagcatccagcagttccaggataggacaatttcattcgcctgagccaaacgctgagctaactggacatcactacaacctgcccaatcaccaagaggtactgctgccgctcatctccaacaataacctgggaaatccgacttgcaggtagacctatccagaaaaaaatgagataaatggagaagagtcaaattcaactgggaaactatgcaacaggaggggtctggaatccccacatggctctgtgcatcatgcctatcttgttactgccctcagctgcggaagtcttaggtgagctaacctttaaaaataataccttacggccaggcacggtggctcacgcctgtaatcccagcactttgggaggctgagacgggcagatgacctgaggttgggaactcgaacccagtgt

SEQ ID NO: 116716 - DNA, 457 bp, Homo sapiens
caataatatgtgagatagcttccctagctccacaactttgcctacaatagtgtttatcacagttgattcttctttccaatttcatcattgtttaaggttttcccattgtttcttcccagaaattactttaagactataaacacttctcaaattgtagtttaactgggtatacaaccttccaaagggttattgaaagtgcatatttcttattctagggatgaattgtttgtgtctctttcccatgtgtgccaggaaacatgcaagaatatttacttcagcacttgtattcaaacgaagtaaataaattaaccctctaccagtaagatggtaatttagagatagctcgttctgacaagaaaatactgtctatcagtgaaaataaattcagttgatttacatgtatcgagagggataaatgtaaaaaaagataaggttaagtgggtggcatcgataaaca

SEQ ID NO: 116717 - DNA, 797 bp, Homo sapiens
agcggattctgaagtcagctacctgcttagcaagatgtgtgggcagaaattcatcccgaaagtgacgtggacagacagtcctccgatctatgctggaaatgtcaagggctctggagcttgaccacctgggttcaaatgccaccttcactcatgttaacagtgtggcttgggcaaccgactttacctctctgcacctgtttcttcaatgtgcaaatggaaagaacatcacctgcctcttaggttgttctaaggataaattatatgcaatgcacttagaatacggccagactaaaaggtcatttccagcatttacttttgaactatcaaggcctgattttgaaagactccggactccatgcaaagtgtcttagctacgagctgaattgtgtccctacccctacctttaaattcctatgttgaagtcaaccctcagtacctcagaatgtgactatatgtggagctagggtctttaaagaggtataattaagttaaaataggtcactggggtgggccctaatccagtgtgactggtatccttataagaagagaaaattagggcatagacatatacagaattgaagatgatgtggggatgcaagaagacagtggtcatctataagcaaaggagagaagcctggaagaaccagtcctgcaacatcttgatcttgaacttctagccgcagaactggaaaaaaaagataagttcctgtcatttaagcttttttctggcaggcctagcaaactaaaaccatctgcattagtcaaggttctccagaaaaactgaaataataagatga

SEQ ID NO: 116718 - DNA, 590 bp, Homo sapiens
gaaccagcagtgtcaaaggaatgcatagacaagctttataaattctataatgtttaaactgaaaaggactcctggaggtctgttttctaggctagtcttcatttagagacctgatttcccagaactttctggaggagccttgggaaacctcagctcaaatttcctgaaattggcaaatgccctcagagtcaaaatggcttcagccctccatttacatttatgggttctaattttcactttgatttttgcctcgcaattccttacagctcttcctgtcagctcttccatgacatttacctggagcagaacaccattcattcttagggtgggggtggggatggggtagcgttttctattataaacaattcaaacacgaaaagattatagaaaataataagatacacatctgtatccctaccagcatcagatacatgctaaattcttgccagattagattccagtatctccctcagtcaaggtaaacagttaattatttctactgtttcaacaatgtcacactacacatccctgtgcatgtcgccttgaaccacctatgcaagatgggcagctgaggaagggatgagcaatgg

SEQ ID NO: 116719 - DNA, 303 bp, Homo sapiens
ctggtacaggggcaggtggggagagaccaagacagaagataaggaagtcaagtcaaagcctgtatgtggaatggagagaattcccaattcctttttctttcaagcttctagaatgcctgcaaccaggcctttcccacaaaggaattcttggaagggtgctcattggggaagttaagcagcccctactggcccttgggtttacccaaccaaccagcctgaataaactccaacagtcaggactcccgccaggcatccgacgtctgtcagctttttggagcctcatttcaaacacaggcagctgag

SEQ ID NO: 116720 - DNA, 267 bp, Homo sapiens
agaaaaacacatttgtttttaatcattcctgagaactatattaaaatagcattcacaggccaggtgtggtggctcacacctgtaatcccagaactttgggaagcccaggtgggcagatcacttgaggtcaggagttcgagaccagcctggccaacatggcgaaacccaatctctactaaaaatacaaaaatcagctgggtgtggtggcacgcacctgtagtcccagctacttgggaggctaaggaaggagaatcacttgaacccagg

SEQ ID NO: 116721 - DNA, 669 bp, Homo sapiens
gcaacaaagtggcctaccactcccttttaaaattaacatctgataactaataagaacagagaaggggtctttggcaaattctaaaaaatctgccaaggagctccctccacccgccagatgagagaaggagcaaatgacttaaaaatcctctgtagagctcaaccctaagaatccacttaaaatacagcacttccttttcactctgaatatgtccttagtgctatatctgcttaagaatctggatctgcttaagaatctggatctgcttaagaatcatgaacgaggatctggaattttctctaagctggcacctcacctctcacactgcaggagccatggagaaaacagctctccatctattacagggcaagttgctacccaacaccatatctcctccaaccctggcccctaaaaacagcccatggaaagcagtatatggtttagcaacacattcaggatcctgggaccactggctataccaactcatagcctcctcaccagccaagagcaaacagaatcacaaccagccccaattccagggttactcgacagctttcctacgctaatcttattcctgaatctgagtcaacaatagtgatctcagtggtttggcaatttacccacttcctattggacaaggaaaagctattactaactccaccccactga

SEQ ID NO: 116722 - DNA, 144 bp, Homo sapiens
tttagaggatccaaggaatcgtgcatgtgctaaggatatgaagaaatatggaaggatacaaagatgattaagacatggcttagtgctggaaaaatgcagctgaactttcagttcattagccatgagtaattaagccttagactc

SEQ ID NO: 116723 - DNA, 616 bp, Homo sapiens
gaaggaggtcacagtggcctgctaggtcatggctctgtcctttttcgcttttcgtgtgttcatgattattgcagctgtatacaacaaatcttacgtacctttacaaaaccagtcttacacctgtatccctaggtaaaagtacagactggagcttgtatgcctagattgaaatcctgtctttgctacttaccatctatgcaactcgggacagcctgattaactgcgttgtactctagtttccctatctgtaaaatggataataacaacactgtctacctgatagcatggcagtgaggattacatgagttaattcacgaaaagctgatttgtaatagtgcctgttcctagcacgcagtaaatattgattattttcattattattattaaacgttccaccttgttattttacattcctttgtctttatagattattattcatttgaatgtctaattgtacatagttgcaatcatagtttatacaatctctggtgtttgtttgtttgttcttgagacagagtctccatgcgatgcccaggctggagtgcaatggcacaatctcagctcactgcaatctccacttcccgggttcaagtgattctcctgccccagcctcctg

SEQ ID NO: 116724 - DNA, 365 bp, Homo sapiens
cataggacacaacaatattgaaatttggccagctaataaccctacaatggcctctacatgttcaagtgaaagaaagagtgccatatttcactttaaatcaacaactagaaatgattaagcttagtaaaggaggtttgttgaaagccaaaatgggctattagccaaattgtgaatgcaaaagaaaagttcttgaaggaaattaaaagtgttattccagtgaacacacgaatgataaagcagaacagccttattgcctgagacgcaggaagtttcactggtctggatagaagatcaaaccagccataacattcccttaagctaaaacctaatccagagcaagttcctaactctattcaattctccga

SEQ ID NO: 116725 - DNA, 310 bp, Homo sapiens
ctcagcctcccgagtagcttggactacaggtacgagccaccatgcccggctaattttttgtatttttaggagagatggggtttcaccatgtaggccatctattgaaaaaacctggccaggctggtctcaaacttgtgagctcaagtggtctgcccaccttggcctcccaaggtactggtattacaggcgtgagccaccacgcccggccctttcccacttttggaatccacagtatcttattttcatctttatgtctatatttacctattgtttagaccccacttacaagtgagagaaggtgtgatatttg

SEQ ID NO: 116726 - DNA, 618 bp, Homo sapiens
  misc_feature (47)..(47): n is a, c, g, or t
attgagatgtagttatgaaagattagaattgccttaaaaaggggtcntgatagcagctatcaaagcaatattcaagcatgatttcaaggatgctttcaggtttagaattagccttccttgtcaaaaatctgcacaacttcatcaaaaacctgtaaaggaaaaagatgataataattttaaaagcaggtactgttaaaataccatacagctaagttcttattaaaaataatcgaatttggcggggcgcggtggctcacatctgtaatcccagcactttgggaggtcgaggtgggaggactgcttgagcccaggagttcaagaccagccggggcaacatggtgaaacctcatctctacaaaacttagctgagtgtggtggtatgcacctgtagttccagccattctggaggctgaggtgagcccaggaggtccaggctgcagtgaaccatgattgcaccgctgcgctccagagcaacagaccctgtgtcacaaaatagatagactcttactgcctgctagattgattgattaattagatagatagtgtcttactgcgcgccagggggaagcttgcaaagcttgtgccagtcagctgacagctgctgacttcaaaatgttc

SEQ ID NO: 116727 - DNA, 178 bp, Homo sapiens
caaccgaggataacatcataagtatttcaagccaaagacccttctacgtggaagctgcctgagctaaagcgaaggatggaaggagggtttggtcgtttcacctcctacattatcacttccattcagttgccaccatgtccttttaattccccctgacactgtgatagactgtctccag

SEQ ID NO: 116728 - DNA, 877 bp, Homo sapiens
gaaagtactgggattacaggcatgaaccaccattcctggccaggaaactgtatttgtaatgaacaccttaggtcagaatcagaggcgcctggagggctccttaagacacagaggagtgggctccattcttagagtctctaactgaataggtctgggtgaggtctgaaaagctgcgtttctaacaagttctcaggtgatgctcatgctgctggtctccaggacacactcggagaactgctgctccaggagagtcttatgaataccaaaatttgaaaatcagccgctgaaggaagatgtgacagaaaagtcctgtccccagaaaactgtccttttggggcggcttggagcaccctgtctgatctctttcaaaccacaacccagagagttggcattgtggaaactgcctctgcttaggaggcaggaacagaagcagggagctccccctccacaaatgtggccagctcttcagtgcttggtgtggtgcccacttcagactcctccctccactcagcagccatagatcacctgggctctgtggagctccttgccacacttccctgagctggtaccattatctggcccttggtatatgtgtttcaggagcaacacaaagtaggcccattggcctccttggtggattgggaactccttcctcccttcttgccctgtgcaactcatagtcattctttgggaacccgtaaccatcatcacttcctccatgaagccttcaaaagcagagttggttgatcccgctctggattctcattctgggcctcattacccgtgttagagctactgcattgtagaatataccattaacagctgggaggcctcccctctagactgcggcttccaggaggatggagcttgtgtgaaa

SEQ ID NO: 116729 - DNA, 639 bp, Homo sapiens
tccagaaaaattaagtccagattcacgtgtgcaaaatgtataaagctaatccgtagagttgaatgagctagagttctgtgtgttactgtgaatatacagggaaaaaaaaggctcagcaaatatggagaatttaaagaaatcttcacatctttaaaatttcatattttttcccacttaaatatgacatttaataataaaaatgacatactactcatatattcaacagcataatcagttctacaccacttaaaaataggttgtgagtaggtgtggccactaatctatcatcaaatatcagttgcaaagaaagaaatgaagagatatttgcccttttccctttatgatttatatttggcataaaagaattgttgaatttcttaggaagttatgataattgatgctaaataaacacatggattgcaaaatcattccaaatgtcaaataaaacatggtttaacaattttcatagaaacaagaccattttatatcatctattttgctaagtttaatcttccgggttacaccaattggaacagtaagggagtatcttttaagcgaaacaactgttccaaatatatcaactgtcatcatagaacgcatggtaaaggactcaattgtactggctgctaattcatcata

SEQ ID NO: 116730 - DNA, 485 bp, Homo sapiens
ttctccattagtttaagctaccctggataagtgactctgtttatgtcctccctatatttcttactcattttcacactaacataacacgtaacaaaattaaacataagctaaattgaagaagcaagtgagacagctaagagttttgtgtacttggacaacaaagctcaaagccactgtggttatctgtcctgttgggagcccctttcaaccatttttttagttgcctgtaagatttatttttaatgtttgcctgcataatgcaaaatacataagtgggaatccctacgccctttacagttaagtggattatggaaataataaggaaagtttatcaactaaggtaggaaatatcttctcatgtctgtatctggccttcagggacttaatgtgggtgaatatatgtcattagacaagatcctaatatagatggctgtatcctgcagatagccaattcaacattaaaattttatgtttccatacctcaa

SEQ ID NO: 116731 - DNA, 154 bp, Homo sapiens
ttttcacggcctaaagctgaccttgaccacaaagggggcgctcacctgggatgagaatggtgaccgcggcctgcaccgctcggcggatgatgttgtccatcgcgaacatccagtggggcctaattaagtggttcctcaaaattttatttaccta

SEQ ID NO: 116732 - DNA, 487 bp, Homo sapiens
acccgcaagcgcagcgcgcagccgcggttcccagccgtgcctccccttccacacctccccgcaggctgagggagccggctccggcctcggccatcccaggaaggggctcccacagtgcagcggcgggctgaagggctcctcaagcgcagccagagtgggcgccgaggccaagggggcgccgaggccgaggaggcgcctagagcgagcgagggctgccagggctgccagcatgctgtcacctctcacaacgatgctgaggaccagtttgagccatcatatgtcagggagaaaagaggaacctctggcaaggctatgcctgctacctgccttatgattgggcagaaactcccacccatggaagctgaaactagtttttagagaaaattttctttgaactggaggatacattgtgattttggcatctgtagctgatactctgcattgccatgaaccaagatgacagcctgttaaggcaactgtgcatgat

SEQ ID NO: 116733 - DNA, 258 bp, Homo sapiens
cctgtccccagaatcctctgttccttcagccagccaaacagtccccccagactccagcccaaggtgattaaagcaaagacatcagggggtccacagggtcagaaacatagatgagacctactagttccccaaacagaccctgaatcccagtttgggtccatttaactgcaggcaagagtgacacctgcagctaaactctgtgtcctgagtccctttcctacagctgtcttgtgcttgaccccttcctttactatatga

SEQ ID NO: 116734 - DNA, 443 bp, Homo sapiens
ggaggcagggcatctctggggatgatcgaccgcatctgctcaggttcttgcagggcagggcaggcagagatgtgtgtttggagccagaaagccttcctgcccaacctgccatgcctcagtttccctatctgaaccaccttcataaaaacaacttatggctctcagagcagcacatttgtaaaaacctgaaaaatataaagaaaaacgtcactcacatttctcccatgaacattttcctattttatgtatcttttatgtaactgaatcacattgcatatacaattatgtgttccatttttaaacaataagcttcccttgttttaaaagtaataatccatgtttattatgtgttattgcatagaaatttcagacacaaaaaaagaaaggaaaaatgactccttattgctccattgagaaataataaatatgaatattattctgat

SEQ ID NO: 116735 - DNA, 630 bp, Homo sapiens
gcacaaggggtcctgcctcccaagggacctccgggcggaagggcagacacggcagggaaagatgacagcggacagggcagaggaggcagccagcagacttcaggccccaggcaaaccacctcagctgtaccccctgcacagatggagagcagagaatgggctgggccaaggggcagccctgccctcaccagtgcggcctgtcttcagcctccaacccactgagagagagaatggagaggtcgtgggtggcaataaggcgcacacaacccaactcacatgggcaggacaggcccgggcaggccggtgatcaaactgaaccgcagcggctgaaattcccacagaaaaggccaaacaaacccagcaccccgcggtttccagagctgagcctcaaagaacccggcctgaaaaggttagagacaagcggatggagaaatatttgttagccaaaagaaaccaagggtagaaatacctcatgaaacactataagctctcggtcaaagaaacattaaacaaagagaaatatattatattttgataagagacctgatctaccaaaagaacagtcattaatttttaagctttaaaaaaaaacactgaactatataaagcaaaaaatggttattaatgtaa

SEQ ID NO: 116736 - DNA, 879 bp, Homo sapiens
atcatgtttcaacatagaaaaagtgcaaaaggtaagaattaaataagaaatgattccttttctcaagaaccagaagttagcatggagtcatggactcagcttgaatcagtctaaggacttaactaaagccagccctctacagttttatggagatatcaacctaccatttttcatgatttttctagcaatacttagctatctggtggtccaaggccaagaactagccatatactagccaaatacatcactagccatgtaccctgcattccacctgaaagagcttcagttttctcatctggtgggtagaaaatctttgctttctgagaaggtttgtgatggcacaaaaaataatcttacttttctacaacaggggaggaaggggttaacaaaggagatgtctgagtactgaaagaatagaaatttttcagatgggaactttggaaaacgtatttagggttgaagaaaaggtacatgcaaaggcactgtccagggaactggctttgctttgaggaactgtgggtagtctggaatggaagcagcagagggcacatgtgggggtacagaaaaaagtgagggtggagattaggctcaggccagatcaggcacagccctcaatgtcttttttcctttttctttctttttttttttgagatggagtcttgctctgtcacccaggctggagtgcagtggtgtgatctcggctcattgcaacctctgcttcctgggttcaagcagttctctgcctcagcctcccaagtagctgggattacaggcacccgccaccaggcccactaattttttcgtatttttagtagagacggggtttcaccatgttgaccaggctggtcttgaacttctgacctcatgatccacccacct

SEQ ID NO: 116737 - DNA, 228 bp, Homo sapiens
aagatcaggagcaagtcccttagacttaagaattcttaaaattttattgcctgtcacaaaacgtacttgtgcacaccatgtgaatctctcaggattacaccgatctgtgaaggagtaaggcccttcttggccagtttgtaaatctgctccttcacgtcgtcagatgtcaacttcaaccaagtggggacgctgcgtcgatagggtaaagccgactgggacaggcccttc

SEQ ID NO: 116738 - DNA, 652 bp, Homo sapiens
agcgggttagccaggatggtctctatctcctgacctcgtgatctgcctgcctcggcctcccgaagtgccggaattacaagcgtgagccaccattcccggcccaaagaggagaagaagtattaagtgcttgcttggacctttctactgtgcttattattctgtcttctcctcatggcaagtttccagcacaatgagaattgtactgattaggtccatgggcagaaacgcagccatgaaatgtggagcagaaagatttcttttttattttcatttattaaatacagaagaaatatttcgctgaagacacaggaaaccctattttgtataaacgagggattgcaagagattgttggaagatcaaagatgggtgaattggaggtaggtcaatgtttccttcccttcttagactccagttctctttaaaaatggcaactgaaaacctaaatactgacaaaggcataaaaataaccatataatatcaaatatagctatatactaaactttatgaggtcaaagactttgtccatccactcagtactgtatactcaatatctaagacaattcctgacacatagtaggcattcttgagcatttgctgattgaacgaaggattattcatacttttaatctttggctgaaattatttttatga

SEQ ID NO: 116739 - DNA, 1659 bp, Homo sapiens
ctcgacccccagagaccacttctcagagtctctatctgttcgtctctggtgttagccacgttcctttactttccctcatttctgtggccactcctgtggcttcctctctttcaacctgcaggctgctgctgccctgcctcagacccttgtaggcttctgtagagatgctactcagatgggggtggagctagatgcagagctgaaacccacctaggagatctagcttggagagcttgtgaatcttaggagagctaggcatagaatgactaaagtttgtcaccgcatgagataaaataaatgaaaagccacttctggagggaatgaggcagtctgcctttattggagagatacatattgttgaacagctctgggcagttgattgtgtgcctgggagagctaaccatgtttactctacacttgacctgtgatggtctgtattgattgtatcacacgcttagctttctaaggctaaccaggtcatcgtcctcagtccctgcctgcaactaggttgccaactggcccttgatttcccacccaacttgttcagtttgccctcaatcctggggcctcactaatttcccaaaaagatatggttggtaccacctgtagtttgctgttgcatgttaacctgacttttgggaaactcaaataaacacttttcaaacgcattgaccatttttactctatgacttctgctttgcatgatcgctagcttggtcacccatcatgctgctttctggtgagctgaaaggaaaataaatggtctaaattgagcaacaagaaagtaaacttttaagcaggtactttccaagtgaaatgagaaccggagattgggtccaaaagagaggatgcccagccagactgaactttcaagtgttttccaactggaaagctccaatgtcctctgatctcagtgaatttccaatctaatttcaaggaagtccctcaggagccccattgcaagggtggttatagaaccatttacaactgctttaataaaactaatgcttataaagaaagaaaacttgttttttagtcatccataacacaaaaaagtgaggtttgatgcacagtaaaaggaatcattatttaagttagtctgagttatattgtattttggaaatgctccacattcaatatttatgccacatactctaaaaccaaagtatgtagattaaaaaaaaactatttccagaaataagcttgctgaatcaccacaggcttaatttatttattttaactaccagtttcctgaatgtttttgtctaattggcctatctgcagttgcccttggtccacccttgagcccactctttaagcctgtctgtcacttagagaagtacaagtacttcctgctgagaataaagccttgatcgcaatttcagtgaattatcagggaagtgtgagaataagtaggaataaatgtctaaacatttgggaaaaacttgtttgcaataaatgtggttaacagagagtgaataggcttactacataaaattgttactcatcaattaaaaaaactgtacaatcctcctccgggggaaaatgatcagatattttaagtctgctgatatttttctctggatgtcagacctgtatactttgtcctgcattattggagtataattggcaaataaaagttttatgtatttaaggcaa

SEQ ID NO: 116740 - DNA, 1605 bp, Homo sapiens
ctcgacccccagagaccacttctcagagtctctatctgttcgtctctggtgttagccacgttcctttactttccctcatttctgtggccactcctgtggcttcctctctttcaacctgcaggctgctgctgccctgcctcagacccttgtaggcttctgtagagatgctactcagatgggggtggagctagatgcagagctgaaacccacctaggagatctagcttggagagcttgtgaatcttaggagagctaggcatagaatgactaaagtttgtcaccgcatgagataaaataaatgaaaagccacttctggagggaatgaggcagtctgcctttattggagagatacatattgttgaacagctctgggcagttgattgtgtgcctgggagagctaaccatgtttactctacacttgacctgtgatggtctgtattgattgtatcacacgcttagctttctaaggctaaccaggtcatcgtcctcagtccctgcctgcaactaggttgccaactggcccttgatttcccacccaacttgttcagtttgccctcaatcctggggcctcactaatttcccaaaaagatatggttggtaccacctgtagtttgctgttgcatgttaacctgacttttgggaaactcaaataaacacttttcaaacgcattgaccatttttactctatgacttctgctttgcatgatcgctagcttggtcacccatcatgctgctttctggtgagctgaaaggaaaataaatggtctaaattgagcaacaagaaagtaaacttttaagcaggtactttccaagtgaaatgagaaccggagattgggtccaaaagagaggatgcccagccagactgaactttcaagtgttttccaactggaaagctccaatgtcctctgatctcagtgaatttccaatctaatttcaaggaagtccctcaggagccccattgcaagggtggttatagaaccatttacaactgctttaataaaactaatgcttataaagaaagaaaacttgttttttagtcatccataacacaaaaaagtgaggtttgatgcacagtaaaaggaatcattatttaagttagtctgagttatattgtattttggaaatgctccacattcaatatttatgccacatactctaaaaccaaagtatgtagattaaaaatttaactaccagtttcctgaatgtttttgtctaattggcctatctgcagttgcccttggtccacccttgagcccactctttaagcctgtctgtcacttagagaagtacaagtacttcctgctgagaataaagccttgatcgcaatttcagtgaattatcagggaagtgtgagaataagtaggaataaatgtctaaacatttgggaaaaacttgtttgcaataaatgtggttaacagagagtgaataggcttactacataaaattgttactcatcaattaaaaaaactgtacaatcctcctccgggggaaaatgatcagatattttaagtctgctgatatttttctctggatgtcagacctgtatactttgtcctgcattattggagtataattggcaaataaaagttttatgtatttaaggcaa

SEQ ID NO: 116741 - DNA, 292 bp, Homo sapiens
gtactcagaaattagggtaagcctgagtccctgactctggacttgagtctttccaccagcccacagcacttttgatctgttccatccatatctttgagccatcttcccactggccttttcctacctatgccaacttagggctgaaacctgtgcacagaggacatactcagttgggccctgccttggaacatcttcccctgagtctgataaccctcattcactagtctcatcttcatagcttcttcttcgtcctcctcctcctcctttctcgttattttctaactccctgtaa

SEQ ID NO: 116742 - DNA, 397 bp, Homo sapiens
acctcaagtgatccgcctgccttggcctcccaaattgctgggattgcaggcgtgagtcaccgcgcccagccattattttgctcattcttagttaaggagatccttggtgctggatgctggaaaaagattgtgtttttcagcatctgcagcctgggctgttttccacaggaataaatacagttttttccagctccaagaagactgaattcattcaacagcaagtctctcatgtgctttactttttagtgatatgcaaataaaaaaaagtaagtggaccctcaatagtatcaaaacattgtccccacgcccttaacatttagaaagatgacccaaaccccagtccctagacagttgtcctaggcaagattttgttcttgggaccttatttaaatttgcc

SEQ ID NO: 116743 - DNA, 249 bp, Homo sapiens
aatgcagggctaatgcctgggtgggtcattgaacaccctggccacatgagttcctgcgtaggcactacagaaagagagatgaattagtgtagaccatgtcctcccagaaagagggtcagggacagggatatggtgacacaatggtgggtgagtgtgcacagttacaacagaatacagaaaagctgtcaggtgcctggtggggacacagaagactcccacaggaagggatgcttacttggggatttgaaa

SEQ ID NO: 116744 - DNA, 760 bp, Homo sapiens
atgagctatttaaatatatacacaagtctgttctggattctgctctacatgggcaccaggacagcaaaaaggctactgggaccacagcaatgtgagcaagaagggtaacaggaggtgagatcagagagggatgttctgtgtgtgtgggttggggggatatcacatacaacctttaaatgctcaatgagatgggagccactgtagggggttgatcagaggggtgacatgacttgatgagtattaacagaatcgcacagctgctgtgttgttctagggagaacagatggtgggggcaagagtagaagcaggagagtgtggaaataatccagagcagagaggacagctgcctgtactagggtgttggagacgaaagtgatgcgaagtggtcagaatctggatatcttctgagggtagaaccaatgagacttcctaatggcctggagtgtgaacaaaagggtgaggtcaagaatgagtgtaagggtttttgtctgagtaaatagaaggatggaatgactgttgcctaatgtggggaagagtatgggaggagcaggttttagggacaagaccaaattttagacatgtttaatttgagatttctctatggtatttgagtagagacatcaagtaggtagcacaagacacaagccttgcgtttaagagagacaccaaggccacggactatttgggtgtctttagggtagaaacagtatttaatgccatgtgattacagtagatcactgatggagggagcacagaaggg

SEQ ID NO: 116745 - DNA, 1523 bp, Homo sapiens
aaaagttatttttttactaaaccatttaaaccttaaattttatatttgttatactctgtgtaacttctaatcaagtaggtattttagatgaaacacattttcattatataaaagcctatataaggatgatcagaaaagacaaaaaagggaaaagatgaagaggcaaacaaattttagcaagaaacgataactgcaaaatcaatcccaaatcaaaaaactggcaggtttcctgtagttgtgctaaccatttttcaaagcaaatttctgttccttcaactttactcactttttatcaaaaaagtacagcagttaaggtttctgggctcactctaatctagtggtgaagcatactatcttttaagctctgcttatagttagcctactcttgtcagatggctattctatcagtaggtcattgggctaatattaggtccatggtagttcctgtagaccacatcctgttaatattttttctttttttggtagagacagggtctcactttgttgcagcaggctggtcttgaactcctgagctcaagcgatcctccagcctcaacctcccaaagtgctgggattacaggtgtaagccactgtatctcagcactacaatctatttccaaacatttttatcacccacactctgtaaccattaaggaatcactccccatttttccttcctcatcccattttctatccctaatcaatgacccattttttatacatcaagtcagatgacaacttctttgttaagctgaccctgacagaataaatcacctctatagtacttcttaatcctgtacatatattgatgattaaatttttacctcattctataactgggtttacattctttttgtctgaactatttgagggcaggatccaggaagcacaaacaatatgccaactatggttaaaaatctttatatccttcccagctagcacagtgcctaacactgagtaagcactcactacatttctgtccagttataatgaaaattattaattgtggtttggtataggcataatttggcaggtgttggggataacatctttctgctaaaaacactctttacctggaatgtttaaataaaaatttcataatttatttatgtttatgtatcctaagctctgaacaaaaacttttgtgatgtaaataaagcctggtaggaataatatgtatatcagaattggtcatcaaaacctctagtgtaaactaatttatcagattctttctccaaagacaggaatgaacaatttaattttgaaggtggagatggaaagagagaaggaataattttgtttaaaaagtagtacttccatgtacatattatgctactacttgggcagatagggagagattgggagctactcacaaagaattcttctcactttataattttctaggacttgtaatgaaccttataaatgttgtaataatcttcttcttatagtcaaaggcaaatgaatctccccattcacctacacataactcttaattatatcactactttcaataattgctc

SEQ ID NO: 116746 - DNA, 957 bp, Homo sapiens
  misc_feature (137)..(137): n is a, c, g, or t
  misc_feature (258)..(258): n is a, c, g, or t
agcgaggcgttctagaggatccctatcgccaaacaggactctcctaacatgtaggaagagtgagagcaaatctgacagcatggactcatcaggtatgaagatggttgggtgtttgtttgttttgttttgtttttttngagataggatctcgctgtgttatccaggctggtctcgaactcctgggctcaagggatcctcccacttcagcctcccgagtagctgggacaacaggcatgagccaccccacctggctggttnggggtttttttgttgggtttacattctttttgtctgaactatttgagggcaggatccaggaagcacaaacaatatgccaactatggttaaaaatctttatatccttcccagctagcacagtgcctaacactgagtaagcactcactacatttctgtccagttataatgaaaattattaattgtggtttggtataggcataatttggcaggtgttggggataacatctttctgctaaaaacactctttacctggaatgtttaaataaaaatttcataatttatttatgtttatgtatcctaagctctgaacaaaaacttttgtgatgtaaataaagcctggtaggaataatatgtatatcagaattggtcatcaaaacctctagtgtaaactaatttatcagattctttctccaaagacaggaatgaacaatttaattttgaaggtggagatggaaagagagaaggaataattttgtttaaaaagtagtacttccatgtacatattatgctactacttgggcagatagggagagattgggagctactcacaaagaattcttctcactttataattttctaggacttgtaatgaaccttataaatgttgtaataatcttcttcttatagtcaaaggcaaatgaatctccccattcacctacacataactcttaattatatcactactttcaataattgctc

SEQ ID NO: 116747 - DNA, 194 bp, Homo sapiens
tgtgtacggatgtggtggcaagaggactggacattcctcaagtcaactggattgttcactatgaccatccggatgaccctaaggaatatattcatcgtgtaggtagaacagccagaggcctaaatgggagaagacatgccttgcccattttgggcccagaataattgggttttcttctacttgaaacaatccaa

SEQ ID NO: 116748 - DNA, 467 bp, Homo sapiens
ctctagcagatctcttccttaagcccatggactcacaaatattttccactccaagtggtgaggttccattccactgcaccttaactgcaccccgtttcagcaggaagtacctagatggagcacatcaccccctttccatagaaatgaaatggaacttgacagtggggagttgtaaccaagagtgtcagctttaaaatgtattttaaagccttcccactagccttaaagtgtatttaaaaggtttttttcctttttttttctctccttccccctggacactgccttataccatgaccttatgaccaacttatacatgcttatctaactgtatgcttgcttagaaattccaggggctggccgggcgcggtgactcacgcctataatcctagcactttgggaggccgaggtgggcagatcactggagatcaagaccatcctggctaacaccgtgaaaccctgtctctact

SEQ ID NO: 116749 - DNA, 479 bp, Homo sapiens
actatgtcgatcgttaagatttacagattataaaacaagacaatttggccaggtgcagtggctcacgcctgtaatggaggccaaggcaggtggatcgcctgaggtcaggagtttgagaccagcctgaccaacatggtgaaaccccatctctactaaaaatacagaattacccaggcatggtggtgcatgcctgtaatcccaactacttgggaggctgaggcaggagaactgcttgaacccaggagatggagaccgcagtgagctgagatcgcgccattgtactccagcctgggcaaaaagagcaaaactctgtctcaaaaaacaacaacaacaacaaaaaagaatttaagccagagtgaaggtcaggggcaaggaaggaggtgggcaaggcaaccaggactgtgttcaaaggcatcgtgagctatggggcggcattgctgtcttaccctaagatgaggtctgtggcctgtgggagcagc

SEQ ID NO: 116750 - DNA, 386 bp, Homo sapiens
gggtctgacccagagaactgtattccagtcttggctcccagctgccatccgctctgcagcttcccctagtggagatttcagcacttgctgggcctgggccagaaccccaagtatataaaatcagagcatgaacatgactttgataaattaagaaggcttcattttaataccacagtaagaggaaccagttaatattcttaccatttcacatccacaaaaaccacatcaggggcattaacaatctctcagttttgtacaaataaaccatgtttctcttaaaaagacttgcacacgtggttcacgcctgtaatcgcagcactttgggaggctgaggcaggtggaggctgaggtcaggagttcgagaccagcctggccaacatagtgaa

SEQ ID NO: 116751 - DNA, 512 bp, Homo sapiens
agacagagaacaataggtgtttgtgttaaaaagtaatactaagctatggagaggtacaaaacaagtttttgttttttgtttgtttttaagacggagtctcgctctgtcgcccaggctggagtgcagtggcgcaatctcggctcactgcaacctctgcaacctccgcctcctgggttcacgccattctcctgcctcagcctccgagtagctgggaatacaggcgcttgccaccaggcccagctaactttttgtatttttagtggagacggggtttcaccatgttagccaggatggtctcgatttcctgaccttgtgatccgcccgcctcggcctcccaaagattacaggcgcaagccaccgcggctggccaagttttttttgtctgggggtgtgttgtagaaaaattgaattcagattacagttttttgttttttgagacagcgtctcactctctcgcccggactggagtgcagtggtccgatctcggctcaccgcaacctccgcctctcagg

SEQ ID NO: 116752 - DNA, 642 bp, Homo sapiens
gctcggtacccatccttccctctctcacgcagtcacttctgatcaccccaagtccagtaatcagtggttactcagaacttctgctgctctgacctcatattcttagcaacttgattttttgcagccccagagcctcatattaacagtctcttgaacacagcaggcactcaactatcttaactgagtgattttgctattttcatattattttctatgggtaaaattatgtatcaggtaagataacttcagtaactgaataaaatcagtttcaataataagggcacatctatggtctcctaaactaagaacagagggcagggctaattcaacggcttacagatatcaaagacccaatcgctctccattttttcactacactatcctcgggccatttgcttctgctcacatggaagcaagagagctactgtagttccagaaatcacgtgtagacagtttctggctatagatgaggatacttatcttctttcatattttattaggaaggaaaacattttccagaagctcctcaggggtccctttggccggggctgagtcccatgtccatgccctagttgcaagggaggctggggaggcagcagataacattttcggcctccactccaggaacaggctctgccagcc

SEQ ID NO: 116753 - DNA, 503 bp, Homo sapiens
tacttttcagagtactttaatttttagatatgactttggaaaaaatgaatagttcagaataaagagtaaagcaatgctcagagtgcttgtgtgggtaaacggataacaaaaatatctggaaaccttgtgaagacaatatttagtttttggaatgaaagaagtccatcagatgaggaattgaacacaacacacttggtttcaatcatacctataaaatgtgtacattaaataggagacctttcaagtctgttccgaaacacactgctcttacaaagaatttattataactgcagtgaacacttctttctagggaatacaataaagtattatgcctacattaaagcatttgttccatttaatgttcactaaagaatataacacaaggtagtgcagcaaacagggcaaagaacatggacaagactacatctatgaaatattaaactaattcatgagaaacattattcaatgtatgcagaatgtctcagggttccctgtgtgatata

SEQ ID NO: 116754 - DNA, 111 bp, Homo sapiens
tctccatgcaagcggaatgatccttgtaaaaacaaatccaatcaactcaggacctcctcctgctcaaaattcttcacacacgtccatcataatcatgatggaacccaaatt

SEQ ID NO: 116755 - DNA, 571 bp, Homo sapiens
tttggaggtgatgcagtgatgtatttaattagcagatacagaggaggaaggaatgaagagagtttggagaagaaaaaagaagcaaggataagtaaatattcaaagtctcagaaaatacaaaattaagcataaatgcaaggttatttttgtaacagtagaacccttttcatcaaaataaaagatagataaaaatggctgaaacattctaagagactgcagaaaattgagggagtttttgaaaaagtatttggtacttttatcctgatggttaaaacagatgaaaagctaaaaactccttcatgggaaaaatcattaaagtatcctcttggttaaaacagatgaaaagctaaaaactccttcacgtgaaaaatcattaaagtattattctagcatatgtaattatgcaaatggtcaattttgtggcaaatgaagcttacttactcttgaaaccaaagaagttttattaatttatgccaccattgatttctcaccaccttcttaacatagcccccattagttggcttcatctatgtaaataccatctgaagagtataaggatctattgaaataa

SEQ ID NO: 116756 - DNA, 317 bp, Homo sapiens
gccgtaaatcaaaagacagtcactactcattacctacttagaattccccgagttcttcctgggaagccatttctcatctgtttgatctcggagccaccagcactatctccaggcacgccacccatcacggcagccgccagacacttttttcttctgggctcctttctcagcacctagatgaatttctacctttctccagctttaagaagagctggagacaagggtagaggccgagaggacaaggttagaagccggaggagacaaggtagaggccggaagaaaaggtagaaggcggaggaggacaggtagaggcgggg

SEQ ID NO: 116757 - DNA, 4312 bp, Homo sapiens
  misc_feature (1129)..(1129): n is a, c, g, or t
  misc_feature (1539)..(1539): n is a, c, g, or t
  misc_feature (1900)..(1900): n is a, c, g, or t
  misc_feature (1947)..(1947): n is a, c, g, or t
  misc_feature (2372)..(2372): n is a, c, g, or t
  misc_feature (2799)..(2799): n is a, c, g, or t
  misc_feature (2844)..(2844): n is a, c, g, or t
  misc_feature (3035)..(3035): n is a, c, g, or t
  misc_feature (3481)..(3481): n is a, c, g, or t
  misc_feature (3754)..(3754): n is a, c, g, or t
gacagagtaataagtagaagaaggaaatcagatttttctaaagcctactccttcctcactttgaaggccttctgggaaagacagcaaagttgagctcatataaaccaaaagctctggtcccagttctccctgtatggtggggagaattgcccattctttcttacttctgacaactggctcttcaagtacacttcaaatacctgagaacctattcatatccattctctgaatgggaagaaaattgctcctccttggcaaacatctttggcctgggcaaaactttccacttttttcatttttgtggtcactgttctcttctatatccttttatgtattagtccataagcactaagttttgaaagcactaagacattctagagtccttgattgttcacccatacttccatttctttattcaataaacatgtattaagttcctattatgtcagatgtgcaaattcttatggtaataaaaagatgtatgagacatagacactttatttagtcaaacactcaacaatatttgaacatctactgtgtacaaggtgctaaggatcaataaaggagtagtgcagtttaagacaacacaacaaaaacaaactcttcactccactggctgtaacacatttctactctgagatcttcatggcacaacttcttgaacaagtgttttcaatagtcactctcttcacatttttcttctattcctcaacatacagaagaaacgtgtgttggactttccagttgaactttcaacccaactatttgtggaaattgctattaccaaattacttatgatgttgccaaaacaaatgatcaattctcttcctgttacatttcatgcatcagaagcatccaacatagtggaccacattctttttgaaatactttcttcacttgacttttacaacgccatccgctcctaattttcctcctgccggccaccgactcctactcagtatctttagctggcccctcctcctctgttcaacctctaaatgtcgatatgtctattccaggattcagtctagaaacttttccttttatccttgaatattcttaccctagcttatttcatctagtcctgggcttttaaaaatcactttacgctactcatgtccaagttganctctctaggactatagcacaaggggtataattattctaaagtaacccagaagtttaataagctggccaagaagagggattttctttttcccagcatgagggactctacctagtatatgtctctatagaatgggtggctttctctcctaagaaaaggaaaaccctttgcacgagccccaaaaactctaggttctgggcagttgattttcccagataatgttgtgaacagctggcacctaaatctagactgtttcacaccaaaagcctgtgtgttcctccattgataaagctgtgtcctcatgctaacatgataaaaaattatagtaagggaaactagtcttcctacactgaaacacagactcatattgtgagcccagtaatttcctgaccatttatgcatcagtgtaaganaggaggatggggaaatcatgcaatctattcttttgctgattagtaatctttgtgagttttcctaatacagcattttttttttggctgaacgcagaagaatttattgatggtacacaacaaggtggggctccctaggcctctccctcttcagagggtctgcatggaaactgtgaggaggggagattctcattgtggtggggcactgagtgtggcagggactccccagaagctgagggcctctgttttcctctcatgctctcgctggggctggtggtccagggatcttactctttgaaggccctgtgggcaatgaggtcgatcacccttttgctatagccaaattcattgtcataccagaaantgagcttgagaaagtggtcattgagggcaatgccagtcccaggatcnaaggtggaagagtgggtgtcgcagttaaagtcagaggagacaagctggttctcagtgcagcccaagatgccctcgaaggggaactccgatgctgcttcaacactttcttgatgtcatcatttttggcaggatttacataggcaagtcaggtccacaaataacatgttggcagtgaggacatgaaacgtcatgccagtaagcctcctgttcaactcagggatgacatttcccatagccttgacagtgccaggagatgcaggaatggcattatggagagccccgcgactctcatggcatagtttcctggaggggctatccacagtcttctgggtggcagcgatgtgtggactgtcgccataagtccttccatgacaccaaagttgtcatggatgaacttggccaggggtgctaagcagttagtggtncaggtgacattgctgatgatcttgaggttgttgtcatacttctcatggttcatgcgcgtctcagatatgggggcgtcagcagaggggcagagataatgacccttttggatccctcctgcaagcgagccccagccttctctatggtggtgaagatgtcggtggactctatgatgtactcaaggccagcatcaccctatttgattttggtgggatctagcttttggaaaatggtggttaaatttgtattcatgacaagcttcccgttttcagctttgacggtgtcatggaatttgccatggatggaatcatactggaacatgtagaccacgtagtcgaggtcaatgatggggtcattgatggcaacagtatccactttaacagagttaaaagcagccctggaggccaggcacccaatatagccaaaccnattgactccaggcttcaccttcactgtggtgccttgggaatgccnctggcgctgcacaagaaaatgtggctgtctgtcgaacgggagaagcagaaatctacagcatattatttaacccataattatcatattgagaaattctttgcgaaatctggtaccaataggtggtgactcagatgggcatcacttgacatagcatgctgaccttccccgagcatcatgtggacaattcagtngtctcagtattacttgtttaaaagactatccttttgctccaatgaattacttttgtgaaaatcaattgaccctatgattttggccgttaactaacacataagcaataatttcctcaaaatggattataggcctaaatttaaaggccaaattatacacctcttaggagaaaacatagattaacatactcatgaacttgagttcgacaaaatcccgatgtttcctggtagaagaaaaaagttgaaatattgagtcatgatcaaaactaaaactgtttgcattttaaaagacatcaataagataatggaaatataatccagagactgagaaaaaaatttcaagtcatacatttgataaaagatttgtatccaaaatataaaatacactgacaactaaatagcaaaaagataaataagccaattttaagttgggcaaaatatttgaatanccattgcaccaaaaggtgtaggaatagctaataaagcacatgaaaagatggtcagtatcatcagtcagcagggaaatgcaaatcaaaactacaatgacacaccacttcttacccactagaatgctatgataaaaatgaaggacaataacaattgaggaagtgaaataacaatgatgtggaaaaattgaaatactcatgcattgttgatgggacatgcagccatgttggaaagcagtttggcagtttcttaaaacgttgaagatacatttaccntattacctagcactttcattccttgttgtctactccaaaggaaaaaaacctatgtccacacaacacatgaatgtgaatattagtagcagctttatccataatagtccataaagtagaaacacatcaaatatctatcagctgatgaaagaataaacaaatgggagtgatccatacaatttaatagaatttagcacctaaaaaaataaaatattgatacgtgctacaacacaggtgaaccacaaaagcacattaatctaagtgaaagaagacagatacaaaaaaccacatgttgtatgactctatttttatgatatccagaaaagacaaatctgtagtgtcagtaagtcaattaggggttgtctggagctggggagtgggaataaggggtggtattgatgagcatgagggatttcttaggaattatagaaatgttccaaaacaagattgtgatgatggtcaaacaagtctaaaattttactaaaaataattaaactgtacacttaaaataggtgaatgttatgatatgtcaattatacctcagtaaagctgtttaaaaac

SEQ ID NO: 116758 - DNA, 862 bp, Homo sapiens
tcctggaaatttcagtattgtgatgttaaagaacatctctaaactgtgtctacgttgaaaaatcagagtcctgatttttggtttagaaaacatggtcacctggttcttcagttgtaaatataattccttcctagacctctctaatgcttaagtctaaattcattcttaaatgaataaacttaatattaaaataagatcaggaagtaaatcccaagccaagcatttcagaccagttgtgaacctcttttgacatgtttttggtaaatgagaagaactgatgacatatttccctatcaaataaaatagacaatttagatttaataaggcagttatcttcaggtaataaaaattcaactaacttgccataactatcttgtttaaagtcaattaagagcctcatatttctcacttgctgggtaaaatttaatagaacttcagttaagcatttattgcttatttaattcaaaattaagttaatcaccacagttggtaacaaccactgagtatttaattaacattcagcaaactatcttattaagtctaaattagatacagacaagtcttgtttatccccatcagtttgcaaacaccacctcccccacctcccatcccaaggggcctttggttttcctacagttttccttttttgattcatcatctgatctatcaggaaaatttagtatatacttatagcatgggtatagcttctagcaccggttgaataatacattaattctggggatcgaaagacacgtggagtatggactggttcagatcacgctacttcccatgtcatttcaacttcccaagtttctgactgcttaataagtctatggcagggaggtagaagaagcgcagatcg

SEQ ID NO: 116759 - DNA, 408 bp, Homo sapiens
atggagaatgaagatacaagaaaagcataaacttaaacttagtggccaagactttagcagatattgcatggatcaaatgtaagtgctcaaggctactaagttataactcttcttttggttataaatattcacttcagtaaactttaggtgggatctgaatagagaacacaagttactttcttcataacggatatatagagtcgcaaagaataagcattaattgagcattaattaattataccttcaggtaccaagagaaccaaccggaacagaaattaagtcattccttctttatctctacagaagcgacaaggtgagggcacgaaggatgccaagattagaggctctagaagatctcgccttcttttccagagaagatgctcaaagatctgtctgctaactgggccc

SEQ ID NO: 116760 - DNA, 420 bp, Homo sapiens
cattactgagtgcttgctctgatctcacggtaccagggccacacagagatcccaaggcatggtccttggaggcttgtagagaggccaatgtgtgaacattcgtaattatatgacttttgctgccataatagaggcagaaaaacatacattaagaatgaagaagaaagaatgctgaatccagaagaggctgacactttaagaaagttgtcggtaggggaacaacacagtgaggcctgtcggaggagggtggtggggagggagagcatcaggaagaaaagctaatggatgctgggcttcaaacctgggtgatgggacgatctgtgcagcaaaccaccgtggcacatgtttacctttgtaacaaacctgcacgtgctgcacatgtactcctgagcttaaaagttgcagaagaaaaaaaaagtt

SEQ ID NO: 116761 - DNA, 324 bp, Homo sapiens
ctagtattgaccttggtaccccagagaccatgtggactgtcagttgaaggaaagcccgatacctctcttctctcaaggtataattagataaagcattagggttcaaacacatttttaaaaactaaaaagaaggtattgtattagaagttccaattagagtgtgcaatagatgttcagcaaaaagaactattcctaaaatgttcctatctttggtttaatcacaaggtgtttgtttggttggttggttggttgtagtaattggccaaggtatctgattggcttggggatgtctttcctgaagaattatacagggaatcctctcag

SEQ ID NO: 116762 - DNA, 337 bp, Homo sapiens
aatcattaaaaatatgttgtctggccacaatggaattaaattagaaattaataaggaaaaggtatctaggctgggcgcagtggctcaagcctgtaatcccagcactttgggaggcagaggctgttggatcacctgaggtcaggagttcaagaccagcctgaccaacaaggcagcctgaccatctgtactaaaaatataaaattagctaggtatggtggcacatgcctataaatcccagctacttgagaggctgaggcaggagaattgcttgaacccaggcagcggagattgcagtgagccgagattgtaccatttcactacagcctagggaacaaga

SEQ ID NO: 116763 - DNA, 731 bp, Homo sapiens
cacacctgtaatcccaacactttgggaggccaaagagcaaggatcgcttgagcccaggagttcgaaaccagctggggcaacagagggagaacttgtctctacaaaaaatttaaaaatcagctgggcatggtggtgcacgcctgtagcccaagctatatgggaagctgaggtgggaggattgcttgagcccgagagtttgaggctgctgtgagctgagatcacgccactgcattccagcctgggcaacaaagcaagaccctgtctgaggtcaactctgcccccaggaaggtatgggaccttgcaatcttatctaggttgcgtctttttcattgaaatcacgaaatcattaaggtaagtagggaagggtcaagatagctaagatgagtgaggggacacagacaccaataaaagttctaactttgaggactcctccagtattcttttcatcctaaagcttctggcctatcagctagttcagacacagcctaggagtctcaagccagtacaggaacaaggaggcaggttgccctcttggggcaaagctgtggccccacccttgatgaagaacgcctgtaggaacccaggacctgtgagcaggtagagtcctgaaggtttaagattctgtggagcaggtatgtgcagtgccagtgcgcaaccagcaactgatggacaggaataggtagagctgctctgagtgcattcctttggcaagcctgggccagaggcacaca

SEQ ID NO: 116764 - DNA, 390 bp, Homo sapiens
ccatcagctctcctgagatgtattcactaccacagagcattgtggggaaaaccaccccatgattcaattatctcccactgggtccctcccacaacacgtgggaattatgggagctacagttcaacatgagatttgggtggggacacagccaaaccatatcaagcagacagcagtggtattttctgctatgcagctgtttctggcttccttctccatctgttgtgcacctgcgcaggcctgagagccgctggaggcatctctgccctccctttcaggctagggacttgttgcctgagccctctgcagaccgaggaggatctgggccatggtgggggctggctaacaaagggctgcgcacgttgcctcacacctgtaatcccagcacttggg

SEQ ID NO: 116765 - DNA, 372 bp, Homo sapiens
cagttctggagctagaagctcgagatcgaggtgttggcagggccttgctccctctgatggccccaggggagggacgggagtgtttgtgccaggactcctagcgtgtggtgggtgcttggcttgtgccggcacaactcgtgttcacatgggattcccctgtgtgtctgtgtccaaatgtccacttttcataaagaaacccatcagattagattggggacccatcctagtccagtatgacctcatcttaactaattacattcgcaacaaccctgtatctagataaggtcacattttgaggtattgaaggttagaatttcaatatatgaatggcggggagggcaggactcataatcatgggtaagtttttctgag

SEQ ID NO: 116766 - DNA, 312 bp, Homo sapiens
cctttgggtcaaattgtgtgtaacaatcccagtaaagaagttataatatagtataaaaagtacagtaaaatatgtaaaatgtatagaaatgatacagagaaaaggatcccctactccttggggtggaagagaaagtttccaggaagaaatgacataaagtgaggtttgtaagagaataggctttcagagaaaggataattcaggcaggcataggaacacacatgtgaaaacagaggaggcttgacctagtatagcttattatggaaatgtccatatgttgatattatagaagcttaacatgccaaagggggt

SEQ ID NO: 116767 - DNA, 447 bp, Homo sapiens
tctggtattgtcagccttccttctgtctattgcctctttcatcagcatacagacaccacaaaacataatgagccccatctctttgaccatctccttctctatccactgctcctctatttacagtagactttgggaaacagcaatctgtgctttccccacctcctgctgttccacttaaaatccctgtgttaattgaattttgaccccaccactcttcagtaatcgtctttgccaaaatcaatagatatttctctgctattaacatacttgacttctccgcagcaacggaaactactgactttcctccaaactccctctcatcctcggtttaccagatgagcccagcttctattgactaggatctctgtggccttccagctttccttacacgctctttccctctaccctcaaattttccagtaaccaagtatctgctttgccctcctc

SEQ ID NO: 116768 - DNA, 455 bp, Homo sapiens
aatcacagttactcgggaggctgaggtgggagaatcacctgagtccaggaggccgatgttgcagtgggccaagactgcactactgctctccagtgtgggcaatgaagtgagacactttctaaaaaaaataaagaaatgggcaaatgatctgaaatcttcaaaagaagacatataaatgaccaacaggtacatgaaaaaatgttcagcatcactaatcatcagagaaaggcaaatcaatactataatgagttaaaatctcacccattatatcgaaaagcaggcagactgggcacagtggcacatacctgtaatcccagcaccttcagaggccaaggcaggtggatcacaaggtcaggagttcaagaccagcctgggcaacatggtgaaaccccgcctctactaaaaatataaaaattagccgggcatggtggcatgtgcctgtaatccaagctagt

SEQ ID NO: 116769 - DNA, 555 bp, Homo sapiens
tctgcctcctgggttcaagtgattcttgtgcctcagcctcccaagatttaacatttctttggatattttgtgtgtgaaacagtgtaaatattatttaaatgtagactatgattaattaaatatgtatattgtaagccttaagtcaaccacgaaattttcttaaaaataatgaagtcaatataggtaataaaagggtctcataagtattgcccaattaatctaaaagagaaacagaaaaaagagaagagaacaatatttttaaaagaacacatggaagaaatagaaaacaactgtcacaatggtaaattttgaccaaccaccagtaatattaaatgtgaatggcctaagttcaccaattaaaagatggagattgttagattgaattaaaattaaaacaaattaaactatgtgctatctacaagaaacctttttcaaatatgaagttaaggaaaggatgcaagcgaaaaggaaggcaaaagatattgtatgtgttatacctgaattgtgtctctcaaaattatgtatgttgagaccctaattcccaatatgactgta

SEQ ID NO: 116770 - DNA, 181 bp, Homo sapiens
tagatttttgcctctaagaatctcagaatgtatttgaacagcaaagtgaataatgaagtattaataatactcaggatttcaaaaatttaaatgagtagtggaaaaattaaaatctaaaccaaattttgcaggatagacaggagttttaagtggattgtcattcttctaacctctttacggg

SEQ ID NO: 116771 - DNA, 608 bp, Homo sapiens
gttctggagttaagtacctgattttgaattctggctttgccagttaaaaactgtgtgatccgtgctagttacttaattctcctaagcctcaagttcctcaactgtgaaatatgaataaagaccatactcacctcacagtgcctaccacacagtatgtctatgattattatcaggtgaagtcaaaccagatctccaatgccaggctccagtgcccctcatattttcccctgagccttcattcccaaccctgacatgacaggactggtccatcccagacttgcatatgttctggagcatttcctgaagtttgttactgttgacaggagttctgtgattcattaagtttcagaaatgctaaattaaacaaagttcaccaagtgtcttaacttcaggcctttcagagcctctaccatatgctaagctgcttattagactggtggcatgcagagctttcccaaaccaaatgagtcaagggccaccttattctcccaggattatttcctggaacgagcaagaaggagccgtgaccatggcggtggatcctggtagcaccctgggaagcatgcttgatctcctgcagcccctctcctgggccagagcccagaggc

SEQ ID NO: 116772 - DNA, 218 bp, Homo sapiens
aaatacaatcattttgtaaacacatcatgggttcactattttttaacaaattaataaaagtatttagatttttttcttcattttcattcctaagataataaatattgatagtggggtcctgagatcacaaagtttgagaacgccagccaagcaagtgtcagagctaactccaagcctatgaaccttagtgcccacaacactgaccactacatgaaacc

SEQ ID NO: 116773 - DNA, 559 bp, Homo sapiens
aggggaaggtgtgcgagatctgaggacctctgggagtgatgcctcactctggagagagaagcctggggagggtgagcagctgggcctgttacaggcctagggacgaagctgccacaaagaggacagcagaggtgaacaggggtggagagaccaagccagaaccactgcggcaggacaaccctgtcctcctcctcatgaatcgaattcagtccaacacagttctgcatcctttgaagctgtttggattggaaattctgttacccacgaccaacagtatgttcgcattggtaacaatcagtgttagtaaattacccattacagcagtcctctgagataagtaccgttaagtctccgtttatagatgaggaagcagaggctttgtggggttagttaacttttccagatcacaggactaagtagcagagctgggttgcaaacccagttctgtctgattcccaagcctgcctcttctgcccagcggtatctgtctgttcccacatcctcagcagcttatcgggaaggcgctcactttctgggaagcaggaggaaacccactctg

SEQ ID NO: 116774 - DNA, 445 bp, Homo sapiens
tgagctattcatttctcatctattctatcaagtaggctcttgaaaccccaaagtcttaccctgtagagctcattggacattagccagcaaacgtggtcgacgccaaactagccaggaagtctctgcatttcagttctaatatgtctaacactggagcttctttctccaaagccaagggtgaaaagactgcagctggccaccatgggtcttctgttgtctaagaatctgtagatgcagagagactggagaccagaagacaaagacagcctcatgtgcatgaacttagccaagttgcacactggcttgctgactaatctgtcttatctccttatctctgtgaatgcagatccctgaaacactgttgtagaaactggttgtcagaaacagaactaaggagtcaattgaaacaatcataggaccagtagccaggaaaggaagagaggta

SEQ ID NO: 116775 - DNA, 354 bp, Homo sapiens
gataatgcaattgagaataatctctcagatctcgggatcctttaacccctaggctttttgggagaagactccaaaatattgctaaacacatacctccatgctaacttccccactctcttttaaactactgacattttaaaattacaagtgaacaaagtctcatccatcagctctatcagttttagcaccataatactacccaaaagaatgccactactaaagaattatttgtaactctttcctgagaaaggacagcttgaaacctggaagataatggtagagttgaatataattcaaattcatgtacctaaatataattcaaatacatatgaatatatatattagagtatacag

SEQ ID NO: 116776 - DNA, 564 bp, Homo sapiens
cctgccacctactcaagtcctttgcaaacgattccatacccactgcattatcttcgcagcatctttttggaacacaaaatattgagacagcctgctaaattgcatatggaagtttccaccaaacatcagactttcgacttactggtggtatccatttttaaattcctaatcaatttaaggcatacaaacaaagatttttaggaaatgttagaggtactgatggatttacatgagcaaccaggtacttacagaaaacacctgaagacaccacaaaaaactaaaatgtcatctggtctctatatcatcatggctagatattatcaaaatgatagatttttaaaagcaagtaacagaatgaaacacacagtgtatcatttatgttaatgaacatgtaacactgtataggtccttaaggaaatattcatatatagtaaaagtaaatttagaaaaagataaaaggatatatacaaattcatattaactacttctgagaagagagggaaataaaactggaaaggggaacaaagtatatttcaaacgttatccgtaacatttcatttattc

SEQ ID NO: 116777 - DNA, 646 bp, Homo sapiens
agggcaatggggaattgcagaaccaagatctgggttggtggggtgagtaagaagtggtagaaaactcagagaggtgaactctgcttttgagttttatcttcttgagaaaaatttcagttcaaaaagtagaggctaaaagattaagaaacttagcagagctttcaacaagttcatgggcttgagggtgtggtaattgtatttaggtcctgtgaaaaggcagaagccctagtaaacaacctaggctttcattgagaaccctgagtctaggtgaatcagaaataaaacataggtagtgaagccaaaactcaaataatttcagattagtgcccctagcctagatgtctgcctgaagccagaataaaaattctctttggaggaagatgcttttcccagaaactcaggttatcactgtagtttttcatgtactatatctgtcagtcagtagaaataatagacacatcacatgagaagaccagatatgattaaaaaaaacaataaaaaataaacaaattggatatacctacaagagatccagataatagataatcaaatatggtccctaccataactgtgattaatatgtttcaaggattaaaagataagattgaaaactctgccagagaactgaaaattgtaaataagacca

SEQ ID NO: 116778 - DNA, 213 bp, Homo sapiens
gagacacgagtgaacccaaagccagtgtgtctgaaatccatttggcaagcatttgtgccatgtcctataatatatatatgtccatatatatattataacatataatattatataatatatgtccaatgcctgtgtggggaagtcacttcaccattttgctcaatggcaatgaagaaatggcattcatgtaaacactttctcagtctctaaaaa

SEQ ID NO: 116779 - DNA, 143 bp, Homo sapiens
gcttcttcccctctctcagtcttcatagaactgaagagaagagaggggccttgctctggattaaactctgacctaatagaatgcttgtggctggtctgatcttctatcctgaacactaaagcttactcctatcagcaataagg

SEQ ID NO: 116780 - DNA, 132 bp, Homo sapiens
cctaaaagagcctcacacttataggggccccagcgcagtccacggtgacactggccagccacgtcggggaaaaacaactctcccatttgaaaacatggtggttccaatgtaccaagacaaggttcagggtgt

SEQ ID NO: 116781 - DNA, 198 bp, Homo sapiens
tagtctgagatttttccatttgccatagattccttcacccttttgctctgtgctgtctctggtatgggtgaaagaaagagaatgagctctaatatttatagtacccaccacggttgttaggccctgtacactcttacttcttttcaattcctcgcaaactacttcctcaccttattataccacttaaactacttatag

SEQ ID NO: 116782 - DNA, 441 bp, Homo sapiens
tacaatcagccagttctgcataatcttgtggttcacgagaggggaaggaccacagcttctccttgagtccacctgggaagggcatctgtggacaccttctctctgcctccctttccttcctcccagttccttcctagagggatggtgtttgatttctgaggccctggacatttcttccagctcatcattcaggttgttcagagcatttggaagacgagcttttctcttgccaacactgaccgcctcttgcgggaagatgtcgcagcattattatttaataacccgtgtctttcttcagctcatcaaagaccttccagctccagataaggagtcggggtagggagtaaggaaacaaagggatgagggtactggaaaatcccagctgccccttatcacacaatcaatatattcaatcaatatagttaatagcaatgtgccaat

SEQ ID NO: 116783 - DNA, 426 bp, Homo sapiens
acatacaatgagctctttcaaggaaaggacacctcgaatggtgttttaatgataaatatgaatacataatatcaatatttagcatctaactctgtaataagggctttatgtacattatttcatttaacccttatgatagctgcaatgaagcaagtactgttgctatctgcacttcacagatgaggcaactaaattaaagctcagggaagctaggtaacttgaccctggtggatctagaattcactaccaggctgtcctacagtgggccatggtgacctgcaggcccaggtcacctgattgctcttgaggtccaggtcatctgattgtaagtgaagacctgattgctcttgaactctgagcctagcagggtggtgcacaaatctgtcctgttcccctttgtggagacctagggccacagctctgctc

SEQ ID NO: 116784 - DNA, 396 bp, Homo sapiens
atggtagtacatggatatcatgttacttatggtgttggggtcaagtgcacaggttctgaaatgatccagaactgagtacaaattctgccagcagtcaatactgtcaagatggtaggtttggccaggagcattggctcacacctgtaatctcagtaccttgggaggctgaggcaggcagattgcttgagcccaggagttcgagaccagcctgggcaacatggttaaaccccatctccactaaaaatacaaaaattatcctcgcatgatggcacacacatgtagtcccagctactcggaaggctgaagttggagggtcagttgagcccaggaggtcaaggctgtaataagccaagattgctccactgcactccagcctgggtgacagaaaaaaaaaaa

SEQ ID NO: 116785 - DNA, 322 bp, Homo sapiens
cgcctgtgagtgctgggtgccatgtggagaggccaggagggccgcccgtgagtgtcgggcaccatgtggggaggcattgctttctctgtgggagcgaggtggctgggctgcagagttactgtgtggcgttggggtgacagcagtgtctgaccatggaccatgacatgaatagggtttttccttacacaagggtaacagattaagttttcaggaatatatctgacagtgcaattgaggagtgaaggggccagtggtagttctgtaagttttcctccataatattgtaacatttataaagacagcacagtcgtcccttggtatc

SEQ ID NO: 116786 - DNA, 737 bp, Homo sapiens
agcggggagtcacgcgaagtcggaagtaccagctgcgggaaggagctgcccactgtgcgtcttctcaacttgttgggacaaccttcctgcggaaaggagagacaaccttcctgcagaaaggagctacctgcttcaggtctactgagagctgttctgccactcaataaagctcttctccatcttgctaagcctccatttgtccgcaatacctcatctccctggacgcaggacaagaactcaggacccgcctggaggactgacattcagacgtggagcaagttggactgcatagggacccaccagtgagatggacgctgtctgtaaacggggaaatttatggaaagatgtcctcctgcaactgctgaaaatgcaacatgctgcccaggtcctgctcagaccactgacaactcagaagttaatactcagagtggaaagccttctggaggtgagacccgggaacaccaggcagaaaaagcaggaagatcattcttcagggagcttgtgtgcctgcctgaaaagctggctaggcattcatcaattgacaggtttctgcagttggagcgtaatctccctggaatgctctgaatcttatccttcacgtgaccttgtaagaaaccagagtatgcacagattcaatatgggaagtgctcagcaacctgtttcaaagctctcggtaaaagtttgcagggatcaacaaggagtgggtgacttcagtttaaatccacccttggaacctg

SEQ ID NO: 116787 - DNA, 300 bp, Homo sapiens
gcatgcaaacacaggcactttattcacccaactactttgcataatgtttaagaagcagcaatgaaatagatcaaggagggtaaacttcccatttcccttttagcatcactgccaagcaactaccatgtgtccctatcagaaatatggctcagggccgggagtggtggctcatgcctgtaatcccagcactttgggaggccaaggcaggtggatcacctgaggtcaggagttcgagaccagcctggccaacatggcaaaaccccatttctattataaatacaaaaattagccatgtgtggt

SEQ ID NO: 116788 - DNA, 241 bp, Homo sapiens
aacggtatgcggttgaagcgtgcatacagcagattgctgaggcctcactgccagggatgccagccgcagcctccaggagggcatcagggaaggaaagagagctgctgaggagggactttgaagctgaaaagcagtgtgactgcttcatttgctcccatgccaagtgacagccacaaagttagttattcttctctacaggcttttaattgtctgtaatctaattaccactcaacctgcttcc

SEQ ID NO: 116789 - DNA, 563 bp, Homo sapiens
ccgtgggccgcactggcgcactctgtaacactagggggaaaattgtctgtagctcatggccccttcccccatgtggtggctcatgcctgtaatcccagcactttgagaggccaaggccaggagttcaagaccagcctggccaacatggtgaaaccccacctctgctaaaaatacaaaaattagccaggcgtggtggcgtgggcctgtactccagcttcttgggaggctgaggcacaagaattgcttgaacctgggaggcggaggttgcagtcagccgagatcgcgccaccacactccagtttgagtgacagcaagactgtcaaaaagaaaaaagggcaaccatgccatgtgacacaatcatatcacaggattggtagcgtaactgcccagtgggttcacctttcctgctgcctggacacagctgattttctcaagacgggggaattacagtagagaaagggtaattcacgcagagccagctgtgcgggagacaagggttttgttatcactcagatcagtctccctgagcattcagggagcagagtttttaaggacaacttggt

SEQ ID NO: 116790 - DNA, 542 bp, Homo sapiens
gatccatatacacttagccaacattgccttctaacattgcaatgataagttcttttaattgagattttggaatggtatagctatctggaaaatatttcaaatgtcattgtggagcttttggttaaatgtgagttttaaaagtttgataaatagaataaagagcggaaaggaaaaatagttatgaatttgttgaattgtttgggctatgagttatctttttaaaaagaggttttatgtttgtgtagaaaatgccactaaatataagaaaatggaagtttaatagttgaacaaggtaagaattgcagatatcatgagattgtaatttaactggagtatgcattaaatgaattgtatatttcactagcttggtgaccatgaatggttttgtttgtcattttatctttcttttcttttctttcttttttttttgagatggagtctctttcacccagcaccgagattgcgccactgcactccagcctgggcaacagagcaagactccatctcaaacaaaacaaaacaaaacaacaaaaaaacaaaaa

SEQ ID NO: 116791 - DNA, 1117 bp, Homo sapiens
gtggaagattgggttttatttattgtttaatggttttacaatacccacatatataaggctgtttactttattcttgaactctcaagaaacactcattggccttcgaatcgtcaagtgattttacaaacacaaattttataaagttctatttttctgcctattgttagttatttgattcgtttgtagtatttataggcctcccagactccatgcttgtaaccacacttatgttaatgcctcataattgaaacttggactgatggttttgcatttgaagattcaccaaccatggatggaaatattcaagaagaaaaccatagtacaaaccatgctatgcaaatactatgccattttatgtaaaggacttgaggatcctccggttgggtatcctgagggtggcggtcttgtaaccaccactcctcaccctgaacatagggagggatgactgtactctatacagtcttttcttcgttacttttcaggagtcagtagagagggccctaaggcctaagaccaaacttggttccctagaagtaaagaatgacatgggtcaaataggatctgtatgctgaatcacaaaatgttagcacttagagcttatataagccactggttctcagccctagctgcaaaatgaaatcacctgagagtttttaaacgtactaatgccaaacacctagaaagtctatgctaatatgcatcatatattgagagtccccaacctgttccaattcctttatttcataaattgtggcccttaaacaaaattaatgattttgttaatgtctttaggaacacatccattatgcctagaaattttatacactaatataatttataatgatgatctcttctgtctcagcccattctggttgttatgataaaataccatgcacaggtggcttaaacaacagaaatgtatttttcacagttcgagaggctggcattcccaagatcaaggtgccggaagattcggtgtctgtgagggcctgcttcctaagtcatagatggcagtctttgctgctttttcaaatggcagaaggggcaagggagctccctggggtctcttttgtaagaccactaatcccattcatgaggagagaggcttcatgaccta

SEQ ID NO: 116792 - DNA, 287 bp, Homo sapiens
tctccacctcctaccctacccccacttccaaccaataagcttatatcaataaatatttgttggctagtaactatatgcctcagatactgctctcatctttgggggatacaaaaataaaagctggagacgtaagcattttctcaaaaatactcataatctggatgggaagacacactgtgcacactgtggtctgcagagtactggtatctgctgtgatagtcatatgatcaatatcctgtgggagtttgaagaagggcctcgagacttagcctaggaatattagggaa

SEQ ID NO: 116793 - DNA, 218 bp, Homo sapiens
ccaaaggctgtgttctcagtctacccagttcagagtcagtaagtccgttgactctagcccctcattctcccctgcctccatctatttatgcatgacatttgtccacccatccatccatccatccatccatcagtccattcatctatttgtctaagcatccatccatccatctatccgtccattcatccatcctctgtccattcatccatccatctgtc

SEQ ID NO: 116794 - DNA, 639 bp, Homo sapiens
tagctctcacatgtgcacaaagatacatggaaatgtcatattaacactatgaacacagtgttcatttttcacaaagaaaaataggaaatgaatatccagaagacaatggataactgcaatgaagtattttcttataatgaatttccaagtagcacaaaaactttgaaaataaaactaaaggaatgtgtcaatttggttgaatctcacaacactagaagaacacgtccaacaaaagagcagctctttcaacttaagtttaatatgtatctatcttaaaatgtaaaagaaattatcctcacttgtaaaaaccaatttgccttcaagaccataaatatcaagatctcaagtcttttttttttaagagacagggtctctgtcacccatgctgaaatacagtgacacaataatgactcactgcagcctcaactcctgtgctcaagcaatcctgcctcagccgcctgaatacctgggactacagctgggcatcacaatgcctggctaatttttttttttttttttttttttttttacttttttttttttttaaaaggagcttgcataacttttgaaaggaaaaaaaataagtattcttccaaaaaaagctttaaaccccccttaaaaaaatgattgttaatttta

SEQ ID NO: 116795 - DNA, 539 bp, Homo sapiens
tttgtttgtttgtttgttttgtagagacacggttttgccatgttgcccaggttggtctcaaacttccggagctcaagcaatccacctgcctcggccttccaaagtcctgggattacaggtgtgagccaccatgcccggcgattacatctgcttaagtaaatcattggtcccatgtctcaactctgctggctagaaatacaaattctaggaggagaagaaggccaggggaatagaatgacgaggaaaaatctttaatgacatgctgagctgtcatgttataaagaaaccaaaaaatactttctgggagacaggcttgaagtggagacagagagacgtcatttccagcctaggggctctagggtgaatttgtcatactgatttttggtgggttgttttggggcagattgcttttcaataaattgtctgcctgcagcacggtatgaaaggtatgaaaggtgtcctttggaagggtcgcggctcccacttccctccagcacttttaagacatagtgggccaggcacagtggctcatgcctgta

SEQ ID NO: 116796 - DNA, 680 bp, Homo sapiens
atggaacaaccctgggaattgtatttgtgattatgatagcagaatgttcttttataactcaaaggttctctttcatcagaataagcaatatctctgaatactgagtaagctaatgtcagaaatgagttaattagactttttactttttatattgtttacatcagttctaaaagacttgtgtttcaaagtagcagaaatgcaatttcatggtattctgcttaagtgacttagagatatatactaactgcctaaagttgattattttaatgattttaagtgtaccgaaactgaaatacagatttgtgattttctaaccaatatacttgttccagaatgaagactctaatctgaatgttaaattataaattttctcatcaaaactaatgtgcagaccacaaagaagatgatcttagtaaaaggagctaaaactctataaaagttttatacataatttatgactggtaaatcaggcatagaataaactatcacagaatctaaacacaattaccaaataacctgaggttattggtaaagctaatttagccttttaatcaaatattcagtaaaatagatttagatcattgacagaataattagttaattgaaatttctgttttgccaagtgctatttgtcattatataaacacaagcactatttttatatcctgatagatgctgaa

SEQ ID NO: 116797 - DNA, 300 bp, Homo sapiens
tttttttaagtttttaaatatttgggattaattagcaataatattaactataaaaattaaaataaggcattatgccgtgtgttcctgcgtgtctaaatttctttttattcagacatttaaagcacatgataaactaactcctcaggaactgtgcctgccccagaaggttagcatgtaattacagcactgtattctaaattgaatagaggtgtggacagagactgcgactaactcttacacactggatagaggctgcagctaactcttacacacccaggagtcaccacagaaaagcttgct

SEQ ID NO: 116798 - DNA, 751 bp, Homo sapiens
aggctaggtcaggtttggggcccgggcagtccaggagaagtgcatttatgtcagcttggggaggtcgcaaatccgtgctgtgtccaagcccaccaggaatggattcaggtgtttatgggtgtggggattcaccaggtttaacccaggcccgtgtgagcaccactggccctagaattagcctcacctggcgccggcctttttgtgatggctcctgattaaatacccactaattctggatctgctggtgaccacagagttcacctgatgggtcccctacaggcagcattcaatccaggaagtgccagcatcacatggtgacttctggtagctgtaacgtttagtgactctctccatgtcatgcagaggggtgacattgagaccctcttatgcctgggaagttcctgctgtcaatgcagaatattctttaaaaaaaaattagagatgggatctcactgtgttgcccaggctggtctcaaactcctatcctcaagtgattctcccaccttggcctcctaaaatgctgggattacaggcacgagccattgtgcccagcctagaatattccttttttttttttttgagacggagtttcactcttgttgcccaggctggagtgcaatggcgcgatcttggctcactacaacctctgcctcccaggttcaagcaattctcctgcctcagcctcccgagtagctgggattacaggcatgcaccaccacgcctggctaattttgtatttttagtagagaca

SEQ ID NO: 116799 - DNA, 346 bp, Homo sapiens
tgtggaaatagaggtattaaaactgatcttttaaacagagactaaaaagaaagactaaagaatcaaatttcttactgaatgtaaaccctgttccaatctgacccccaagaagaatggccataaaatatactctgttcttctacaatatgtttctttaatgggaataactaactcagaagcaattggtgagaatggagactggggactatgttagtataacacagaattcatgttgatggttcataatgtttcccaacacattgttctgcactgagcacaaagtgtaataatgcagccaacaaggcagcaagggaccagtgccatgaagcctgttcactccacgtgc

SEQ ID NO: 116800 - DNA, 378 bp, Homo sapiens
aagcaccagcatcttcctggagaggaagaacctcttccacaccctgactttctcaagtgtattcatttgctgtggacttgctggacgttcatctgctaacctcagcaggaaattgcggaactaacacattagggcgtaagtgtaggccatttttccccagtcacatgtctcagtgcctaggtgtaggtccctggatatagttacctgtgtgccactatcacaaagttccaggatggctagatataggagggtcccaagaattgcacttgagaaggctgaggaactctccagctccgtgtcctggtacttccgttaggatcacccgtgttcctgccctagccaggtgcctttgaagcctgaagacaggtctggagagta

SEQ ID NO: 116801 - DNA, 874 bp, Homo sapiens
gaaaccatgcgcgtaaccccatgtgcatgccgagcaggcctcacgccagtttagggtctctggtatctcccgctgagctgctctgttcccggcttagaggaccaggagaagggggagttggaggctggagcctgtaacaccgtggctcgtctcgctctggatggtggtggcaacagagatggcagcgcagctggagtgttaggagggcggcctgagcggtaggagtggggctggagcagtaagatggcggccggagcagtaagatggcggctggagtggtttttctggcattgtctgcccagctgctccaagccaggctgatgaaggaggagtcccctgtggtgagctggaggttggagcctgaagatggcacagctctagatggagtttcaccacgttgcccaggctggtttcgaactcctgagctcaaatgatccacctgcctcagcctccgaaagtgctggagttaaaagcgtgagccaccatgcccggccaagagctgtttactttatccctccttcccaaatgttaattagctttgtaattgttacttatgtattatatattacttattatattattaatattttaacttgcttgatttcttttatgtgtagtgtataagagtgttgacatttgagaagttccctgtagaaatctattctttgatattgtctatgattttacaagtcctttttatttggtttaggaagatacattccagactgtgtatatatagtaaacgttttcttttaatgccgagtgctcttcattagctatttaattgtaacatatgggtttgaagcgttcccctaaatgtagtgttttattttccttcttttattcactgatacctttatatgatattgtaaat

SEQ ID NO: 116802 - DNA, 320 bp, Homo sapiens
gcagaggacaagttaggtgacagaattgagacagaggggaaggaagagctctgtactggaaagaagagagggggttgactcagaagtgaattagggccacgcccggtagctcacgcctgtaatcccagcgctttgagaggccaaggcaggcagatcacttgaggccaggagtttgagaccagcctggccaacatagcgagactccatctctactaaaaatacaaaattacctaggcatggtagtgcacgcctgtaatctcagcctcttgggaagccgaggcatgagaattgctttaacctgggaggtggaggtttcagtg

SEQ ID NO: 116803 - DNA, 236 bp, Homo sapiens
atgcagtctgggatgaaaacaattggtttaggatgagggatggattcactgtgtgtgattatcatgagtgctgctgagatttgtcccatggctgcttctgactttgggattttgaaaagcagcgctgccattgtaaaaatcaaaagacagcttcaagatgtactcaaatactttgctaaactgcaacagaataaaatgtcttcttagcagctcggtctatagtcactttaattcaa

SEQ ID NO: 116804 - DNA, 483 bp, Homo sapiens
gtggtagccacgatcatgatgacaacataataaacagtaagaaaatcattgcttactgagtgttgtctatgggccaggcagtgcagctaaacattttgcatgcatttttacttaactcttataatcctcagatgagggaggcactattatccccattttacagaggaggaaacaagggcccatcttttgaagtttaccctgaaggagggtggtgaggaagtcctggagacgctcaggcagtggaaggacacagtcagccacggtgaggagacagcagaggctcacagattttctgggacgtatccacatcctgccagcatcagggctggtgctgggagtccccaggagtcaggatgtgtggtgcaaagccagcccttccccaaacaccggggggctcttcctgttccatcttcccctcccccgtcaagcacaggcctgatctgcctatggggtgacccagtcatggggaacagtgtgtgctca

SEQ ID NO: 116805 - DNA, 505 bp, Homo sapiens
aaattagccaggcgtggtggtgcatgcatgtgattccagctactagggaggctggctggtttcctggcactgattgctccttttccagatcactggttcacgcatcagctgtaagtagtgctctcttcctaataaggctgactggttttgcgcaccactccttaatgacctcccgtaactccccatccccagacttcaagtttgggtacagtcacttcaaaccaggttgctatttcttgacttgggaccagatacagtagcagttgataagagccgagggactgtgttgtaagacaaatatttatcttgaaaatctagacccgtcttatgcctggtgtgatgctgacactctgagaagctcgagggaactagatggagacaggaaggagcagactgaatatctcttgactcatttccatgggatgcagggaagatgaacttgaaaaataattttttgcttttcccagtcgaagctgagcctgtctgcacatagatcagtacctgt

SEQ ID NO: 116806 - DNA, 326 bp, Homo sapiens
gagcagtcaaggctgcagtgagctgtgattccacaaatgcactccagcctaggcaacagagtgagaccctgtctcaaacaaatgaaaagcagaatcttatcatgtcattgttctgcctacaggccttttcttctatggcatgccactgtatttaggaataaagtcaagatccttatcaggacacacaacccctgtatggcctggcttcctctgtctctctccttcttggtcatcagtacaaagaccttctagaatctgagaagctggacatttacttctgctcttctttctctctctacctcctgccctccttgactgggctcttc

SEQ ID NO: 116807 - DNA, 317 bp, Homo sapiens
tcaatattttctttactgtttgatatgttgaatattgaaatagcatagtgagagaggggctaagatctctgtccttgcaaatcaaacaatgaaacagaggaaagagtctactctagcccacttggttttgactcaatcatgcccagcatgattaaagtacacaagtcagcatcgactgcagtgtaaaccttttattttctcatcttgcaccttatttggattctgagcaccttggggcaggaccatgtcacttatgtagatagtaaggcccatagtgccagtaaatcaaagttgtcaactaagtacagtaaatggta

SEQ ID NO: 116808 - DNA, 539 bp, Homo sapiens
acccaggaccaatttcttactctctctgctttagtgagtgtcttcatctgtccagtaggaataataatactatctacctcatgagagagatgtcattaggatcattggagtttataagtgaagtgtttagaatagcatttgacatacagtaggcactatatgagatttttactattgttatttttgctatcacctttatcctcaggaaatgttttggcaaggtggtttggaaaaaacatgtatatatttttagcccaggattcaaattggctgcctgtaaccacattgaatccaccaccaagttttgtttgttcatccaaactgaaagtttattttttaacagtggagaaacccagacatttttcttttaaaagctccagatttctcacttctcttgaaaaattaaaagatctggaaatgataagcctaaatatatacctaatgataagcctaaatttggagttgtcaagaagctgccccccttggatgaacagtctctctggtttggatctgcctatgtctagtgctcttcactcatg

SEQ ID NO: 116809 - DNA, 375 bp, Homo sapiens
aggctctacctcacaagcagtgtgtcggcctgtcttcctcatgccttccaaaacatgaggagacagagtgggcagcagcgtgtactgatgcaggctcgcaggaagaaaagccacctctaggggtgggccaagggctgcagcccaggagtgggagacacgatgtcaggaagttatatgcataaaaggtaggggcaccatatcacccagccgaggtccggagggttagcccaggagcggctctgatctgaaaacaagcagggctgctgagctctgtcttaacttggagaagaatcaaaggtcctatcaggctggaaagctagccagtgctgcaaacctccaagagctgccataagctgtacctagctgacttttgcc

SEQ ID NO: 116810 - DNA, 606 bp, Homo sapiens
cgtggtagctcacacctataatcccagcactctggaaggccaaggcaggaggacggcatccggccaggcccaatgcaatgaggccctatctctattaaattttatacaaatatgggctgggcgccgtggctcacgcctgtaatcccagcacattgggaggccgaggcgggcggatcaccaggtcaggagatcgaaaccatcctggctaacacattgaaaccctgtctctactagaaatacaaaaaattagccaggtgtggtggcaggcgcctgtagccccagctactcgggaggctgaggcagcagaatagcgtgaacccaaacaaattagctgggcatggtggtgcacgcctgtaatccagctacctgggaagctgaggcaggagaatcacttgaacacgggaggtggaggttgcagcgagccgagatcatgccactgcactccaggcctgggtgacagagcaagactccatcccaaaaaacaaaacaactcacacacaaaaaaaaacaacatttttgggcgcccttgggccctctggaaaggctttttaaaacccattccgtttgggggccggggccccaatggtgtcccgtggcaccctgtgg

SEQ ID NO: 116811 - DNA, 456 bp, Homo sapiens
tccagcaatgcacctcctgctctctgcagcatagatgaaatttcatctcatccccttcaaaagcttctttagactgagtcagcagatatgaccaaataatcctatttgcatcacagatccactcctttcctggcacacatgaagatgaacaactttagggtttcagtggggagcagaggggtactgtacactttctggagcagagggatgtgtgtcagcgctctgctatgcccttttcttacccaaggcggggtgagggaagagtttcctgccatttaaaccataccactcagtgactcactccatgagttcccccacccttgatacatacacatggataaccaagcacattaagtgctgggtgttcagaatacagctaaactgtctgattacaacccaaagcctggaaaaccttaatctctgttcccttttccttcatgtattccttcaagatat

SEQ ID NO: 116812 - DNA, 414 bp, Homo sapiens
taacggcaactgaactgtacactttaaaatagttaaatgtatgttatctgaattttgcctcaaagaaattaaatcctaaaattaatctaaccatatgcttgaaaatattatttctgagctaaaatagagttattctgagttattcttcccaactagcctccaagctccttaggggctaactaattttgagaaatgtgtgcaaattccgtcttcccaacctcaacaaacagcaccactctccacccaactgcccaacctgcataactagagaaacgctggtacctctttcattcctcactttccctcggccggtctggcatcacacccttcctgatccctcaaatctgtcttctcactaactctacttctaccaccagagtccaagctacttttttgttttttagatggagtttc

SEQ ID NO: 116813 - DNA, 115 bp, Homo sapiens
acctttagtgcctttgtaacattaaaatctaaattctccctatatgatctggcttttgcctactccttcaaactcattttgtctcactccccttcatacattattccacaaacta

SEQ ID NO: 116814 - DNA, 299 bp, Homo sapiens
cattctccttgcatcacttccagcgcaacagaaggatcaatcccagtggatgatgcctaggccctgcctctcagtgggccacatgcagctctgtgaccttggatgaatcgctcttcctctgtgatcctcattctcctcattttaaagcaggggtcaaaatgcagctagcaagtctcaggaagattaaatgacataaccttttatttgtaacaatctactatgtgccaggctcttttctggaaccatagagaccctgcccctaccccagggacaatgacagtgacaaccaatggtggaca

SEQ ID NO: 116815 - DNA, 117 bp, Homo sapiens
ggcctgtaatcccccaacctttctacgtccatgcagactgcttacacatgagcaaaggaggaaggctggagacacaagagccagagggaattacagtttgccatcccaaatgtacca

SEQ ID NO: 116816 - DNA, 570 bp, Homo sapiens
gacctagaggaccccccctggtatccccacccattattatccttacatagcttacattttatgacctgcttaaagatgcaaggagcataaatcttgggaaggatggtcttatttacttgttcgtcttttctgcagatgggatgctcacattagagccgggctggcttcagatgtctgctccaggatattttagctgaactgtatgagtccattaaacaaatgtaagagtttttgggaaagaagagcagtgtctcaaaccaaatgttttacatggagaacatctggggaatattggtatttgtgtgtacagtacatcagaaagcagcttggcggggttccgcagggatgtttctggcctgtggttgctggatttgacagttttgttgtaagggaatggttcttataaagtattgccatcaaagcaacgcttgatccaggaaggagtgtccttgcttagccgcacattcaaattgttctgattagctccccgaccagaccttccacgacatttgagcaatctgctatctgagctagtttcccccaaggctttacattccagagaaaggaagc

SEQ ID NO: 116817 - DNA, 863 bp, Homo sapiens
tggctggtaccgccccgggagattatgggatggcctgaatgcctatcaagagggcactgcttaaagaaacgattgtccctccaaacaacagaattctgtgcagcagacggcgcctgagcgatctttgagaactactgcagatgcctggcccagctctggccccggtgctgcctgcatgccaagcgcttcattagccgggaaagaagactcttgccctccttcgtctaatcctcgccagtgaccttcaggaaccaggcaccttctgacgttgggagcctgggatggtgcaatcatcaattacgccgtggcctccgcagctgttcctgaatggatttcttgctcagagaagcgtgtttgaaaagcatctaatggaacggatcatcaatttgtttgaatacacatctaatctgattaggggggcactggccaccagggcagctagtgcaactgagccttgacatggccccagggaatcataagtggggtggcggggccagtctagggaaggagggctgtgtgccctgggcctgccaccgagccctccttgagctcagcccatggtacgtccagccaaaaaagtcacagagaaaagcagaacacatcacacagatgccaggagagctgggcccaagactcctgtttttctatagccctggcactgggcacagagcctgagacaaagaagatgcttgggaaatatgtggcaaatgaatgacagtaaggcccaacatggaagccaagggatgtttaataaagtcatctgtgggacaagactaggtgatgcctgtattgggttgaatatgtctcccccaaattcatgtccttcccaaaacctcagaatgtgacctgatttggaaatcgag

SEQ ID NO: 116818 - DNA, 690 bp, Homo sapiens
ggcactcagctagctcagatgaactgaagacccttcagtaactgcgttctctatacctgaactggaacgcaactgggacatttctttttatagaaattctaatcttttcatgtggccacttgagaattctaaattagctggaaggtgtttcagtcaccaagatgtaaacaggttttatttcactggaaaagtggttacataaagcttgcctttcatccccttcaactaattcaaaagctctaaagagaaatattttaaccttgaattttgcaactttgaaatagactcatatgatattttatcagtgctttacttttatcttctgactgttcttccattacaactgttgtattacattgctttttaaatagctttggcaacctgaaatatgaattcccaggccctcaaactttccttctgtgattaattataattaatcctctcgcttgtcatttcgtctagtatcctgtcatacaacccagaagacactttgcaaaatttcaagcaggaaatctcctgcacatggtttaatgttgatgctgtttccaggtgtcatttatcttccttaagtaatccatacacaacccctccaagaaaggccctctctgtgctcagcaccagacatgctcagcaccacacatctttatgttggatggataagaaagattgcaaacttaaggttgccagatt

SEQ ID NO: 116819 - DNA, 325 bp, Homo sapiens
agcatttgggtgggtttctgggttttgtttttgctgccttctaagtagctgacttttcacccccaagctatgcttcttgaggcagagaagtgccagtttattttgttttctgtctctaaatccagttccttaatgcaccactgagactcagtttagaagtacagtgaaactttgtgagcatttttctccctgagtttgaatggatccctctctcattctttgagttcttgggcacttgtctcttagacactttcaagttacctactggacaggagagacctcttctctataaagtatcacacttggaggcttttcaggcacagga

SEQ ID NO: 116820 - DNA, 313 bp, Homo sapiens
aataaacaaaatttgtattttactttggagaagccatgccctggctaaaagcattcataatcacaaattgtaaatgctgatctgaatgtgtttgcacatacgtagattttggtactagctatgtttggtgcagttggtcatggactatgagcctgcaacctccatttctagtccagctggttttgtgtatgttttgaacagtctgtgcctctgtgtaataatgatggattgttgtgttttttcctcagctcccccttttcctgtaccactgcttaattagaagtatgtcaaggactttgaacacagcgggagc

SEQ ID NO: 116821 - DNA, 282 bp, Homo sapiens
acaaaaccatcaagtcaacgtgatggtattcatttgtaatgatcaccactgaatttttaacaactgcttttgatccaactgtctcccttgggaatattgggcaacactaggaataatctggacaacatgttgaaagctttggatgcagtttagaaacttctatgggggctgtactttccctatagccaaggaaagagaaaaaaacaagtctgagggtggcagatgggaaagaatagtggccttggcaactggaagccagtttcaatctgagctgaagcaatt

SEQ ID NO: 116822 - DNA, 723 bp, Homo sapiens
aatgatgaagtattgaaagcagtgcctctgcagaactattttttaggcaggagcaaagcaaacgagaatgtttggaggcatctagtttctaggaaaatgaatggagcccaattcttttttttcttttattttgctgctttttctcactggaaaatagagcccaattttatagtccgttcttctccagaaattgaattatggtgatgagtacttgtttctggattgtttggcctaggatgaactattgacaaataccttgttaacctgaattgtatgcacttgaatatgggcttttagatgttgtctccagttgtggaggatcctgtcgagagtggatcatttatgaatcgagaatccctgggaaattatctttgtttgcagcagaatgggcatcatcagtgcttgggttcaacctgttaaactactactgttactactaaaaatctcagggttttatctgatgtttgggggtagtggttttcctatgtgtagtgttggtattatatcaaagcctttttctcgatatttttatgtattaaggatgctttgaaatgcctaaatccttagtggctgtgggtgtcttccaatagttgtcctgtgaaaaaggattggttagacagataccatcaggcactgtactgagagtgaccactagcttgtttttctaatgcgtttacttacagctttgtaatgattggaatttcttagtaaaccagtataaag

SEQ ID NO: 116823 - DNA, 250 bp, Homo sapiens
  misc_feature (1)..(1): n is a, c, g, or t
ngctctagaggaccccgaaggcgctggctgggtctgctgtgcccacagtggctggcactgggtcaaccctcaagagacatgtgggcagggaacaaatgggcacccactgtatgcacaccatgtcttcagactctcaaaacaattcttcaaggtagatgtgagtatccccatcctacagatgaggaaactgaggctcagatatgtagaggaacatgcactgactcgcacagccaataagaggcagaagagg

SEQ ID NO: 116824 - DNA, 214 bp, Homo sapiens
catttttttaatgcctatcaagcttggatttgggatggcctctcagaggcagacacaaggcccaggccaattgcacattttgatgctcacagggttaaaaaagaaaaaaataataaagttgaaaaaactctggaatatactaaacgtttgcattggaaacatctgaactttaaacaactacataaatatcgtaattgtgctgctcatttgcata

SEQ ID NO: 116825 - DNA, 568 bp, Homo sapiens
ggtctgtaaacttgcttaatctagtgcagaagccttagatctttcctagaaagtcagtgattttgactttcttgcctcatttcaaagtcatctgtcatgtgttcccactctgttgggttcagagggctctgtggacagtttggcttgaagatttcctctccatccagccttctggagggtgaaagtggacgtgctacacttgcttacaaaaaggaaagatgaccataatgtagcattttctggctgggtgcagtggctcacacctgtaatcccagcactttgggaggctgagatagatcacttgaggtcagtagttcaagaccagcctggccaacatgacaaaagcccatctctactaaaaataaaaaaatcagctggcatggtggcgcatgcctgtagtcccagctacttgggaggccaagacagcagaatcgcttgaaccttggaggctgaggttacagtgagtcgagatcatgccactgcattccagcctgggtgacaaagagagacaatttctcaaaaaaaaaaataataaaataagtaaagcaagcagtagaagtgggtttgg

SEQ ID NO: 116826 - DNA, 416 bp, Homo sapiens
agccaatgaattaacgttttaattttcttttttcttccagatgttttccgtaaggtggaaatgccctctcagtactgcttggccttgctagaactaaatggaattggctttagtactgcagaatgtgaaagtcagaaacatataatgcaagccaagctggatgcaattgagacccaggcctatcaactagctggccacagtttttctttcaccagttcagatgacatcgctgaggttgtatcatggggctagggatatagatacataatttttagagttaaaatgattgtgtgtgtgtgtgtgtgtgtgtgtgtgtgtatttacctgaacaccaaaggtcagtaaaatgaaacagccagttaaccagattgctttgggaatattctagcatctaatttgtaaattatatctgtatt

SEQ ID NO: 116827 - DNA, 1068 bp, Homo sapiens
cagagacgactaccaaaccccaagccacatctgccccgtcccccgcccccaagcaaagcttcctgtttggaacacagaacacctcaccttccagccctgccgcccctgctgcatcttcagcatctcccatgttcaagcccattttcacggctccacccaagagtgagaaggaaggcctcacaccgcctggcccttcagtctcagccacagcgccctccagctcctccctccccacgaccaccagcaccacagccccgaccttccagcctgtctttagcagcatggggccacctgcatctgtgcccttgcctgctcccttcttcaagcagacaactactcccgccactgctcccaccacaactgccccgctcttcactggcctggccagcgccacctctgctgtggctcccatcacctctgccagtccatccacagactctgcttcgaagcctgcgtttggctttggcataaacagtgtgagcagcagcagtgtgagtaccacgaccagcaccgccactgccgcctcacagcctttcctcttcggggcgccccaggcctctgctgccagcttcaccccggccatgggctccatattccagtttggcaaacctcctgccttgcccacaaccaccacagtcaccaccttcagccagtccctgcccactgccgtgccaacggccaccagcagcagcgctgccgactttagtggttttggcagcaccctcgccacctccgccccggccaccagcagccagcccactctgacgttcagtaacacgagcacccccacgttcaacattccctttggctcaagcgccaagtccccgctcccatcatatccgggagccaacccccagcccgcatttggggccgctgaggggcagccaccgggggccgccaagccagcccttacccccagctttggcagctctttcacttttggaaactctgcagcccggccggtatggaccaaacctgactggttccgatcagatcgtggctggcagtgcgacccatcagctacttgggggcccgcaccggttggtgaagccgatcgctcggggcgcg

SEQ ID NO: 116828 - DNA, 855 bp, Homo sapiens
caggtcatttaacttttcagccagtttctccagctgtgaaatatagataataatgttcccactccacatggcagtcatgagaatttgatgaaatcatacatgtaaaatgcaggcatagcaaatggtccatgaatgtgagctgctgttaagattaattttattctctcctgtttaattatttattttgtccattcctttctctctcatgcattcatccaacaaatatttactgagggctcactgtgagctaaacaatttctgccactccctgaggcttcagagagctgcctcctgtgtatcctgtagcttccagttccttctgctatccggccctaggcccaggaattctggttcatggtgtggacagcacatacatatgtgataaggggaacaccatgtccagtcctgggatacaacaaatgcaggtttagcatagggacagctacagaaaccatttggcttggtttcactttgtcagagggcctcaggatgaaattattgctactacctgcagacgaggttatatatccaatatacagacatgagatgtaagcattcaccgggtaactttatcaggtaattcacatcccatagctagacttccctgcctgtaaaaccctatgaatatgtgtttgcaatcttgtggaaagcataattgttcactatactttcacgtacatgtgaaaagcattattgtgttacatttctgtaaaaatgttttagcatttgtaataatcataagagccttaagagtggctcagggttctttctacctctgagaggccccgggaagcattcaaccatgaagcagtcatggagttgaggagcgcaaactccagtgaggtgtttgcggaa

SEQ ID NO: 116829 - DNA, 785 bp, Homo sapiens
ggcttcatcatcttactgttttgcaggtcagaagccctaaaagaaggtgacggcagggttggttcctcccaaaagctctgggaagaatctggtccttgccttttccagattctagaaacctccctcatattttgcctcgtgatcccctcctcacacttcagagcccgtcggcacaacctctgcttctgttatctttccttcacattgacccttctgccttcctcataaatagaaccttgtgattacgtttggccaacccagataatccagtctatctttccatctctagacccttattttaatcatacctgcaaactcctttttgccatgtaaggtaacatagtcccagattctggggactgggatgtagacatctttggaggcccttattctgcctaccacagtcatgatgagttggggcaatgttgctgactgacgacacacagaacctctaaaacattcttttactttccctgttcgtctccattgtaaatagggattctttgtctagggtttggggtttaagcctgttaatttagtagaacctcatttttctcttctacccctggaagatttttttccactgaggctgtgattcctagagtcagccagtatttcttgagttctatttattgtgcacctgggtacacaaaatgagtaagatacgaccctggaccttatggactgctagaggagaaagatgttactgcagtagagtacatgttgtgttgatttcattttctagatatctttaggttccgtccctttgtttctgtcttctctca

SEQ ID NO: 116830 - DNA, 322 bp, Homo sapiens
ttggttaatcctggactttgtttttattttaatacttggtgacttaatcagaatttagtggggattgactgcactgccattagatacaagtaagaaatgatatgtgtgggatgaaaaccacaagttctcctctgcttgtgcctatcctctgaatttctttaaaagagaaattaatgtaacaataaatttgttgggggagggggcattgattcttattgccctctttgatctttctcttatttcccacagatttgttaccatttcccttttttccctctctcatctcctgccatctcacattgctactggttctacacctctt

SEQ ID NO: 116831 - DNA, 760 bp, Homo sapiens
cggaggggagccaagatggccgaataggaacagctccggtctacagctcccagcgtgagcgacccagaagacgggtgatttctgcatttccatctgaggtaccgggttcatctcactagggagtgtcagacagtgggcgcagtttggagttgttgctacctgtgtctacccagccaaggactttatgcctcaggccttcatattcaggacatgtttctcatgaaaattttggaaatgtgaaattacagaaaagcccaaaggaaaacaatgaaaatctcttgcaactacagtacttagaaaaatgcctattatcattttgttttatatccctgctgtctttatatgtacaacttgcattttgcaagagtttagaaagttgtaaccttattttttaaatcagtgcataactaatattttttatgctattaaaatattattttaagatgtaatatctaatcacatgtctgcatcataatctacttaatctccccttgttcacaattaagtagtttccaatttttcactatcaaagtaatgctacaacaagaaggatatcctggtatataaataattttacacaacacagttatttccttgacataaatacctagaatagaattagtcaaacataagaaattaatatttaatacctccgatacatcctgccatgctgcccacaaaaagaccataccaagttacaccaccaccgaaaatgtgttaaaggatcagtttgctcaaaacttaaataaaatagagtaag

SEQ ID NO: 116832 - DNA, 187 bp, Homo sapiens
tggagggtttgagttgggcagtggagtggacaggatccaccctgccttttaacagacttgccctgggtcctgtgtggagaaagtgaaggccagccagggtggaagagggagacaagttaggaggctgttgccatcatccaggggaaagatgcatccagggtgtactctgaagtacagccagtaggct

SEQ ID NO: 116833 - DNA, 426 bp, Homo sapiens
gcccattttgatgttgtctacttaacaaagcagaacagatgaggcaaacctaatataagaaaaatccagatttatcaggaggtaattaatcatattacaaaaggcttcactgttgggtttctttaaatagcttaccttcctaatgcttttaaaatataatttgatgtagaaaatacatttgttgcataaatgaggtatatttgtgcttatatggctgcaatgggcctactcatctctaatccatctaatatcattctgggttcctggttttcagcaaacctgtcctggacttattaaagacaaggtcccagattagtatcttctttctgataaaaacacactcaaagacaaagagaacggtttctgcaaccccaaagcatttccaccaatattcttcagacgtcctcaaatttgccctgggtatcc

SEQ ID NO: 116834 - DNA, 890 bp, Homo sapiens
cgaccccaccccgcgggccactcagcggcccgagctggaagcgcggggcagcggaggctgccgggctgtgtccttcgcggggccgccaccgcccctcctgaaaggccgcggagccctcagggcatgcggatgttccgaggatggagaagctgagactcacagcgaggacgggccagggtctccccaagcctcagttcccagagcccttccatccccgggttctccaccaggatcctctgccagcccagccccaagggcgcactttcccaccaggtttctagagagtggctgggaaactcgtcgccaaaccctgcccagctcagctctgctgggaccccagaccccagaacggcgcagcgggagtccctgagccccaacagcggccccagctcccgtggcctcagcctctggctttccctaaaggactgtgggcctcagccccctgttcccctagcccaccaggtccccaggctctttcccccagtctttgcctatctgtgatctgctccttcccccatgctccgaagttccaacgggctctgccgtgtctggtaataaataggactgttgggctcaaccaacaaacacacaaacgacacacaccagacacaccacacacaccaacaacaacaacaccacacgcacccaacccacaacacacaccacaagcaggccacccacacagaggaccacccggggcaggccgccccagccacccccgctgcgggccgacacaggagcacccctgagaggacagaccgcatcaagagacccggacggcgcgggcaagctcctaccacgcgcgacgaaggaacaccggagggggcctgcgcgcaccgcgaaggagagcctacgaaagagcgggcgggaacaccactacgcgcccggac

SEQ ID NO: 116835 - DNA, 379 bp, Homo sapiens
gaaacgacaaatcttttgcattagactcagagttgactaaaactatggcagcttttcataaagtcaggctatagatgtccctaattcccccacagagcccacagccctttgaaagtgatgatagaatactggggatggatcagagagtgctgagaggagagtggaagggaagaagggacaaagggaaaggaatccagagtgggaagagttggattcgtagagccagcagatggtgttggtgataaagaagattacgtgactcatttctgtaacccatgagtgtcaaagttctccactcagtgccatgtctccatcccattacccccacctaaataagttatctgttctaacacccatctgtccccacaccaaaccatca

SEQ ID NO: 116836 - DNA, 332 bp, Homo sapiens
tcccttgggtggtccttatgtccacccaaggtcaagagccattttccaaagaaggaactgggggccgggtgaagtggctcctgcctgtaatcccagcactttgggaggccgaggtgggtggatcatctgaggtcaggagttcgagaccagcctggccaacatggtgaaaccccatctctactaaaaatacaaaaattagctgggcatggtggcgcatgcctgtaatcccagctactcaggaggctgaggcagaagaatcacttgacccaggaggcggaggttgcagtgagccgagatcataccactgtactccagcctaggtgacagatcta

SEQ ID NO: 116837 - DNA, 505 bp, Homo sapiens
aagggtttcttggattactctacaaagctagtaggcagctttggttcagttatgactcagtgaaggttagagaattatatctacaaagtaggatctttttctttctttctttcgttttttgatacggagtttcgctcttgttgcccaggctggaatgtaatagcgcgatctcggctcactgcaacctctgcctcccgggttcaagcgattctcctgcctcagcctcttgatgcctggcgaattttttttgtatttttagtagtgacggggtttcaccatgttggccaggctggtctggaactcctgacctcaagtgattcacctgtatcggccttccgaagtgctggggtggtgtgagccaccgcgccctgccagatctttcttgtttgactttcattgctaagaatttgggtgagtgttgttgaatcaaagacatctttattctctgcctcctcaccatgcacatacgtacaaatgtctgctgacagatatctgcccttcctat

SEQ ID NO: 116838 - DNA, 315 bp, Homo sapiens
ttacctggaagtagaatgcgcctttaataaatacctaaaaacatggaagtggctttggaactgggcaggggacagaggctagaattttaagaagcataatttctgaaggctggacacagtggctcacgcctgcaatcccagcactttgggaggccaaggcgggtgaactgcttgaggtcaggagttcgagaccagcctgaccagcatggtgaaaccctgtttctattaaaaatacaaaaattagcctggcatggtggtgggcacctgtaaaccccagctatttgggaggctgaggcaggagaatcacttgaaccc

SEQ ID NO: 116839 - DNA, 482 bp, Homo sapiens
tccgtttgcagatgacatgattgtatatttagaaaacctcatcttctcagcccgaaatctccttaggctgataagcaacttcagcaaagtctcgggatacaaaatcagtgtgcaaaaatcacaagcattcttacacacccagccccattttcgacgccctctacttggcagccggtgagcccccggcccctgcgtttctggctccagccccaggtggcggcgctgtaggctggagcccctggaaagcgctggcctggcagccctggggagtgttccaggcccttggaccgcagggagggcaaccaaatggcagaggcggtaacggagagcatccctgaacggtaaaaagtcgtctaaaggatcgaagaaacggagtgtgagcgagtccgtgggcgggacagcaccttcgggtgccggtcagaggagcgagcggcggaagaggcgggtccagggcggtgtaattaaggcgcggagcccagacc

SEQ ID NO: 116840 - DNA, 407 bp, Homo sapiens
catccctaccacttaagaattgaggcttcacttcacagaagaagctccccctcctcaaaagaagcacaaaaaggaatggaagaaggatacaggaaataaactccaatgctacgaatcacactaagtttccatttccctccactaataatagctgtaacaatcccttggggagtcacaaaagggtgggatctacctaacttaaccttagagggcattccttaattgaaatcctaagtaagttcttctactgcaacctctggattagattttgtgtgtgtgtgtgtgtgtgtgtgtgtgtgtgtgtgtgtctcatctccaattattttccttggccttagagtgctgactagcttgtggtcttccgcagtagggcgcgcgcaactgatacggcggggggtaccgagctc

SEQ ID NO: 116841 - DNA, 343 bp, Homo sapiens
ggattggaatgcagttcgtaaggaggccttttgtccctgggtttttcagatgggaatctgagccattatgtcaaaaattttacctccaatttattccttactgaaggtgagatatatgggccttctaggctggtttttcctggtggtaggggcagacctctgtgtcagaagccacctgggttgcttatttaaaatgtaggttgggacttagagggtgcagcagttcccatcctagacctactgaatcagactctcaggggatagaggtctggactctgcatttgtaacaggtatagctcaagtaattatgatttatgttagtgattaagatcactgcctatat

SEQ ID NO: 116842 - DNA, 406 bp, Homo sapiens
tgttgctaatgctactcataataggaagctcagttttaaccctgggggttggggaagagcagcaagcctggggttagagaaacagacacgtataaaaagcatcatccagccgagtgcggcggctcacgcctgtaatgccaacactttgagaggccgaggagagcagattgtatgagctcaggagttggacaccagcctgggcaatatggcaaaacctcatctctacaaaaaatacaaaaattagctgggtgtggtggtgtgcgcctatagtccctgctactcaggaggctgaggtaggaggatcacttgagcccaagaggttgaggctgcaggatctcgccactgcactccagcctgggcgacagagcaagaccctgtctcaaaaaaaaaaagaaagcaaagaaag

SEQ ID NO: 116843 - DNA, 500 bp, Homo sapiens
ttattcatttattgacatataaacaaaatgtcatttgtttattcaataaacatttattaaatccctagtaaatttcagacatgatgccagtcacagggatgacaatgacgataagatgtggtctctgccctcaaggagctgatagcccaggagactgacaagtagacagatgattatgtgcaatgtaacaaaggctgtgatgtcatacaagaagacaagtgagagtatgtgataggagtatggttttgaccagttcctcctcttagatttatcccttttactttggctataaagcaaaagaattggtcctattttttttttccttaactgtgcaaattaaaccataaaatttaaaaactttatgaagataaaaggcaagcagtcaggtgcagtggctcacgcctgcaatcccaacactttggtaggccaagggggatggatcacctgaggctaggagtccgagaccagcctgtccaacatgacaaaaccccgtctgcacc

SEQ ID NO: 116844 - DNA, 413 bp, Homo sapiens
actggatgtgggtggaactccagcccctgcccttcgctcactctgctccagccacgtcacctcctccgggctcctacatgccccaatcacattcccacctcagggtctttgcaaatgctattccctctgcctagaagcctctcttcccaggtcctcctcattcctgggcacctgggaagcctccacctcctagttcagatctttgctgcaaggccacctcctcagagagccctttcctgaccaccttggttcattctgtattaacatgttttcttgttcactcacaaagactgaaacccacgacagcagcaactttgttttttttcccatttggtttccccagcccctagagcatcctggcacatggcacctaatcaataaatattccttggtgatcgtggggttgtaagggg

SEQ ID NO: 116845 - DNA, 447 bp, Homo sapiens
ctgatactggcataaagacggacacgtagctgcatcgaacagaacagagagcccagaaataaatccacgcacgtatggtttgaccttggtactttttgacgaagtaccaagaatatacaatggagaatggatagtctctaacaaatagtgccgggaacactgtaattaatatattcaccctgttttatagttgtttgaaatgaaagagctaatctgatgctaattattccatcatggcttaagagtttttagtttttaatcataaatgtgttttaaattttattgaatgcattcttttttacctataaaggttatcttgtgacctttaaaaaataaatgaataaaaaataaaattgaaccatcactttatactacacacaaaaagcaactcaaaatgttttaaagacttaaatgcaagacctgaaactgtaaaatttaaaaaaagaa

SEQ ID NO: 116846 - DNA, 594 bp, Homo sapiens
tttgactgaggacggtcagttgggccatttttccaagtgatgtcccattaagagtggctgcccagagaaagggcctagggctcttactgctgagattcccgaactagtccaaagcctgggtgttgagcttttactttgaccctagaagcttttccatgccaggacaaataaagccctgttgttattctttcacctaatattcctttggagcgttgatcagtatggtccacagtcagctaggagtgttttttagaggaaaaaaaaaaaatcagtggaggattagaaaagtcctgttcacagctttgtggggctgcttcctcaatccattttactcctcctcctcctggttctgggacaaatgagatgggccatccgccctgttgtgctttaggaatgcctctttgaaactgtcctctgaaaccctcaagatggatcagggcaggaccttaatcacgcttacccaagcccacattattcactaaactgagcatttacccctctgctgtgtcccttcctgaactgtacttagcaagctcatcaggttgtgaatggtaagtaaatgggtggccatgggctatacagtggcacctgaaa

SEQ ID NO: 116847 - DNA, 587 bp, Homo sapiens
ctgttctctgaaggttagtataaaagagatcattgttctggatagctctcttgttttcatattctcttaactcataagaaggagtaaaggctaagctccagaaacaccctggaaaggttttatgaagacctcaaataaaagttaaaggatctggttgataagtataagatttcttactgcttagaaggtttcaagccatttaggagtgacttatgccccccaaaggacatatgctgagcctggcagttagggagcactaatccctgagatgttagaatagctgttagaaatagatttggccaagactaagaggaaaacagagaatgtatactttgggtcaagtatgcaaggagaatattcatgcttgagaaacattacatacctagctttggacttgtgaggcatttaattgttttgttttagatgattgttttcataatctgattgtattaagaatgtgctacaaacacaaggtacaattctcttaaagtctcttaggaaagattgatcctcacttcattactcagttgctcatcagaccttcttctctgaataagaaggagtattttattttctgatagagcact

SEQ ID NO: 116848 - DNA, 767 bp, Homo sapiens
tatatttccaattgcttatattacatataattgatttttgcatactgacctagcatcttagaattcgctaagattatactagatttgagcttagcaaatctcatatttggtaggttccttaggattttctgcatacttgatcatatcctcaaatcaaataaaggaggtttattgctttgtttcaatctgcattctctctttctctatctgtctctctcattgcattgtctaggatcatagtataacattaggtagaaatgagaagaagtttagatgtttacccttgccttgttcttgattttcagagaaaagcattttatatttattgttaaacataatattagctctagattctttgcttgttttatttaagctcctttttatgtggttaagggaattcttttcttgtcctagtttgaagaaaacttttatctagataatgttggattttattaggtgatttatttgcatttagagaaatgataactttttctcacttatttggttaatatgatggagtgaattgattttcaaagtgaaattgttattgaatttatgggataaagtctacttggtcatgatgtgctatcatttttatgcattggtgaatcctaattgtattttataaaaagtttatacatgcagtatgtacatatatagatacatataaatatacacacatatgaacaaactcatattagactgtagtttacttgtaatatcataatctggttttgttattttaattaataaagacagtactatta

SEQ ID NO: 116849 - DNA, 429 bp, Homo sapiens
tgaggtgactctacaggatcttaatcggaaccaatgagccaaaatgggtctgtgagttggaggatccagtggtaacacagagtgggcgatgatgaggtctggagtgtgacccagggactgggcacctgagagtaaggaggaaagtaagtttgtcagaaacctgagaggccaaggtgttggctaggtcgttggctggacatttccgtgtggtccttcagctacactgtgcatccttctcagccctgctctgtgccccagaggctgacctttaattaccatctcagtgccctttccctcagactgagagatacacagcctggaccagggaagacatggagacagagcatccattcctccagcccctcccctcaaggtccctgcaggtaggccgtgtctctactgaaacccaccgctcatttccctacaatt

SEQ ID NO: 116850 - DNA, 255 bp, Homo sapiens
gatttgtctgcctcaaggagaagagttggatcccagctgccaggggccctggggctgatgggagcagagtcctttccctgtggagtgacagatggtttcagacatcccccagttcttgtgtctgcgccactcatttgcctgtattaatgtagcaatgtcagtttcacccctcagtaccttacctttctctccctggggttgctatgatgctctctctgaggcaggagaatcactttaacccgggaggcagaggat

SEQ ID NO: 116851 - DNA, 911 bp, Homo sapiens
gctggaggctgaattaagaaagagcttgagcatctggagcatagatgttgtgttgcttgtgtattttttcgtctctctattgaactggatgatctgaatgtatttatatctaagaaacatctgcagcccttgattaatagtcatgagggttttttctttaactttttatagatgaacaggatgttgcaaagatagtaaaggggttctgtgtacccttcatctggttttccccagtggttacatcttacgtaactacagtacagcatgatgaaaccaggaaattggcattggtaccatctgctcatacagctctgtgcccctttatcacatttgtggattgtgtaaccattattatctcagtgaagatcctgaactattccgcccacctcagcctcccaaagtgctgggattacaggcatgagccaacacacccgggctatatttcggataagcttatctagtaggtttttgcaaaatagaaattttttttaatggtgctactagattctggtagtacatatctaggagtttatctgatacaaagagattattcactatagatttcgaataggtactagtcgtacaggtaatcaataattgggggagttgaacagtgtctatgaaggttgaaccacaatcgcccaccaccaacacagcactttttcgcgcgccgcctcgcgcctccaacaagaactttcaacagaaccaacgtcgctagggggcacgcggcccccggtaggcagaccgagacacgggggccaacacgcggggagtcacaaaggaagagaccgggcacagcaacacagcgcgtccagatgcccccgcgattacaaaaaccccccgggggacaccaggacgttgtcggacaaaacccacagaggggggttagagcgcgaagacgcggcgcacca

SEQ ID NO: 116852 - DNA, 273 bp, Homo sapiens
gacgctcttctccagccggagctgggactgttcagtcactgggagaagggatgtgggtctgaagagcttggttgcagaaacttcggggtctacaaaggccggcgggagctgagccaaaagagcttgtttgctgggaggcgggagatgcagccaggaggaacagctgggccatgcgggaggcagaggccgggcctcctcaagtcggcctctcagacccacttggcagcctcccggcgtcctctccgggcccagctcttcctcccggctgcgtct

SEQ ID NO: 116853 - DNA, 126 bp, Homo sapiens
tgatacttgcctaacatgcatgtgctgtaaaaatagttaacagggaaataacttgagatgatggctagctttgtttaatgtcttatgaaattttcatgaacaatccaagcataattgttaagaaca

SEQ ID NO: 116854 - DNA, 481 bp, Homo sapiens
tagtagaaacggggtttcactgtgttagccaagatggtcttgatctgaccttgtgatctgcccgccttggctcccaaagtgctgggattacaggtgtgagccactgcacccggccatttttgttttttttttttgagatggagtctcgctctgttgccaggctggagtgagatcctgtctttaaataaataaataaataaaatggcagtagcataacaagaatgaagctttccacatcttggtaagatctcctcttgtgtgccctactagggatctgcaagccaagggattgggttaagatatttgcttctgataagatttatatccttgaccattagattgggatcttaatgtagcctctcatgtgtgtgagatttctttttgtacatctgtagctcactagaaacatttctgtataagacgtctgaatcataactcaaacttgggtgtggcattaaggatgggcttgtttcttttaata

SEQ ID NO: 116855 - DNA, 349 bp, Homo sapiens
agaagctcttctgtcatgaacagaaaaattctcctgtcaccccatcacttagaaatttacatgagtttgctgggcgcggtatctcacgcctgtaatcccagcactttgggaggccgacacaggcggatcatgaggtcaggagatcgagaccatcctggctaacacggtgaaaccccgtctctactaaaaatacaaaaaaattagccgggcgtggtggcgggagcctgtagtcccagctactcatgaggctgaggcaggagaatggtgtgaacccgggaggcggagcttgcagtgagccgagattgcgccactgcactccagcctgggtgagagagtgagactccgtctc

SEQ ID NO: 116856 - DNA, 641 bp, Homo sapiens
ccccccccacaatgggacagcctgcctggcagctctttcctggtctcaggatgatgtgcaggcagaggcccctggcaaagcagaggcaaatctggatgcttcggttcattgtgctcagctttgataggaggatgccagccccgcctgccgtgcgccccaaggcccgtctacatgactgtgaccaaaacataatgactttcgtctaaattcactctctaaaaggaacaccctcctgaatcagcgtgttctcctcaaaggcgttatgggaacctgagctcactccgaagacattcccagttgctcaaggcaggggtgaggcccctccatggaacttggagctacacagagcttgagctccggtgtgggaggcctcgcaggaaggcatcgcggccttgatgggtgggcctcacattccagcgtgtgtgtgtcctgtgcccagaccctctgtgtgtcttctccatctcacacagacagtcccataggactcacgtgttttctttttgtcgcattgatggtttcctcagagggtgggtgtgttggggggtgtatgtgtggtgtgtgcatgtgcgtatatgcatgtgtgtggagggtgtgtgcatgtgtgtgtgtgtgcatgtgtgcgtgtgtgtgcatgtttgtga

SEQ ID NO: 116857 - DNA, 725 bp, Homo sapiens
gttgaccaggctgcagtgtagtagcatgatcttgactcactgcagccttgacctcctgagcgcaagggatcatcccacctcatcctgctgagtagctgggaccacatcatgcgccaccattcctggctaattttttgtattttttgtagagatggggtttctccatgttgtgcaggctggtcttgaactcctgagctcaagtgatccgcccaccttggcctcccaaagccttgggattacaggtgttagccagcgtgcccagcctaatattcttaaagtttattttgtttttctaattttgaattgaattattaatatatttaatttttttaagagactttgtctcaccttattgcccaggctggagtgcagtggtgcacttatagctcacagctttgaacttctgagctcaagcgatcctcccacccaagcctaagttgctgggaccacagtcgtgtaccaccatgcccagataatttttaaacattttgtcaaggtaatgtcttgctatgttgctcaggctggtcttgaactcctggcctaaagcttcctcccaccttggcctcttaaaatgttgggattataggagtgagccaccacacctggctttcagttaattcttacttagaaatggagcatttgagtctttatatatttatttgagtcaactttgactacattcccttgattttgatatatgtttcttttatataactttctagata

SEQ ID NO: 116858 - DNA, 345 bp, Homo sapiens
agtgaagcaaaggactagggacagtggggaatctatttctgtgactggctcctgcagtttccaggccaacagttccctgtggcagcatcaaccatccagtgctggtggtggtgccgccaggatatccacgactcagctgtgcagcagtcttctcaccaggtagtcccattggtgtgattatggttgtggctctcacttccttgcctccatttgttcctagtcattttctgaccctgattctctaagccctcccagtgagtcagtgagctacctgatatctctttggttctcttttccctgtttatatcagcaagaatcaatttctgatgttgtagctaagaaatc

SEQ ID NO: 116859 - DNA, 191 bp, Homo sapiens
tatagaatgtggaactttgcggggaggaaggcaagagtcaggctgtttttatggcactgcttggaagatggagttcgctgcatttgtcctgagcctttatctctgttgcagctccataaaggatttgaaaattcagcccaacaaaggaaatcttcttaatctggcttttctctgcttccccaccaccatct

SEQ ID NO: 116860 - DNA, 818 bp, Homo sapiens
tcagacatctgcttaacctgctctccttaggaaggcctctccagtgggttaggactatacagaggtgccccggcactaatgccccatttaaggttgaaagctcagctgagagaaaaagtgtggtgtcatcgggtacccatcctagtaatagttgccttccataaggaggattaacctgcatctcaggctccactaggccaacacaaattccccttcagaaaccagatcctcatctctcaccttacacaaaaatcaactcaagatggtcaaaggctgaaagctaaaacctgaaaccaatacaagttctagaagataacatcggaaaaactcttccagacattggcttaggcaaagaattcatgactaagaccccaaaagcaaatgcaacaaaaacataaataaatgggacctaattaaactaaaaggcttctgcacagcaagagaaatagcagtgtaaacagacaacccacagagtgggagaaaatcttcgcaaactatgattccgacaaaggactaacacccagagtctacaaggaactcaaacaatcggcaagaaacaaacaaacaaacaaaaaaccaaataatcccatcaaaaaatgggcaaaggacatgaatagacaatctgaaaaagaagatacacagccaacaaacatgaaaaaatgctcaacatcactaattatcagagaaatgcaaattaaaaccacaatgtgataccaccttactcctgcaagaatggccataattaaaaagcaaaaaaattacagatgttggtgtggatgtggtgaaaagggaacacttttacaatgctggtgggaata

SEQ ID NO: 116861 - DNA, 207 bp, Homo sapiens
agtattcccacacaatcatgctctctcaggcttctgggtctgttaaaaaatgttcccactgtgcactgcatcctcccttcctctggctatcctttcactgtgcttaatagtccaccaaaagatcccttcctctgggaagtcttccttgactaatctctaccacatccgtggtagagtctcctctgatgcacttcctttggcactcta

SEQ ID NO: 116862 - DNA, 275 bp, Homo sapiens
aagattaataaataataggaaagcgggagtagagaagcaggagaaaggagatgggagaagctggcaaagatgaaacacagctctgctgagaagcatatatccaagaacaatcaacactataaatttcatggatgctgcatcagttacctattgctgtgaaacgacaactcccagatttagggacttaaaataacacatattcataatctcaccatttctgtggggcagaagtcagagtgcaccttagctcagggtctctcacaaggctgcaacca

SEQ ID NO: 116863 - DNA, 321 bp, Homo sapiens
  misc_feature (150)..(151): n is a, c, g, or t
  misc_feature (191)..(191): n is a, c, g, or t
  misc_feature (216)..(216): n is a, c, g, or t
  misc_feature (226)..(226): n is a, c, g, or t
  misc_feature (237)..(237): n is a, c, g, or t
  misc_feature (239)..(240): n is a, c, g, or t
ttgccacaggtcccatattttacatattctactcttacagaactctaagggatagatactatgtctccctttaaaaaatctgtttccggagccaggctgggtggttcacatctataatcctagcactagtgggcagcatctcagctactnnagccccgcctcccgtgctcaagcgatcctcccacgtcagnctcccaagaaggtggtattattggncacgcctggncagtttttgtntnntttgtagagaggaggtctcactgtgttgcccaggctgatcttgtactcctgagctccagcaatccacccgccttgggctct

SEQ ID NO: 116864 - DNA, 126 bp, Homo sapiens
ctactgtgcattttcattattgacagttgcgttgcagaagaatttttcttgcaaatgcaggccaatttttccatgaattttaggtgatctcctatttataaataaagccactgaaagggtttttgt

SEQ ID NO: 116865 - DNA, 318 bp, Homo sapiens
tgggatagagggggcaccctgctggcctcatcacagctgcttggcctcaggtgggacgctctgggtgacctctggatcctgtgctctgtggaggagacctgggagatgcctttctgtgacctatggattccttgggaaaagactttgagcaaattcggtccccaggaggaattgttcattcagtgtcttgtgtatttatctctctttactgctctgaagttagggattcaatttcaactgctttcaagattagttacccttgaaattttgccatgcatacttaacttagcaaagtctaaagttaatcaataacttaac

SEQ ID NO: 116866 - DNA, 762 bp, Homo sapiens
tgcacttgccggcccctaactctgtagctgcacacagggcctgggcacttgagacctcagactcgccaccggctcctcagagcccctgcccaggtcacctgtgtaaggagaacacagtgccaatgcagcacagcatagtgacacccggcctgccgggatttagcccccaccctacctagcggttctggagctgccactgtgacccatgcagggtcgagcatcccaggctcataggaggaatggacttgccttgtctcagctcgaattctctctcctgccaccctgagaagaggtgccttccaccatgattgcactccctccaagacagacttctctgtggaagcagcatattggaggcctgctaggacagttcacaggaatggctgtggagggctgcaggcatgtctctaatcagaacctgcttgtctttttgattgacagctgcactttctccaccaagaagtgggtactgtgcaagttatggtcatagtgaaggtgggggacatggagatgatcccgaatgagctgcataggcctcatcgaatcagtggaaagccttgagaacagagccaaagtttctctgaggaaggggaaattctacctgtagacagcagcttcagttcctgctgcagtttccagcctgcccttcctgatggccttccctgtggattccagatttgccagccagtcctcatagccacataagccaattgcttgtaataaatctcctagtgttaatgatcctttaataatatacatata

SEQ ID NO: 116867 - DNA, 478 bp, Homo sapiens
aagcatccagcacaggagaaagatgaaggctgggaggctaggccagtctagtcttttcacatttttctgcctgtattatatactagcctcactggcagctgatgagatggtgaccacccagattaagggtgggtctgcctttcccagcccactgactcaaatgttaatctcctttggcaacaccctcacagacacacccaggatcaatactttgcatccttgaatccaatcaagttgacactcagtattaactatcacagctaagaaggaaaaaggaaaagcaattttatgcgcctttcctctccactccctctttcttttttgtacagacaaccacatttaaattgggtagtggtctcttttggtatttggtattcatacttctgtatcttttttttttcccctcagatattatccatgaacttcttactgcagaaaatgagaatttagctgttttaaaccacttctttcaccattc

SEQ ID NO: 116868 - DNA, 141 bp, Homo sapiens
cagaaaatttctttgtgcaccaccaagtcaagaatcctcattcagagtgaaccattcttctcatttttattagcatgaccttttttctttctatttttgaattaagtataaataaataaatggaatgatacagaatgtatt

SEQ ID NO: 116869 - DNA, 589 bp, Homo sapiens
gggagtgtgttctctgtccacagggaaggtcattcattctgagatttgtgttttaggtagatcttcatggctgtgtttggatttgagggtcacaagtctggacacatggagacaattagaaagcttttgagactgggcatggtggctaatgcaatacaaattcaaaattacagggctacaaagacattctgacctcaaatctgctgacaaattcattctttccaccgcataactgacaatctgcacaatcaaaggtaacatcggttagtagaaaaaaaatttttttctttgtttttttgagacggagtctcgctctgttgccctgaagagcagtggcacgatctcggctcactgcaacctccaccttccgggttcaagcaatccttctgcctcagcttcctgagtagctgggattacaggcacccgccactatgctaggctaatttatgtattttgggtagagactaggtttaactatgtaggttagactggtctcgatctcccgacctcgtgatccgcctccctctgcctcccaaagtgctgggagtacgggttagagccaccgtacttggcccaagaatttttttta

SEQ ID NO: 116870 - DNA, 245 bp, Homo sapiens
tcaggcttcataacgtagtgtcccaggaaactcactcatccctgccgctcccagctgggggtacataggctgcttctctggagctaccaccgtgccacgcttttctctccagttcttttcttctctgtggctcagaggaacacagagaaatcagcaacctactgccttagcagatgagcagccagtgaaagtgatgttggtcttcccctctttaggcccgcccccctggtctctgtgtgattccg

SEQ ID NO: 116871 - DNA, 160 bp, Homo sapiens
ggcgggtgtgggagtacacttcgtctaagctgaggaagggggccctggccagaacagcccagcagggccagccctgagttcctggctttggcagcactcctcccaaacccaccagtcaagtctgccctcgccccctccagcggccccatgtgtggcggag

SEQ ID NO: 116872 - DNA, 500 bp, Homo sapiens
cgagtagctgggattacaggtgcccgccacccagatgatttttgtatttttagtagagatggggtttcaccatgttggccaggctcatctcgaactcctgaactcaagtgatctgcctgcctcagcctcccaaaatgcagggattacagacatgagctaccactccgggcctccatttcttttttgtagtctttaataaacagctgctatcgttgcagacttgctatttaggcacttaggaatttttcactagaaggcgtgtaaagaaagaccacggacctttgtaaggaatttagcattcattctttgactacatgactgtccccagagctataactttactaatgaattttttagaagccacttagctagcaactgagcctaatcagccactcaccctcgttattcagtgctctttttttattgtctatttctcctccaacttggctatactcacaaagtaataaaaacttgcatttgttttctttccttttcagaga

SEQ ID NO: 116873 - DNA, 264 bp, Homo sapiens
cacttaaatttaggctcccttaaaggagtagttttagaggttggtgtttgagagttgttctgaacccaggagtgaccttcttagctgtttccctgattctctctggtatactagttggcctgtggtttagcttgtgtctcatgaagctaccagcttcctcttaattacttaccaacagaacctcctccaccattttcgagcatgcccttaggcttgagctctcccacgctgtttcaagtcaagtcagttctttggggagagact

SEQ ID NO: 116874 - DNA, 659 bp, Homo sapiens
tatagtggctaacccctgtaatcccaacactttggaaggacaaggcaggaggatcacttgaggccaggagctcaagaccagctcaggcaacatggcaagacctcattgtctctacaaaaaataaaaaaattagctagatgtggtgacgatgtgaatgatcttaagcaaagtcaagacacacatgacggaatccactaaaagactcttaggactaacacctaggttacaggagacaaactcaatacatgaaacacatctgtcagggtaaactggtgggaaaaaaaaatcaattgtatttctatacatagcaataaacaatccaaaaatttaatttaaaatatccaattggagggctgggcgtggtggcatgcctgtcatcccagcactttgggaggctgaggcaggcggatcacgaggtcaagagatcgagaccgtcctggccaacacggtgaaactctttctctactaaaaacacaaaaatcagctgagtgtggtggtgcgtgcctgtggtcccagctactcgggaggctgaggcaggagaatcgcttgaacctgggaaacagaggttgcagtaagctgagaccgcaccactgcacgccagcctggtgacagagtgagactccatctaaaaaaaaataataataatagaataaaaataa

SEQ ID NO: 116875 - DNA, 611 bp, Homo sapiens
  misc_feature (564)..(564): n is a, c, g, or t
  misc_feature (601)..(601): n is a, c, g, or t
  misc_feature (608)..(608): n is a, c, g, or t
caaacatttattggcttactttttatacataaagcatttagcaaagaatttgacacattgccccatttattcccacaacagccctatgaggtagttatattattgtccctatcttacaaatgtgggaactgagagcagagattgattaactgtagcctgtgggccaaatccagccactgcccgttgttactggaacatagccttgttcattcattcatgtgttgtctatggctgctgccatttacattgagtagttgcttgcagcagaaaccatatatggcctgcatagcctaaaatattcagtgtctaaccctttataggaagagtttactgacttctactctagaaggttaatttataaggtgacaaaactagttatggtggaggcatgagtccaactccgttcagtttgattccaaagctcaggctcttggttgtcacatactcccactggaggcggtggattttcattaagtggtcgttagacaagttctggtgggtggggaaagtccaagatcaaagcgccagcaggtttgtagtctaatgagggctgctctctgcttncaagatggcccttgaatgctgagtcctccaaagtganaaacctntag

SEQ ID NO: 116876 - DNA, 3526 bp, Homo sapiens
aggtcctgggagcctggcaagcccacacagcgacggttatttagccgttgaactgccagccgcccggggcccacgcgctccgggccgctcaggctgagcgatttcccgccttttctgaggttctgaggcgggagccattggttctttctgttgccctcatagaccgtatgtagcagttcgcgtgggcacagaacccacggtttcccgctagttcttcaaagatatttacaaccgtaacagagaaaatggaaaagcaaaagccctttgcattgttcgtaccaccgagatcaagcagcagtcaggtgtctgcggtgaaacctcagaccctgggaggcgattccactttcttcaagagtttcaacaaatgtactgaagatgattttgagtttccatttgcaaagactaatctctccaaaaatggggaaaacattgattcagatcctgctttacaaaaagttaatttcttgcccgtgcttgagcaggttggtaattctgactgtcactatcaggaaggactaaaagactctgatttggagaattcagagggattgagcagagtgtattcaaaactgtataaggaggctgaaaagataaaaaaatggaaagtaagtacagaagctgaactgagacagaaagaaagtaagttgcaagaaaacagaaagataattgaagcacagcgaaaagccattcaggaactgcaatttggaaatgaaaaagtaagtttgaaattagaagaaggaatacaagaaaataaagatttaataaaagagaataatgccacaaggcatttatgtaatctactcaaagaaacctgtgctagatctgcagaaaagacaaagaaatatgaatatgaacgggaagaaaccaggcaagtttatatggatctaaataataacattgagaaaatgataacagcttttgaggaacttcgtgtgcaagctgagaattccagactggaaatgcattttaagttaaaggaagattatgaaaaaatccaacaccttgaacaagaatacaagaaggaaataaatgacaaggaaaagcaggtatcactactattgatccaaatcactgagaaagaaaataaaatgaaagatttaacatttctgctagaggaatccagagataaagttaatcaattagaggaaaagacaaaattacagagtgaaaacttaaaacaatcaattgagaaacagcatcatttgactaaagaactagaagatattaaagtgtcattacaaagaagtgtgagtactcaaaaggctttagaggaagatttacagatagcaacaaaaacaatttgtcagctaactgaagaaaaagaaactcaaatggaagaatctaataaagctagagctgctcattcgtttgtggttactgaatttgaaactactgtctgcagcttggaagaattattgagaacagaacagcaaagattggaaaaaaatgaagatcaattgaaaatacttaccatggagcttcaaaagaaatcaagtgagctggaagagatgactaagcttacaaataacaaagaagtagaacttgaagaattgaaaaaagtcttgggagaaaaggaaacacttttatatgaaaataaacaatttgagaagattgctgaagaattaaaaggaacagaacaagaactaattggtcttctccaagccagagagaaagaagtacatgatttggaaatacagttaactgccattaccacaagtgaacagtattattcaaaagaggttaaagatctaaaaactgagcttgaaaacgagaagcttaagaatactgaattaacttcacactgcaacaagctttcactagaaaacaaagagctcacacaggaaacaagtgatatgaccctagaactcaagaatcagcaagaagatattaataataacaaaaagcaagaagaaaggatgttgaaacaaatagaaaatcttcaagaaacagaaacccaattaagaaatgaactagaatatgtgagagaagagctaaaacagaaaagagatgaagttaaatgtaaattggacaagagtgaagaaaattgtaacaatttaaggaaacaagttgaaaataaaaacaagtatattgaagaacttcagcaggagaataaggccttgaaaaaaaaaggtacagcagaaagcaagcaactgaatgtttatgagataaaggtcaataaattagagttagaactagaaagtgccaaacagaaatttggagaaatcacagacacctatcagaaagaaattgaggacaaaaagatatcagaagaaaatcttttggaagaggttgagaaagcaaaagtaatagctgatgaagcagtaaaattacagaaagaaattgataagcgatgtcaacataaaatagctgaaatggtagcacttatggaaaaacataagcaccaatatgataagatcattgaagaaagagactcagaattaggactttataagagcaaagaacaagaacagtcatcactgagagcatctttggagattgaactatccaatctcaaagctgaacttttgtctgttaagaagcaacttgaaatagaaagagaagagaaggaaaaactcaaaagagaggctaaagaaacacagctactcttaaagaaaaaaaagacaagaaaacacaaacatttttattggaaacacctgaaatttattggaaattggattctaaagcagttccttcacaaactgtatctcgaaatttcacatcagttgatcatggcatatccaaagataaaagagactatctgtggacatctgccaaaaatactttatctacaccattgccaaaggcatatacagtgaagacaccaacaaaaccaaaactacagcaaagagaaaacttgaatatacccattgaagaaagtaaaaaaaagagaaaaatggcctttgaatttgatattaattcagatagttcagaaactactgatcttttgagcatggtttcagaagaagagacattgaaaacactgtataggaacaataatccaccagcttctcatctttgtgtcaaaacaccaaaaaaggccccttcatctctaacaacccctggatctacactgaagtttggagctataagaaaaatgcgggaggaccgttgggctgtaattgctaaaatggatagaaaaaaaaaactaaaagaagctgaaaagttatttgtttaatttcagagaatcagtgtagttaaggagcctaataacgtgaaacttatagttaatattttgttcttatttgccagagccaaattttatctggaagttgagacttaaaaaatacttgcatgaatgatttgtgtttctttatatttttagcctaaatgttaactacatattgtctggaaacctgtcattgtattcagataattagatgattatatattggtgttactttttcttgtattcatgaaaactgtttttactaagttttcaaatttgtaaagttagcctttgaatgctaggaatgcattattgagggtcattctttattctttactattaaaatattttggatgcaaa

SEQ ID NO: 116877 - DNA, 972 bp, Homo sapiens
gcaacaagaggaatgaaaaacgaaacagcctgaatgaaccccgtgtcgtatggaaaaactcaaaagagaggctaaagaaacacagctactcttaaagaaaaaaaagacaagaaaacacaaacatttttattggaaacacctgaaatttattggaaattggattctaaagcagttccttcacaaactgtatctcgaaatttcacatcagttgatcatggcatatccaaagataaaagagactatctgtggacatctgccaaaaatactttatctacaccattgccaaagagcatggtttcagaagaagagacattgaaaacactgtataggaacaataatccaccagcttctcatctttgtgtcaaaacaccaaaaaaggccccttcatctctaacaacccctggatctacactgaagtttggagctataagaaaaatgcgggaggaccgttgggctgtaattgctaaaatggatagaaaaaaaaaactaaaagaagctgaaaagttatttgtttaatttcagagaatcagtgtagttaaggagcctaataacgtgaaacttatagttaatattttgttcttatttgccagagccaaattttatctggaagttgagacttaaaaaatacttgcatgaatgatttgtgtttctttatatttttagcctaaatgttaactacatattgtctggaaacctgtcattgtattcagataattagatgattatatattggtgttactttttcttgtattcatgaaaactgtttttactaagttttcaaatttgtaaagttagcctttgaatgctaggaatgcattattgagggtcattctttattctttactattaaaatattttggatgcaaaaaaaaaaaaaggcctcttggcttacggtgaactttcggccgtccctttaaggggttattatgaccttgtcatgactctggctcggcgtcggtggggagcgatcat

SEQ ID NO: 116878 - DNA, 700 bp, Homo sapiens
tctaggcatctttttcctggattgcctatttatgtcctcaaatctcttcttacaaaattcaggaaaaactcaaaagagaggctaaagaaacacagctactcttaaagaaaaaaaagacaagagcatggtttcagaagaagagacattgaaaacactgtataggaacaataatccaccagcttctcatctttgtgtcaaaacaccaaaaaaggccccttcatctctaacaacccctggatctacactgaagtttggagctataagaaaaatgcgggaggaccgttgggctgtaattgctaaaatggatagaaaaaaaaaactaaaagaagctgaaaagttatttgtttaatttcagagaatcagtgtagttaaggagcctaataacgtgaaacttatagttaatattttgttcttatttgccagagccaaattttatctggaagttgagacttaaaaaatacttgcatgaatgatttgtgtttctttatatttttagcctaaatgttaactacatattgtctggaaacctgtcattgtattcagataattagatgattatatattggtgttactttttcttgtattcatgaaaactgtttttactaagttttcaaatttgtaaagttagcctttgaatgctaggaatgcattattgagggtcattctttattctttactattaaaatattttggatgcaaa

SEQ ID NO: 116879 - DNA, 397 bp, Homo sapiens
tgtttatttttgctaataagcaaaatgggatgaacttttctgttttataaattagtttggaaatgaaaaagtaagtttgaaattagaagaaggaatacaagaaaataaagatttaataaaagagaataatgccacaaggcatttatgtaatctactcaaagaaacctgtgctagatctgcagaaaagacaaagaaattgcctgctatgtcatgaaatcttctagatgctgatgaaaaacagcagtgaacaaagtctctactcttacaagagtgtatattccatggtgtatatgtgccacattttctttatccagtctgtcattgatgggcatttgggttggttccaagtctttgctgttgtaaatagtgctgcaataaacatacgtgtgcatgtgtc

SEQ ID NO: 116880 - DNA, 1179 bp, Homo sapiens
gcaacaagaggaatgaaaaacgaaacagcctgaatgaaccccgtgtcgtatggaaaaactcaaaagagaggctaaagaaacacagctactcttaaagaaaaaaaagacaagaaaacacaaacatttttattggaaacacctgaaatttattggaaattggattctaaagcagttccttcacaaactgtatctcgaaatttcacatcagttgatcatggcatatccaaagataaaagagactatctgtggacatctgccaaaaatactttatctacaccattgccaaagagcatggtttcagaagaagagacattgaaaacactgtataggaacaataatccaccagcttctcatctttgtgtcaaaacaccaaaaaaggccccttcatctctaacaacccctggatctacactgaagtttggagctataagaaaaatgcgggaggaccgttgggctgtaattgctaaaatggatagaaaaaaaaaactaaaagaagctgaaaagttatttgtttaatttcagagaatcagtgtagttaaggagcctaataacgtgaaacttatagttaatattttgttcttatttgccagagccaaattttatctggaagttgagacttaaaaaatacttgcatgaatgatttgtgtttctttatatttttagcctaaatgttaactacatattgtctggaaacctgtcattgtattcagataattagatgattatatattggtgttactttttcttgtattcatgaaaactgtttttactaagttttcaaatttgtaaagttagcctttgaatgctaggaatgcattattgagggtcattctttattctttactattaaaatattttggatgcaaaaaaaaaacaaaaatgcctcgttggccttaacggcggactcttgcgcccgttcccttagggagggtaattcagatcctcgtcactgactcctgcctgggcgttcggtgcgcaagcggataccctactcaagggggaatagggatccacaaaaagcgggatacccgataagaatgtagaaaaaggcccaaaaggcccaaaccgaaaaggccgtgttggggtgttcctaggcccgcccccagaagttcgaaaaggcgttatgcatgggcgaacccaaggcttaagaaccgggttccccggaggcctcgcgctctt

SEQ ID NO: 116881 - DNA, 3205 bp, Homo sapiens
aggtcctgggagcctggcaagcccacacagcgacggttatttagccgttgaactgccagccgcccggggcccacgcgctccgggccgctcaggctgagcgatttcccgccttttctgaggttctgaggcgggagccattggttctttctgttgccctcatagaccgtatgtagcagttcgcgtgggcacagaacccacggtttcccgctagttcttcaaagatatttacaaccgtaacagagaaaatggaaaagcaaaagccctttgcattgttcgtaccaccgagatcaagcagcagtcaggtgtctgcggtgaaacctcagaccctgggaggcgattccactttcttcaagagtttcaacaaatgtactgaagatgattttgagtttccatttgcaaagactaatctctccaaaaatggggaaaacattgattcagatcctgctttacaaaaagttaatttcttgcccgtgcttgagcaggttggtaattctgactgtcactatcaggaaggactaaaagactctgatttggagaattcagagggattgagcagagtgtattcaaaactgtataaggaggctgaaaagataaaaaaatggaaagtaagtacagaagctgaactgagacagaaagaaagtaagttgcaagaaaacagaaagataattgaagcacagcgaaaagccattcaggaactgcaatttggaaatgaaaaagtaagtttgaaattagaagaaggaatacaagaaaataaagatttaataaaagagaataatgccacaaggcatttatgtaatctactcaaagaaacctgtgctagatctgcagaaaagacaaagaaatatgaatatgaacgggaagaaaccaggcaagtttatatggatctaaataataacattgagaaaatgataacagcttttgaggaacttcgtgtgcaagctgagaattccagactggaaatgcattttaagttaaaggaagattatgaaaaaatccaacaccttgaacaagaatacaagaaggaaataaatgacaaggaaaagcaggtatcactactattgatccaaatcactgagaaagaaaataaaatgaaagatttaacatttctgctagaggaatccagagataaagttaatcaattagaggaaaagacaaaattacagagtgaaaacttaaaacaatcaattgagaaacagcatcatttgactaaagaactagaagatattaaagtgtcattacaaagaagtgtgagtactcaaaaggctttagaggaagatttacagatagcaacaaaaacaatttgtcagctaactgaagaaaaagaaactcaaatggaagaatctaataaagctagagctgctcattcgtttgtggttactgaatttgaaactactgtctgcagcttggaagaattattgagaacagaacagcaaagattggaaaaaaatgaagatcaattgaaaatacttaccatggagcttcaaaagaaatcaagtgagctggaagagatgactaagcttacaaataacaaagaagtagaacttgaagaattgaaaaaagtcttgggagaaaaggaaacacttttatatgaaaataaacaatttgagaagattgctgaagaattaaaaggaacagaacaagaactaattggtcttctccaagccagagagaaagaagtacatgatttggaaatacagttaactgccattaccacaagtgaacagtattattcaaaagaggttaaagatctaaaaactgagcttgaaaacgagaagcttaagaatactgaattaacttcacactgcaacaagctttcactagaaaacaaagagctcacacaggaaacaagtgatatgaccctagaactcaagaatcagcaagaagatattaataataacaaaaagcaagaagaaaggatgttgaaacaaatagaaaatcttcaagaaacagaaacccaattaagaaatgaactagaatatgtgagagaagagctaaaacagaaaagagatgaagttaaatgtaaattggacaagagtgaagaaaattgtaacaatttaaggaaacaagttgaaaataaaaacaagtatattgaagaacttcagcaggagaataaggccttgaaaaaaaaaggtacagcagaaagcaagcaactgaatgtttatgagataaaggtcaataaattagagttagaactagaaagtgccaaacagaaatttggagaaatcacagacacctatcagaaagaaattgaggacaaaaagatatcagaagaaaatcttttggaagaggttgagaaagcaaaagtaatagctgatgaagcagtaaaattacagaaagaaattgataagcgatgtcaacataaaatagctgaaatggtagcacttatggaaaaacataagcaccaatatgataagatcattgaagaaagagactcagaattaggactttataagagcaaagaacaagaacagtcatcactgagagcatctttggagattgaactatccaatctcaaagctgaacttttgtctgttaagaagcaacttgaaatagaaagagaagagaaggaaaaactcaaaagagaggctaaagaaacacagctactcttaaagaaaaaaaagacaagagcatggtttcagaagaagagacattgaaaacactgtataggaacaataatccaccagcttctcatctttgtgtcaaaacaccaaaaaaggccccttcatctctaacaacccctggatctacactgaagtttggagctataagaaaaatgcgggaggaccgttgggctgtaattgctaaaatggatagaaaaaaaaaactaaaagaagctgaaaagttatttgtttaatttcagagaatcagtgtagttaaggagcctaataacgtgaaacttatagttaatattttgttcttatttgccagagccaaattttatctggaagttgagacttaaaaaatacttgcatgaatgatttgtgtttctttatatttttagcctaaatgttaactacatattgtctggaaacctgtcattgtattcagataattagatgattatatattggtgttactttttcttgtattcatgaaaactgtttttactaagttttcaaatttgtaaagttagcctttgaatgctaggaatgcattattgagggtcattctttattctttactattaaaatattttggatgcaaa

SEQ ID NO: 116882 - DNA, 866 bp, Homo sapiens
taattatatatcggacatatgtacatgaaagaaaagaggggggcagcttaggaaaaactcaaaagagaggctaaagaaacacagctactcttaaagaaaaaaaagacaagaaaacacaaacatttttattggaaacacctgaaatttattggaaattggattctaaagcagttccttcacaaactgtatctcgaaatttcacatcagttgatcatggcatatccaaagataaaagagactatctgtggacatctgccaaaaatactttatctacaccattgccaaagagcatggtttcagaagaagagacattgaaaacactgtataggaacaataatccaccagcttctcatctttgtgtcaaaacaccaaaaaaggccccttcatctctaacaacccctggatctacactgaagtttggagctataagaaaaatgcgggaggaccgttgggctgtaattgctaaaatggatagaaaaaaaaaactaaaagaagctgaaaagttatttgtttaatttcagagaatcagtgtagttaaggagcctaataacgtgaaacttatagttaatattttgttcttatttgccagagccaaattttatctggaagttgagacttaaaaaatacttgcatgaatgatttgtgtttctttatatttttagcctaaatgttaactacatattgtctggaaacctgtcattgtattcagataattagatgattatatattggtgttactttttcttgtattcatgaaaactgtttttactaagttttcaaatttgtaaagttagcctttgaatgctaggaatgcattattgagggtcattctttattctttactattaaaatattttggatgcaaa

SEQ ID NO: 116883 - DNA, 3517 bp, Homo sapiens
aggtcctgggagcctggcaagcccacacagcgacggttatttagccgttgaactgccagccgcccggggcccacgcgctccgggccgctcaggctgagcgatttcccgccttttctgaggttctgaggcgggagccattggttctttctgttgccctcatagaccgtatgtagcagttcgcgtgggcacagaacccacggtttcccgctagttcttcaaagatatttacaaccgtaacagagaaaatggaaaagcaaaagccctttgcattgttcgtaccaccgagatcaagcagcagtcaggtgtctgcggtgaaacctcagaccctgggaggcgattccactttcttcaagagtttcaacaaatgtactgaagatgattttgagtttccatttgcaaagactaatctctccaaaaatggggaaaacattgattcagatcctgctttacaaaaagttaatttcttgcccgtgcttgagcaggttggtaattctgactgtcactatcaggaaggactaaaagactctgatttggagaattcagagggattgagcagagtgtattcaaaactgtataaggaggctgaaaagataaaaaaatggaaagtaagtacagaagctgaactgagacagaaagaaagtaagttgcaagaaaacagaaagataattgaagcacagcgaaaagccattcaggaactgcaatttggaaatgaaaaagtaagtttgaaattagaagaaggaatacaagaaaataaagatttaataaaagagaataatgccacaaggcatttatgtaatctactcaaagaaacctgtgctagatctgcagaaaagacaaagaaatatgaatatgaacgggaagaaaccaggcaagtttatatggatctaaataataacattgagaaaatgataacagcttttgaggaacttcgtgtgcaagctgagaattccagactggaaatgcattttaagttaaaggaagattatgaaaaaatccaacaccttgaacaagaatacaagaaggaaataaatgacaaggaaaagcaggtatcactactattgatccaaatcactgagaaagaaaataaaatgaaagatttaacatttctgctagaggaatccagagataaagttaatcaattagaggaaaagacaaaattacagagtgaaaacttaaaacaatcaattgagaaacagcatcatttgactaaagaactagaagatattaaagtgtcattacaaagaagtgtgagtactcaaaaggctttagaggaagatttacagatagcaacaaaaacaatttgtcagctaactgaagaaaaagaaactcaaatggaagaatctaataaagctagagctgctcattcgtttgtggttactgaatttgaaactactgtctgcagcttggaagaattattgagaacagaacagcaaagattggaaaaaaatgaagatcaattgaaaatacttaccatggagcttcaaaagaaatcaagtgagctggaagagatgactaagcttacaaataacaaagaagtagaacttgaagaattgaaaaaagtcttgggagaaaaggaaacacttttatatgaaaataaacaatttgagaagattgctgaagaattaaaaggaacagaacaagaactaattggtcttctccaagccagagagaaagaagtacatgatttggaaatacagttaactgccattaccacaagtgaacagtattattcaaaagaggttaaagatctaaaaactgagcttgaaaacgagaagcttaagaatactgaattaacttcacactgcaacaagctttcactagaaaacaaagagctcacacaggaaacaagtgatatgaccctagaactcaagaatcagcaagaagatattaataataacaaaaagcaagaagaaaggatgttgaaacaaatagaaaatcttcaagaaacagaaacccaattaagaaatgaactagaatatgtgagagaagagctaaaacagaaaagagatgaagttaaatgtaaattggacaagagtgaagaaaattgtaacaatttaaggaaacaagttgaaaataaaaacaagtatattgaagaacttcagcaggagaataaggccttgaaaaaaaaaggtacagcagaaagcaagcaactgaatgtttatgagataaaggtcaataaattagagttagaactagaaagtgccaaacagaaatttggagaaatcacagacacctatcagaaagaaattgaggacaaaaagatatcagaagaaaatcttttggaagaggttgagaaagcaaaagtaatagctgatgaagcagtaaaattacagaaagaaattgataagcgatgtcaacataaaatagctgaaatggtagcacttatggaaaaacataagcaccaatatgataagatcattgaagaaagagactcagaattaggactttataagagcaaagaacaagaacagtcatcactgagagcatctttggagattgaactatccaatctcaaagctgaacttttgtctgttaagaagcaacttgaaatagaaagagaagagaaggaaaaactcaaaagagaggctaaagaaacacagctactcttaaagaaaaaaaagacaagagcatggtttcagaagaagagacattgaaaacactgtataggaacaataatccaccagcttctcatctttgtgtcaaaacaccaaaaaaggccccttcatctctaacaacccctggatctacactgaagtttggagctataagaaaaatgcgggaggaccgttgggctgtaattgctaaaatggatagaaaaaaaaaactaaaagaagctgaaaagttatttgtttaatttcagagaatcagtgtagttaaggagcctaataacgtgaaacttatagttaatattttgttcttatttgccagagccaaattttatctggaagttgagacttaaaaaatacttgcatgaatgatttgtgtttctttatatttttagcctaaatgttaactacatattgtctggaaacctgtcattgtattcagataattagatgattatatattggtgttactttttcttgtattcatgaaaactgtttttactaagttttcaaatttgtaaagttagcctttgaatgctaggaatgcattattgagggtcattctttattctttactattaaaatattttggatgcaaaaaaaaaacaaaaatgcctcgttggccttaacggcggactcttgcgcccgttcccttagggagggtaattcagatcctcgtcactgactcctgcctgggcgttcggtgcgcaagcggataccctactcaagggggaatagggatccacaaaaagcgggatacccgataagaatgtagaaaaaggcccaaaaggcccaaaccgaaaaggccgtgttggggtgttcctaggcccgcccccagaagttcgaaaaggcgttatgcatgggcgaacccaaggcttaagaaccgggttccccggaggcctcgcgctctt

SEQ ID NO: 116884 - DNA, 872 bp, Homo sapiens
tccttcaacatctcgcaatattcattcccgcgcccctcggttcctttttcacctcaggaaaaactcaaaagagaggctaaagaaacacagctactcttaaagaaaaaaaagacaagaaaacacaaacatttttattggaaacacctgaaatttattggaaattggattctaaagcagttccttcacaaactgtatctcgaaatttcacatcagttgatcatggcatatccaaagataaaagagactatctgtggacatctgccaaaaatactttatctacaccattgccaaagagcatggtttcagaagaagagacattgaaaacactgtataggaacaataatccaccagcttctcatctttgtgtcaaaacaccaaaaaaggccccttcatctctaacaacccctggatctacactgaagtttggagctataagaaaaatgcgggaggaccgttgggctgtaattgctaaaatggatagaaaaaaaaaactaaaagaagctgaaaagttatttgtttaatttcagagaatcagtgtagttaaggagcctaataacgtgaaacttatagttaatattttgttcttatttgccagagccaaattttatctggaagttgagacttaaaaaatacttgcatgaatgatttgtgtttctttatatttttagcctaaatgttaactacatattgtctggaaacctgtcattgtattcagataattagatgattatatattggtgttactttttcttgtattcatgaaaactgtttttactaagttttcaaatttgtaaagttagcctttgaatgctaggaatgcattattgagggtcattctttattctttactattaaaatattttggatgcaaa

SEQ ID NO: 116885 - DNA, 1120 bp, Homo sapiens
aggtcctgggagcctggcaagcccacacagcgacggttatttagccgttgaactgccagccgcccggggcccacgcgctccgggccgctcaggctgagcgatttcccgccttttctgaggttctgaggcgggagccattggttctttctgttgccctcatagaccgtatgtagcagttcgcgtgggcacagaacccacggtttcccgctagttcttcaaagatatttacaaccgtaacagagaaaatggaaaagcaaaagccctttgcattgttcgtaccaccgagatcaagcagcagtcaggtgtctgcggtgaaacctcagaccctgggaggcgattccactttcttcaagagtttcaacaaatgtactgaagatgattttgagtttccatttgcaaagactaatctctccaaaaatggggaaaacattgattcagatcctgctttacaaaaagttaatttcttgcccgtgcttgagcaggttggtaattctgactgtcactatcaggaaggactaaaagactctgatttggagaattcagagggattgagcagagtgtattcaaaactgtataaggaggctgaaaagataaaaaaatggaaagtaagtacagaagctgaactgagacagaaagaaagtaagttgcaagaaaacagaaagataattgaagcacagcgaaaagccattcaggaactgcaatttggaaatgaaaaagtaagtttgaaattagaagaaggaatacaagaaaataaagatttaataaaagagaataatgccacaaggcatttatgtaatctactcaaagaaacctgtgctagatctgcagaaaagacaaagaaatatgaatatgaacgggaagaaaccaggcaagtttatatggatctaaataataacattgagaaaatgataacagcttttgaggaacttcgtgtgcaagctgagaattccagactggaaatgcattttaagttaaaggaagattatgaaaaaatccaacaccttgaacaagaatacaagaaggaaataaatgacaaggaaaagcaggttttttaaaaaaccaactctttgtattctttatatttgctaattcattaaaaacttaaaatttcaaaagaagt

SEQ ID NO: 116886 - DNA, 826 bp, Homo sapiens
  misc_feature (1)..(1): n is a, c, g, or t
nctaggagaactctcacgtacaggcatgagagccactacctactcttaaagcgtcaaaagacgagatttcaaaacacaaacatttttattggaaacacctgaaatttattggaaattggattctaaagcagttccttcacaaactgtatctcgaaatttcacatcagttgatcatggcatatccaaagataaaagagactatctgtggacatctgccaaaaatactttatctacaccattgccaaagagcatggtttcagaagaagagacattgaaaacactgtataggaacaataatccaccagcttctcatctttgtgtcaaaacaccaaaaaaggccccttcatctctaacaacccctggatctacactgaagtttggagctataagaaaaatgcgggaggaccgttgggctgtaattgctaaaatggatagaaaaaaaaaactaaaagaagctgaaaagttatttgtttaatttcagagaatcagtgtagttaaggagcctaataacgtgaaacttatagttaatattttgttcttatttgccagagccaaattttatctggaagttgagacttaaaaaatacttgcatgaatgatttgtgtttctttatatttttagcctaaatgttaactacatattgtctggaaacctgtcattgtattcagataattagatgattatatattggtgttactttttcttgtattcatgaaaactgtttttactaagttttcaaatttgtaaagttagcctttgaatgctaggaatgcattattgagggtcattctttattctttactattaaaatattttggatgcaaa

SEQ ID NO: 116887 - DNA, 1043 bp, Homo sapiens
aggtcctgggagcctggcaagcccacacagcgacggttatttagccgttgaactgccagccgcccggggcccacgcgctccgggccgctcaggctgagcgatttcccgccttttctgaggttctgaggcgggagccattggttctttctgttgccctcatagaccgtatgtagcagttcgcgtgggcacagaacccacggtttcccgctagttcttcaaagatatttacaaccgtaacagagaaaatggaaaagcaaaagccctttgcattgttcgtaccaccgagatcaagcagcagtcaggtgtctgcggtgaaacctcagaccctgggaggcgattccactttcttcaagagtttcaacaaatgtactgaagatgattttgagtttccatttgcaaagactaatctctccaaaaatggggaaaacattgattcagatcctgctttacaaaaagttaatttcttgcccgtgcttgagcaggttggtaattctgactgtcactatcaggaaggactaaaagactctgatttggagaattcagagggattgagcagagtgtattcaaaactgtataaggaggctgaaaagataaaaaaatggaaagtaagtacagaagctgaactgagacagaaagaaagtaagttgcaagaaaacagaaagataattgaagcacagcgaaaagccattcaggaactgcaatttggaaatgaaaaagtaagtttgaaattagaagaaggaatacaagaaaataaagatttaataaaagagaataatgccacaaggcatttatgtaatctactcaaagaaacctgtgctagatctgcagaaaagacaaagaaattgcctgctatgtcatgaaatcttctagatgctgatgaaaaacagcagtgaacaaagtctctactcttacaagagtgtatattccatggtgtatatgtgccacattttctttatccagtctgtcattgatgggcatttgggttggttccaagtctttgctgttgtaaatagtgctgcaataaacatacgtgtgcatgtgtc

SEQ ID NO: 116888 - DNA, 867 bp, Homo sapiens
gcaacaagaggaatgaaaaacgaaacagcctgaatgaaccccgtgtcgtatggaaaaactcaaaagagaggctaaagaaacacagctactcttaaagaaaaaaaagacaagaaaacacaaacatttttattggaaacacctgaaatttattggaaattggattctaaagcagttccttcacaaactgtatctcgaaatttcacatcagttgatcatggcatatccaaagataaaagagactatctgtggacatctgccaaaaatactttatctacaccattgccaaagagcatggtttcagaagaagagacattgaaaacactgtataggaacaataatccaccagcttctcatctttgtgtcaaaacaccaaaaaaggccccttcatctctaacaacccctggatctacactgaagtttggagctataagaaaaatgcgggaggaccgttgggctgtaattgctaaaatggatagaaaaaaaaaactaaaagaagctgaaaagttatttgtttaatttcagagaatcagtgtagttaaggagcctaataacgtgaaacttatagttaatattttgttcttatttgccagagccaaattttatctggaagttgagacttaaaaaatacttgcatgaatgatttgtgtttctttatatttttagcctaaatgttaactacatattgtctggaaacctgtcattgtattcagataattagatgattatatattggtgttactttttcttgtattcatgaaaactgtttttactaagttttcaaatttgtaaagttagcctttgaatgctaggaatgcattattgagggtcattctttattctttactattaaaatattttggatgcaaa

SEQ ID NO: 116889 - DNA, 3457 bp, Homo sapiens
gcgcaggaacttaagacagttcctcctggcgatgtgatggaatttaatgggacaggagaagggaacgggctttcttttcaggccagcgtggcagcgggcggtagggcgaaagggagaaggaaacgagggtttattccgttgcccactccgcgatatttacaaccgtaacagagaaaatggaaaagcaaaagccctttgcattgttcgtaccaccgagatcaagcagcagtcaggtgtctgcggtgaaacctcagaccctgggaggcgattccactttcttcaagagtttcaacaaatgtactgaagatgattttgagtttccatttgcaaagactaatctctccaaaaatggggaaaacattgattcagatcctgctttacaaaaagttaatttcttgcccgtgcttgagcaggttggtaattctgactgtcactatcaggaaggactaaaagactctgatttggagaattcagagggattgagcagagtgtattcaaaactgtataaggaggctgaaaagataaaaaaatggaaagtaagtacagaagctgaactgagacagaaagaaagtaagttgcaagaaaacagaaagataattgaagcacagcgaaaagccattcaggaactgcaatttggaaatgaaaaagtaagtttgaaattagaagaaggaatacaagaaaataaagatttaataaaagagaataatgccacaaggcatttatgtaatctactcaaagaaacctgtgctagatctgcagaaaagacaaagaaatatgaatatgaacgggaagaaaccaggcaagtttatatggatctaaataataacattgagaaaatgataacagcttttgaggaacttcgtgtgcaagctgagaattccagactggaaatgcattttaagttaaaggaagattatgaaaaaatccaacaccttgaacaagaatacaagaaggaaataaatgacaaggaaaagcaggtatcactactattgatccaaatcactgagaaagaaaataaaatgaaagatttaacatttctgctagaggaatccagagataaagttaatcaattagaggaaaagacaaaattacagagtgaaaacttaaaacaatcaattgagaaacagcatcatttgactaaagaactagaagatattaaagtgtcattacaaagaagtgtgagtactcaaaaggctttagaggaagatttacagatagcaacaaaaacaatttgtcagctaactgaagaaaaagaaactcaaatggaagaatctaataaagctagagctgctcattcgtttgtggttactgaatttgaaactactgtctgcagcttggaagaattattgagaacagaacagcaaagattggaaaaaaatgaagatcaattgaaaatacttaccatggagcttcaaaagaaatcaagtgagctggaagagatgactaagcttacaaataacaaagaagtagaacttgaagaattgaaaaaagtcttgggagaaaaggaaacacttttatatgaaaataaacaatttgagaagattgctgaagaattaaaaggaacagaacaagaactaattggtcttctccaagccagagagaaagaagtacatgatttggaaatacagttaactgccattaccacaagtgaacagtattattcaaaagaggttaaagatctaaaaactgagcttgaaaacgagaagcttaagaatactgaattaacttcacactgcaacaagctttcactagaaaacaaagagctcacacaggaaacaagtgatatgaccctagaactcaagaatcagcaagaagatattaataataacaaaaagcaagaagaaaggatgttgaaacaaatagaaaatcttcaagaaacagaaacccaattaagaaatgaactagaatatgtgagagaagagctaaaacagaaaagagatgaagttaaatgtaaattggacaagagtgaagaaaattgtaacaatttaaggaaacaagttgaaaataaaaacaagtatattgaagaacttcagcaggagaataaggccttgaaaaaaaaaggtacagcagaaagcaagcaactgaatgtttatgagataaaggtcaataaattagagttagaactagaaagtgccaaacagaaatttggagaaatcacagacacctatcagaaagaaattgaggacaaaaagatatcagaagaaaatcttttggaagaggttgagaaagcaaaagtaatagctgatgaagcagtaaaattacagaaagaaattgataagcgatgtcaacataaaatagctgaaatggtagcacttatggaaaaacataagcaccaatatgataagatcattgaagaaagagactcagaattaggactttataagagcaaagaacaagaacagtcatcactgagagcatctttggagattgaactatccaatctcaaagctgaacttttgtctgttaagaagcaacttgaaatagaaagagaagagaaggaaaaactcaaaagagaggctaaagaaacacagctactcttaaagaaaaaaaagacaagaaaacacaaacatttttattggaaacacctgaaatttattggaaattggattctaaagcagttccttcacaaactgtatctcgaaatttcacatcagttgatcatggcatatccaaagataaaagagactatctgtggacatctgccaaaaatactttatctacaccattgccaaaggcatatacagtgaagacaccaacaaaaccaaaactacagcaaagagaaaacttgaatatacccattgaagaaagtaaaaaaaagagaaaaatggcctttgaatttgatattaattcagatagttcagaaactactgatcttttgagcatggtttcagaagaagagacattgaaaacactgtataggaacaataatccaccagcttctcatctttgtgtcaaaacaccaaaaaaggccccttcatctctaacaacccctggatctacactgaagtttggagctataagaaaaatgcgggaggaccgttgggctgtaattgctaaaatggatagaaaaaaaaaactaaaagaagctgaaaagttatttgtttaatttcagagaatcagtgtagttaaggagcctaataacgtgaaacttatagttaatattttgttcttatttgccagagccaaattttatctggaagttgagacttaaaaaatacttgcatgaatgatttgtgtttctttatatttttagcctaaatgttaactacatattgtctggaaacctgtcattgtattcagataattagatgattatatattggtgttactttttcttgtattcatgaaaactgtttttactaagttttcaaatttgtaaagttagcctttgaatgctaggaatgcattattgagggtcattctttattctttactattaaaatattttggatgcaaa

SEQ ID NO: 116890 - DNA, 691 bp, Homo sapiens
atctatacctaatcattccctgtctttcacttcccttcctcttcgctcctcaggaaaaactcaaaagagaggctaaagaaacacagctactcttaaagaaaaaaaagacaagagcatggtttcagaagaagagacattgaaaacactgtataggaacaataatccaccagcttctcatctttgtgtcaaaacaccaaaaaaggccccttcatctctaacaacccctggatctacactgaagtttggagctataagaaaaatgcgggaggaccgttgggctgtaattgctaaaatggatagaaaaaaaaaactaaaagaagctgaaaagttatttgtttaatttcagagaatcagtgtagttaaggagcctaataacgtgaaacttatagttaatattttgttcttatttgccagagccaaattttatctggaagttgagacttaaaaaatacttgcatgaatgatttgtgtttctttatatttttagcctaaatgttaactacatattgtctggaaacctgtcattgtattcagataattagatgattatatattggtgttactttttcttgtattcatgaaaactgtttttactaagttttcaaatttgtaaagttagcctttgaatgctaggaatgcattattgagggtcattctttattctttactattaaaatattttggatgcaaa

SEQ ID NO: 116891 - DNA, 355 bp, Homo sapiens
tgagagagtcccactcttgcccaggccagagtgctgtggtgccttcacagctcaccacagcctcaatctcctgggctcaagcaatcctgcctcccaagccaagcagctggtactgcaagcatgtgccaccgtgcctggctcctgaagactgaggttggtttagattaatgagttgcccaaattcagacagttcttaagtggcaaagttaggattccaacccaggtcaacataactaaagcccaaaccccatctcacccctctaggccatcaaatattggctgggtgcggtggtttatgtctgcctccccggagtgttgggattgcaggggtgggccaccacgcccgggctattta

SEQ ID NO: 116892 - DNA, 989 bp, Homo sapiens
tgagagagtcccactcttgcccaggccagagtgctgtggtgccttcacagctcaccacagcctcaatctcctgggctcaagcaatcctgcctcccaagccaagcagctggtactgcaagcatgtgccaccgtgcctggctcctgaagactgaggttggtttagattaatgagttgcccaaattcagacagttcttaagtggcaaagttaggattccaacccaggtcaacataactaaagcccaaaccccatctcacccctctaggccatcaaatattggctgggtgcggtggtttatgtctgtagtcccagcactttgggaggcggaggcgggaggactgtttgagctcaggagtttgagaccagcctgggcaacataacaagaccctgtctctacaaaaatatataaattagccgggtgtactggctcacacctgtagctacttgggaggctgaggtgggaggatcgcttgagcctgggaggtcaaggctgcggtgacctgtgattgcaccaccaggagaccctgtcttaaaaatgtatatataaaaataaaaagaacatcagacatcaccatcacctcgcttagaatccatggggccttctcctcaaattcaatcttcccaggcatttcatgaacttgcgtctagtttctgttccctctcaaattgcccaggctgtcctgtgagtgacagcagctatttcgtgggcctcctctggaatcatgagaagtcacccaaacaatctcagttttctagctcactccgtcttgacatttctacactgtcatccttggttttcttggaaattaatttgcttttcttcattgtctttctttggagctgctttccttttgttggttactattttatttttagcttctcacaccataccgacatatgttggttattcttttagacatgttttttgttgttgttgtcacctggaacttttgtatcttgaataaatttggggatcaaatacaaattttc

SEQ ID NO: 116893 - DNA, 602 bp, Homo sapiens
tgcctcccaaaatgttgggattacaggcgtgagccaccacgcccagcctatttatttatttttttagaatcaagatcttgctatgttgcccaggctgaactcgaactcctgggctcaagcaatcctgcctcccaagccaagcagctggtactgcaagcatgtgccaccgtgcctggctcctgaagactgaggttggtttagattaatgagttgcccaaattcagacagttcttaagtggcaaagttaggattccaacccaggtcaacataactaaagcccaaaccccatctcacccctctaggccatcaaatattggctgggtgcggtggtttatgtctgtagtcccagcactttgggaggcggaggcgggaggactgtttgagctcaggagtttgagaccagcctgggcaacataacaagaccctgtctctacaaaaatatataaattagccgggtgtactggctcacacctgtagctacttgggaggctgaggtgggaggatcgcttgagcctgggaggtcaaggctgcggtgacctgtgattgcaccaccaggagaccctgtcttaaaaatgtatatataaaaataaaaagaacatcag

SEQ ID NO: 116894 - DNA, 851 bp, Homo sapiens
agcgggtgaggccagagcagcggggccgggcgcgcagggcctggccggagcccccactcccaggagtttcctctgcagagccccgcgccccccgcgcggggatttcagcccgatcccctcctctccctgcgcccagcctctccccagcatgtaaagtcttctgtctctcctcggagttggcggaggcggcaactttccattctcgccgccgggggccaggcagcagcgggcgcgcgggtcagcgctcagcacggcgggcagcgccgcgctgcgcaccgccgccgaccatgagcgaggacagccgcggaggccgcgccgagagcgccaaggacctggagaagcagcttcgcctgcgcgtgtgcgtgctcagcgagctccagaagaccgagcgggactatgtgggcacgctggagttcctggtgtcggtgagtgtccccggcagacgcagggggacgtccgggcggcgcggggcgcgggtcccggagtggctgcgggaaggacgcgcggcattgtctgtgcggggacccgggacgggtcggggcatcacaggcgcgggaatccacgtgtggactctgcgttcgcgggcgcggtgacccccgcggggattcgttggtgccccgagactcactgagttgcgggggccttggagacctccaggtctgaaaagttagctctagagaagagagctccagtccagggaatcccggctgccctatcttccctcacttttcttttacccgcctccccagtctgctcaagtgcactgtgtaattgattttccttcttgttctttcctggagactttgttttaaagctttggttttgtgattaaaggtccagtcggctacatc

SEQ ID NO: 116895 - DNA, 569 bp, Homo sapiens
gtagtttttggcttcaggtggctgctgcattatttggtgcataggtattcataactgttatatatcactgaagaattgcaggttttagcattaatacctagtgttcgccattaatacctttttgcttgaactctgctttgtctgatatcagcataacaatcactgctttccgttttcattaagctagtacaactttttagcttttctctgtttttggtgtctcttgtatgtagtgtatatttgggccttgttttatgagacaaatttaaaatcttttttgtttaagcctgaaatgtatttgagttgagaaataaaggcagattttgatttggcatttggttgacagcgggtgtttaccataaattaaatgagctgtttgcagctctaccatttgggtaaaatatatttgaagtgtatgataagatcaaaacattttataaaacaaatgttatttcagcaaaaggatattggaattaacaatattttgatgttttctacccttttggactatataaaattaaactgctaagggaaacaatagcaggtataattcataatcatttgataag

SEQ ID NO: 116896 - DNA, 554 bp, Homo sapiens
atggggcttgtcatgcgtggatgcatcgggcgttctgatagaagctgtatatggatgtctcattcagtcccatgaggcagatggatcagtccccattttatacatgagaagctgaggcattgaactcaggcagtgactctggagcctctccttttaatccctgcagcagtctttgtgatagggtcaagtgggtatttattggaaaggtcccctgctctgtcccccttacccagtgcaggggttaagaagggcctgtttgttaggaaaagtcttcagcacaaccgatcctgcttgcttactgagctgctgacattctcagttttgagaacgaggtaggagagttgcagaatcagagggcaggagcgctgtgtttccagggtgccctgaaatggcagaggatccaggggccagaccagaatgacgaggaactcgccacaggcctggctcctcgcggggaggaaaacggaagatcagataacaagactaagcacgtgaactccagatgcataaccttggatcaaaattggggtgccagaccagagtgggtggacaga

SEQ ID NO: 116897 - DNA, 234 bp, Homo sapiens
atcaaacgacttacatcataaattatcaagataactgatactatctatattgtacaatgacagaacatatgcatttttactttatactcctaaattattgaatattagcaaagaaaggagggtcaacagtcatctaaatatataactttttattttacagagaattacccaaataggtgaaatggcttagataaattcacattgttttaggtatagagccaggacctcagtttt

SEQ ID NO: 116898 - DNA, 737 bp, Homo sapiens
aaaaagagcagttagatctcagattttctgagcaatccagtgccaagaggtgactgcccgcccccactcagctgtaagactggagttgtatgtattctctgagaataaaagggagccctttataatggggactctggccctttcttggtggaatatcttagagaacaggaaggttgggtgaacatcagtgtgcagaccagttccttaggccccagtctctatccacatttggtttccaagccccagcagtcaggagtagcccccaggaaggaaactgatgaattttctccagtaaatttctccagaggttctccagtaaaatggcggaggtggaccctcctgtgtatgccctccccatcctccgacgccacccagtcagctccatagagaaccattctcaagtgggagtgataggcctggttcagcagacatttgaggaaacactctcatttgaggaaccaagacaaaaagaggaagaaaacaaaaagcaagttgcaggcagcagatactgtgcagggggaagaaaactgttatacaaaactactgtaatatcctcagagagaatctctaaatacggaagagtcagaggaggaaccgatccccagaagtcagaaataagatatcatgaataaaaaactccaaagaagggttggatgaaaacttgacacttctaggaagaagaggacaataagagagacaacccaatgtccgaatagaaggagttttagaaaaagaga

SEQ ID NO: 116899 - DNA, 664 bp, Homo sapiens
agaactgccctggggttccgcccagcccaaacgggctagatgaaggtggagtccagaggcctccccgtcctgctggctgagggcctgggcctcaaacagctgcttcattatgagcgccgacttctgctccagctgcatgacgcgcccactcttctcggtcacctcctgggtgaggcgtcggttctgctccttcagcataaggatagtctgctgctgccaccccgggaaggaggtgaacgtcagggcagggcagaggggcccggaggaggacgtaggtagggcccggctggcaccggccgcagccagcaactcccccacgcaccgggccacctcctgtaccttaggcagtagccgccccagtgggtgggggctccccgcaggcccaaagtcggcgctggctctgctctggcccaggcggcactggcggtcctgcactggttgcagccgctgctggtaccagtcgcgaccccgccatcatctccaaaccctgcagcagcaccaccttctcctgctccagctccttcatctgcttcagcaggccgcagtccacgccgctggtgatggtgagcctccgacttcccttcgggcacggggggccagtcggacatcccgagtccacctccagggccctgcaggccaatgaacctgcgtccgcgcttgcgct

SEQ ID NO: 116900 - DNA, 683 bp, Homo sapiens
tgcagtttgcaatggaatatgacaaacagacatgctaaagaggttcaacaaaatttaaagggcaatgaaaaaattaaaatttgattttttattatgaaagtcacacgtgttccttgtagaaaattgggacaaaaagaaaggtagaaaaaagttaaaaatcagtcataatacaatcattattattttcttccagttgtttttcctgcattctttctacaagtggaggtgaataccctcagggaactatgaaataccaattacattttatccctattgtttgagtagtaattacaatagctaaattgtctcgaatgcttacatataccaggcgttctactaagcatatcacatacaaacttcagtcctctctggcaatgccatcaattctaaagaaatgttttgtagttccaagccatagttgaagacaccagatagagtcacaactaatttggatcacttgtgactatggagcccttagtcacaagtgatccaaatattatagaaaataagtatttaaatgacaaattaaagattaaaacattggtttaaggaatttgttttgttttgtaagagaagtaagaattttaagcatggtaaacttgtatattgctgttgcccaaatatactctttgccatcattttgatttactgagacctaatctgggtatgagaaaaacgaagta

SEQ ID NO: 116901 - DNA, 2014 bp, Homo sapiens
tttgctccccccttgattttcccaattgacagggatttctaaacctcttccattgaatggaaaggacagctgtagctgaagctggtggcttcattccattcatttggaaaacacagagataaaaacaagccaggcacgttgcactcttcctgaaaaagtgtcatcccttggagaagggctcagatgctgaatacacaactctctctttcagaaagaactggcatgaaacccattctgccttcaagttttgagatgcagagcttttagttcctctgctaatagagcctcgtttgaatactctgcttgaaaggcaaaagacatctgcctcaacttcaatcaaggaaaaatagagcaactgtacagcaggcagaatctctatgatgactggaattttgtctatcaatggatgtaattaatcctttggctcaagggcaataaaattttgtcttaaagtagcagatcctgctccatcaaagcacaactcaattgggagtaaatgcaaacatgtatctatattgagagatagattttactctgattagaaagatgaaggagggatttggggataaacaatatgaaaattgctgagcagagctgagccagccagaagaaaaagcgatagcaagagaaactgtaggcagatgcaacggcaggataaaatagctatgccaggggtgtgatggggcctgaggagagcatggcatggagacagacacgtgcagggaaccaagtggtgggaggacaagcccactcagagtgttgccgaactgtagcaaatcagtaactataattagcatagcctcagcaatgacaataatgatcatattctgaaaaaaatattggtctctgcttaaaatggcttgaagtcctgatgagggtgacattccatttcataacaaatacttttggaatggacttgaccaacaacctagagattttctttcagttgaccaactttgatttccaaaggtggagttacttttgtgaacccccaaaatctgagacaggtctcagttaatttagaaagtttattttgccagggttgaggatgtgcacccgtgacacagcctcaggtggtcctgatgacatgtgcccaaagcggtcagaacagtttggttttatgcattgtaggaagacatgagacatcgatcaacatatgtaagataaacattggttcagtctggaaaagccagagatgactcaaagtggggagggggcttccgggtcataggtaggtaagagacaaatggttgcattcttctgggtttctgattagtctctccaaaggaggcaatcagatatgcatttatctcagtgaacggagcaatgactttaatagaatgggaggcatgtatgccgtaagcagttcccaacttgacttttccctttagcttagtgattttggggacccaagatattttcctttcacactttggataagtaagatgtgtgaccctgcaaggaataacaaaaattattctgcttatatattcttagaggatacattaatgtctcagtgattgtcattcatctttcacagcgcccagcaaaatactcaataaatttgtgctaaaaacaaaatcaccagctcttcttgctctacttgtcctctttcaatctcttgctttagtgtttgcaccaaataaaccctcactctgcatatttgctttctgcttagaagctaagaaaggacttgctagcacaatttgatccatgcttctgaataaaaaataaccagagataaagttattctttggtcaagtgacagagattgaagccaatatataaatgagatcattttttaaaattgcactatatgtctcaagaatataactgttagacaattgatatggaatatgtgagaataggctacagcaagtctttaagcataaagccaagacagatcaagtttatctattaacttcatccaataagatttaactggccaggcacagtggcacatagctgtaatcccagcactttgggaggccaaggtgggcagatcacttgagcc

SEQ ID NO: 116902 - DNA, 2008 bp, Homo sapiens
gagagggctgactcagagtctgcacatggggtctgcttccaagttcttccaactgggcatatgcctccgccactctctgactgtcctttgcctgtgccaaggtttctgggaagaacaggaagttcagggatggcggaaaatgtttggcagattccctgagtccaaagccggagcacctgctcctgcctgagggcagagaggactgaaagaactggcatgaaacccattctgccttcaagttttgagatgcagagcttttagttcctctgctaatagagcctcgtttgaatactctgcttgaaaggcaaaagacatctgcctcaacttcaatcaaggaaaaatagagcaactgtacagcaggcagaatctctatgatgactggaattttgtctatcaatggatgtaattaatcctttggctcaagggcaataaaattttgtcttaaagtagcagatcctgctccatcaaagcacaactcaattgggagtaaatgcaaacatgtatctatattgagagatagattttactctgattagaaagatgaaggagggatttggggataaacaatatgaaaattgctgagcagagctgagccagccagaagaaaaagcgatagcaagagaaactgtaggcagatgcaacggcaggataaaatagctatgccaggggtgtgatggggcctgaggagagcatggcatggagacagacacgtgcagggaaccaagtggtgggaggacaagcccactcagagtgttgccgaactgtagcaaatcagtaactataattagcatagcctcagcaatgacaataatgatcatattctgaaaaaaatattggtctctgcttaaaatggcttgaagtcctgatgagggtgacattccatttcataacaaatacttttggaatggacttgaccaacaacctagagattttctttcagttgaccaactttgatttccaaaggtggagttacttttgtgaacccccaaaatctgagacaggtctcagttaatttagaaagtttattttgccagggttgaggatgtgcacccgtgacacagcctcaggtggtcctgatgacatgtgcccaaagcggtcagaacagtttggttttatgcattgtaggaagacatgagacatcgatcaacatatgtaagataaacattggttcagtctggaaaagccagagatgactcaaagtggggagggggcttccgggtcataggtaggtaagagacaaatggttgcattcttctgggtttctgattagtctctccaaaggaggcaatcagatatgcatttatctcagtgaacggagcaatgactttaatagaatgggaggcatgtatgccgtaagcagttcccaacttgacttttccctttagcttagtgattttggggacccaagatattttcctttcacactttggataagtaagatgtgtgaccctgcaaggaataacaaaaattattctgcttatatattcttagaggatacattaatgtctcagtgattgtcattcatctttcacagcgcccagcaaaatactcaataaatttgtgctaaaaacaaaatcaccagctcttcttgctctacttgtcctctttcaatctcttgctttagtgtttgcaccaaataaaccctcactctgcatatttgctttctgcttagaagctaagaaaggacttgctagcacaatttgatccatgcttctgaataaaaaataaccagagataaagttattctttggtcaagtgacagagattgaagccaatatataaatgagatcattttttaaaattgcactatatgtctcaagaatataactgttagacaattgatatggaatatgtgagaataggctacagcaagtctttaagcataaagccaagacagatcaagtttatctattaacttcatccaataagatttaactggccaggcacagtggcacatagctgtaatcccagcactttgggaggccaaggtgggcagatcacttgagcc

SEQ ID NO: 116903 - DNA, 748 bp, Homo sapiens
gagagggctgactcagagtctgcacatggggtctgcttccaagttcttccaactgggcatatgcctccgccactctctgactgtcctttgcctgtgccaaggtttctgggaagaacaggaagttcagggatggcggaaaatgtttggcagattccctgagtccaaagccggagcacctgctcctgcctgagggcagagaggactggttttatgacaacagatgaaaggaaattattcaaccacctcaagtctcctcatctgaaatattgggttccattcatctggtttggaaatcttgcaactaaagcccggaatgaaggtagaatcagagacagtgttgatctgcaatcattgatgactgaaatgaatcgataccgctcttggtgcagcctcttattcggttatgactgggttgggattccgctggtttacacccaggtagcagagcagcttatcaacccttttggagaagatgatgatgattttgaaactaactggtgcattgacagaaatttgcaggtctctcttttagctgtggacgaaatgcacatgagcttacccaagatgaagaaggacatttactgggacgattctgctgctcgcccaccatacacattggcagctgctgactactgcataccctcatttctggggtcaacagtccagatggggagatctcggttcaaacctgttccttgggcggaagtctctaatcccatcaggatggttggggctctcttccaggggc

SEQ ID NO: 116904 - DNA, 547 bp, Homo sapiens
gtcatggcaagtatgaactacagacatttgtatattcactcatttagactgtgtcctagcccaatctaactctcatctgcccaaaaaaacttctcctttttatttaatttacatctgagttattctaacaatataacaatgattttaggtctctcttttagctgtggacgaaatgcacatgagcttacccaagatgaagaaggacatttactgggacgattctgctgctcgcccaccatacacattggcagctgctgactactgcataccctcatttctggggtcaacagtccagatggggtaagtgcatttttaaaaaatctctaatattttccagcctgagcaacatagtgagaccttgtctctataaaaaaaaaaagaaataaaataatttaaagtagccaactgtgatgtcacctgtagtcctagctacttggggaggctgcagttggaggattgcttgagcccaggggttcaaggctgcagtgagctgtgattgtgccattgcactccagcctgggtgacaaagtgaagccctgtctcaaga

SEQ ID NO: 116905 - DNA, 671 bp, Homo sapiens
cagagaacagaaagaaaatctgactgtgcacgagcgaagggtgacaccgggcgtgcagcaccgacctgaaggcacctcttcgggggagcccgaaatttgaagattctctttcctgtcggagactacaaaccaaataaatagattgttacttacaggagtccaaaaacgttactttgaaaaattatcaatttactgtgacagatatgctgaacaaattccagtaacctttgtgcttgggttttatgttactctggtagtgaaccgatggtggaaccagtttgtgaatttgccctggccagacaggctaatgttcctcatctctagcagtgttcacggaagcgacgagcacgggcgcctgcttagaaggacgctgatgcgctacgtcaatctcacctccctgctcatctttcgctcggtgagcactgctgtgtacaaaagatttcccacaatggaccacgtggttgaagcagagtctcactatgttgcctatgctggtcttgaactcctggcctcaagcaatcttcccaccatagcctcccaaagggctgggatttctggtgtgagccaccacacctggcctgccctggaatcttaatgtaaagattcttgactgtcttctatgactacagggagcctgatgagactccactggaattttcagtgacacttat

SEQ ID NO: 116906 - DNA, 1115 bp, Homo sapiens
caaaatcagaagatatggataataatatatttttgtcctccaacctctaaaaaggctaaaattcagctaaaagcatcagtgtcaccaacgtgtctgctgtaagaaactgctttataatttcctgttattctacagggttttatgttactctggtagtgaaccgatggtggaaccagtttgtgaatttgccctggccagacaggctaatgttcctcatctctagcagtgttcacggaagcgacgagcacgggcgcctgcttagaaggacgctgatgcgctacgtcaatctcacctccctgctcatctttcgctcggtgagcactgctgtgtacaaaagatttcccacaatggaccacgtggttgaagcaggttttatgacaacagatgaaaggaaattattcaaccacctcaagtctcctcatctgaaatattgggttccattcatctggtttggaaatcttgcaactaaagcccggaatgaaggtagaatcagagacagtgttgatctgcaatcattgatgactgaaatgaatcgataccgctcttggtgcagcctcttattcggttatgactgggttgggattccgctggtttacacccaggtagcagagcagcttatcaacccttttggagaagatgatgatgattttgaaactaactggtgcattgacagaaatttgcaggtctctcttttagctgtggacgaaatgcacatgagcttacccaagatgaagaaggacatttactgggacgattctgctgctcgcccaccatacacattggcagctgctgactactgcataccctcatttctggggtcaacagtccagatggggaaacagatgcctaagaatgagtggaagatggaagatataaaaatcccactccctcagcctcaattccagtgtgctaagagtgatcctggtggttaaaggtacaacactcgaatctttcaaaacaacttggctcctaaacacaagccaacaatctcatctgctgctcaactgaaaaacattctccactttttagcatccaggcatgtggagttcctaagaaatgcactttattaatgcccaacatggtaccttcccaggagattttaatggtaattttca

SEQ ID NO: 116907 - DNA, 259 bp, Homo sapiens
gagacacgttctcactcagttgcccaacctggagtgcagtagcacggtcatagcttacagtaacctcaaacttctgggctcaagccatcctcctgcctcagccttttgagcaactaggactacagatgtgcgccgctgtgcctggccaatttacttatttatttgtttaatccctttttttcctttttttcttttttgatacagagtctcactatgttgcctatgctggtcttgaactcctggcctcaagcaatcttcc

SEQ ID NO: 116908 - DNA, 520 bp, Homo sapiens
caaaatcagaagatatggataataatatatttttgtcctccaacctctaaaaaggctaaaattcagctaaaagcatcagtgtcaccaacgtgtctgctgtaagaaactgctttataatttcctgttattctacagggttttatgttactctggtagtgaaccgatggtggaaccagtttgtgaatttgccctggccagacaggctaatgttcctcatctctagcagtgttcacggaagcgacgagcacgggcgcctgcttagaaggacgctgatgcgctacgtcaatctcacctccctgctcatctttcgctcggtgagcactgctgtgtacaaaagatttcccacaatggaccacgtggttgaagcaggtactatgaatggcttttccttccatgggctcttctcagctgagacaggacctccagaattcctttgaaaattctttatgtttgtttattcactcaagaaacatttattggttgggcgcggtggctcatgcctgtaatcccagcactttgg

SEQ ID NO: 116909 - DNA, 2172 bp, Homo sapiens
caaaatcagaagatatggataataatatatttttgtcctccaacctctaaaaaggctaaaattcagctaaaagcatcagtgtcaccaacgtgtctgctgtaagaaactgctttataatttcctgttattctacagggttttatgttactctggtagtgaaccgatggtggaaccagtttgtgaatttgccctggccagacaggctaatgttcctcatctctagcagtgttcacggaagcgacgagcacgggcgcctgcttagaaggacgctgatgcgctacgtcaatctcacctccctgctcatctttcgctcggtgagcactgctgtgtacaaaagatttcccacaatggaccacgtggttgaagcagaaagaactggcatgaaacccattctgccttcaagttttgagatgcagagcttttagttcctctgctaatagagcctcgtttgaatactctgcttgaaaggcaaaagacatctgcctcaacttcaatcaaggaaaaatagagcaactgtacagcaggcagaatctctatgatgactggaattttgtctatcaatggatgtaattaatcctttggctcaagggcaataaaattttgtcttaaagtagcagatcctgctccatcaaagcacaactcaattgggagtaaatgcaaacatgtatctatattgagagatagattttactctgattagaaagatgaaggagggatttggggataaacaatatgaaaattgctgagcagagctgagccagccagaagaaaaagcgatagcaagagaaactgtaggcagatgcaacggcaggataaaatagctatgccaggggtgtgatggggcctgaggagagcatggcatggagacagacacgtgcagggaaccaagtggtgggaggacaagcccactcagagtgttgccgaactgtagcaaatcagtaactataattagcatagcctcagcaatgacaataatgatcatattctgaaaaaaatattggtctctgcttaaaatggcttgaagtcctgatgagggtgacattccatttcataacaaatacttttggaatggacttgaccaacaacctagagattttctttcagttgaccaactttgatttccaaaggtggagttacttttgtgaacccccaaaatctgagacaggtctcagttaatttagaaagtttattttgccagggttgaggatgtgcacccgtgacacagcctcaggtggtcctgatgacatgtgcccaaagcggtcagaacagtttggttttatgcattgtaggaagacatgagacatcgatcaacatatgtaagataaacattggttcagtctggaaaagccagagatgactcaaagtggggagggggcttccgggtcataggtaggtaagagacaaatggttgcattcttctgggtttctgattagtctctccaaaggaggcaatcagatatgcatttatctcagtgaacggagcaatgactttaatagaatgggaggcatgtatgccgtaagcagttcccaacttgacttttccctttagcttagtgattttggggacccaagatattttcctttcacactttggataagtaagatgtgtgaccctgcaaggaataacaaaaattattctgcttatatattcttagaggatacattaatgtctcagtgattgtcattcatctttcacagcgcccagcaaaatactcaataaatttgtgctaaaaacaaaatcaccagctcttcttgctctacttgtcctctttcaatctcttgctttagtgtttgcaccaaataaaccctcactctgcatatttgctttctgcttagaagctaagaaaggacttgctagcacaatttgatccatgcttctgaataaaaaataaccagagataaagttattctttggtcaagtgacagagattgaagccaatatataaatgagatcattttttaaaattgcactatatgtctcaagaatataactgttagacaattgatatggaatatgtgagaataggctacagcaagtctttaagcataaagccaagacagatcaagtttatctattaacttcatccaataagatttaactggccaggcacagtggcacatagctgtaatcccagcactttgggaggccaaggtgggcagatcacttgagcc

SEQ ID NO: 116910 - DNA, 2178 bp, Homo sapiens
cagagaacagaaagaaaatctgactgtgcacgagcgaagggtgacaccgggcgtgcagcaccgacctgaaggcacctcttcgggggagcccgaaatttgaagattctctttcctgtcggagactacaaaccaaataaatagggttttatgttactctggtagtgaaccgatggtggaaccagtttgtgaatttgccctggccagacaggctaatgttcctcatctctagcagtgttcacggaagcgacgagcacgggcgcctgcttagaaggacgctgatgcgctacgtcaatctcacctccctgctcatctttcgctcggtgagcactgctgtgtacaaaagatttcccacaatggaccacgtggttgaagcagaaagaactggcatgaaacccattctgccttcaagttttgagatgcagagcttttagttcctctgctaatagagcctcgtttgaatactctgcttgaaaggcaaaagacatctgcctcaacttcaatcaaggaaaaatagagcaactgtacagcaggcagaatctctatgatgactggaattttgtctatcaatggatgtaattaatcctttggctcaagggcaataaaattttgtcttaaagtagcagatcctgctccatcaaagcacaactcaattgggagtaaatgcaaacatgtatctatattgagagatagattttactctgattagaaagatgaaggagggatttggggataaacaatatgaaaattgctgagcagagctgagccagccagaagaaaaagcgatagcaagagaaactgtaggcagatgcaacggcaggataaaatagctatgccaggggtgtgatggggcctgaggagagcatggcatggagacagacacgtgcagggaaccaagtggtgggaggacaagcccactcagagtgttgccgaactgtagcaaatcagtaactataattagcatagcctcagcaatgacaataatgatcatattctgaaaaaaatattggtctctgcttaaaatggcttgaagtcctgatgagggtgacattccatttcataacaaatacttttggaatggacttgaccaacaacctagagattttctttcagttgaccaactttgatttccaaaggtggagttacttttgtgaacccccaaaatctgagacaggtctcagttaatttagaaagtttattttgccagggttgaggatgtgcacccgtgacacagcctcaggtggtcctgatgacatgtgcccaaagcggtcagaacagtttggttttatgcattgtaggaagacatgagacatcgatcaacatatgtaagataaacattggttcagtctggaaaagccagagatgactcaaagtggggagggggcttccgggtcataggtaggtaagagacaaatggttgcattcttctgggtttctgattagtctctccaaaggaggcaatcagatatgcatttatctcagtgaacggagcaatgactttaatagaatgggaggcatgtatgccgtaagcagttcccaacttgacttttccctttagcttagtgattttggggacccaagatattttcctttcacactttggataagtaagatgtgtgaccctgcaaggaataacaaaaattattctgcttatatattcttagaggatacattaatgtctcagtgattgtcattcatctttcacagcgcccagcaaaatactcaataaatttgtgctaaaaacaaaatcaccagctcttcttgctctacttgtcctctttcaatctcttgctttagtgtttgcaccaaataaaccctcactctgcatatttgctttctgcttagaagctaagaaaggacttgctagcacaatttgatccatgcttctgaataaaaaataaccagagataaagttattctttggtcaagtgacagagattgaagccaatatataaatgagatcattttttaaaattgcactatatgtctcaagaatataactgttagacaattgatatggaatatgtgagaataggctacagcaagtctttaagcataaagccaagacagatcaagtttatctattaacttcatccaataagatttaactggccaggcacagtggcacatagctgtaatcccagcactttgggaggccaaggtgggcagatcacttgagcc

SEQ ID NO: 116911 - DNA, 661 bp, Homo sapiens
agcggaaggtgcgggctggtatcatggcaggagcgcggcgccgcaggaggcgcctggcggagctgacggtggacgagttcctagcttcgggctttgactctaagtccgaatactctccagaagcggagacgcgggaggcacgcgaggctgcccggagtccggatgagccgggcgggagcccctcggccagccggcgtaaaggctgtgcctctgagcacaaagatcagctctctcggctgaaggacagagaccccgagttctacaagttcctgcaggagaatgaccagagccagctaaacttcagtgactcagacagctctgaggaggaagaggagccgttcaactccctgccagatgtgctggaggaagccagtgaggatgaggatggagcggaggagggggaagatggggacagggtccccagagggctgaaggggaagaattgtgttcctgtgaccctcgccatggttgagagatggaagcaggcagcaaagcaacacctcactccaaagctgttccatgaagtggtacaggcgttcggagcagctgtggccaccacccaaggggaccaggaaattgctgaggccaacaaattccaggtcagggacagtgctgtgttcaatgctctggtcaccttctgcatcagagaccttattggctg

SEQ ID NO: 116912 - DNA, 656 bp, Homo sapiens
tgctccagattttagggtctgtaaaaaaaaaaaagtactcaggtaaatgatcacttagagtaatttcattgatgtttcacagagtctgaaggggcgggttagaggagagtgagtttacaatcatttcctactgcagaaaagctcatatttcaaatgtaattcatcgctcttcgagagaaaaccatctaacactaaaaatgcagctgtaagccaggcatgatggtgcacacttgtaatcccagctactcaggaggctgaggtgggaggatcgcccaggagttcatgcctgtgaaaggccactgcactccagcctgagtaacacagcaagaccccatcactaaaagaaaggaatttaagaacaaaaaagcagccatactggaagtataggaaaggggctttgtaggaagaggcaggaaagaagttaactcagtgtccaaagttttgtcctaaagagaacaggaaattccctgggtggttttgcaaccactcggccccaaatgtggtttttgtgatcctgaattaattacctagttaggaaactgtgtagcccacacctgatggaaagctgccaacctaacactttttgttctaagacctagctggtgagaagtgagggacttggtaaaataaatgtggtgataaccacagaaaaataa

SEQ ID NO: 116913 - DNA, 586 bp, Homo sapiens
tataggcgtgagccaccacgcccagccccttttatcttctcttcctctttctcctttttttttcctcctcctcctccttctttctcttgtatttgtccattctcctttttccttaacttagtctattctgtgtattttctaagtaccaggattcttatttgtttgttaatgctaagtgtggtggtggtaaaccctgcatgctgtagtatgacagttactagactttgactgagtggtggctgtcctttgtaggccagggttcacagtagggaatgctaccagagaactgagctccctgatgttaatggtgatagtaggacttcagagtaacagtggccaggtggcaacattttaccatcatagtttgtggtgttttctgtctcctaattatgctgtaagcatggattgtgtgtgtgtgtgtgtgtgtgtgtgtgttgtttgtttgttttgagacagtgtcttggtctgttgcccaggctggagtgcagtgatgcaatcttggctcactgcggcctcaacttcccaggctcaagtgatcctcctgcctcagtccccctgagcagctgggactacaggcatgcgcccc

SEQ ID NO: 116914 - DNA, 391 bp, Homo sapiens
tgaaatggagtcttgctctgtcacccaggctggagtacaggggtgccatctcagctcactgcagcctccacctcccaggttcaagtgattctcctgcctcagcctcttcagtagctggaactacagtcgcctgccaccaagcctggtgaatttttgtatttttagtaaagatggggagaggaggcttcacgtcgagtgctgtgggcttgcactggaagagaagaagggacagccaagggaggcacctttcctgtggcagggcccttgaggactgacaagagctgggtccctggacggcaattagccactgaatgggacaggggaggaccatgttggagagaggccctgttttggttttgctggggtctggccatatttcttttttttttga

SEQ ID NO: 116915 - DNA, 406 bp, Homo sapiens
aggctcagagtgggcaccactgtgtcctaggctgtcaaggaaagggtggggtaagggccgtctctaggagagctctaatgacacatcctgccaggaaattctgtatgctgttgtggcctcaaacccctctgctgctgtctgtccctgttcgcctcctgtcctcaaggtggccagggaccgctgggaagccaagccccgccagggcctgggcagctttctcctggtggctagaattcccccacagcaagactatctggggaattctcttgaaatgtttgtgcaaagcaaatgttgttgcagttgctggctagtgtattttttaaagcgtgttatggttttgagttatttccctgatgcccaggctggaagtgtgtgctaggcctagagagaggaagagccccaggac

SEQ ID NO: 116916 - DNA, 410 bp, Homo sapiens
atgattataatataaaccaaaatctccagaaatgcacctcttgttttaatcgagggatgactggatgttgttttgtttggaactttgctgagagctgctcaccgttgggggaaatcatctgtctctgacagcaactccactcgaactcaagacccaagtcaagacccttgcaccagctgcattagcaaatcatcacgttcacagtgacttgtatttgcacaaacatactcatttgtcaactatttcgatgtgtcagatatcaagtggcaacataattctgttaaatgatcttacttctcatcatgccacttactcattctaagcaggcgccgactgtcgcattctgtcttctggcatagccacacccaggcatttgtgtattgccataatattattttattggaagtcac

SEQ ID NO: 116917 - DNA, 265 bp, Homo sapiens
ttggtttaccatgaagactgaggcccagtaataaacaggaatttccaatcagagttgatggaacagctaggacttgacccagcttggattcttaacagaactgcagcatacagtggtttgtaagaacactgggccaacagcacagggaaggtggggaaattcaatccacattctcctcacccagccctgcactctggagtgatgctggtgctgcacctaaccagaggaaggagccctttctgtggtttgtttgaaaacaccatat

SEQ ID NO: 116918 - DNA, 321 bp, Homo sapiens
tctcccaagtagctgggactacaggcacacaccaccatgcctggtaatttttgcttgtttgaagagcgatgcccaagctagtcttgaactcctggtctcaagtgatcctctggcctcaccgtcccaaagtagtgggattacaggtgtgagccactgcgcctggcgccaactccactttgaataaatagaacccaatgcagagttcacaaataccaattatatgggtatatcacaaatatactcatataatttattatctgagcagctgctgatatcccatgacttgcctgagcagaggcaggtacttcactgccatatccc

SEQ ID NO: 116919 - DNA, 310 bp, Homo sapiens
ggttttttaacaaagtgttgaaaaaaagaaaaaaaaattgaaaacctctgatactggagaaaaatgctaaactagagtatccaaaagcctgggttggggcacagatcacataagttcttaatgcatcatttgttaaatctgtgaaatggagcagacactgtctggcttccaggggccacactgactgtggattaaatgagagaacacacaatgtgcctggcccaggggtcttaggcgaagttggtctttgcgggggccccaaggggatgcatgtgactgtgcaggaaaagggtgctcagtccacccatgc

SEQ ID NO: 116920 - DNA, 475 bp, Homo sapiens
ctaaatgttaaagtctttttgaagagctgtgctcctttcaaaaggtaggatccttctgcaagaccactagcctggactctgaagaaatgtcaatgacatgaaagttagaacaaagcagtaggattattctagattaaaggagaccaaagagacaagacaactaacccttgattggtttctggataaaaagacaagtaggccaggcacagtggctcacgcctgtaatcctagcactttgggaggctgtggctggtggatcatgaggtcaggagatcaagaccgttctggccaacgtggtgaaaccccgtctctactaaaaatacaaaaattagctggatgtggtggcacatgcctgtagtcccagctacttgggaggctgaggcaggagaatagcttgaacccgggacgcagaggctgcagtgagctgagatagcaccattgcactccagcctgacgacacagtgagatttcattc

SEQ ID NO: 116921 - DNA, 236 bp, Homo sapiens
ctcatatgcttttttttttgctttgctcaaaactcaggaacctgtttataaacctcccaaacttgccattaattcccaggcttttacttctccaactctccatttgccaaccctgcacctaaaaggaaagatcaagctaccataaaatctggagaggcgtgagtttttttacaggaaaaaatttctaagttgcttttatcttttttgacttttttggggaaaaggaagagtaggat

SEQ ID NO: 116922 - DNA, 639 bp, Homo sapiens
tccggggcagggctggggcggccgcggacctgcctggccatcaggccgagcgtggaccctcggacctgagatttgctgtttttgttttctggggtcttcccccttccccccgccaagagaaggaggaaaaaggatgaccgttgttgttctttttaagaaggagaaagaagctcacgccgtgtccaagcccaaggcggaattgttgacatccaacatctctagctagctgatttgggttggaaaggtgttttagactagatcatatagcagtcagataagcatcctttaaaaaaaagaaaaaagaaaagaaagaaaagaaatccatctagtttctgacgaattaacaggtgtacaccacactctagggtttgtattttgtcagggaggggaaagtggaatacagtcttgtctgtgttcagttacttgttaagagtctttatcttcctgatttgacttttttttttaaaaaaatgataactcaagagccatcgtgaaaatatatctcaaaatgcattgtcatctttaattaggggcaggtgacttttttcattgtaatgtcacaagtcctcatattgagtttagacccgctctgtttaaatgtcgtcttttaatcaagttgaggtcaaagccaaaccccaa

SEQ ID NO: 116923 - DNA, 403 bp, Homo sapiens
tctaatcctgactccagacggcctgagttctaatcctggctccagatggcctgaattctaatcccgactccagacggcctgagttctaatcctggctccagatggcctgcgttctaatcccgatttctacttgccatgtaaccttgagaaagtttcttaactatctgagcttctataccctcatctataaaatggggctgatgttaatactcacatcaaagggctgctgtattaaactaataaatatatgtgaagtgtctagaaagagcccaggcacactgaacactaacttttgttgtaatttaaaccggtgtccatggagccacttcgtcctccttcttgccatcttcctgcctcaggaacatctcagaactcaccccccaatacctgcctctctcccaat

SEQ ID NO: 116924 - DNA, 259 bp, Homo sapiens
aaatattcatttgaggcagcagttgtataggctgagaccagatcatgcagtgccttataggccattgtaagatttttcgtatgctaagaacactgggaagccattcaagagtttttaatttgtgggtggaaatggaatggttggcctatgaaaattatgagattttcattttgaaaagttaattttagctcctatatataaaacagattagagggtgatcagggaattagaatagtttagataagagatgatcatagcc

SEQ ID NO: 116925 - DNA, 606 bp, Homo sapiens
atttaaatgaatcagcctaaataattgcctagtgttttctttatgtcaaatgttgtcatttggagatatctctgccagcagaaagaataatgtatgtcctccctcagtaaacattccaacactggtcctaaaatctgaaggtggctgatgagggactttctctggccttttcttccatgactgtttgctcccctgtctctgctgtacctggtctccttgctgttccttagtcataccagtcctagcttgccccggatgtgtttggtttatccgcttacttagaaagctgcttacaaatgccaattgccatctcctttgagctattagaccctcgatttcagagcctgtgttttcttctgatgcctggagatgtggagcacagaaagtggttccacaactgtccttagaaggggccacagctgctccttgtcctgccttgagaaggtgcagaaacaagagaatcactatggccactggccattgatcgagttgcggatttagcaggctgggtttctatcccagccagagggctaacagggtttggttaagttaaggttagagcacttcattcaccacgcttttttttttttttttttttttgagaca

SEQ ID NO: 116926 - DNA, 711 bp, Homo sapiens
tgatgtctacagtatcacctttcttgtagattggcacttatgcggccaaaggaacaacaccatgttttctaaaaggctggagaaaataccacaggtgcctctcctctttcccttcatcttcatcattttgacaaattactcaaagatggagggtgcagttgaaagccagccatcattttttaaaacttctcaggacattgtaacatgcacttgggttgagaactgctactcgagcttctccaggaggcccttggagcaaatgttttgtaaacaccaatctaagaacattatctcttggacgggcatggtggctcacacctgtaatcccagcactttgggaggccaaggtttgtgtgattttgctaaaatgcatcaccaacagcgaatggctgccttagggacggacaaagagctgagtgatttactggatttcagtgcgatgttttcacctcctgtgagcagtgggaaacaatggaccaacttctttggcaagtggacattttactggctcaaatgtagaagacagaagtagctcagggtcctgggggaatggaggacatccaagcccgtccaggaactatggagatgggactccctatgaccacatgaccagcagggaccttgggtcacatgacgatctctctccacctttgtcaattccagaatacaaagtaaaaccagaaaggggtcatactcatcttatgggagaga

SEQ ID NO: 116927 - DNA, 641 bp, Homo sapiens
accatgtgttgtggagaaataagaggtaagcatgcactgtaagttagatataggatttgaaatgaaggagaaatatttatgtggaaaagacatttccacataaaaatatttatgtagaaaagaaaatattcttgagttctagtctcttctttatttgaaatgatggtgtagattcagtccacatattttatagataaagatggtaaggtaggataagtctggaaagagtaatcaatatattgtatttcagcacgaattcatttatttttaggattcaaacagaaagaaatgactatggcagtgaaacagacttatatggacttgtgtctaacattttggaagaacaagataagtcacagccatattttgctgaagggacctgctcctccaatttaaagtcagtttggccaatgaacacaagcagatttgcagatcaccatgacctcttaacagaaaccaaaaggccaatagatacagtcatctctcagcaagctttttatagtgatgaatctgtgtcagcaatggaaaagcaatacctgcgtaacagtaatctcacaccacaacaaaaaatagatgaacttcatcatggatttactggtttagatcttgaagaacaatggatgtacccctcacgaagtgat

SEQ ID NO: 116928 - DNA, 244 bp, Homo sapiens
ccctagagaggacaggtggggagcagttgggaggaagagggggtacccccagagcgcctgtcttcgagcccagcagtggctctggaagccacgtccgccaggatacagatgaggtggtgcttgctgcagggcttggtggagagcctaggaaggcaggcagcacaatcccctcaaggaagaccccaaacctgccctatgtcctgctggagggctggcaggggctgggagacaatggcaggctcag

SEQ ID NO: 116929 - DNA, 268 bp, Homo sapiens
cccactttgccacttcagtttaggcctcaagctaaacctctccgtttcctgattacatccagagggatgcctcagctttcacgaacaaggctggaacaatattattgtcattagggtcagccttggcctgataagagtcctgccatcaacacccaacatcagctcacaagaaattcgtatgaagattaagaacagagaagagtggctgggcacagtgactcacgcctgcagtcccagcactctgggaggccaaggcgggtggatcacc

SEQ ID NO: 116930 - DNA, 166 bp, Homo sapiens
ggctgatagggctccctcctggttttcccaaaggtcagataacaacttagcttcgtcattgtgacttagaatctgagtgtgactagctgcattttgtttattcctgtgtcttggtgcctagcacaagagtttagtctaaaacaaccgcctcctataattttgtcgc

SEQ ID NO: 116931 - DNA, 400 bp, Homo sapiens
cctcagtgcctcatgctaaggcatgagagagggatgaggcagggaattcacttactcacgcaggaggatcttatggagcacccactgctacgtggtgataagatggtacgcaacagaaacatattccttttcctcagagagcttagaatttagtgcaaaagacaggtgtgaaacaaataagcacaccaataaccatgctattcaactcataaaagtgctgtaaaggtgtatgtagagaatgctatgaatgcttacaagaggaggacccaacttaggggtccagaagatcttgcacaagtgatgtttaagctgaaacccaaaggagtgggagttagccaggcaatgagttgccaaggcaactattcaaggtccctggtggtccccaagagcgagtgccagg

SEQ ID NO: 116932 - DNA, 380 bp, Homo sapiens
attaaaatagccctgaaatgactgactgctcagactagccttaattgccataaaatatggcatacttcatatatgtgaaatatcaaattatttggcagtgtgagaaagtagcaaaacatgaattactctcctaatgaaatatcccagaagctaaatatgagactaaaaaattatctcccactaagctgtcatttagtactttttatatataaattcatgaaagtctagctttttttgtgaaataatttttaatttattaatggtaactggtataacttgctatatgaagaaattttaaaatagagcttgaaacagagagtagatgatagaggattttgttactggttcttctgagatgtgaagcttaactatgtacaaat

SEQ ID NO: 116933 - DNA, 382 bp, Homo sapiens
gcggagcacggagaccgccctgtactggaaaatgctgggcgaccccagctggctgcccgccaagtgccccggcaagggtgcctggtccagcccatggaagtggctgtttggggcgactgctgttgccttggggggtgtggcgctctctgtggtcactcctgacaggaactgaccacccaggtggccgccaccccctctgtacaccatggaccctgccctgtgctccataactcccccaggctccctgtccactgcccttcctggtccggccccctcctccaagttggaggcagcaaggactgggggttgtgcagcccagccagcaggagggactgaggccctctaggaggaatgcgcagagtgagggggacctcattccttc

SEQ ID NO: 116934 - DNA, 642 bp, Homo sapiens
gagcggcgagtgcgggagaccgtgcgcagggataaaacgctcctgaaggagaagaggaagcgacgcaaggaaagctcgcctgcttgtttccagcctcatgttcctccctagggcctccatgaacccttggcatgtattagcccctgacatccttgggacagagcccagctcctcaccctggatcagaccttccaccacccactgtcccttcctccctctgctcggtcagaaggactcacttgtggtccccagatgcaccaggtgttttcatgcccctgggcctttgcacatgccattctttcagtctggcatgtcccccttttctccttccttcaaacttctatctatcctgtgggcagcctgggcagatgcaggaggttagggatgcggatgatgacagctacatccccagcacctagcacagtgcctggcacatggtaggtgctaggttaatgtttgtggaatgatgaatgaatgagtgaatgagctttaacctcagatgggcctgggtgcacattcactcagcacttactctgtgatcttggatcagtgattttttttcctccaggcctcaaattactcatcagtagaacatggatgggtgcagggcctccctctcaggtggttgcctggtgctaatcc

SEQ ID NO: 116935 - DNA, 692 bp, Homo sapiens
ggcacttattgtgtggctcccaaagccacacaatagaatgaagtatataagaatataagtgaagaaaaagcttcactttcttcatttataaaacctacctcgtagagtgctgtgagaattaaaaataataaatataagatgtaactatatagtaagtatttgataaatggtagatattattttcctttagcacacttgatatttttcgtctcgaaaatactgctatagaagatgaatcattttttatgacatcagaactaaacagaattactcatcaaactatacattttctagatagatctattgaaagcatgacacttaaaaaaataagctaattatgatgagctctgaattaaagacactgaatctgctgtctcaaggctgttattataatcataaaaggataagagttattgacagtcatccttctagccatactattcatatatattacccatactattctagagacctgtgaaaatctttggattctatatcctggtaaagatataaatctactatcccaagaccagacatgtaaaaattccatatctcataaatatttgaggatattatataatcctatcaaatgaaaatataaatgaaagaagaacagatgtagaatgttataggtattatatttaagaaataaggtaggatcttaaattctcagaagttctaccctctccttg

SEQ ID NO: 116936 - DNA, 474 bp, Homo sapiens
acaacagcatcaaaaagataacataagtatttaataatttaacaaaagaagtgcaagacttttatactgaaaaatcaaacatcattgaaggaaatttaataagacatggatgttcaaagacttaatactgttaacacggcaatactccccaggttgatccacagatagaatgcaatccctgatgggaatgtgaactagtacaaccactatggaaaacagtgtggagattccttgaagaactaaaggtagatctaccatttgatccagcgatcccattaggaaagtaagtcattatatgaaaaagatacttgcacatgcatgtttatagcagcacaatttgcaactgcaaaaatatggaaccagcccaaatgcccatcaatcaatgagtaaagaaaatgtggtatatatatatataccatggagtactactcagccataaaaagaaacaaaataatggcattcacagcacctgcg

SEQ ID NO: 116937 - DNA, 798 bp, Homo sapiens
tcctgcccctgttctttctggtgtctaaaaattctcaccattgtagtagaaccttgcatttgtggtaagaagttgcctgtgtcgggagaagacactgaagatattgctgggctctttagtgaaaatgaagagttgggaaagatgaggtcaagtctcatcgagaatacagaaacctacatgagtatgaggaggccctttgctgaatatccagtatgagtgtggtttaattagcagacagtcggtcacattatggcttactgagatctaatcccaagattctcaaatgctaatgtcctcacaaatatctgatgatcttattaaaatacaggttttgatttggtaggtttgagatgggacccaacactccatatttctaacaagtactaggtggatattacactgcaaacactggtctaaaacagaacaccaggaagtgtggaataagaggaccagaagttaagaaatggatcacccccacagggttctgaaggaatgagacacaagggcggtaatttgggggattgtcaggtacagaaaattttatgtcttcttatgtaaaggatgcctctgaatgtcattcatctgtatgccaaagagaaactggttcctttgaccaaagctttatttctgtgaacattgccaacaaggtatgtaaagcatacttgccatgcattctcagaaaccttctcttttctgagagtagaggtttaaaggcatagataacttgctatgtttgtaagcaaaaatgccctcccgatgactttaaaaaggtctgtagccagatccacaaagccacaa

SEQ ID NO: 116938 - DNA, 212 bp, Homo sapiens
attaagctggatagtgaaaaggaaatgagaaatacagacagtgagcttatatttcttcctcccttccttccttccttcctttcttccgtctttccttccttccttcctttccttccttccttcctttacttccttccttctctctcttttcttttcttttccttccttctttccctccctccctccttccttcctttctttcttctttcttt

SEQ ID NO: 116939 - DNA, 152 bp, Homo sapiens
atcatgctcaccaagtgttacaggaacacagccatgccatgccatttgcatattgcctgtggctgctttcatatcacaatggcaggctgcagagggacaacagaaaccttagggcccaaagccaaacagatggattatctgacccttaacag

SEQ ID NO: 116940 - DNA, 472 bp, Homo sapiens
atgtatttgacttttttagattccacatgtaagatcatgtagtattttcctttctatgtctgccttgctgtgattaatgatgactttcaacaagttgcttactttctctgggcctaaatttctttggtctgtaaaggtaagatattggacctaacctgtctggggcaattgagccattaaagaatctgatgagggctgggcactgtggcttacgcctgtaatcccagcactttgggagttggaggtgggtggattgcttgagctcaggagttgaagagcagcctggacaacatggcgaaccccatctctactaaaaatacaaaaattagctgggcatggtggcatgcctgtagtcccagctactcagtggggaggcaggaggatcgcttgagcccaggaggcaaaggttgcagtgagccaagattgagccactgcactctagcctgggtgacagagtgagaccctgtctcaa

SEQ ID NO: 116941 - DNA, 426 bp, Homo sapiens
ctcctttccagggctagggattgtagtcctgcttcccctcttagtctctatctacctcatggatatttctcccttcaggtacttgtgatgctttctgtgggttaaggaagggacaaatctcctcctagggaacccaagatagtgggcaatctggttccactttggtcttacttttccagtgtagaaacagtgagttggagggaaattttccttgcagttggtgctcggcaaaatggggggaggggcatagtagatgtggaagtctgattctctgtctgctgggagccaagaggaagtctctcaaaactagaagggaaaggtgtttcctccacatcaatccagctttggagacattctattagtgacatatgccccttcacccaaaaacaacaatgaagtgttctgtgtgctaacaacatagcttta

SEQ ID NO: 116942 - DNA, 393 bp, Homo sapiens
atccatccctctctcacggcagtctaccatttgtagtccaatccatgccttctggctccatttcctgacatcaggaggttaaagactaacttgttttctcctagtcacagctccacacctaggaacagctttttcacttttaaacagtttatctctgttccccctaccccctttaaaaagaaagaaaaacactaggaatgagtaatactgatttctcagtatttgtttgattctgtggcatactgtacacttcagcagcaaaagtagatggttgagttatattgctagttcttactcagtctataaacctaattcgttttatttatgatgagagagggaaggatcgtgagagaggcaagatcgtagagagggaaggatgggtgccgagctcga

SEQ ID NO: 116943 - DNA, 411 bp, Homo sapiens
accatttgtagtccaatccatgccttctggctccatttcctgacatcaggaggttaaagactaacttgttttctcctagtcacagctccacacctaggaacagctttttcacttttaaacagtttatctctgttccccctaccccctttaaaaagaaagaaaaacactaggaatgagtaatactgatttctcagtatttgtttgattctgtggcatactgtacacttcagcagcaaaagtagatggttgagttatattgctagttcttactcagtctataaacctaattcgttttatttatgatgagagagggagaatttatgaattcattttgttaagcaattcttgagcctttgtagtgtgctattatgatggatacactcctggtttgaagaaatacagagtccctga

SEQ ID NO: 116944 - DNA, 1540 bp, Homo sapiens
acggtgtctgaccttggctaagagggaaggagatcctatcagtggggagagtgtgaggggagagggagagcctgcagggcaggcgctgaggatcacgcatcctgtgactctcccctgtcccccgccaccctctgaaccactggccaccatggctacttcaaagttgcccgtggtgcctggggaggaggaaaacaccatccttatggccaaggaaaggctggaggccctgcgcacagcctttgagtcgggtgacctcccccaggccgcctctcacctccaggagctgctggcctccacggaaagcatccgcctggaggtgggcgtcacgggcgagtcgggcgcgggcaagtcctccctcatcaatgccctgcgtggcctggaggccgaggaccctggcgcggctctcacgggcgtcatggagaccacgatgcaaccgtcgccctatccacacccacagttccctgacgtgaccctctgggacctgccaggagccggctctccaggctgcccggctgacaagtacctaaagcaggtagacttcagccgctatgacttcttcctgctggtctccccccgccgctgcggggccgtcgagacccgcctggccgctgagatcctgtgccagggcaagaagttctactttgtgcgcaccaaggtggacgaggacctggcggccacgcgcacccagcggccgtcgggcttcagagaggccgctgtcctgcaggagatccgagaccactgtgccgagcggctgcgggaggccggcgtggctgaccctcgcatcttcctggtgtccaacctctcgccggcccgctacgactttcccacgctggtgtccacctgggagcacgacctgccctcccaccggcgccacgctggcctgctgtcgctccccgacatctcgctggaggccttgcagaagaagaaggccatgcttcaagagcaagtcctcaagaccgccctggtgttgggcgtcatccaggccctgccggtcccagggctggcggccgcctacgatgatgcgttgctcatccactcactgcgtggctaccaccgcagctttggtctggacgacgactcgctggccaagctggccgagcaggtgggcaaacaggcaggtgacctgcgctcggtcatccgctccccactggccaacgaggtctcgcctgagactgtcctgcggctctattcccagtcgtccgacggcgccatgcgggtggcccgcgcctttgagaggggcatccctgtgtttgggacgctggtggctggcggcatcagctttggcgctgtctacaccatgctccagggctgcctcaacgagatggctgaggacgcccagcgtgtccgcatcaaggccctggaggatgacgagccgcagccggaggtcagcttggaagtggccagtgacaatggcgtggaaaaggggggctccggggagggaggtggggaggaagccccactctcaacctgcaggaagctcggcctccttcttaagtacattctggacagctggaagaaacacgactcagaagagaaataa

SEQ ID NO: 116945 - DNA, 488 bp, Homo sapiens
acggtgtctgaccttggctaagagggaaggagatcctatcagtggggagagtgtgaggggagagggagagcctgcagggcaggcgctgaggatcacgcatcctgtgactctcccctgtcccccgccaccctctgaaccactggccaccatggctacttcaaagttgcccgtggtgcctggggaggaggaaaacaccatccttatggccaaggaaaggctggaggccctgcgcacagcctttgagtcgggtgacctcccccaggccgcctctcacctccaggagctgctggcctccacggaaagcatccgcctggaggtgggcgtcacgggcgagtcgggcgcgggcaagtcctccctcatcaatgccctgcgtggcctggaggccgaggaccctggcgcggctctcacgggcgtcatggagaccacgatgcaaccgcccccctgcctcacccacaaactaagtcttaacaaaatccaaattaccaaca

SEQ ID NO: 116946 - DNA, 1653 bp, Homo sapiens
acggtgtctgaccttggctaagagggaaggagatcctatcagtggggagagtgtgaggggagagggagagcctgcagggcaggaaaaagagagctgtgggcttccagggcgactcccttcacatccgtggtatctgtctctccctgccccatgccaaggcccaggaggtgtgaatggctcccttctcctctgcaggcgctgaggatcacgcatcctgtgactctcccctgtcccccgccaccctctgaaccactggccaccatggctacttcaaagttgcccgtggtgcctggggaggaggaaaacaccatccttatggccaaggaaaggctggaggccctgcgcacagcctttgagtcgggtgacctcccccaggccgcctctcacctccaggagctgctggcctccacggaaagcatccgcctggaggtgggcgtcacgggcgagtcgggcgcgggcaagtcctccctcatcaatgccctgcgtggcctggaggccgaggaccctggcgcggctctcacgggcgtcatggagaccacgatgcaaccgtcgccctatccacacccacagttccctgacgtgaccctctgggacctgccaggagccggctctccaggctgcccggctgacaagtacctaaagcaggtagacttcagccgctatgacttcttcctgctggtctccccccgccgctgcggggccgtcgagacccgcctggccgctgagatcctgtgccagggcaagaagttctactttgtgcgcaccaaggtggacgaggacctggcggccacgcgcacccagcggccgtcgggcttcagagaggccgctgtcctgcaggagatccgagaccactgtgccgagcggctgcgggaggccggcgtggctgaccctcgcatcttcctggtgtccaacctctcgccggcccgctacgactttcccacgctggtgtccacctgggagcacgacctgccctcccaccggcgccacgctggcctgctgtcgctccccgacatctcgctggaggccttgcagaagaagaaggccatgcttcaagagcaagtcctcaagaccgccctggtgttgggcgtcatccaggccctgccggtcccagggctggcggccgcctacgatgatgcgttgctcatccactcactgcgtggctaccaccgcagctttggtctggacgacgactcgctggccaagctggccgagcaggtgggcaaacaggcaggtgacctgcgctcggtcatccgctccccactggccaacgaggtctcgcctgagactgtcctgcggctctattcccagtcgtccgacggcgccatgcgggtggcccgcgcctttgagaggggcatccctgtgtttgggacgctggtggctggcggcatcagctttggcgctgtctacaccatgctccagggctgcctcaacgagatggctgaggacgcccagcgtgtccgcatcaaggccctggaggatgacgagccgcagccggaggtcagcttggaagtggccagtgacaatggcgtggaaaaggggggctccggggagggaggtggggaggaagccccactctcaacctgcaggaagctcggcctccttcttaagtacattctggacagctggaagaaacacgactcagaagagaaataa

SEQ ID NO: 116947 - DNA, 327 bp, Homo sapiens
ccaccgcacctgccctcatcttgaatatctttactgcttttaagtttttattcagtaggtcttatcagaaattgttcaagatattcctttaataacaattatctagaagtccagatgtttatagataccatgttgccagttaggttgaacaaaattttccacacatgtagtacaggggatgaacaataggtaaagataaagttggagttgtaactgtcctaatatgaaatgggaagtatatggcaagataattttcaatgatgaagataattaatggtttgtgtgtatgtgggggcttttatttctggtagatatccatttaatcta

SEQ ID NO: 116948 - DNA, 442 bp, Homo sapiens
tactttccttaacctcccagttcccccaaaatatgactgtccctgcttccatgcatccttatatacttttagcatatcactttattgtaactacttcttgatccacttgttttcctttagactttgaactggctcagggcatcactgtatctctagcacctaaacacagcgcaatttcaaacagcgacccaaaactgaatttcataacgcagtgtagcacaaatcttttgcccaacgtcacacagatgtagcggtaatgcaagtttttaacaaccagtcctttagactcccagtccagtgctctttctcctgtaccacagtgcctccctgaggcaatcggtcacttaactactcagtctctgcctggacagcccaagagtgcccaagatgttgtccacttggttgtcgtgggaccatgagcaaccagagtcctcaatctcac

SEQ ID NO: 116949 - DNA, 247 bp, Homo sapiens
ccttcctgtgtccaagtgttgagcaggctctctttttctagtgctctgcctgctcctgcgctagcccatggtctcttttctaatgtcctgttctctcttcgaagtctgtacctggcacccctactaaatggcacacacagacacctcatatttctggggttctagtcacacctgagtcttagctggtggaaggaactatttattttcccctttaggaaaccaatcatttgaagcctcaagtatcagc

SEQ ID NO: 116950 - DNA, 290 bp, Homo sapiens
cctcctgggttcaagcaattctcctgcctcagccccccgagtagctgggattacaggcgcctgccaccacaccctgctaatttttgtatttttagtagagacaaagtttacgtagagacagggtttcaccatgttggccaggctggtctcaaactcatgacctcaggtgatccacccaccttgccctcccaaagtgctgggattacaggcgtgagtgactgtgcccggccagcagtgtctaggatttaccatacacatcttcaacttcacgccgcatacctttaatcact

SEQ ID NO: 116951 - DNA, 346 bp, Homo sapiens
aatcatggctcactgcagcttccaactcctaggcacaagtgatcctcccacctctgcctcccgagtagctgggtctataggtatgtgccaccatgctcagctaatttttaacttttaaattttctgtggaaatggaatcttgctttgttgcacaggctgatgttgaattcctgacctcaagcaaccctcctgcctctgcctcccaaagtgctgggattacagttgtgagccactgtgcacagcctttcaccaattgtcaaaaacttattcatgtatgtgattgtagattctttgaccaacatctctccatccttctacccctctaattacccaagcctctgataaa

SEQ ID NO: 116952 - DNA, 153 bp, Homo sapiens
aatgtgtgtttgttgtatgcagttgttacctaatgtgtgtgtgttgtatgcagttgttacctaatgtgtgtgtgttgtatccagttgttacctaatgtgtgtttggaatttggcttgtgtctgtattcagcaagcagatacttattagcaatg

SEQ ID NO: 116953 - DNA, 667 bp, Homo sapiens
gttccctttaattgctttgtatggtgtgtagtagtgtttgaatgttagggtgaaatgcactcttcgtccttttagataacctgcctgttttagctccaacatgttggttgttgctctatggagtaaattaagaaaattcctctgtttatccagtgacaaatattcactcacatatattaagtttatgtcttacagctcttattgccaggctctactgtgcagttatagctgttattttcaatccttcatcataatacagtatttctgaagtcattttaaatagcaattaagaattgcatttgggtgcaagctgtagaaaactggatgaagagtggcgtaacttattaagggtttatttgtctaatacagaaaggtgtagaataggttgtgcatgaagagactggggtggcagctacaaaatgtcattaaggacccaggctactgtctttctgcttgagcatatattattttcacatatttatggtgtttgttttcacatttgtgaaatggtttctgcacctccaggcaccatatctgcgtttctgcaagtaagcagactagagaagggcaaaagcctgctttgtgttttcattcatttaagtgaagccttcccaaggactgtctgcctcacatctcattggtcagaactgtgtcatgtgattaacaa

SEQ ID NO: 116954 - DNA, 351 bp, Homo sapiens
aacgatgcgctgcgaagacggactcctgtacaagacttcgatgactgacataggcacaattgtggcttctagtttttattttaactttttatttaaagtaacttatcgatggaagcgaaactctgcaaaggaacgtcagaccgctaccagaaagggggtgaagtcaggacttactggtgattattgtccaaggacacatttaagcagatagttttgaaattaattttggcataaccctgagacaatgagaagaaacaatgcatttataaaaagttattaaaccatttttttttgtcacagtcaaaacattcattagcttgtttctattattaggtgcccaataggtttgtt

SEQ ID NO: 116955 - DNA, 309 bp, Homo sapiens
ggcctcctaaagtactgggattacaggcatgagccaccgtgcctggcccacatatgttttttcataatgtgttacaaatgtcttccttcttatgaatgctgcacaacattctttttgctgcttgatgcccactgcagggatgcgtgaaatccactagctccagtggccagacacatcccggttgcctccaggttgtaagcaatcctgaaatagcctcgtatgttcctaggacagagttctagaagtgagattgccgaactggaagaatgcaagttacattcaacccacgtcctgcgaatgccgatctct

SEQ ID NO: 116956 - DNA, 552 bp, Homo sapiens
gtaactgggtatgtgaagttctgttcagttctggggggaaatttattctgagttgtgctgatgacaagaccctacacgtatgggattacaagaacaggcaatgcatgaagaccctcaatgcgtatgaacactttgttacctcattggatttccacaagacagcaccctatgtggtcactggcagcgtggctcaaacagtaaaagtgtgggagtgccgttgattgtgtcttcttcggcccttcctccctcttttcctctggatgcactctgatgataccatggctaccccactgagctctgtttaaataaatattgtcctttcatgtaaattattctggatgtagattgagcttattaaatgttacaaagaaaaaaaaaagaacagcatcaaaaactaagacgtaaacagtaggtgtgctcattgctactgggatgacacttattcaggccctgtcaggagacagaacaaggaaatatataccaacccatatctgtaagtgtattgtacatatccgtctgcatctattttgagctgaactcgattccacgttg

SEQ ID NO: 116957 - DNA, 345 bp, Homo sapiens
ctttgtacctgcagtgtccctcatagtctgtggcatgttgtaagtactggatagattttcattgaacaaattaataaatgtgtttgtcgtcttaggtgaagagagactgctttgacaatgccaggcctcagctgtccaagcccagtctcaatgcagaaaccaggcctgagtgagttgtggcagaatgttgggagtcttctctccatcagaaggtgggagatggaacagtcttcagtgcatgaagagcatctgtggcatctccagggacctgcgaggtgtttgccttcatctccactctgttacttcagcccacaaatggagttctgccctgattcctggattgac

SEQ ID NO: 116958 - DNA, 544 bp, Homo sapiens
ttttaggtcaagttttagcgacctattagacattcagttggagatgacaagtaagtattccagtatgtggatttggattttaagggagtgtctgtgctgggttcataagccatcagcatgtagacagtatttagagccataggaataatgaggtcaccaagggagtgagtgtagatagaacacacagtccaattcctaaaacacagggtactccaatctatagatgtgagggagagaataagaaaacagcaaaagaaatagaacaagtggctggagacaaggaggaaaaatcaagaggatataatttcttggacaccaatttttctagaaagtgttttaaggaagagtagagtgacctactatagctatgctgagaagctaagggctgagaattgatcattgcctttagcaatgctgaattcattgctgaccttggtaagtgcacattctgtgaaacattgggagcaaaaatccttattgggtgtgtccaacctgagatgaggagagtgattcgaggtgctaagacagttaatcttggaaggag

SEQ ID NO: 116959 - DNA, 238 bp, Homo sapiens
tgtgagaacagactaatacatctcctaactgggttgcctgcctaatgtctggttcctttgcaatctaccctttacattactacagaaccacttttctaaaataaaaatctgattgtgcttgtcccctgcttggtcattcagtagttgtctagtgcctcaagataaagcccaaactcagtatggtggcaatgccaggcctttgtgccctacccctgcttgcctccacagtctcatctcc

SEQ ID NO: 116960 - DNA, 319 bp, Homo sapiens
ctttctgaggctgttttcctgagttcaactctccacttgagacacatatagtaatgaagtactaatataagaaacaaaataataactgaaatcaagagtgccctaaataaccctacccaacacagatcctttattcctaaggctttatctcctaaacattattattaagtttacactatatcttattactctttttactacataaatggtagttgatctaatgttggtttctgctttcatggttcttttctccctcaggtggattataggctaattaaaaataaaaattttgccttgtaattttcttcaattgaaatca

SEQ ID NO: 116961 - DNA, 195 bp, Homo sapiens
tccactcggtgtgacagggcacttagtgccagaattatttataacattgagatggcaacagggcaatggagagcagcccaacccatggacactttctctttgaaagctcgatcaatggacctagatcactgtttactacttggtgtctcggcctctgccatgtttcctgctggctttgggggatggggaaacagg

SEQ ID NO: 116962 - DNA, 750 bp, Homo sapiens
atccagctgtgttttggaacaaatgccaattcttcctgggagcaagtgtctttcagtcgcgttcctggctgttttcttcaaaagcaggcgtttctcctggtagcaccgcttgttggcgacgtcggattcttttccgtggcagtactggtcgtttcatggagtggccggtttctcactcgcactgtgccggctggcagttattccgtggaggcgcagctctcagccgcttcccttggttctcggtgtcggctgtccctgtacctgcgtttgtggcggtatttctgtcacaatcgagtctgtgttttttcgatgacaacgccattcatttctctaaaacaggctatgtttggaattggcaatttttctttgtcagagtccttggtttcgcagagcctgttgttccaggttactggactgctgtttgctccgtgctagcaatgttgcacccagtaccgttaggtgctccctgttggagttttgagacagcgttttgagataggtgcaccagcactccagacctggcacctgaagaaagcattatcatttcaagctcagtaggggcaatagaatgagtggtgttagagaaagcaagcagatgcttgaagaaagggccactccacagtattttttggcttttttttttttttcactttttttgagacagggtctggctgtgtcccccaggctggagtgcagtggcacaagcatagctcactgcagcctcaaccatcctgggtcatgcagtcctcc

SEQ ID NO: 116963 - DNA, 438 bp, Homo sapiens
ttccagggacagagcgaggtactggggacacaggaaggacgaggcagagctccgcgctgacgaaaccaagggccaagcgtgcgagtgaatacgaacatcctggcgttaaaacgtcttgcattctagtgaaatgagacccattggacacagagaagccccaccacaattgcatctgtgtaaaatcgagagaaagatcgtgaaaacagccatggcaggtgctggactaaggggtgacattgggttttctcttcccacctatcctttagggttgttaaaacagaaatagatctcacgtaggcccctgctctgcaccctgcttgctgagtcacgcagggccagttacgcagctaccgtgtgcttacccggcctcatctgtaaaataaggatgacactgcctgcctggcagggctctcctgagaatacacagtgcctcgtgca

SEQ ID NO: 116964 - DNA, 205 bp, Homo sapiens
caccactcagccctcctccgcaggcctctccctacccctctccccccacgtggcttctcaggctcctcctgtgttcctgctctgccacagctgggcacaggagccaccacagactgccacgggccacaccaggcctctggggtcaatctgcccaaaccaccgcatgtttcagagtaacctctgctgttcccgtgggagtgggaca

SEQ ID NO: 116965 - DNA, 358 bp, Homo sapiens
tctgactctctacttacttggactttctccttaggtttcatagacctgcccaccacaaaacaaaatgttatgtgatttactggcaaaagttagtctatgtattattttaatttctgttaagtaagaatgtccttaaaagcaggaactttattacccaaataaatttatgagtggatgatcacacctagtaaagtgctttggagagagtaagcactgaatgaattcttgcaactgaatatatgttaaatattaaataattggttccaggcacagtggcttgcacctgtaatcctagctatgagggcagagttgaaaggattgcttgagaccaggagtttgagactggtctggcaacatg

SEQ ID NO: 116966 - DNA, 335 bp, Homo sapiens
attttgtgagtaaccagctttaatttggaaaacctagacttgtacatacagattgttatgtttagggatcatggaaaggaagctgaatttgccaagttttgccacttgggcattgcatgcctatgtgattaaccaccaataaaaacctgggacatcaaagaataaataagctgctctaattgccaagaattcacatgtggttgtatgcagctttactgggagactgaagtgtatctgcatgtgattctgctgtgatggacacttgtaagtttgtgcctggagtctcctggactttgccctgagaatctttttcctttgttgatacgactctgcat

SEQ ID NO: 116967 - DNA, 275 bp, Homo sapiens
ttctcaggaggctgaggcaggaagatcacttgagctcaggaggctgaggatacagtgagccatgattgtcccactgcaatccagcctggatgataaagtgagactggtcttaaaacaaacaaacaaacaaacaaaacaaacaaacaaaaaaaaaccaagatgactagaagtttcttaccaacttaggtaggtgacgagtgccttacttgggagcttagtaaaggatggctgtccattggggaatcaactaaaatgtacagtaattttttttgttt

SEQ ID NO: 116968 - DNA, 283 bp, Homo sapiens
tttgaattcactttgcaaatttaagtcttagagtatcaagcaactcctacgccatataattctgtctgaaatttttcattaaaaaaatcacatgtggcattctaaaagcacttattatttcctcttctttcccaagtcttagaaaccaagcccaagatacactctatgatattgcgtcactcataactgtaaaatttggttaattcctttcttcttgagtttttccaaattttgctatgatcttaagcctcccagtgagtgagattcattgtaatttctgaaa

SEQ ID NO: 116969 - DNA, 515 bp, Homo sapiens
aatgataccaacagccacctattgactgaaacctgattctatctcctaaatgttttgaatttctttctcttcctccagtttagcctaaatgagcaccagcctcctaaatcagctatttgtctctggtcttgatctttccagtttttagtccacacaataatcaggatgattcctggaaaaacatgcacattcgattgttcaaactcgattgttgaaacatgcttaaagccacacccaagacactaggattgtttcccagaggccttagacagaaaaataaattccctatgctctactgcctgtccaggcctttgagggcatctctcaagaacaaaggggaactcccagaatcttaggccagaaccctatgagtccttgacgcatctatctctcttgccctccatgtccagtgagtcacgaaattctgtattcttccttccaaattacaccttgcatgatttcagctctctttagctctactaccgacttaatctaaacttggtgtcccacagatt

SEQ ID NO: 116970 - DNA, 288 bp, Homo sapiens
gagaaatccacttgtttcccgggcactgagcaggaggtggtctccaaacagatccaagcacacgtcctctcgatgggcagtgcaactctggtctctgtggtggtcacgccccctgttcacgtgaagggtgaaggtcagtgttggtggtgtctccgcaggtgggtagtttgcaggcgctgttagcactggccttcctgcacactgggaacttcagtgccgcaggatgttgggaacccgatccctgggtgagagcagtggggcaggaagaagacggtgggaccagcctca

SEQ ID NO: 116971 - DNA, 464 bp, Homo sapiens
attatagtcttcaaatagggacattaaagggaagagggggtgtgttgctcacgttgaaatgaggcagaagttaagggacagagatttctgtttaatacaagatctttctaatgtttagaactgcagctaattccactgttcgatttgtgaaatagtgagaggcctaccactcaaaatccagttgataagaggctagagaatggatgaatatctgttatccttgcctgcacttacaggacttgcctagttcctagctctgagtaggtgcccaacaagtgtttcataaaagaaaaaaggctcaactggattatctttgggatgccctccaactctgaaatggaaggacaggggatgcttctactttcaagctaggataaggcttgattgacaagatgttcttgaggatgcccatccatctagttgagatggctggataaataccttcctgatacagagcagaaggt

SEQ ID NO: 116972 - DNA, 440 bp, Homo sapiens
gatgtggtggcacgcacctgtagtccccagctatgtgggaggctgagctgagaggattgtttgagcccaggagtttcaggctgcagtgagccgtgattttacaactgcactctagcctgggtaacagagcgagacccttttctctacaaaagaaaacaaaaaaacacgcacaaaaataaggactttaaaaaaccaattgcccgtttaaaataataattccaggctgggtgtggtggctcatgcctgtaatcccagcactttgggaggccgaggcgggtggatcacgaggtcaggagttcaagaccagcctggccaagacggtgaaaccccatctctactaaaaacacaaaaaattagctgggcacggtggcagacgcctgtaattccagctactcgggaggctgaggcaggagaattgcttgaacccagagggtggaggt

SEQ ID NO: 116973 - DNA, 383 bp, Homo sapiens
caccgcctgcccgtcttgattgttttaatctgcgaaatgggaacactgccagtacttccccaggcactgttttgtagatattcattgagatagtgcttctcccacctgttaagagggattcagagggagagtgcaggcgttgattagtcatgtctgctacagcagtggcccatggcacattggtatccattggtctcagactgcaactgtggttactctcatctttttcttttcttttgagacctgtctcccaggctagagtgcagtggtgctgtcatagctcactgcagcctcgaactcctatgctcaagtgatcctccagccccagcctcccaaatagctggaactacaggcctgcaccactacacctggctcatttttta

SEQ ID NO: 116974 - DNA, 222 bp, Homo sapiens
ccaaagtcctaggattacagacgtgatccactgtgcctggcctcttctttctttttttgtagacttgatatcgttctgcctcttaggctggagtgcagtggcatgatcacagcacactacagcctcagcctccagggctcaagtgatcctcctgtctcagtttcctgagaagctgggactacaggcatgagccagtatgcctgactgatttttgaacttttt

SEQ ID NO: 116975 - DNA, 378 bp, Homo sapiens
agggcctcaggaaagttttattcatggtagaaggcaagggaagctggcatgtcatatgggagagagggagcaggagagatagggcagatcccagactctttaacaaccagatcttgcttgaactaatggcactagaactctcattaatgtagggaaggcaccaagccattactgagggatctgtccccatggcccaaacaccttgcaccaggccccaccaccaacattagcagtcacatttcaatatgagatttggagaggacaaatatcaaaactatctcaacaagttgtgcttcttttaagtttattcctaaaaatgtatttttatgctattgtaaatggaattattgtcttaattttattttcagattgttcact

SEQ ID NO: 116976 - DNA, 438 bp, Homo sapiens
gccccacgtcccacaaaaagaagtgaaagtaatgtgttggcttcatcacccaagtatccatgcacacttttctttcaaaccttgctttgaaaaccaatggcatgtttctattgttaacattctctgtgggcctgagctttcaataattttattctaaccctacagttagttcttaatattatgcaggctaataaggtcactgtttggggggtttgtctttgtttggttgcttgttttttaggatattcttctatcataacacttgtgtactaattcccctaaacttctttaaatttcctcaaacttgacctttgaacagagaaagtctgctgtttctgaggctgaccacgaatgcatcctcactctgccttcacctctctttatggttgctttctcttttttggcagaacagaaatttccaagttttgtgtgtttgct

SEQ ID NO: 116977 - DNA, 879 bp, Homo sapiens
atgttggtcaggctggtctcgaaatccagacctcaggtgatctgcccgcctcagccccacaaagtgctgggattagaggcgtgagccactgcaccctgcctcatctcattcttatctcttgtttcagtgagccaatatgttattttattttattgagagccaagcgaatgtactctaaaatataccagagaaatataccataaaatgtcatttggaaaattttatttttctctgtttatagtgtccttaaacatatatttccttttactcatgcatgcatgatgagacttctatctaggaattatatttgatttctagtggattgagtaagttcttcttgaattcctttgaactttacctatatgcgtgattgcagtctctgacacatcatcctcataatcaataaatatggagactataaaaagattctctaacataaagagaaacaaggcaaacaaaacaaatttaaacttagctttcttatctacttaaaggagataataacacttaggtcacaggaaatattgcaagattaaatgcctaagatgtttgacatactccctgagaaatacttaacagatatagctcttattattacatcagtggagaatctagttattatccagaatattaaattggcatggaaaaagcatctggttattgaaactttggatatgtaaaaatagcattcatggatagtactcatttcttaccacatcattgcaaaattacaaacagcctgggagtccttcatttttattcttcaccttgagaagcgtgtggacaatctaactaccaatatcatcctttacgtaactccttaactccctttaaacattatacttcgggctgggcgcgggggctcatgcctgtaatccc

SEQ ID NO: 116978 - DNA, 294 bp, Homo sapiens
agtagaaatgagggtctcatcatgttggccaggctggtctcaaactcctggcctcaagtgatcaacccacctcgacctcccaaaatgctgagattacaggcgggagccattgcacccggccatagttttgaattctgcagcaattacaaaattgattcaaacaaagtatgttggactcagggagatacgtgaatgtaacatttggacccaatgcctcagcagccaggccatgaataaaagaccacaagtagacctgtctacttgaccagtcctgtctaagctctctggacatct

SEQ ID NO: 116979 - DNA, 322 bp, Homo sapiens
caggtgcagagacaggatgcagtaccgtcctattcccaactcgctctgacagcagcagggagcctgtctaagcactggcctcggtagaaaagttagttacaggccgggcgtggtggcccacgcctgtaatcccagcactttgggaggccgagtcgggcggatgacctgaggtcgggagtccgagaccagcctaaccaacatggagagaccctgtctctactaaaaatacaaaattagccgggtgtggtggagcatgcctgtaatcccagctactggggaggctgaggcaggagaatcgatggaacgcggaaggcggaggttg

SEQ ID NO: 116980 - DNA, 411 bp, Homo sapiens
tttttcaaaagccatacttttactatgtagcagcagctgcaataatactttcttcactgcttacttgttggcaggtcctgtgctaaattctttcacagcccagtccaagcaatggatattagtatctgcattttgcccatagaaactgaggcccaggattaagttacttccccaagatcacatggccaataagtgcggaaactagtattggaagccagatagcctgaacaggagccaatgcttagccattaagctgaattgcttccacctttatctggtgaaggatgtcattaaagataaaggtaatctttgctcttacatggtgggcacatttgatgacataatcagagtccagaaagaacttgatgtgttggagtgatatgttgaatctaacacaattagatttgaagg

SEQ ID NO: 116981 - DNA, 409 bp, Homo sapiens
attaacttcagacagagtagagttcagagcaaggaaaattatcagggaaagacaggggcattacataataagaggccaattctccaagaagacatatcattccttaatgtgtgtatacctaacaacagagtgtcagatatatgaggcaaaaacaggcagacctgcaaggagaaacagataaatccactattatagttggagacttcaacaccccccatcagaaatggacacatcaaacagatataaaatcagtaaggacataattgaactcaatagcccctcaatcaactgaaatatagttggcatctattgacgacttcatccaacaacagcaggatacatactcttttgaagctcatgtagaacattcagcaaggtagatcacattctggaccataaaacacatctg

SEQ ID NO: 116982 - DNA, 581 bp, Homo sapiens
aagtacgtgttattcatccttcagtactccgctaacacacactttcatctggaagaacttactctgtcccccattctagacttacataggctggaagtaaaaggatggaaaaaagagtctccacacaaagtttctgtaggtcagacatccagcaaggagtttctgggttctttgctctgggttttaggagagtgaattcgagatgtgagccagaccaagttctaatttgtaaactctgaagaaaagttattgtccaaggtattttgtggtgaagatgaactctagaatcaggtactgcaatttgaatgctggctccacaactgataaggtacatgccctgggacaaaccacaccacctctcagagcctgtcacaaggcagtcaggacattttaggagcaaacgcctatgaagctcgtaaaaagggcttggcttatgggaagtgagtttaacaattctgaagaagtatcatttgcaagcgtctggggaaaaaatgatcagaatttgaagaaagaacaaaacgcacaaagtaacaataaaaaaaatcaatgaaagacaaagcaacagaagaacagagtaataa

SEQ ID NO: 116983 - DNA, 675 bp, Homo sapiens
tagctgggattacaggtgcccaccaccaagcccggctaatttttctttgaattgaaggcactgtctccaaatactgtcacattcttgggtactggggggttaggacttcaccatataattgaggagggcagcacacaattcagctgtaaaacaaaagtaggctaaaaccaaccaggatgcaagatggaatttttttaaatcagcaaacaaaagaaaaagtaaatatactttgaaagttgaggaaaaacatacaattttaaatatcctccttaattagcatgtagcttattatgccaattgccagactcagctcagggatttgtctgctgtataatttttatcacagggacaaatttgccgatagtagtagctacagcatctcaatcttctgtagcctgaaaggaattggtagcaacagtatgtcatagtagaatactaggggtgtgtactttacttacctgtcctctgttacagattgaattgttttcccagaaaagataatcttaaagtcctaacccctggtacctatgaatgtgaccttagttagaaatggagtcttggcagatgtagtcaagttaatatgagattattaaggtggagactaatctggtgtccacataagaagagttgaagatacacagacacagaaactcagacaataccatgtgatgaagg

SEQ ID NO: 116984 - DNA, 362 bp, Homo sapiens
tggagacggggtttcaccgtgttagccaggatggtctcgatctcctgacttcgtgatctgcccacctcggcctcccaaagtactgggattacaggtgtgagccaccgcgcccggcctaaaatattcttttatgtttatcctatgttaatagttttattttagctcttgagaattaaaaatttaactgtggtgaagaacacatggcaacatgacaatttaccaacttgcctgtttctaagtgtagagttcagtagtgtgtactcacatcgttgtgcaacagatctccataaactttcatctttcaaaactgaaactctgtactcattaaacaattccctgtttccccctactcccggaccctg

SEQ ID NO: 116985 - DNA, 395 bp, Homo sapiens
aactgctcccctgaagaacatatctgatccccagaaagaaagagtcagtctaagtggagggaggaagaaaagcagctgaatgagctgggctgggctgcctgttagagcagagagagctcaagggccattgggagggaggggaagtccaaagaggggtctgtgtgtttggagtagggcagaggtgggtagggcagtcagtgtgaacagaaaagagaaagactgtggaaagccagaaggaagtggagttggactgaaaagatgaaagaatgggagaggaagtgggagatgggcttaaactcaaacagtggagagaagaaagtgctacaggccatattgcttgtttccagatttgcttttaaagaactgagatttaggccgggcgcggtggctcatgc

SEQ ID NO: 116986 - DNA, 560 bp, Homo sapiens
cacaaaggacactgagaaggaccaaagaaagagggaggaggagacctaagggcctggcaggaatagctgttaccgtgaattggaggtctgctgctgttcacatactatgctgagaactccaggtccctcactttgtaaatctgcaacagtcttgcaggtgggtggaattagccatgacttaggggctccgagtttaaataacatgtccaagtttagctgtccagccaaagtggcagatctgtgttttttttttccccaaagcccatgttcttttccaccccatgggaatggtggtggtagcagagatggaggctccagagtccagaaaacctcctcctttaggggacctcagtaacttgggcagatgtcaaattggaggaacttgagcattacaggtgccaatgagagggaggcccactgggctcatttctctgttggccccactgagcaggtcacatgacagggacctggacaagaaggctgtttaaaatggaacatgaaaaacaatgccaggaatttaattgcaccgtgaattgtggccagaaaaggaacctagcaac

SEQ ID NO: 116987 - DNA, 253 bp, Homo sapiens
ttttatagcagaggaaatttaggttcaaagaagttgagttgagagtcccaggagtaagaagcagtcaaggatccccccaggcctccggggccgcctgggctgcctggcctcacgacctggccccatgctcctgagatggagaagccccaggcccatgagcctgttgcccttggcaaagccacttcccttctgagtaaagtcagacgagcctgcccagtcccaagagactgcgattccgtaatcgccctcccct

SEQ ID NO: 116988 - DNA, 926 bp, Homo sapiens
ctctagccacttagacagaggataatcacaagttcctggaggataatattggaaagggaatctgacaggagagacatctgatcacactcagaggtggcagaggaacggcagtgggatgtctgttgccttgccatccagttgtttggctcaaacctctgcatacgcttcctcaaccagtacttctccaaggggcctcacatcaagtgagtttttcaaatgcatggagctacaaggcccactccagactagagtcagaacttctggggcaaaagtttggggcctgggcatctgtatctttaaaaagctcatcaggtgattctgatgcactccctgttgctataaaccatggccagatcgctgctcctgcctgggtcggtgtgtctgcctgaccattggtacttagagaacaggacggagacctgtgtaattctctccattcagaagctactctggcaccatacacaacggtgcacaattgaagggcctgttctgctcctccacatggcacccttagaaacgtcacttccccaccttgtgtggcaacagccccggccaacgtgcttatgaagagccatggcaggctggtcttgaactcctgacctcaggtgatccacccacatcagcctcccaaagtgctgggattacaggcatgagccaccgtgcccagcctagggcctggttcttaagaacgccattcccttcttgatcctcaggcccagtgagtgaggcagcgtggcagtccaggacctcccaacgccgagcacatcctctctccttcctcgctggggcagatgcttacacaggtagagagcccaagcccaggctagcagcctcagttgctcagtcatgcagcaggcgtatgctgaccccctgttacagtcctgggcagacagagatgtgcaccacactacagaaataaacacagt

SEQ ID NO: 116989 - DNA, 687 bp, Homo sapiens
tgtcttcaaggagatatactagaatttgctcctgtgtttgtgcccatggagtaaagtttgaggcttttttctaagctgtgcatacactttgcattagcctgtgacttgggtagaggaaggacactgaggtgatttgtggggagggtaacatagaccccaacagctgcatttcatcttttctttgcttatttattggaattgatgccaggcagaaaatactttcatttctaaatatgagttaataactttcctaagatcttttctaaatttggggacttctcctactcaagagtcctttttgagaatactttatgttgatttaccttctgaaaataatctgtgtccaacatagatgtttttgcatgaatattatgtatatatacaatgcttttgatgctcttctaattgaactattgaaagctttgcacaaagctttgcacaaagatgcagatagtatttttaaatactattccattagggtgaaattctcagaggcctgtactttgccatgaccaatcttgttaaatcttcatccacgtagcaagttttaatttcagaagcatggcttccccagacgccagagccaggctcatgtgcactatgaaaaggatgtatgaaccctgccatactcagaaaatagccaacatccatgtgcatcttgctgtctctgaaaattgatttcttaag

SEQ ID NO: 116990 - DNA, 471 bp, Homo sapiens
tgatatcatctcaacttagtattatacccacacccagtccaattgtttggtatttttaaaacataggtgtattcatgttactccacctgcctcaacctcccaaagggctgggattacaggcttgagcaccgcatgcatagacttctttgcccatcagggtgcctagaacagagcaggctgttagtaaatatttgttgagtgaatgagtaaacaaatcaatgaaatcttgctgaagtaagtgttaaagaataaaacccattattagtggcaggaatggacaattcccactttagtcagtcctatctgcagaatgccaaaaaagaaaaatagtattttagggtgtttttatttttctgaaacacaattatttcacttgaacatccataagaagtctatgattgtatccccatttttttatgttggaaagttattactgtatttgaatcagaagaagaggagatcagagataat

SEQ ID NO: 116991 - DNA, 1615 bp, Homo sapiens
ctacacattacctccatgatttggaatggaaaaggccacttttctttttgttctgcctctcaaattcaacacagaggagctcctaggattccagttatcctgctaacatctccaggaagaaagaagcaactcacatgggtcttttgctgtttgcttaattataaagacatcattttgcaagcagaaggctgagtttcatttgaaacaggtgcttaggtggtggtatttgtgaatacttttcattccaagcaagaagactaaagaagtagcaagtatgaatgacttcagggtttaaaaaaaatgtcttccagtttcagccactaccatgataagcacagttgagactgcagcagtaaattccaaatatgtgtttctaatttgacgtgaaagatactaaaaatttatatttgtatatttaaatcctggctcatcctgtgacatagatttactgaataggaacaaaggcccaattttaaacaaaaacctaggccgggtgtggtggctcacacctgtaatcccaacactttgggaggccaaggcaggcaaatcacctgaggttgggagtttgagaccagcctgaccaacatggagaaaccccatctctactaaaaatagaaaattagccaggtgtggtggtagatacgtgtagtcccagctactcgtgaggctgaggcaggagaattgcttgaatccgggaggcggaggttgcagtgaactgagattgcaccactgcactccagcctgggcgacagagtgagactccgtctcagaaaaataaaaaacaactttggacatagaggagttgggggcagaggggggaggatgagagaattttccatgtaactccttttccttaagaaaaagaagcaaaaatccctcatgcagtgccatctgactttatggtgtttcacattatatagttactttttttaataaacgcataagattaactcttcctgcaacccaaggtggatacttggatgtttgatttttatttatttatttatttattttttggggcagtctctctctgttgcccaggctggagtgatgcgtgatttctgctcactgcagtctctcccacccgggttcgagcgattctcctgcctcagcctcccaagtagctaggattacaggcgcgcaccaccacgctcagcctgatttctaggctgaaaaggctgggactcaggtactttccccagttgggactgaactttctcatcagagaatgggcctcagaagcaatgttcccaaacttgtggttgggtcatcgtggaaaagaaacctcaaataagaaaaataattacaataagaaatggattttcttttttcccacaacagttatacattataaagaacagactgtcgtagaaaactgtctttgcttccaaatcagcagaggaccattgtatgtattgtcaggtctttatataagagtgaaacctttatttatgcttcttgtgagtagagaataaattttaaaactaattagatgaaattaagaacagagtattggaacatctctgtgttttccggaatgtttactcaggtccatgaatgctgtgatgctgggaacttagggaagattcaccaaaatttgagagtgataaatggc

SEQ ID NO: 116992 - DNA, 1157 bp, Homo sapiens
ctacacattacctccatgatttggaatggaaaaggccacttttctttttgttctgcctctcaaattcaacacagaggagctcctaggattccagttatcctgctaacatctccaggaagaaagaagcaactcacatgggtcttttgctgtttgcttaattataaagacatcattttgcaagcagaaggctgagtttcatttgaaacaggtgcttaggtggtggtatttgtgaatacttttcattccaagcaagaagactaaagaagtagcaagtatgaatgacttcagggtttaaaaaaaatgtcttccagtttcagccactaccatgataagcacagttgagactgcagcagtaaattccaaatatgtgtttctaatttgacgtgaaagatactaaaaatttatatttgtatatttaaatcctggctcatcctgtgacatagatttactgaataggaacaaaggcccaattttaaacaaaaacctaggccgggtgtggtggctcacacctgtaatcccaacactttgggaggccaaggcaggcaaatcacctgaggttgggagtttgagaccagcctgaccaacatggagaaaccccatctctactaaaaatagaaaattagccaggtgtggtggtagatacgtgtagtcccacctcccaagtagctaggattacaggcgcgcaccaccacgctcagcctgatttctaggctgaaaaggctgggactcaggtactttccccagttgggactgaactttctcatcagagaatgggcctcagaagcaatgttcccaaacttgtggttgggtcatcgtggaaaagaaacctcaaataagaaaaataattacaataagaaatggattttcttttttcccacaacagttatacattataaagaacagactgtcgtagaaaactgtctttgcttccaaatcagcagaggaccattgtatgtattgtcaggtctttatataagagtgaaacctttatttatgcttcttgtgagtagagaataaattttaaaactaattagatgaaattaagaacagagtattggaacatctctgtgttttccggaatgtttactcaggtccatgaatgctgtgatgctgggaacttagggaagattcaccaaaatttgagagtgataaatggc

SEQ ID NO: 116993 - DNA, 730 bp, Homo sapiens
gcggcgatccggggtctgggcgcggcgaggtctggtgtggcagatgtggatagctggaccctcctgggtgcctctgcgttatgtcgtttggttgatgcatttggagagaatctgtgctctccacaactgcaggggcaacatgctttcctggcctcttcagatcagggtggctgttcttgggtgctgcaccaaaactccagcagtgggctttcttcaagtggccggctcacctcattcctgccaagacccaggtccgtgttctcacagtgctgccatctttcctccgtgtgagcgtgggctgtgcggagagtggacctcggtgtgtgcggggctgcgtgcactgccatcgctccctctacacgagccggcgtggacccagggctgagctgtgaccacgagggccatcccgacgagccgccatggacccagggctgagctgtgaccatgagggctatcccgacgagctgccgtggacccagggctgagccgtgaccatgagggccatcccgaaactgtgattgttttctgaatgtggaagcgtcggccgagcgcggtccttggagaacccttgctgcggagaatgacgctcactctgcggcctggcctcgcctccccatcccttctgcaaactcacaggacaggattgatggggagagcccaggcgaaacgaagctgaccctagtgaccagccctactggcggctctggaacaggcccgggaccagtggcct

SEQ ID NO: 116994 - DNA, 369 bp, Homo sapiens
cttagactttaaattcctatgctcattccacattgtcagtagtgactgacatttgcattcagaagtctttctctcacaccttatctcatttgcacccctctgtggccctgttaattttcctcctaaattctctttcacaagtccaatcatcgacatttcttctgctgaagtaatgactgctgtagttctgctgaagtgagtgactcttgccggccagggattgatgccctccctccaggcatgggcagcatggaagagtttctcagggtttctacaaggcacagagatcagggctgggatgtctagggtggtggcacagatactggagccagattgcccactctactacttagtatcttgagccagtta

SEQ ID NO: 116995 - DNA, 397 bp, Homo sapiens
aggtaacagctcaaacttctagatccagagctacctcacagcaaaggacagcctcttacaccccaccaccgtctgcagagcccacagcaggcatccaggtgaagctcctcagtttatcaatgaaggaattgcacctgtgaatggaagtggcctgccgaaggctacacggcagtgagtgtaaccagattacctgataccccttccagggcccttggtgtgacttattgagatctcatgggccagtgggtgtcactgaaattcctggataaaagttgcttgtggagggctgtcatagtggctcatgcctgtaatcccagcatttcggggagcaatttgggaggccaaggcaggtggatggtttgagcccaggaattccagatcagcctgggcaacatgg

SEQ ID NO: 116996 - DNA, 256 bp, Homo sapiens
tcctcccatagtttaaataatttctaacctagttcttggttggcctcttgcaaggaatatacatgaacagttctgttaggactcgcagccacgtggaaattgggcagtagcctttggtgaggttgtgtaagctcggatttagcgtccccttatggatctggcagttggggatgaattggagtcctgtgaaaatccagttgagagctagtccttgagccagatcgtgtcgggagggcactggcagaatctgctgtca

SEQ ID NO: 116997 - DNA, 390 bp, Homo sapiens
tgtccccacgcagaaaagagcaattatatgcttgagagtagtaaatcgccctaagatgtcttcaaacaatggatagacctgaatgagaggagagaatcctctttgtttccataacacttcaaaatcatgggctactccaaaaacatatctaggtgtaacaatgtaaaccctgcaactcttttgcctttgttttaagatgagctgctgcacaacagcatagccctaattgatcaatgtctttctcccaggtcacatctattgagatatcccccttgcaaatactaatattgttgtttggcttataaatggaccttacttaatggatgaatctggattctatagggctggatacactatagtgtctttaactgaagaaacaggaagtgccta

SEQ ID NO: 116998 - DNA, 768 bp, Homo sapiens
agcggacggacgcgctcgcaagctcactgggaaaacatggcggagtcggctggcgttaagttgctttttggcaaagttgggcggcgagattgtttttggtgatttggattagaaagctgcaggagggtcatcgcttagtaatttagggttaagagtacagaagctatgtcttccgttggtcgcatgccatttgagttcctttttatttcctcgagttttatttgttggttattcatggctaggtctgttcgctcctcacgttctctcctaatctcagtaactttgttaacctttcattttcaagtaattcacagttacagaaatattgctaaactagtacaaataattcccacaaacccttctagattccacaaatgttaacgttttgcatgtgctatatcatttgaaaggaaattgccgacatgatgtccttctatcgctacatttttttttttttaaagacggagtctcggtctgttgcccaggttggagtgcagtggcgggggcttggctcaccgcaacctccgcctcccgggttcaagtgattctccagcctcagcctcccaagtagccgggactacaggcgcgcgccaccatggccggctaatttttttgcatttttagtagagacagggtttcactatgttggccaggctggtctcgaactcctgacctcgtgatctgcctccctcagcttcctaaagtgctgggattacaggcgtgagccgccgtgcctggcgtaacattcttttatagagacagggtctc

SEQ ID NO: 116999 - DNA, 311 bp, Homo sapiens
tctagatcttagtggtctgaattatgtggaaaaggtatacaccacacttcgaggactggctactttcactacaaaaaaatggagtcaccctaagctttttgtaagaagcatgtattgaatttgtaatcattgtaaagggtttaaaaaatggcatttctcaaaggatggctaccattttgctggagccaaagaagtatccattcttatttatgatttctggggcctccctgacccaactacttgttcaagacttttattttgacttagaatgatgtaaaaatgacttctgttttggtgaaggaggctgaaag

SEQ ID NO: 117000 - DNA, 849 bp, Homo sapiens
gttaactacagtcaccctactctgctattgaacattagaacttactcctctatctgactgtatgtttgtatccattaaccaacctcttttcatccacccaccctcttaaactcacactcttcccggccttggatagctgtcactctactctttacccccatgagatcaacttttgaagccccgatatatgaacgaaaacatgtgatatttgttattctgtgcctggcttatttcacttaacataataacctccagttccatccatgttgttgcaaatgacatggctttattctttttttatggccaaatagtattccattgtgtatacatacacattttcttcattcattcatccactgatggacacttaggttgattctatatctttgttattgtgaatagtgctgcatagaggtgcagatatctttttgatatgctgattttagactaggagcattttgaaatcttgccaagtttaatagttcatctttgttttaatatttgctttttaaaaagagaaagaacaaagcaacccaaatgtccactgatagatgtatgaatggataaagaaatgtaatatacatgtacaatggaatattacacagtcttaaaaaagaggaaaatcctgtcacatgctacaacatgattgaaccccaaggatataaattatgctaaatggaataagccagtcataaacggacaaatactgtatgctttcactcaaataaagtatctaaaggggtcaaaatcataaaaagaggaagtagaaaggtagctgccaagggtaggagaaagaagaaattagtgtttaatgagtatgggtttgttttgcgagataaaagttctaga

SEQ ID NO: 117001 - DNA, 315 bp, Homo sapiens
ccagcttcatcctccaggtctcctcctgcctgaccctcgccagcgcccagctcttagaacacagtgtgagaaccacggagactcccccagtccctatgggggtttctcacgtgtgaactgggggctctaacggccctggaggcacatttggaggtagaaagttactccaccccaggccgggaagcccagttgagtcagacccacaagcaccgacatggcagacttcatccaagcaggagcagctgtttgcagcaggcagagtgggaggcaggtggtgtggggtggcgtggcaccatggcacgggggagagcaggc

SEQ ID NO: 117002 - DNA, 528 bp, Homo sapiens
aggctggagtgcagtggtgtgatcttggctcactgcaacctccgcctcctgggttcaagcgattttcctgtctcagcctccggagtagctgggattacaggcatgcaccaccacaccctgctaatttttgtatttttagtagagattgggtttcaccatgctggccaggctgatagtgaactcctgacctcaggtgatctgctcgccttggcctcccaaagtgctgggattacaggcatgaaccactgcgcccggccgttgaataacatttaaagacacctaaataaattgagaggtatagcacattcatagatattattaaactgactgttagggagatgatcactttgtagattcagggtaattgcagtcaaaatcccaacatatttatggaactttacaagctaatttataatttatatagaaaagcaaagggcccaaaataggcatcttcagaagaaaaagaaagatgtggataaacttgccctaacagaaatcaagacatattatgaagccatggtaattaat

SEQ ID NO: 117003 - DNA, 477 bp, Homo sapiens
tttttgagcaaggggaaaaagaagaccatggtcgattatgaatactagccataaacttagagtagtgatgtgctgatatgcaagccagattgctgttatttgtattacaggctatgacaaggaaggaaatcacagacacacagaataaatgttgagtacagatttggaaatcttggttttatttattttgtttaactttcatttcaacctgtgtcaagataggtgattattgatctagaatccctttctggacttctagtctaaataatcctcatcataaaataaatcttttaagtgtttctttttcctaaatttctgagtatttttttcttcttgcccctaagaacatcgtttctttttaagaatcagaactcaaaccatctggtgtgtaatgggacagcccttctcttgtacttacagtcagtttcctgctgtagatgtcactgtaatataggtaggtacaggaatgctttagta

SEQ ID NO: 117004 - DNA, 715 bp, Homo sapiens
acctagttaatagggagtctagcttcaaacccacatctgactgaatctaattccacctacagctttgaaggctcagaaaacataactgcttgaaaaactgagttaactctatgactgccaggacaaaagcttaggatttagaaatgaaacaatgaataagtagacattttgctctcattttgttattttttactttattttccaaatatgtttaggttaaagaaaagaacatgggatttagagtcaaataggcaggtgttttgattctacccttgctaaccctgtgacctttggacagcctacgttgtccagtggaggcagccttcccattccaacggacatttgtgggatattagagaccaagaagtgttaagagatgatcttcacaaaatgctgagcttgtgtgggtgtcgaactacaaacaggaggagatggatattcacatgcagtggtggagggttatggctctccagcctggaggattggagcttgagccaggtgaacagtgggtccattaaaggggcagctcagttcagcaagtcagagcctgaacaggatgaaaggggcaacccacaaagatgaggactgaattggagttacagatcccagttggttggagagaccattttcctggaggatgacccagtttgggagtcacagccagagctgggataaaagataatccacactcttttggatataatatgtattataa

SEQ ID NO: 117005 - DNA, 386 bp, Homo sapiens
ctctagaggatcgcccctaatcactgctctgtctaaactcctgtatcgcaacttcctccctgggatataaaaggcaaggctgccagggtgagcacaggagagggattttcatgcagcaggagtgtgggaagcaccctgccatctcagttgggatctctagcttgctatattctaagagtaggggtgaaacagatgtagcctgagctttacagagatggcagctcattctttgaacatctcagtccatgtttggattaaagtgatctgttggctccatttatctaaaagaggatacagaactctcctcagaggaaggcagtagcagccagagtctcaggaactttaatgggcattgttcagctttcaacagaaaggaagcatgcata

SEQ ID NO: 117006 - DNA, 721 bp, Homo sapiens
agagatcatcagaccattctgaagaggaggagttggcacagttacttctcctctctgagcctcgatctccctgccggcaaaatggggatccttgtcccagctccactcactctatagggttcgtttgaggctcatggaatgaaaagatctaaagaagtctggccagagggacactgagatgagcaatgtggttggaggagaggatactgacccaagaattctctggataagaagaaggaggaggggaagcctgaagtggatgggtcgagcctcagctgtggaagaattgctaattacagccaccataaggaaatatcaatgatggacgtcaatattattgcctcctgcatccctgcctgttatttggagatgaaaagcgccctagggtcatctctccaggacgaagatgagtgatgacagaagggaggagagctacacatggagaaaagggcatcctccagctggattcattcatgaaaccaggacccatttcctctgggcagagttctctccactgagggcccagggctggggctgagggcaaaggaacctgcacagggaggaggaactagtgatcctgctcccagccctggttcaccaagtgactgcatgtatgcctcttagtgcctcagttaactcatctgataaatgggtatgacaattccaaaacaaaacccaaaaactctccagcgctggaatccggccaaaaagggcctgatac

SEQ ID NO: 117007 - DNA, 128 bp, Homo sapiens
tccttcactatactgtgcgcatcatccatttctgtatcctagattgctagcaaaatgtctcgtatttgtgcaaaactttatcaaatatagattccataaatgtttatttagtaaaacgatggatggat

SEQ ID NO: 117008 - DNA, 185 bp, Homo sapiens
cacaggaagttagcaaggcaggttaggaagggtctgaatggagagccaatctaaggagtatggctcttcagtaggcaaagggaagacagtggagtattgtaggctgatggctgaaaggatcagattttcaatgagctctttagaaagatcacactggctggagtctgaagaatgaactggaagga

SEQ ID NO: 117009 - DNA, 587 bp, Homo sapiens
gggtggactatgagaggcaataattcgaaattatatcgtggaaatgcttcaacctctaccaagacctacttcaaaaggaaaatcttgtgttgagtagcagttaaaaatggaataagatatcagaccttcaaccaaatagttcttaatagctcaaaactactataggatagcaattttattcccaaattattctagaactgaatatctgaaactcagtgaccaaaagccagtcaaccaatcttccacagcctaatacacacacataaaatatacctctggcattacattataacttcccccatcaaacaaaacaggaagagtggttatgttgggctgatagtgtaagatggtctgtcatgtagcgtttccgttatattctgaatttgagttggtataccatgtgacagttctttatatatatgttttcaacaccgctatgacaagagtgtctttctgtttttgcgtcagtgtctcatgaaaagaagacataaagaatattcaaaagaaattttaagaatctttgttatctgaaggtcgtatctttagtgcatgttctgtctctcatagttgctaaactctagctgcag

SEQ ID NO: 117010 - DNA, 352 bp, Homo sapiens
actctctgccaatcctgtgctgagggacttgcatttggccctggtaacaccacaatgagatccgttaatactgtgcccattaatagtaagtgaaaccgagggggtttaataacttacctaaggactcattgctaagtggtggtgccaggtgccaggatttgaatccagattggcctgcctctaaagcctgtgctctttttttttttttttttttttgagacagagcgagactgttgcccaggctggagtgcagtggtgcgatcatggctcactgcagcctcaacttcctggcctcaaacaatccttccacctcagcttcccgaatagtaggactacgggcacaggccaacac

SEQ ID NO: 117011 - DNA, 523 bp, Homo sapiens
gacaggcctgcatccaaatcccagctctaccacttgccaggctaagcctcagtttcctctcctgtaaatgaaggtcaaggaatccctatcttgggatagttgtgaaaattcaatgagatcatgcacgaaaatctcagcactaggcctggtgctggtgtccactcagtgcatggtagttaaaagagaaaaaggagatatatttagatgttaaaacctcacttagactaggctaagtttcccacttctgtactaggccccactgcagcccctccatgatggacagggactggtgggcctgtgaccccttcacctctcgggtctgcatctgatcatacctcaaccatggctgtgtgagtcatctccgtgcatgcagcaggtgcttaatacatgcttgtgaggttaactgacaaaaatagctactgtttctcaggcatttcctgacatttatatagtgccccacagtttacagagcaccctgtaagttcatctatggagcaaattattattattattatttttgaga

SEQ ID NO: 117012 - DNA, 634 bp, Homo sapiens
ttcgagctcgccacccagcttccctctctcacgtaaggaataagaatactcattttatgggcaaataaactgaatgtgaagtaaagtaggtgcatctcaggttgcctggtgaaagaaggattaagtctggtatagggtttgtcttttaaaattgtggaaaacatgcatatcgtagattgacttttagggaaagatgtgggtcctattgggttaatggcggaatcttttggtaagatcatgcccagccctgaggactgttgccaatgcctccctcaccacgtgtgccatgtgctcttgaggacatcctgtcattggcttcccacaccatcattacatctggaacaagggacgcataaaaagtgagtggcccagcgtggctcagctggtaagtgaagggcatgggcttggacccaggacttccagctgctgcagcatgtgtcctgctcccctacagcttgaagagggctaaatgagactggaggacttcttagaaaaagagacttgattatcagcgtagtgggagaagagcaaatgcttatgaatactgcacctgtgctttaaaagtcaccatgagctgggcgttgtggcttacgtctgtaatcccagcactttgggaggccgagacaggtggatc

SEQ ID NO: 117013 - DNA, 345 bp, Homo sapiens
ggaggagtaggggtgctgactcccttcctagtggggtcatagctggagggtctgctgcctttcaaggactctttgttgagaggactgagggcaacccagagggtggcaggcagggatcctggcctcaggtggcttgtgtcccatgtcaccaagagcacaaggcggtaggagcccagggctcagggcaggagcttcccatctcggagctggttctcctggggctggaagccactgactcggggcttgccaaggctgccagggctggcaaagggatggtggcctttggggctggagtggaagagggagggcagctggtgggtcctgtcagcttggagcctgtgagat

SEQ ID NO: 117014 - DNA, 419 bp, Homo sapiens
aacctgggtgttgtgcagtgggaaattacggaaagaatcaggacacgtggttaggtaggggcccagtggcgtcagacttagctcttcgtgactgcgagcttcttggtttaataaggatattggctcgctctgttcctggggtttctgggaaaagatatggaactgaaatgaaggtttcattgaatatggcccactgattttacaagcagaggtgcctgagataagcaaaaggtgaggcatgacctctggctgtgcattatttgttctgatattacaggagccaagcattccacttccttctttttaaagagctttgatttcctctcacatcttcatgaagaaggaaacagtgcccccacttacttatcctcaggccacacctgttcccatttattccgtgagttcctcccgcacccttc

SEQ ID NO: 117015 - DNA, 478 bp, Homo sapiens
gcacgagggcgcgcacctgtaatcccagctacctggaaggcggaggcaggagaatggcttgaaagcaggaggcagaggttgcagtgagccgagatctcgccactgcactccagcctgggcgacagagcgagactctgtctccaaaaacaaacaaaagctaaatgagcatggctgtgtgtcaatgaaactttattatggatgctaaaatttgaatttaataacattttcaagtgtcattaaatactccccttggattctggccctccctccccagtcatttaaaaatgtaaaaaccattcttagcttttgacgtatacgaagacagatagtagaccgtagtttgccgactccggacaggataataatgaaatatccggtatttttcaagcgatagtaattgggagagagtgaaaacaagctataatctcttaatttcatctgtctgtttaccacaataataaaggggatctgaattctt

SEQ ID NO: 117016 - DNA, 216 bp, Homo sapiens
cttccacactcaagcaatactcctcccaagtaggtggtactacaggcatgcaccacaacgggtctcactatgttgctgaggctggggaaaaaaaaaggccaggcacggtggctcatgcctgtaatcccagcactttgggaggccaaggggggcagatcacttgagtcctagagtttgagaccagcctgggcaacataacaagatcctgtctctaga

SEQ ID NO: 117017 - DNA, 280 bp, Homo sapiens
gagctcaggagtttgaggccagcctggacaacatagcaagaccctgtctttaatttttttttaataaagagagctggctgtgcagggctgggatgtgacttagcggggcagcaggtaggatggaaggagccactcacagatgggaatctaataattagtctccaacttgagagagggtatagaaacatctttggaaaggaacagaatagatatgtgattcccacgatacagatcgtattgccatttccttggtcaagcccccaaatgttagtatccttcc

SEQ ID NO: 117018 - DNA, 846 bp, Homo sapiens
gtgagtctttgttatgcaaatgtattttccactcagggagaattatatgctagatgtcatttccccatactgaatctacaagttacttccgtggctgagggcacaaaggaaatataaatatatccattctttaatctttctaaattatgcattttcaagttttaatcaatttttcttgtctaaataatcaggctcttggaaaaattatttccaaggaacatgattttgagtttcagaagatgggtcaactatatcatttgtaaataacatcaagggtcaacttttggccaatctaagaaaaacttttttatttgatactgattcatttttatgaacacatctacttgaatgaattaatgtgcgtctctttcttgtgacattttaaatgacaataaccatcgaattatggcgtctatacgttatacctgaattttaaaaatgaaattaataaaaaatagcaaccattttaaaatgtatgctacatagaagtactttatattatctcatttaaccctcatgattaaaatgaggtatatattgtccttcccattttacaggttaaaaaaaccaagtcagagacaagttaaacattttgcccaaggcagcatttaaacccagatagatttgatagcaaagtccaggttgccagtttatcccttaggtgtctgaatccagttgttctctaaattttattttctaaattatatctaaattgtatcatttgcaagtaccaaatgatataatttagaaattataatttttaattaatttaattaacttaataatcttgaaggatttaaatgtcaaaatttgcaatgattctaccagaattttttacccttacaa

SEQ ID NO: 117019 - DNA, 353 bp, Homo sapiens
aataaactagataaagtatttgtcatacatatgagagcgaaaagggtaatatccacaaaacacgaaaaactcttgaaagtcaattgaaaaaagataaactacctaatggaaaaatgggaaaaggacatgatcaggcaattcataaaagaaatacagatttttagtaaatacatgaaaatatgcataatcttattggcaataaaattaaaacaatatcttcttgttttacctatcagattaagaaaaatttaaaagattattgcccattgttgttaaaagtgtaggaaaggcctggcgcggtggctcacgcctgtaatcccagcactgtgggaggccgaggcaggtggatcacg

SEQ ID NO: 117020 - DNA, 677 bp, Homo sapiens
aactgacagaggcaaatgttttaattctgttacacctctaaataaactgcttcatgaactgatatattagttatggtccagatgaaccctggaaatcggggtaactgacatcactccccaaaactcctgtcacatgacatcagcatctggtgctaagggaagaatgtgtaaccacagcgcctcctgcagcctacacagaggccctgctttagagaggaaggctaccagctccggcctccttactcagaaaacaaaaccacatttttgaatggaggaatttaaccaaattcggttgttattattgtcactattttaggtaggatattatttcttggaaataagagggctaaaaatgagacaaatgacattttgattttctatactagatctgtagtgaaaaattaagagtgaacagagccctggcaatgagaaaagtgactctcaggccttcctgacagtgcctctggtgaccactacatcaggcagccctagcccgtggcctcttctggctgtagctgtgtgaccttagacaagtcccttcacactcggggcctcagcctgtttataaaacagaagtgttcacatgtaagaactaagctctctcctggctctaaaatcctgtgaatctttacaaggcagtgaagtattccatggttctgttctgattctattctcta

SEQ ID NO: 117021 - DNA, 690 bp, Homo sapiens
tgcatgttgatgataacttatctcttgttttcatacttgaaagtaattgtctagatatgaaatctttggctcactttttctttaacttaaatgtattactccaccttctgcaggaataaagaattgtttctgttataatcatttggtctttttatctggatgtacaatagatattttctttttctttataataatttactagaatatgtcttagtattgatcattctgagctgattttcccagattcggggtatgttctttcattatagagtagcaaactttgtttttcagaaaagttttattgaattatagttttttatattctgttctcttgctttggttttcttttttgtgggaactcctgttgtatgcatgttcgaggttcgtttcttgtttctaatatttgttgccttctcttgaattattttttttcttctaaaagtttgttttcattgtctgtttctcttacattatgtattgtgtatattgactcttatgtttctccttagtcgtcttcttaaaatgattcattttatagctaattccttcctgagttccatcagctcatttccgagtgtttgtcactctgatttatgctattctttcgtatcttgtagcaatattaaaatgtttttaaaatgtgaaataatagataatttcatctttgtgtgtatgatttcttaccatgat

SEQ ID NO: 117022 - DNA, 393 bp, Homo sapiens
aatgattgtgggtcaggggccaatggcgatgtgacattcagcctatagaaccatagggcagaggtgacagttgctggaatagatgggagctcagtttaaggaagatcgccaagccagacatcgctgttagatggatgtaatggggaataaactgccattgtcaactcaaaagtaaccagggccaggtgtgggggctcacacctgtaatcccaatactttgggaggccgaggcaggtggattacttgaggtgaggagtttgagaccagcctagccaacatggtgaaacaccgtctctcttaaaaatacaaaaatcagccggacatggtggcaggcacttgtagtcccagctactcagaaggctgaggcaggagaatcatttgaacccaaaaggc

SEQ ID NO: 117023 - DNA, 296 bp, Homo sapiens
tcttctccaacaccaagtttctctcaattttctttttttctcttctttcactctaacacagggaaagaagtctccccactcctttgcaaggtgaatacctttacttcttcagttagttcttctctcttgcatctttaatgtctccaacttcaatagctcctttctccaaccttagacatgtctagttctacactatgtccacccccatacacatatgttcacgcgcacacacatacaaacacacacacacatgcacacacagaagcctgccttcactaatcctacttcccactgat

SEQ ID NO: 117024 - DNA, 180 bp, Homo sapiens
tgaggtaggtgagatcatgagccactcagccataatgccaccatcggggaataatcaaagcacatctcaaatggaattctgcttctgtatttattaaccaaatgattattagtaaagcagaccacaaattgttaatacaacctgttctgaattctcatcactctctacatttctgaggtt

SEQ ID NO: 117025 - DNA, 283 bp, Homo sapiens
cggggaatgtttcaaaggtgcttgataccaaagcataggtcctaagtcctcatcatcctgtatgaagcatgcacatgatgccacatggtagctgaggccatgctctgaaggatgtctacatgaaacaaccatgaaaaatcatataatatgggttacattcccaacccacatcttctcaaattcactagaaggtgtccattttgttgacaaaactgaatttgaagtatatgcaataaatgacaccaacattatttttatggctaaaagtacttgaagagcacgc

SEQ ID NO: 117026 - DNA, 383 bp, Homo sapiens
tcctgacgtgggtggcggatgggtgcttgacgtggccgagaagtctcgggggttgggggtggtcagagccgcctgcaggctgaggagatgctgccaggtagccccagttcttcatctgacactgtggggatgtgccgcttgtgtttctcagtgttgtgttctgaaacgtcaaactggcggaaaagttgaaggcagcacaaggggcgtccattgtccacttcctgctcatggggttccccagacttgagcgtgtcccacggcggctttccctctctccattctaaccgtttaaaaataagtcgcagacgtcaagaccagaaagcctcataactctatacagcctgagagaaattccatgatggccactggtgtttgtgcccctg

SEQ ID NO: 117027 - DNA, 499 bp, Homo sapiens
tcccttttctggcccaggacaggattataataaaactgatgcaaacaccatccttgaaattaataccagatagccctttaaatgggacagccagaaaatgaagcctaagaaacttcagttactaaacttcctccatgaggcccaaggcagactaaccagctgagactaacatggattggaatgtttataagtaagatttttagttattctcatgaaccttactgtgggccggtcagttagcaagtcctatataatgcttgttaaagatctcaaactaagattttcagggctcacagggattaagtggaatggaagaatggagagaagccatttctcccggctgagtccatcatgctcaggagacttttaccctcttcacttcctgacccatcaatgatgttcccttcttggctttagctctaacctgtctccagagcatctgatccattacttccaagtgtttatttaatggggcctcccctatgggcaactttaagac

SEQ ID NO: 117028 - DNA, 545 bp, Homo sapiens
gatgtctgaaggaagtttataagaataacttacactctaccttatatgagatgaagaatcacacagtgtttctccttcttatggtcctaagatattcgaatttgcactattcttaaaatgaggcatatatagaaaatgtaagcacataatttctttagtattaggaagttctgtttatgatttgtgtctatatgtgtatatacttatgtacatgaatgtacagataaccttccatgtgactcagaacacatctcatggggaacacaattagtcctcactataaatttatgaattaagttaccattacacaaggctggggaaatagagaaaagaattaaaataactggtttttaaagaacaacctggtcaaattagtaaaatcttagcccttgacagccaacgtggttgtggtcaaggaaaatcataaaatgacctgaacacttcaaacttaaccttgggaaaaggctgaagagcagccatttgttaagctgaagctactaattctgcaaatcaaatatataaatatcaccctaccatgcccctgg

SEQ ID NO: 117029 - DNA, 671 bp, Homo sapiens
gacctttgccagctgtctgtggatcagaagagatgatatattgatgcacatggaagtggcttgatttgtttgtggtttgcttgaaccaaaggaaggctgagggagaggctggcttcctcactttaatcttgatgggttattattaagcaactctgtgcagtgagctgctgcaggctttggcaatacagtggggaattttcctgtcttcagaggaggttatcatctagcgatgggggtgacaagtccaagaatgcaagctcctcacgcctgtaatcccagaactttgggaggccgaggtaggtggatcacgaggtcaggagatcgagaccatcctggctaacacaatgaagccctgtctctactaaaattacaaaaaaaaaaaaaaaaaaaaaaaaaaaaactttttgggggccctgggcccagaaaaagcttaaaaccacaatccggtagggacacgggggccacaagaggaaaggaaaatgtgcgcaaagaggtgtccaaggggaaaccggggccaagaaaaaggggaagggaattcaccacaggtaaaaacgcccgcggggacacacgagcggtcggaacaaagccccaagaggggatcgaggggctcacgcgcgggcactaataccagagggggttcaaaggagagcgcgagatagaaattgaggcca

SEQ ID NO: 117030 - DNA, 519 bp, Homo sapiens
gacctttgccagctgtctgtggatcagaagagatgatatattgatgcacatggaagtggcttgatttgtttgtggtttgcttgaaccaaaggaaggctgagggagaggctggcttcctcactttaatcttgatgggttattattaagcaactctgtgcagtgagctgctgcaggctttggcaatacagtggggaattttcctgtcttcagaggaggttatcatctagcgatgggggtgacaagtccaagaatgcaagctcctcacgcctgtaatcccagaactttgggaggccgaggtaggtggatcacgaggtcaggagatcgagaccatcctggctaacacaatgaagccctgtctctactaaaattacaaaaaaattagcccggtgtggtggcgggcgcctgtagtcccagctacttgggaggctgaggcaggaaaatggcgtgaacccgggaggcggagcttgcagtgagccaagatcacgccactgcactccagcctgggcgacggagcgagac

SEQ ID NO: 117031 - DNA, 398 bp, Homo sapiens
ataataaggttttcagacctctcatcttccagttcattcgcctgtgaactgagacagtgttcaaaacaccaaagtgaaagaattcaaatggtgacaaataactcaagggcactacaaacccctcctttgggttggtgggaagtgggggagcagggagcactggggaagggtacagggtccccagagaccaggcctgttctggaaccttccacggacacccccccaccaacagggcaacacaagtgagccccccactgtgggccaactcggggcaaggactcccctgatcctttggataatcgttcaggtaaattcccaaaggtcatggctcacagatattgggaccccagctctctacctgtgaagatggggtctgcaggagccaggcagaggggagc

SEQ ID NO: 117032 - DNA, 233 bp, Homo sapiens
accacctcctccctttgattcctacagtcctacccaaggagtggtagctgcttcctacagcttcctgagtaactctgtgttaactcagtcttttccattctctagcacctgttgaataagatcttcgtattaaataatatgtcgcattacatagtattgcttccattttcctaatagcccctgactgattaatttccccaagccctagaatcctggcagaggtgtggcgagag

SEQ ID NO: 117033 - DNA, 338 bp, Homo sapiens
gaaaacagaggtttctcctagccctagcattggagactgacataccctcaatggatgtcaggggagacccagtcactaaggatgactctcctgcccctaacccattagcatgtcccaaaaagaaacaggagaccaaagacctttgccttgtataacagtcatgctgcctcggaaaagctgggaagtcccctcccagtgaccccatgttctatcctaatgtgaacgatgttcatgctttttcatcaaatcttttaaatagaaagggtgcagagaaagtcaactgtaatcacttggtgcagagtgcagggagagagagcatttcatattcaagaagaaat

SEQ ID NO: 117034 - DNA, 547 bp, Homo sapiens
cacggtggctcacacctgtaatcccagcactttgggaggctgaggcgggcggatcacaaggtcaggagatcgagaccatcctggctagcacagtgaaaccccatctctaccaaaaatacaaaaaaaaattagccaggcgtggtggcaggcacctatagtcccagctactcgggaggctgaggcaggagaatggtgtgaacccaggaggtggaacttgcagtgagccaagaccgtgccattgcactccagccagggcgacagagcgagactccgtctcaaaacgaaacaaaacaaaaattccattacttatatatgctaatgacatgtatagtatttatagttacattattctttacattaaaaacccagaaactacccaaaagctcatgagcagaacaatgaattgtgttaaaaacaatacaacagaatactatgcagcagtgaaaatgaataacctacagttgaactcatcaatacagatgtatctgaaaaagtgttgctaaactaaacaagtcagccaggtttggggctcatgcctgtaatccca

SEQ ID NO: 117035 - DNA, 142 bp, Homo sapiens
cgtgaggcaggactcggcggtggcggaaaccttttgcatgagggcctcagtctgacacccaagcaggtttcccagcctgtgaggcatcatcgtacgggcacaggcccatgggtcagctggccctgcaggcccaagggctcag

SEQ ID NO: 117036 - DNA, 254 bp, Homo sapiens
gaagataatgcctgtgccacagtggagactaattggagggggcaagaaatgcaggcagtggagccgaagtgagagctttggaacagttcaggtgccaggtgatgcaggacacactgggaccactgcagaggaggtggagttagttgttccagaggcttcatgacatctacctgacactaggtgcagagggaagggacatgaagaacaaagatgatttgggttttgaacatctaatggttggaaggctatgttat

SEQ ID NO: 117037 - DNA, 254 bp, Homo sapiens
atttagcatcacattttttcccttgctggcactcaaaaaatattgactgactggttgatagatgagtggcatacctttcaaccatgccaagatgttgagtggccttgacatctgtccattgtcaagctgcctgctgctctcaaggtctgcagcccacgttttgtcaataatcttgcagccctgctcattttaggtcaatgtttggtgatgcattgcagatctgtattccattactgtgctgttgtccataaaaa

SEQ ID NO: 117038 - DNA, 321 bp, Homo sapiens
ctaaaggtacctgtgcagaatttgtctcttccaccaccagaacaggcgtgcctaccctacgacagcatcagggaaaatgaacccgagaagggagacagcttggaaaactcaagaagtttaatggataggaccggagatgactgagttaggaccggttagttagctgtatacatgcagggtgaaactatatagtttcggttgtcctggaagattgaacgtctgttgcctgggtttcttggcccctgcctggccttgcatacttggggtgaccctgaagcaggacccaaatgatccactggccagagatggaagtacacagtc

SEQ ID NO: 117039 - DNA, 169 bp, Homo sapiens
gagtgggtgagcagacccgttcagaaccagtgtgctttggggcaagggttaaggagagtgccaaacagctcagccagttccacgtggacatgtttattcatataatttttacagctttaacaagcaataaaaaaagacctgaaagtacttggatgtgtacagaaccacg

SEQ ID NO: 117040 - DNA, 309 bp, Homo sapiens
ggttcctcaccacagcaaggaggaaaacacagaactttgttctctcctctctggataatggtggccaggatagaagttcatgggcaatgagaagcctgggccctcctgcacaaggttggcatcaagcaaaattgcattagctaataaaatagtatccttgtgcaagttatttcaccccgctgagcctcagggccctcctcattaaactgggaaaataatactacctaccctcctgatgcccttatttattcctgtcttcaggtcctttttatttacctcttctgcctttttttttttttttgaaacagg

SEQ ID NO: 117041 - DNA, 151 bp, Homo sapiens
ttcttcatgtctcagtgcctctgatctagtgaacacactgtcctgaatgtgaaagaacttgctaaatttctggtttatttttaggtggctagaacagatttataagacttccttacccatgtctgctgaagtttgaattcttagtagtagg

SEQ ID NO: 117042 - DNA, 654 bp, Homo sapiens
gtgcacagggctccactgcagttaggagccggtgagtccgggtggatgaggtcagagcgccccatggtgtggtgctgcctctttgtccgttcgcagttcttccagggatcaccccagaagaaaacagctgatacttacatctttgctccaggatctgctttaggggaactccaaactaacagcaggtaaacataaaagaaagaagacttactaaagacagacgactggccaggcgctgtggctcatgcctgtaatctcagcactttaggaggccaaggcgagtggatcacctgaggtcaggagttcgagaccagcctggccaacatggtgaaaccccctctccactaaaaatacaaaaatcagccagtgtggtggcacatgcctgtaatcccagctactcaggaggccgaggcaggctaatggcttgaacctggcccagtggaggtcccagtgagctgagattatgccgctgcagtccagcctgggcaacaccagcgggactccaacctcataacataacgtccctacagacatacctaaacactgtcctcaccacatagataccaggccaacgtgccgctgggctcctgcctatcaatcccaagactttctgacggctgacgccacgacggatcggctcgcagcccacgaagc

SEQ ID NO: 117043 - DNA, 256 bp, Homo sapiens
tgaggccatccatgtgcagggaaacgttttatgccagagagtaatatttttggaaagggaggaactcatatgattctgctgagcagcttgttcttcctacatttggctctgtggggtagtgtgtatgtctggaagtggcagatacatgtttcccactacctcggggtaaatgtccacaaaaaaataacactcactgtttgggaaaattaaaaaataagcctagggatgattaggttcctctgatccaagtctttgg

SEQ ID NO: 117044 - DNA, 177 bp, Homo sapiens
ctacaggttctaccaaactgttctccagcatggttcttccgatagatttacactttgactagcaggggatgcaagttcctactgccctacatggtcatcagtacttcatattctcagactttgcatttattattattattattattattaatgcaaagtctgagaatatgaagtact

SEQ ID NO: 117045 - DNA, 754 bp, Homo sapiens
acggggtttcaccatgttggctaggctggtcttgaacttctgacctcaggtgattcacctgcctaggcctcccaaagtggtgggattacaggtgtgaaccaccgcacccagccttattgttctttaaactgctttctccaagtagccctccttgctgacatgcctctctctctttttttttaatattccagtttatcttttgttagtaagaccctatatttaagggtaagtgatgcatggagtttgcaaagtctgtaagttcagagcctctgatgttggactccctgggttcaaatttggactctaaccttgaccagctatgtggtcttgggaaatttttttaatctctgtaagcatcgtttttctcatatgcaaagtcaagataacagcacaacctcatagcattgttgtgaagattgagtgatgagagacatgtaaaatgctaggcacagtgcccagcaagaagtaagcactcagtaaatgtcagctgttgttggtacctgataaaagataatacctgcctagtgatcctaaaaaaaacacaatagatactcatcattatgcacaacataaagaacataattaagaacttggcaactgaaaaaatatagcatacggtttcatacctattgtatgatcctaagaacaaaccatttgttcttttccttttagttagtattcaaaattaagggaaaattgcttacaattgaaatctgggcattataaaaatgggtcacagtacaaagccttccac

SEQ ID NO: 117046 - DNA, 1542 bp, Homo sapiens
cgtgaatttgctgatctgagttctttggcttttcatacgtggttgtcctattgtactgcaggagctttgtgcttttactaagtttactactagaaaagccttgctaaaattctagtgtactctcagctacttctcttatagctgtgtcttggtgactaaagagaattcttcttccatgtagccagagagattaacagatgtccgagctgaaccccaaagcatccagccgtctttcccgctttgaccctgtaacctctcccctggttggcagtgtgcctgtgttgacagttctcctggttcagccaaaggtgaaagataattgcttgtggagtagcggctgggatggtatgtgtttttgtagcaagcatccccacccccgtctccaggcaaagccttgaatctggtgcatatttcaaagcatgtgttaaactttatgtgatactgattaaaatggagggctccagggtgaattggcagagtcccacaactgcatctgccaaatgacatacagagaaaatgtcttgctacaaatggaagggctgaaacctgtctatcttagcaatatgtaagcctgcaaaaggaaaggtgactccggccatgtgtatatacacagcctgtggaacatgcaagattctttagcaactcctttgttcctatggcattttaatgcaaaagaaagtctttttattttccttccccttcaaacaacaataacaacaaaacccatatggaaataatagtattacatgtcagtgctccattcccattgaacatttgtttaaaaatctaacttggaccaaaaatatggaggtggaagaattatctatcttctgaaactagatttgtgagtcactgagataagatctgtgaagttcactcttttattttattttttatttttttgagacagagtcttgctctgttacccacgctgtagtacagtggcaccatctcggctcactgcaacctccgcctcccagggtcaagcgattctcctgcctcagtttcctgagtagctgggattacaggcgcccaccaccatgtctggctaattttagtatttttagtagagatgggattcccatgttggccaggctggtctcaagctcctgacctcaagtgatctgcctgtgaatgcctcttccaaagtgctgggattacaagtgtgagctaccatgccccaccagttcattcttgaaggaagaaagctcttttcaaagcagaaaatttgtatccagagcttttagattcaaggtctccttaggacattcttttagaaagaaatatgcatttatatcataggcatagatcaacacttcctcaaaagcaatgtagacaacattagtatctcatgtcacatttcctcaccctgcttttatgacaagttaggatagagaaaccatcagttccttaaagggatttggatatatttttttaggaaagcagaaaggataagaaatttagaggagtaaggatgagtggcacaaggaaaaaaaaaaagaaaaaaggaagaaaagtttgtggaaagaggaaggtaagtag

SEQ ID NO: 117047 - DNA, 999 bp, Homo sapiens
tgagcctttctttggcccatatgttgctctgaaatttttggactgtatcatattagcaaagtgattcttcgccatcttaattcatctgctctgaaatctagaatcaggaaactctaaaaatgcatagagaagcaaatatagatactgtaaaatctacattctaactacatgccctttagttccagaaaagttcttcttcacctatttaatctttctccagatgcaattttaaaaaattcttacattcactcccctaataattattgagcaatttctatggacaaggctctatttcaggcattcagtaaataaacagacacatcacataccctcaaatagcttatattctggtgatggggagaatattcaataataaattaatatgtcatgtggtaaaaagtattatgaagataaagcaggaaagggggctagcaagtgacaggtggtgtaataaggatatgcgttattattatataataagaagaatacgaagtaaactccatgatatttgggacttattattcacctccattgcactaacactgataaaaataatggcacatagtaagcacaaggtaaatattgtgtgaatattttgagaatgaatgaatgaatgaatgaatgaatgagtgatggtgaggaagagaacccagttaggaggttacaataattcaggtgatagccaaatgatggctaaacacaggaagaaactttgcaaatcatgagaggagaccatagtctggatacatttaaaagatagaactggctgggtgcgggggttcatgcctgtaatcccagcactttgggaggctgaggcaagcagatcacatgaggtcaggagttcgagaccagcatggccaacatggtgaaaccccctctctactaaaagtacaaaaattagccaggtgtggtggcagacacctgtaatgccagctactcaggaggatgaggcgggagaattgcttaaacctgggaggcggaggttgctgtgagccgaga

SEQ ID NO: 117048 - DNA, 197 bp, Homo sapiens
tgggaggactggatgccttcaggaaactagggaagacctgtctctgcaagaaggcaggaagtgtagcttatgggaggctgaggagtttggagtttctccttggggaaggtgggagccatggaggctgaagacagttgtccaactcagggcatacaaatgagaggaactcaactgctgctctgcaaggaacccacgat

SEQ ID NO: 117049 - DNA, 178 bp, Homo sapiens
gcccatgggaagagtccaccttgcctcagagcctgagggtcagaggaattctgattgctttcctgagacccctgggaaaggtttgagcagtgcagtcagggagccagactttgtcaggcctctgggaagacagagagcaacaggagggaccaaggcccaaacccggaagtaaggctgg

SEQ ID NO: 117050 - DNA, 264 bp, Homo sapiens
aagaagtcataataggactaaaatattaaaatgaggaaaatgaattttccaggtaagatggcatgatgtgtggtggcaagcattctggacattaataagatctcagctttatttcttacttcctacatagcttttagataagttaataaatcttactggactttctcaaactctagttttctccactgtaaaatgagtgcctaacaaaattgtaaggactaaatgagatactatacatgaaagtttctagcataatgtttggta

SEQ ID NO: 117051 - DNA, 424 bp, Homo sapiens
cacattttcccatagtgttcttaaccagggatagtaacattttctgcattccccccagccctgcaaataatgtctggaaatttgtggggccatttttgcttggcacacagacttgaggtagataccactgacatttagtagttgggagccaaggatgctaaatgctctgcagtgtgaatgacactccagcacatcaaagattatcctacccaaaatacagatagccccacttagagacaagtgcattattaaaatgctgatttttcaggattactagaataattatccatttttgtaataggcctacctggaccatgcaaagatattaaagcaagtgacattaccaagagttcttgtaagttaacttgggaacctccagaatttgatggtggaaccccaattcttcattatgtcctggagcgca

SEQ ID NO: 117052 - DNA, 268 bp, Homo sapiens
tctctcagggatcctgccgatcattgccctggctgtgctaagctgttgcccacttatacttcatggacattgctagtcttacacgaatatttgtgctaatagactctcactggctgcctggagcatgcatttcccagcctgctgttgtccagtgaggtgttcgttattttgaccctagtcaggacccagaggaaatagtctataggataggaagtatttcttctctcaaacaatagacatgctttctctactgtctgttctagtttct

SEQ ID NO: 117053 - DNA, 299 bp, Homo sapiens
gttacataaaatgtctttccagtagacatatatctggacataaaactattatcagtagtttgggttaacctacgtggtatgcaggtttctcaattatacatacaacaggagccagtgagaaagacccgccccagcgatggctccatgaagagatggggactctgagttccagacacaatcgcaatctgctagagcccactttttctagatgacagatctgaagtctggtcctcctattcagaagccaatcccaggactgaggtctttaggaaccacagcagcaatgaaatcacccactt

SEQ ID NO: 117054 - DNA, 352 bp, Homo sapiens
atgcccgaataatttttgcatttttagtagagatggagttttgtcacattggccagagtggtcttgaacttgtgacctcaagtaatctgcctgcttcagtctcccgaagtgctgggattacatgtgtgagcctggcctgaatggcatttttaatgtgatggtttcagagtccttaacgaagtaagatataatctcccattctttattacatgtctatgattgtgtcaagaagtcattattgccattttttttactttcatggtaaaaatagccatgaattataagctttttttttttctgccagcctaaattgttacttagtgaagatgagagtacaactgatggactttga

SEQ ID NO: 117055 - DNA, 655 bp, Homo sapiens
agcagtcttgtcacaaaatattaaacctggacctgatcaagcatctggactggcttatggatatagagaaaatgtaggggatagatgagcacgggaaatgtctccgtggggcaaaattcacgaaattcagattgttggacactctccaggacaaaaggtctagattcttcaaaaacaacaacatcgaaaaaaaaaaactgccagaaagaaaaaatacagagggagaaggacacagaacacatttatgagtcttttcaccctcatttcgttgaagattttattggccgaagaaccctcagtaggcacgaaattcattctcacaagcagagagatgcattatgctccatttattgctcatcctaaattataaacatttccagtgaatgtaaaggaagatatgattgaaaaggactctgtgaagacaggatgtttctgtacagtccttgtatctgctcacctattccaaactttccagagattttaccagaggtttaagatattctcctgagggtttgctgtagagagatttttcttaactaaggagtgcaagtagcaagcaatagcccacccagttggagacaaaaaagaagggtgtcagtgttcccactgttaaaaaacaaaaaaaaatcaccctggacacctctgagaattatac

SEQ ID NO: 117056 - DNA, 180 bp, Homo sapiens
tagtagcactgctttaatttcttaaactcagaattgacttgtccatacatccgtttatatttaatttccctgaagctctgaaaatagggcaaaagaacatagtcttggtccatcagaggtcttcttttttgtctttttggcctatcctttgggctcagtctaaatctttcccccaggatt

SEQ ID NO: 117057 - DNA, 240 bp, Homo sapiens
taacttctctgaaatcgtccgccccatgtgccttccctaatttatctgacagatgcaacactgtctcccaccaccgtaagtcttctctcccaaggagaggtaggcactctctaagacctaagttctaaggtacatataataatgcattctattttatttttaaatttattattattactattcttgaaacagggtctcatcctgtcgcccaggctagagtgcagtggtgcaatcacagct

SEQ ID NO: 117058 - DNA, 851 bp, Homo sapiens
cacccgccaccacgcctggataatttctgtatttttagtagagacggggtttcattatgttggctggtctcaaactcctgacctcaggtgatccgccttccttggcctcccaaagtgctgggattacaggcgtgagccactgtgcccggccgtaagaattctttatatgttgtagatttagccttttccctggcacacttttgcaagtattgctaaaagatttcttttatgttttcttctacacatttggtagcttttcatctaaagttaaatcttcgatccatttcaagtacattttgtattcagagtgaggcacacgcctgggttcctttctgttctatgtggatatctaagcttggtacctttgttttgattaaataaatacaaggttttttttctggactttttgttctcttccattgatctgtgtttctgtctttatcccagtaccatcctgccttgataagaggtttaaagtaaatctgaaattaggtaatataagtcttgcaatcttcttactttacaaaaaaaaaaacaaaacaaacaccaaaaaaacactttttgggccccctggccccctaaaaacttttctaacaccttctcttttggccgcggggccccagtagtgtcagttcaccttggcccacaagcgtgtgtcctccaaggaaaacacccgggcactggaccacagtggttgtggtagttctcccaccttataaaaaaacccccggggggagacaccagaagttgttttttgacacaatcccccgatgggggtttccaggaggccactacaccgggcttctcatccacacacgggattcccaagacggagtccgatttaatagcag

SEQ ID NO: 117059 - DNA, 410 bp, Homo sapiens
gtgaccagccgcagctttgtctcactgcacctgcagaattgggcagaaactcctcccagtctccatgatggtgctgttctagttagtatttgagtcctgtttcactgtcctgagatgagctgcttgttgctgttgtgccttgggagagatggaggtgcaaaggtgggcagttgagggtcttaggacctaatgacccagccaagaagtgacattttggtcaactcccactctccaggccagctggtgtcccagtgatgccagcatcccgggatggtattcatttcatctgccttgaaatagtaactgcaggtgtttgagaagcgcggggaggttggtgtgggctcagggaggttgtgtctcttccacgtgcggtctgtcatggctgagagcaggccctgccccacttcttg

SEQ ID NO: 117060 - DNA, 329 bp, Homo sapiens
cacacagtgagcttacgttacacgtgaccttctcgctccatccaggggtcatcaataacaataaacctaagcctaacccagcatgcttcaactgttttcaaagaaagagtgacaaagcttcttccatactttacatatggaagttctcacaatatttctgaacaaaatcacagaataaaaaactgccatatttgtgagctaggaaaaaaaaatacctgggacatttttgttttttaagagacaaggcctcactctgtcacccaggctggagtgcagtggcatgatcatagcttatggcagtttctaactcttgggctcagatgatccct

SEQ ID NO: 117061 - DNA, 803 bp, Homo sapiens
gtggaatgaggggattggccaaggaagacacaagccccaccttttatgtgaagagcctagggactgtgattcaggttagcaagggtggcagagactccaagcctcatcctccctagcctccacaagggaatgttgaggtccctctgattgttaaatctcaccaattacagagattctcttctcttctcttctcttcctccttccgtccctccctctctccctctctctctctctttctttctttcattctctttctttttggattcaagcccttctcattagaacattttttaaaagcttaattttagccatttcaaaggtgactttttgatcaaaacttggcagaactagctcgggcccacagggcaatgtgaataggttgggagtgctgtctctgccctgctcggtccctgtcttcatgccctactccatgctttgttccttcattgacagctaagaggcagctcatgcagaaaggcaagaaacaaatgacacccctcctcctcttctaccttctaccttctcattctgtagtgtggccagttataatccctgaatgaataaagtagtttggacagatgggtgggaaaaaatagcaaacagcccaagtgccgaggctctgataatgtcagccatccagaaagagtccaaaagggaagaagggagaaaagtctcccccaaaatgaatgggacagagtgtgaagtggatctgtctcgaacagagactgccccctccattgccccacgatagaacagagaagaggatagaaacaatagtaaaagggaagttacttgtcttttgg

SEQ ID NO: 117062 - DNA, 740 bp, Homo sapiens
gtggaatgaggggattggccaaggaagacacaagccccaccttttatgtgaagagcctagggactgtgattcaggttagcaagggtggcagagactccaagcctcatcctccctagcctccacaagggaatgttgaggtccctctgattgttaaatctcaccaattacagagattctcttctcttctcttctcttcctccttccgtccctccctctctccctctctctctctctttctttctttcattctctttctttttggattcaagcccttctcattagaacattttttaaaagcttaattttagccatttcaaaggtgactttttgatcaaaacttggcagaactagctcgggcccacagggcaatgtgaataggttgggagtgctgtctctgccctgctcggtccctgtcttcatgccctactccatgctttgttccttcattgacagctaagaggcagctcatgcagaaaggcaagaaacaaatgacacccctcctcctcttctaccttctaccttctcattctgtagtgtggccagttataatccctgaatgaataaagtagtttggacagatgggtgggaaaaaatagcaaacagcccacgtagctagcaaggtatgatccatccatagaaagagcacatcctctcagaaatgaaagaaaagtttcttttttatgttcctttattttttttgagatggggtctcgcgctctaggtgctccggggcgaattgt

SEQ ID NO: 117063 - DNA, 514 bp, Homo sapiens
tcttgaactcctgacctcaggtgatccacctagctcggcctcccaaagtgctgggatcacaggcatgagccactgggcctggcctacaacttcccagtatttaaagacttctgtgatgagatcagtggtaatagatggaatttttagtattggataatgaaatacataagcattttgaagagctcacaactgaggaaacaaatattaacttaccaatgcatgatgtacagaattatgcatgggtaaggatccattcagagtgaaggcagacatggattttaatgtaacagagtacagaaagttcattgatagggttttagattttacattggagctaacctttaggaaactaccatctaggctgggtgtggtagctcatgcccgggatctcagcaccttgggaggccgaggtgggaggattgctggaggccaggatttcaaaaccagcctgggcagcaagcaaggctccatctctgcaagaaaaaaagaaaagaaaagaaaaagaaagctacaa

SEQ ID NO: 117064 - DNA, 237 bp, Homo sapiens
tacagggtacagcaaaagcagtgctcagaggaaagtttatagcaataaatggctacatgaagaaagtacaaatatttcaaataagcaacataacaacgcacttgaaggaactagaaaaatatgaacaaaacccaaaattagcagaaagagaaaaaataataaagataagagcagaattaaacaaaatagagactcaaaaaatacaaagatcaacaaaatgaaaatttggttttttga

SEQ ID NO: 117065 - DNA, 646 bp, Homo sapiens
ccaagcatacatctctaattttattattttggtcttttcgttggattttccctttcttctttttttcgggttatcgctcagttttgagcagaggtttacattttttaaaaatttgctttccagcccgccttgatcttctaagtgcgagttcatcgtctgagaaaaaaaaaaatctctggttggcgtttttgtttcttttcttttctttcttttctttccttttttttttttttaatttttttcaagggggaggagattttccacaagaaaaggttgttttcatgtttgggattcaggaaagcatccaacggagtggaagcagcatgaaggaagagccgctgggcagcggcatgaacgcggtgcggacgtggatgcagggcgccggggtgctggacgccaacacggcggcgcagagcggggtgggtctggcccgggctcactttgagaagcagccgccttccaatctgcggaaatccaacttcttccacttcgtcctggccctctacgacagacagggccagcccgtggagatcgagaggacagcgtttgtggggttcgtggagaaggaaaaagaagccaacagcgaaaagaccaataacggaattcactaccggcttcagcttctctacagcaatggtgaggcccg

SEQ ID NO: 117066 - DNA, 421 bp, Homo sapiens
aggctcacaaggcagctgagcacaaagcttccactttgcagcggaagaaagtgaggctcactttgggaaaagattgggggccactcacacactctggcccaggctgcaggaccaggtagggctactataccaggtgtcccagccaccatcggacccatcgtgcctggaaaccatgtgtggcctattccttccagcccctttcttgacagagcctctacttatccatttgcaatcaagccagctcaatcgacatcagagtaaagaggcccttgtttccctcttcaaatgaggaaactgaggttcaaagaggaggcagggactgcctccagtcacatggcatattaatggtagagccaggactagaaccccagactcctggcttgttccacggccccaagctgtctatcctggcactgtattc

SEQ ID NO: 117067 - DNA, 607 bp, Homo sapiens
ttaagatcttcatgacagagggtagttgtgcaatataaaaccaggtgcctgctaaaggtaggctctcagtctcctacagaaacatttgaatagtgtgctatcattttggctatttacattttgaagcaatggctctctactccccaagcgttggactacagcacttctgcttgccctctcctggtggctggagttttctcttgactcctacctcctgccactgaggtacagcccacaatacagggtgaacagccaggaggtcacatctcacatgaaccccaattgccacagcagcactccagcgccacatcagagagtgaagcctgagctgcaggaggagagcctgcaggcctcctgggtaggaatgcaccttcacaataatgagaacgggaacagttttaggctcagtttctatttataatggtgacatggaaaacattctgctggatttccagcatgagtctgtaaagagacagctccaagagttccattgtgacagcccacctcattcacagacactgtgaaatgctaaaatggcttctgaaacagacactcaaagcattggagagaaaaacagctctcagtctcagaaagattataccgagag

SEQ ID NO: 117068 - DNA, 444 bp, Homo sapiens
ggggccaataggcaggggtggatgtggggcagcccaaaaaccaacacacagccaccgaccccatcagccatgatttatatccatgcctttcctggacaaaaaaccaaatcccactgccctgggcatcagcgggcagggcccacacaggcttcatagatgtctcctctccgggaagtggagggtgtgtttgtgcattcggagtagctggtgcctggtagaaaatcagtgcggttttggctttggcagagcagcccaggctccctttgcattcccacaaatcgaggcagctctgctgtgctactatcacagttttggcggctttgaccgcaggtcctcctgaggccgggagactgctggggcgttgtatatcagttgttgggggccgtgcttccccagggcagatgcatgcaggggctctggggcagagtgatcgtgggttcgatg

SEQ ID NO: 117069 - DNA, 858 bp, Homo sapiens
ctgaattgtcagacgccagtaaggttgagacacggtatcctaatataactactagtcctctatgcacacaaaataatagggtatttagagggcgaatactctacaaatctagtaatgttcaaaatcaagtatggagttccgcattgggcattcaacgcccatgcctaccctatgcatatcaccccaaatttcagactataccatgatatcgaccatatgtgataatcttccaccaccccctgcgtgccttcagcactcaaggaattatacaacataattgtaccagggacggttttcatttgcgttagaaaaaagccacacaatccttccttgaaaggacccactcttctttttcactcatctcctctcactgatctctccgctggtggtggcggataaaaggcagagatgtggtcaactcccaaatgagattatgttctgggaattcagagattacagtctgaagaattcaagataaggtatgaacctccctaaagaaccttcatatcatcttgccctgcatgaaaatattagaagcctttgctctggtctttcatggtacttttaaaggatattatcatttacaaaatggaataccaatgacttttcacaagtggtctatcaactaagcatgtacttaagtaaatattttcagaggatttcattaacctctgagtgaatagttgaaaaaaaagaatgaaacagatataagtccatgtttttatttgtaaataaatgtattgccaaaattacatacaaataacaaataatgtctcgagtgacatgcaatgatcaaaatcctcaaaagaatacttttgtttagtagagatttgaacaaataaactacaatttaaggag

SEQ ID NO: 117070 - DNA, 684 bp, Homo sapiens
tctcgcccaggctagagtgcggtgatgtgatgtcggctcactgcaacctccacctccggggttcaagcagtcctcctgcctcagcctcccaagtatctgggattacaggtgcatgccaccacacccagctaatttttgtatttttagttgacacggggttttaccgtgttggccaggctggtcttgaactcctgacctcaagtgatctgcctgccttggcctcccgaagtgctgggattacaggcatgagccaccatgcccagctggtatgtgtactttgaaaaagctcccccttcagcccccagatccttcgtccacttttcttattgatctgtagcagctctttgtatatttgggacattcactttgtcatctgtgttgcaaatgtcttgctctcccaggatggttgtgataaacccacatgctcctccctctcgctgagagccactgctcgcaggggacagtgtgctcaggtgttggtgatgcaagagctggcgcagcagagcctcagagacccagctctgctgccaccaccatctctgtcagtcccacgggtgcgtggcctcgctggggtgtctcgtctgccattgttcctcagttccaccgagtgacacctcgttagtctccaccctctggcatcctcagttgtctctgccttcccattattcaagataagtggctgtt

SEQ ID NO: 117071 - DNA, 673 bp, Homo sapiens
gctccttcaccttccaccacgattgtgaggcctccccagccacgtggaactgagcctgaagttatggggcgtgtatacagtgagggaccgcaccgcccgccggcagctttcatctgtcaactcctagtgagaagaacactcacccaccaaaaaaaggaaaaattgaaaatggtgctgatttcgagcatccacagggtacttggagactggccccgggctgggccctgtctggagcgcagaggcctgcctgtcggcctgggatgactgcagaggctgctgtcaagaaagctgtgctccatggtcaggacaagcaagccgacctaggggcccaagagaccaagatgagctctccaggccccacagcccggccttgagcctcttctgctgaagccagcccgtgcgctgacagcggtatggggcctgcatgattggcgcaggaataagcaaagagaccctggacccaagggcgggtccagaaagcggccccttccccacgccgatttataacaaaggcccctgcagagcagggggaagaggtggcctttccctgccacgtgtccagtatcagttggacactgacagaaaaaagtgaccccatccccacaattaatttaaaatgagtcacagagcaggctgggcacggtggctcacacctgtaatcccagcactttgg

SEQ ID NO: 117072 - DNA, 484 bp, Homo sapiens
atggtccccctatcttctaaagccatcctctccaactgggagctcctggtgtcccccatgcctccatagtgggctgcagttcccaattgtgcgcattcctttctcaagctggcaggactctctcctttcaccatctaggtttagtctaagttccatgttcttcagcgtctctgggggatgtgtccttcctcttccttgcctggctgcaggttcacgtcaggtcccacctggattatttgtctcctcaatgacctttcagaaacaccctgccaccagtttgtcttacagagacaagtgccctttccaaagcacagactggagcatgccaatgtgatgctcactctcccttgagggttccccgaggctggcgaggggatgtcctggtgccttcaggtgactccaacatctctgtgtcatgccccagccttgctgtttgcatttgctcctgcttaccatcttccttctccttggtgcaagcccctcc

SEQ ID NO: 117073 - DNA, 417 bp, Homo sapiens
gtgatgctagtgttgctctatgggccatgcattgtactgggaggttttaaataattcttttagctgtgtgttttgctaatcaatgttagacattcttcatttatttcctgcaataatttatgaacatttcatttctccatcagccttacttgccttacttgccttcccatctttacattacagttatatttagtatttttattaatattaataaacactgctatagtacagtgactgtaaaattgtttactgcatagtaaagcagtgaactattataattcatttctcatacagccttttgtttttcctggagtttctaattgtatttattttcttcttacaatgtcttgctcataataattctgtttcccctctcccctcgataaagctcaccataacagctcatctataaagtcc

SEQ ID NO: 117074 - DNA, 249 bp, Homo sapiens
gcacgagactgggtgaaaatatttgcaaaagacacatctagtaaaggactgttatccaaaattacaaagaactcttaaaactcaacaataaaataatgcaacaataaaataaacaatgggcagaatagactgggcatagtgattgactcctgtaatcccagcacttcgggaggtcggggtaggaggattgcttgagcgcaggagtagttcaagatcagcctgggcaacagcaagacctcatctctacca

SEQ ID NO: 117075 - DNA, 94 bp, Homo sapiens
taatttttaagaatataaataattatatttgcctattaagtaatatatagccatatatatatatatatatatatatatatatatatatatatga

SEQ ID NO: 117076 - DNA, 772 bp, Homo sapiens
gacagccggcaagaacgaggacacttcacagggctgggctgccgaggaatagatgagagactaaatctgatgagaatcaccaaccagtttgatgacttggagaacagtcacttcctctttctgggctacagttttctcatcagtaactgaagagcttgcagtaccttcaacattccttcagagctgctctgtgagaagacaaggagaaaatggtccctactaggatactcacctctgtctcagggagacactcaagcatttattcaaccaagaaagagaattagttccagtacagacagccagcatgcagtgagcactcagcgatggccaagtatgggagaagccatgctggaatgaacatgtgggaccattttgtgcagtttctcagaggaagataacaaccatcttcaatggcacatggcagttgccaaattgccatgaagcaatatctaaagccacctcatgctcaggagaaaacgctcaccttcccctcctggctccccgtgctctacacgttcagagaaacttctctagtaatgaactcaggaactggtcactgagagtatagtctctatggacagcttcggagccatggagtgaagccgagcaaatccatggaccactgccctgcccccggtctatctcgctagactagggacaggacttgggtgatgcaggaacagagaatggcctgaggaggacacagaccagaccagagaggaaggaagatgagaggaggatgcgggaaaggggcttacatcaatctccagaa

SEQ ID NO: 117077 - DNA, 643 bp, Homo sapiens
gctctgtgttgtaaacactgaactcagctcagtcctgtaaacaggactaccttgtgaaacagaaagagctgtgttaattttactttcattaatatgaaggatagtatggaaagagcaagaagcatttataaaaggcctctttggcaatggcctttgatgtctacgtctgaacaaaatgtcctgatgtgaaaataaaatggcaatattaaaacagcttttctgtgaggtcaggtcctattacttgggaatgtttaaagaaaaagcataaaccaggcaataataggcttagaaattctgcagtgtggtcagaataagatggagtttggtggaattagtttatgttgagtatgcagtgccagattagatagcaatgttaaccaaatccacagatttttcctggggtgaaaatatctcatttcagagaaaccttatgttaggcaagtatgttcacagaggtagagttggggggtgggggttgttgtttttttaatttttttattgtcttcttttccatctgtttcagagaaaccaggtattttcaagcactctttaatatgaaactgttaaaaagcaaaattatacactacattttgggctgtgggttgctcaaaggtagatggaataataagcttcccattcagaa

SEQ ID NO: 117078 - DNA, 213 bp, Homo sapiens
tcaagaacaaaaagaaaagttcagtcatcctatttatcagggaaatgtaatcactatttcagaatcttcccatgaagaaatacaaagtccagaacattttactggcaagtgctaccacacacttaaatgacaattaattttaatctgacacagtctattccagagaacagaaaaataggaacactctcccagtcactgtatgaggttagcaaa

SEQ ID NO: 117079 - DNA, 779 bp, Homo sapiens
atggtaacagtacatccagagactggtagtgcatcaagcccaatcacgcagcatatgtcctctgggataatgtgtgctaagaacctttacagagagggctttgagggcatgtctgatctgaaatgtgtccaggatgccaagggaggttctttctacagagatcactgccctgtgctaggtgagcagaatggcaacaggaatcctggtggattgcagattggtgacctggtaaatatagatctcgacctcgaaattgtacagtctttgcagcatggtcatggaggatggactgatggaatgtttgagactttaactacaactggaactgtttgtggcattgatgaagatcatgacattgtagtacagtatccaagtggcaataggtggaccttcaatcctgctgttctcactaaagcgaacattgtccgaagtggagatgctgctcaaggtgcacaaagaggcacctcgcagttgtaagtgggtgatcctgtacatgttggttatgacctggaacgaattagacttctacagggaggacatggggaatgggctgaagcgatgcttccaactttaggtaaagtcggccgattccaccagatttattgcaacagtgatttaaaggtggaagtttgtggaacatttcgcacatgcattcaacagtaatttccaaggtggtatcggaaggatctaccatactcatgcgtctggagaagactctcaccagtcccgaaaattatttgaacccaggaacgggtgaccttatgaagaataagtaggct

SEQ ID NO: 117080 - DNA, 423 bp, Homo sapiens
ctcaacagtttgccttcactctaagatatttcaagtagatcctgatattcttagtttgaaccttatgggcctgtcttattttggatcctgctgctaatagttgagtctgaattcatatgactgaaggctgagacctggttccctagaggcatatcccttggcctttaccttgataggaagtttgacaatgcattttaaaaataaggcatctttatacacagtgacagtttatctatcatttacatatttgaatcttataaatgtttaaaacttgcttctttgggcaccaaaacttttaaaattattttttaaattgagatatttttctcagtggcctttgggcatcattggaaatgttaattttgctgacttgtagtgggcttattttatttaattttttttcagacagaatctcccaggctg

SEQ ID NO: 117081 - DNA, 315 bp, Homo sapiens
tgacagagcaagactctgtctttaaaaaaaaaaagaaaagaaaagaattaagcttaaaatacatttttacttagtgatttccacatttgcctttctggttcctcttgccgtatgacctggactaggctttgcttctacttgtaacatttgggccctcgtgagggaccagttggtcctcagtttctcctggagcagccaccaggctcccttgctgattggacatgtggaattggctgttcttggaaagagagttggagtcaaccgttcaaatgttctgggacctccgaagcccaggaatcacgccaccacccccca

SEQ ID NO: 117082 - DNA, 2513 bp, Homo sapiens
  misc_feature (424)..(424): n is a, c, g, or t
  misc_feature (1967)..(1967): n is a, c, g, or t
agcttttcatgacaactttgtaatactttttttgtttgctgttatgaaatatctccttttgggtggggtggagaggggatgtcaggtagtatctgtggtaataggtgaagagatgatagctaatgtgaggctgttggtccatctggatttcagggaactcacctccccaccttgtgaaatattagagaaaattaccattactgttctcatgatgttaattatatcttctgaagttttagaggtttacatataaaccaaaccccaattaaggtttaagaaagtggcatgacttagtgcaaacagatgaaatgttgatttctttaaaagttgtcttaatactaatggatcttacaggtgttttcaagaaagttataagttttgtaagtataattttagtaaataaaattttgtaaatataattttnattttggacttttttttttccttccttacttgctgcatcaaagtgaacaaatgacaagtgaaatttttttgagtcttctgagagaaggaagtttataaaagcagatgcctttttctgtacttccaggtcaaaaattgtaggcctccattttaatatagcttattgttagaacaaggaaatttcatttaagacaagaaatgaagtcatagttacattctgtttaaaactaatagaattaaacattttgacataaataaaacaattagaaaactttacaaaataaatgtaaaaagaattcattcacaatacactgattattacagctatgttaaagtctacaattgaacacaaaatataaacaattgttatttaagggattataagtaaatttaataaattttctttacaaaatttttggtgagatatcttataagaagtagaggggtcagaaatcaaatttctgggatgcttattaagataagcttgaaatgtaattgaatttttaaattcgcattacaagtcataatagtagactattcggtaaatgtagggagtaatggtaggtaatagcaaagctaggtaatttgactctttttttttttttaagctcattttcaaatgagagactccatacacggagatagtagtgtcgaacaatgataaaaattctaggagttgttactatcttaacacatttatctaagcatttacctatgttgccttggtgcctttgactgctgacattgcaccctttcgtctgtttttaacttgtcgaaattgttgttataacatttatctgcctctgttcctcaggtatagctgtgaaaatagaaatggttcggggttaaggattgtgaatgggaggaagaaataatcctctcattattttcaatacagggaaagaggattatttgtaaccctgagcttttaccccaaaaggacataaagtataataggtgatctttgcttttataaatgtgaaccataataactactcttgggaaaggattgataggccctattttctacttgccttttcatccatttattttgtgataattcctctatgtttcctaatcatttgctctttgaaaaaagtgagagcttgtgatcagtcctgcacggaagccagtacacaatctaggtattagagcagtgcattgacagagaggctaccttccattttgtgcttccaagaggtggttgtaaataggaaagtgaaaattgttaaatgacaaaaattactttgaagtaaatttctctgcctgttttagaacttaactctagatgaagaatcagtatattttggggggcagtaatagtaagaccaaaaagcaacgtttttacagcagtgtcagaatatctatttgccaagtattatttccactttatggatggggcctaaaagccagatagtttgtttgacttgaaggtcactggttaatgagccttttattactacgtaggttttcaccggtgctgagcaagaaagcttacaaatctcctacctaaggcatgcttatatccgaaccattccaagatnaagaaaatgtacaatttaagcttttctggaagaaaggaaaacctcaacactttctgatctctctcagatcaatagcattttaaactaaatcttttatgcgaaaagttaattaaggcaactccaattcctttcttaacagaaatggttttacatcatcctccatgaagtaactaaccaaagacaggcccaccttcatctttctccttagtaagtttattgatcccagggctctttactcttacacgtccaattttaaaatgtacacgtggccgggcacagtggctcacgcctgtaatcctagcactttgtgaggccagggcgggcagatcatgaggtcaagagatcgagaccatcctggccaacatggtgaaaccctgtctctactaaaaataaaaaaattagctgagcgtggtggtgcgcggctgtaaccaaagctacttgggagtctgaggcaggagaatcacttgaacctgggaggtggaggttgcagtgagccgagatcacgccactgcactccagcctggcaacagagcaagactctatctc

SEQ ID NO: 117083 - DNA, 678 bp, Homo sapiens
aaccgctgccccaggcccactcggcgtggctcggccacgctcggcttgacttggctcggctcggccacactcggcttccctcggcttcctctcggcctctcggcagcactgcgggctccgcagcccttctggccttcacgtggttcccagttctcgtggtacgtcctgcctgccgggatctcagggctcttggaagaccccaggcccggggagggcatgtcccaagggcatgccaggtcaaggccacaatagcgagccctctcccacgccctgtagtcgtcggagaccaacgtgttctcccaccccattccggtccacagcaatccctgcctacccaacctcacatagaccttaggtcttgaacctcttttcctacctggaaatgaggttaagaactacccacctcatgggtgaagttcaatcagaggatgcctgaaaagtgcttaatacgtgatgtgtgcccagtcattggaatcagccctctctgcttgattctttcattgctgctgtttgtttgtttgttgttgttgtttgaaacaccgtctcattgactaggcgcggtggctcacgcctgtaatcccagcactttgggaggccgaggtgggcagatcacttgagaccaggagttcgtcaccagcctggccaacatggtgaaaccccgtctctactaaaaataca

SEQ ID NO: 117084 - DNA, 338 bp, Homo sapiens
ggttctctgcctttccagggatttgaaccataggttggttcataatagcccatgtgctctcagactgtagtgtgcattggaatcatctgcaaggcttgctaaaatgcagagtctcagggcctggtctcagagagtccaattcattaaatccaaagcaggtctgaggaatctgccgttaattaaacacactcccacggcaatgctgatgaaagtggtcttcagctcatgctttgagaaatgctgctccacagttttctcccatccgcctgctgcagtcacacacatgtatgcacacatacacacacacacatgcaaacacacacatgcgcacacacaca

SEQ ID NO: 117085 - DNA, 409 bp, Homo sapiens
agtgcttctgtcattgggacttctcagtgacccttgcacatccatgcactgtgcacctgaaggtttggcatatcctgagcctgcatcctgagctcattcttcttaatctacagactcttcctggctgacctgacccacatccacagcttcagcttacacagtggggatgtctaaatctgtatgtctacaaaaggcttgcccgccaagcttccaatctactcatacacctcttcaaatcagcccgtccaaagcttagctcataatccctgtctcacctgtaactcgagtcagcctccttttctccctctccctcacctgccatgacattttctaacaacattctctcaagcttttttccacctccattgccaccatcttagttcaggctcttgtcatttcctgctaaacc

SEQ ID NO: 117086 - DNA, 453 bp, Homo sapiens
tggggtgaaagcggcaggaggtatgtgagatggtgaaatgatttgcttctgccatgctggggtcacgggtggatcgccctaaactctcggtggccccctcagtagttttggaagaggaccaagtccttgtctctccagcagtggacctggaagaaggatgccggctcagggacttcactgtaagttcagctttattttgctcccctggtaggacctcacagggctgcagccaagctgcagcctggagtttttcctgaaggatttaagttgttaatgcaggagcagggggcaagtcttggggctcagggtgaagttatggatggaggcagagccctctcagaattgtgtagcatctttcatttatcttactttggttctctgggaaaaacccttgcagtgatttccagaccaggcagcatggaaaagctggctggattcagcctttagatttcc

SEQ ID NO: 117087 - DNA, 580 bp, Homo sapiens
atgcttacctgaatgctgcatctcccttcgagcttccttggtgcctgactaagctcttcttgttactcacacttctgttgtttggatctcggcttctcctgaacaacaagcaacaaaatacactctctctctgtctttatttttttatttttttatttttttttttgagacggagtctcgttctgtcgcccaggccggactgcggactgcagtggcgcaatctcggctcactgcaagctccgcttcccgggttcacgccattctcctgcctcagcctcccgagtagctgggactacaggcgcccgccaccgcgcccggctaattttttgtatttttagtagagacggggtttcaccttgttagccaggatggtctcgatctcctgacctcatgatccacccgcctcggcctcccaaagtgctgggattacaggcgtgagccaccgcgcccggcctctctctgtctttattatctgccttggttgtttctggattcttctcacgcccttgttccctagctatatgatctcttctgggggagccaaaagttaccctttgtttccttaatagccaaccatcat

SEQ ID NO: 117088 - DNA, 499 bp, Homo sapiens
gctgtctttacttcattataaatatatctgctaattttatctctttctttcaggacaggagttttaaagggaaaaaagggagggatgatttgggagaagttacatgatttacttgtcaaaggcagatctggccatgtgtctaactgggagatactgggataaaccaacagacagggaaggtagaaaatcgctggtgacaataaattaatcaccttgtagcattccaagagaaagctctgggccacatggtgtccaaaaagtgccaaatgcaggtaacttcactcattcattcatctatccatccattcattcaaaaaacatttaaccagctttcgcttcatgctcaacactgggagggttgaataaaacagtctcacaaagtggtagcagagacagcctaatagatcacccatttcagcataatgtggcaaagctgtgattgaggtagcaagactactagaggagcacagaggaggagcatctatattggattaggaag

SEQ ID NO: 117089 - DNA, 862 bp, Homo sapiens
agtggcaaaggttacgaagctattagttaaggctctttgctcctcttcctgcagtccatgccatgaaagtctgaatatactttcacagtaatcaccctccagtgactgattttcaaaagccaagtgtggcaaattatagtaagtcactctgagtcgctgtattgcctcttgccttgtgaaaatcagatgtttgggggtatccatgtatgtgaccacaagcatcagtttgatgtttgtgatttttaaaaaaagtgtgtgtgtgtgtgtgtgtgtgtgcgtgtgtggtggtgtcagagagatgtttcatagaaaaagtaatttaagtgacattctcatttggcagtatttaattgcttccttcctaatgtgtacatagcaatctggctgattattggttgttacttgttcagaatttattgtgtcttattgctatgtatgcaactgagtgtatgttaaagtttagacttcagtacgctatctgcacaattgtgtgtgctttaaacctctgtaaacatgcagatgaatcatgtatggtgtgttaaatgtgacttccactcttgaaacaataatttttggtatgtacatttgaaaactatttgaacaatctaaatgtgtactgtaaatgtccagtaccctcaatcaaaaacagcactggtaaaatgtatgcctcttcaacctaccaatttataagaggtcagggataaattgagaattaagttaatttttctaatggcaagtatttttggtaatttcttacctgcctaagtgtattttcaagaaaaattgtcgacagaagaaatctaagctatcagagggaatgactttatttcataagcattaattatactttatgtcttaccta

SEQ ID NO: 117090 - DNA, 403 bp, Homo sapiens
cataatcacagagagttctactggacattgctgctctagaggctggcaggggccagtcaacgaggagctttgaatgacatgccaagatgtttggaccttatcctgaggataataagatgccactgaagcatttgatataagggaatagaatgattaaatttatgtgtttagaaaagccactctataggtcacaaaagagattagagagaggcaaggctagaaattagagatatcagtgaagaaagtattggattaagcagagcaagagatgatgggggccttgtatgggtagaatagagagaagtatatggactcaagaaattttaagaaatagaatcaataggacatattaaacaatatgaaacaatatctaaacagatgtggaggatgagaaggcagaggt

SEQ ID NO: 117091 - DNA, 314 bp, Homo sapiens
cttgaacctgggaggtgggaggtttgcagtgagctgaaatcgcaccactgcactccagcttgggcaacagagcaagacttggtctcaaaacaaaaaggaaaagaaaaattccttgaattcgtcaagttctttcctgtgtcacattgtcttccatgtttcctttatcagaaatgcaggccccttatttctgatggctcctactccaagttttcacattatgtgggccccatgcatatgtcctctaagcttgtctcatcttttagctttctgcttcaatgtcacttcctcatagagcccttctcagatcttccagg

SEQ ID NO: 117092 - DNA, 385 bp, Homo sapiens
tagatgatgcgtctcacacataaagcctgtgctgtttgtcaaatgcacagaggtgctgctataatttttaagatacatgtaaaaagtattactgaatgcatggtagctttttctcagcatgcagttcttcatttgtagatactaaaagtacaattatgattacttggaaggatccaaaagtggttttgaagtttgtttgtttgtttgtttgtttgtttttgagacagagtcttactctgtcacccaggctggagtgcagtggcgcaatcttggctcactgcaacctctgcctcctgggttggagtaattctcctgcctcagcctccggagtagctgggattacaggtgtgcgccacaatgcctggctaatttttgtatttttagt

SEQ ID NO: 117093 - DNA, 180 bp, Homo sapiens
aagattgcaccactgcactccagcctggacgacagagcgagactcatctcaaaaaataaataaatcaaataagatatccttttaatatattttaatcagctttattgaggtataatttattcactaaaatgcacattttaaataaagcttgctgagttttgaaaaagtatacagccatgt

SEQ ID NO: 117094 - DNA, 1382 bp, Homo sapiens
aggtccacaaaaaaatacaacaattagccaggcgcagtactcacacctgtatcctagcactttgggaggcaaggtgggcgaatcacctgaagtcaggagtccaagaccagcaaggccaacatggcgaaaccccgtctctacaaaaaatacaaaaattaggcgggcttggtggcatgtgcctatagtcctagctactccagggaggcagaggttatagtgagttgtgattgtgccattgtgctccagcctgggcaacggaggagaccctatctcaacaacaaaaaccctgatttgcagccaaatagtttcctcagcctatttcctgccagtaaatggttaggagcccagtggctttgttttgaacagtctttgtccattttagtccaagctagtggtgcttgtgttagttcagttctcttaaaaacattgtgagttttctgtggattttactgggattcactgtgttagataaaaaccatctccaccaatctttttaagatacgctccctctctggggtgcatgtcagggtgctgtgtgagaacacacttgttctttcagacgcctgtttgtctcactaaccatgagggtttgagaagcaattccttacatctttctgggattttaacaaagggcctcatgttgaccagaggccacgttttacttgtggcatcgaaaccacctttgcataaattataactgagaggattatgacaatgaaagagatgtgacctaacttactgatttgttcctaacctccaagctgtccttgttcattcctgggtgtaggctgaactaattttggaaggaacttaacttacagtttaactttgttttttgttgttgttgtttattttgttttgttttgttttgagacagagtctcactctatcacccaggctggagtgcagtggccccatcttggctcactgcaatctccacctcctgggttcaaacgattctcctgcgtcagcctcctgagtagctgggactacaggtgcacgccaccacgccagactaatttttgtatttttagtagagacagggtttcaccatgttggccaggctggtctcgaactcctgatctcaaatgatctgcctgcctcggccttccaacgtgctgggattacaggtgtgagccaccacgcccggcctatagtttaactttgaaacaaagatggtaccagccctttccctgaacaaacacccttttagcctgggaactataaactgcctttgcaggactaacaaattagctacaagattagaaattgtggtttaggagtcatgcagctggaggtggcaagattctaaacccctccaaattgctcctccagataacaggtattttggagaccctgcactcgatggatcagctgtccct

SEQ ID NO: 117095 - DNA, 341 bp, Homo sapiens
ttgtttatttccagacatggattgattaaatccaaggaacagagggggagctggcatcagataaaaaaaggccctgttcttataagattttaaagtgaaagtaaatatcaggagagagagaaggtgataaatgagcatgaatgaaaactggacacttggactctagatcaatactgtgcattcatgagcatcccgagagatggacatggtcaccaggtctgtgttgttaagatggttgaggctgcaggttctgggcatgcatatgtcaggaaacactctgtcactagaaccaactgtttttcctcactttccaattttggaaccttggcaaaagcaatgtg

SEQ ID NO: 117096 - DNA, 435 bp, Homo sapiens
acatagtaatttgaaggataaatgaatgtctattagctagtaagacaggctgctaatcacagacaacttgtatctctctggtagaaggaggactgagcacagataataatttcaacagtcctaatatttctgccttatagattttgcttttatctttgtgtatgtcttataaatatatattttttaatcttttacttttttatcatctggtttcagttccaagtagttttctctgctttgaaaaagcaacagattactctcttatctgtacaggctcctctacaaaacaatgaattctattctggctaaggaaaaaaggctaaattaaagaaaccactaatttcttgccagtgaattaacccagctgagtatccctcatccaaaacgcttgaagtgttttgggtttcgtattttttctggatgtgggaatacttg

SEQ ID NO: 117097 - DNA, 1572 bp, Homo sapiens
gaagagattaaatggaagcaaactctttccatctcttggggaaatgggagatgcgggtgtccactggagccagggcttctaaattttaaaatcacttcttcaccaggctgaagccggggtgcccccacggaaggtactgttgaattgcttcgaaggtttctcattgagagaagctctctgtttctccctaagtgttgggattacaggcatgagccaccccacctggcctttattttattttattttttaaaagagatgtggccttgccctgtcacccaggctggacccatgctggagtgtagtggcctgatcatggttcactgcagcctcaaactcctgggcacaagtgatgcccccacctcagcctcctaagaacccaggattataggtgtgcgccactgcttctggctgggcatctttttttaaaagtcctaatgtacagctgcaattgtgaaacattcattacctgttttcatatttagaatgagggtaatccttctagaggcacacaaagttagctgagtagcaaaaagctgggtctcaaaccaaggtcttctaatttcaaatatcatgttttatctactttaccatgaagctgaattgtgtgagcacaattatgaggtctcctttgcctcccaccctcgctgtattgtccattttccaaggtaaacacacccagttctttcagttctttttactctgtgatttcagtgccttctgctctcctagtaataatatatttaccagccagcatatatttatgatcagtatacatttgtgatgcattctatgggccaggtacagggctaggcattgggactccagagtgcctggaggagaagatcccccacgcttaaatatagtacatttgacatagtccttatccttagtgccctcaagacctttcccagcatatctggctcttcataacatggagagctagtggtccttcctggatctgcgtgtcctcagtctaacccctgcagatctcccttcatgtgggtagggccttctagatggcacctgggctatgccgacttaaccctgcatttcaggctgatcccacacagcctccaaataggcactattgctctaaggtgcctgggagagaaaaggttggccccggttttggaaactttggggttttgcgtgtgtctaaaaagattatcttcagtagttttgctctcccagtgagaaaaggagaggctgatcatgtgctgccagacactgggcaaagggtgatgtttgtaatgaccatccagtgactcctgctgccgctgtccttcctgcctggatgtttttggagcttccgtctactcattcagcatccagggaggctgtgatgaagtaaggaccatctgttagggaccagatagcaaggacatttgcagcgcattgaaggttggcctggatgaccagcaagggtttttcctgccctgcatgcctggactcccacctccccacccctggttaggcttcctggttgtggggagtcatagccagtggagctctagtctgtaacaaacacaccatcggaacaacaaaccctcaggtctttcacattgattagat

SEQ ID NO: 117098 - DNA, 656 bp, Homo sapiens
ctgtgcctcgcgatcagctgatgatctcacttgagaaaatgagtaaacagaaggaaacaatcttcctttgcaaaatccactgagctagtttgacctatatccatgtactcagccttccctcttcatacaatggatagagtgtcctgtccacctgagtccagggtgctgcctcctcacctgtggaaggactctgcccttctattataccccctctctctccagcatcatcaaatctccctctctatgggagcattcccatcaggaaacatacatgttataatatcaatatcgctgataaaaatattcccttaccttaccttctccagccactttatagcaaaaccccacaaaagcattgcttattctgtctccacttcctcaccccaattctctcctgaacccactctaatcagctttcatttcagctgctccacttaacctctctgatgaaaatcagcagttaggcctatatctccccagtcctcattttacctccctctcagcagcattgccacatggctgggcatgccctcttttctgaaaccctttctctactgggcctctgcagcagcacatacttctgctttgcttccttccataccaacctctcgctccatgaatgttccttcaccagctctgcctccttgccccaacct

SEQ ID NO: 117099 - DNA, 135 bp, Homo sapiens
acataagtccctcacaatgccttataaaagagttttatatttaaataagcttggagattcaaaagcacatgatatacaaaagaatggcctttatggcaggtctacaaaagtagacctgccataaagaaagtaatt

SEQ ID NO: 117100 - DNA, 493 bp, Homo sapiens
tgtatactacgttgatttgaatttttactgattggtaaataaaatgagaagaatggggaatatttatgtaaatttcttgctgaattgtgtgttcacatgtgtttggactcaggcttaattttaagtcttatgaggtaaaattatcaaggtagctggttatattctcattactactgtgcagctaaaatttgagaaaagatgaaaaattcacatttgtcttaccatggtcacagaatgttttgtgtttattattatgcaataaattattgaccggaagagtaggcttacttctaaaacagagaaaatatatctttgaatcaggtgataatagtgtagaaggaatttgattaaatgcatacaaccaatatgatttctagcattaaattgcaatgtatattgtgttagtgaaaaaatcattagtaaaaatatagtccagtggtgtatcctgcttgaatagagcaggctggatgcggtggtttgctcgcctgtaatc

SEQ ID NO: 117101 - DNA, 405 bp, Homo sapiens
cttatgtggaatatctcattgccagtcaatgttgaataagtgaggcatttattgtgtggcggaaaggtggttctttgggccagatgaagtaaggtgggaagaaaggaatatgaaatactgagagaaggaattactactttaaataatagatgtagctttggtatgtttttctgtgcaaatcttgagacaaagccctttttgttggaggaaatggcatgcaagggattttattttcagtttgaccatttgcaagtattagagctgtctccatgggagaaaggtgagttccctctggcagtgtggtttacgaaggtttgcttgggaggaaaagagaggagctagttgatccagagtggaaaaacaccaaagcaaagttttctccaaaataacacacacggatttctg

SEQ ID NO: 117102 - DNA, 583 bp, Homo sapiens
cggggttactgcggcgaccgccagagcagccttggcgctatgttggagccaggggctacccctcagcggtacttggggctggtcctgggggagccacgcagggttgtggcagcgctgcctgaaagtatgagactggattcgaatcctcatggttttccatgggaaatggtgatatgtgcagctgttgctgcattttttgctgttctcctttttctgtggagaagttttagatcggttaggagtcggctttatgtgggaagagagaaaaagcttgctataatgctttctggactaattgaagaaaaatgtaaactacttgaaaaatttagccttgttcaaaaagagtatgaagactatgaagtagcgtcatcgttagaggatgccagctttgagaaggcggcagcagaagcacgaagtttggaggcaacctgtgaaaagttgaacaggtccaattctgaacttgagcatgaaattctctgtctagaaaaagagttaaaagaagagaaatctaaacattcgcaacaaaatgaattgatggcggatatttcaaaaacgatacagcctctagcagatgagtcagaat

SEQ ID NO: 117103 - DNA, 305 bp, Homo sapiens
ggcatctgtgcagttgcaaggcatttgggggatagggagtggggatgttgagggtctggcaaagtgggaaggatggggactctgacagcaaatgtcaccgagctagccctctgggctggagtgagttggatgttgcctctctgaacagcacgattgtaccctttctctgcctgcaacttattgatgaccccgaagggtttagaactagcattcaaatcaaccaagcaaagcaggctgcaatcatctactcttgcattttaaatcctaatgaccattttgggaacctgagcaaattactctgcaag

SEQ ID NO: 117104 - DNA, 446 bp, Homo sapiens
  misc_feature (157)..(157): n is a, c, g, or t
gacgagacatcgagacatagtggcatctccaagcctgcgctgtttatgtattccaccaataggcacgcaattatcatggcctgtgatttatactcattcgcgagtccggtagcaagcccgaatccagtttactttcatcattctatcctctattganaaagaaagtacagaaatttttagattcactaaaagtcattgaacaggaatcagtggggtgtttttggcaagccaactccttattttccatttcaagatcagatctaatcctataatagttttaagcctaacctttaaatgactgctcggctggtcacggtggctcatgactgtaatcataacatttgggatgctgaggcaggaggattgcttgagtagtgtgctgccttccaatgagcatggccaaggactcagtttcatctaatggaacaccttcaaactgtcacagg

SEQ ID NO: 117105 - DNA, 342 bp, Homo sapiens
tggacacagggtgttttctcaggaaaacaatagttgagtggcagaagatagatttcctttcatatgagctatttcaaaagcatcttccttgagactgaccttgaggctgcatttctaaaagtgcactgaatattctttttaaaaattacttgaaagctgcttttagggctgtgtgacatggagtgcagtttgacagctgcaaaagtacaagttgtcaagttgttcattgagaagtgagagtggggaattgaaccttcagtctgttcctaaacccatcattgtggattgtttggctgcctgatccagagttctttctatttgttgaaacttaacgtcaccttt

SEQ ID NO: 117106 - DNA, 431 bp, Homo sapiens
tcatgatggtttctcttataatcaggttggaaaggatctcagggtgagtctggtaaaaagccttctgaaatgttagaccagagaattatctggagagggaggaaatgcagggcaagttcctgcaaagcctcacactcatgttggtctcaccgatgtttatcagggagaaacagcctgtactcccagggcagccgtttgaacgggcagagcccactttgttcctcgattctgtttctttccatgcaatccgccctcctgacctaataccgttgaggctggtgtcttgtcccatgggacatggaactagggaacacagatggatctaagctagcactcccctacgttttggcaaatttaagaatcaacactctgaagaaccgtggttttgattccctgagaaggaaatggattaagacttactctccctactc

SEQ ID NO: 117107 - DNA, 453 bp, Homo sapiens
atgtttgattgagaagaatagaggccaagcacagtggctcacgcctgtaatccctgcattctgggaggccaaggcagacggatcacttgaggtcaggatttcgagaccagcctgaccaacatggcaaaaccccgtctctactaaaaatacaaaaattagccgggcgtggtggtgtagatctgtaatcccagctactcaggaggctgatgcacgagaattacttgaacccgggaggcggaggttgcagtgagctgagattcgccactgcacgccagcctgggtgacagagcgagactctgtctcaaaaaataaaaaagaagaatagagattacaattagaatagaaataatggttattatccaggtctttaaagaaaagtcagacacaggccaggtgcgatctcagctcacatcactagtgaattcgcgccgcctgcagtcgaccatatgggag

SEQ ID NO: 117108 - DNA, 505 bp, Homo sapiens
atgtttgattgagaagaatagaggccaagcacagtggctcacgcctgtaatccctgcattctgggaggccaaggcagacggatcacttgaggtcaggatttcgagaccagcctgaccaacatggcaaaaccccgtctctactaaaaatacaaaaattagccgggcgtggtggtgtagatctgtaatcccagctactcaggaggctgatgcacgagaattacttgaacccgggaggcggaggttgcagtgagctgagattcgccactgcacgccagcctgggtgacagagcgagactctgtctcaaaaaataaaaaagaagaatagagattacaattagaatagaaataatggttattatccaggtctttaaagaaaagtcagacacaggccaggtgcggtggctcacgcctgtaatcccagcactttggaaggccaaggtgggcggattacgaggtcaggagatcgagaccatcctggctaacacagtgaaaccccgtctctact

SEQ ID NO: 117109 - DNA, 602 bp, Homo sapiens
aagggacattttacagccatgatcctcaaatcattttcttgcctcttggtttcctttgcttaataaaaaatgttttgattagttttaattttctgggtgcattgattgttagctcttttgtattctgatattgttggcatcaggactcatcaatttcataaaattattgagtaattatattgactaattattgagtaattagagtgaaatgtctctaagaaaaaaaattcaatttggagggatttctcatctaaatgtaaatgtttatatttacgtattttctttagttagttttttttttttcacctggttgatttctttgttatattttggttctaatttcaaaagcatttatagacacgaaaacttatgtggctcaaggacccagtactgagagagttctaggatggctgtgctttggctaatgtttgttgaaaccagataggaaagattaattagagacctaagtgacagaaaaaacaaggaaatttaaacttaggtttgtttcattttaacaaactgacaaagtaaagaatgaaaatttactaaattgtagccttaaatttacagaatatttagactagaataactgtgtgtttgat

SEQ ID NO: 117110 - DNA, 504 bp, Homo sapiens
gggcccagcttctgcttctgaaacatttcctgctccaggtctcctgtcctgatctcctaaaaattccctagtttctctagatacagggttttttaaaaaacctttacgcaaaagttacctgctccctaagcctctctgcaggacctaacatactacctggaggtaaacattagcactataagaacttaaggagaatgcagtttttctatctccaagccccagcccttcaagctatctcctaatatgcctctcactttctttttttttttcctttgtgaagaatgtgggcatcattctttcttcttttcttcaacatataccagttcctccagttcctgcttcttgaaaccagttcctccagttcctgcttcttgaaaccagttcctccagttcctgcttcttgaaaccagttcctccagttcctgcttcttgaaaccagttcctccaagtctttataaaatctgtttatggttttcccataatacaatagcatctggctcttat

SEQ ID NO: 117111 - DNA, 271 bp, Homo sapiens
tatctcgtgccttgttggattagaactgattgagctctgtctgctgccccaaacatgtggctcagccaatctccagtggcatctgcaatgtgggtattctagcctccagtgctcacgtggctcaccttagaaagggcagatattcctatttcctgacgctgctggagaatgaggtctgagtcagaagtcctcaggtgtgacctgcccagaactatctgaaattgctggatttcttgttcttcctcagtgtttaacaatcacccaattgctc

SEQ ID NO: 117112 - DNA, 555 bp, Homo sapiens
tgtatagctgctcctgagggaaaatgacgctactgatcctacagaatgttccagcggaaccgcctcaaaaccacacttagagtaatgtaggtatagagtgtaaatgttctgcttgaagtggatggctctagtgcagtggattgtaaactctgggagaggatcggagacgcttttggaaagctgggtaaactatgggccatattctcagaaaagtgtccactaaactcacagaaagactcattctcatatacacacaattttgcattctcttatcagagggctcctggccccaggttaataacaactgctctcttcttgtgaccctcggactaaatgtaatcaggcagtctggcaaaaatgtaaagcctgttctcagctgattccttatttctggagagacagcgagtgtggagcacaaggactctggtggtctagagaccggaaagaagagagagcagatgacccctcccaaaataaaagccatcagagagagaagcctcagaacagaagagggccattggagatggcccgacgtaggctgggtgaaccttgctt

SEQ ID NO: 117113 - DNA, 337 bp, Homo sapiens
caatcagagcctcaaagcctaaaagcatgaagtcagacttaagggaaccgacactgcaccacggcagctgggcagcctcagagccctctatgtgcatccctcacgctccctgtcacctaccctgctcacggtctctctatcctggcccaacactggttctaggtggtttctccttcctcctctcccaccaatctttctggcccagctggctctcacctgacttctgctttgtgctgttcccctgaccacagtcacctgatccaccccaccccagcccagccttgggtgctggccaagatgacacagccagggaccttcctcctcagagcagaaggga

SEQ ID NO: 117114 - DNA, 244 bp, Homo sapiens
ctcttcccaacttccagttatgactgttacaagtctgccacgggccaggccctgtcctatgcactttgggtctccctgctcccctcctggccctgaagatcatttccctcatgcagccagagggtccctgtgtacacccatgacgcatcatattccgcacccctgggcacaccagcatccttgaaattactccccaggacaggcctgtctcagggcctttgcactggctgttccctctgcctgg

SEQ ID NO: 117115 - DNA, 525 bp, Homo sapiens
acagtccgccccccttgtccctgccctcctcccggggaggagtcgccgctccagcgggaggcaggatggttgctacctggggcggccgccagctcctcccgcagggctccgggccgcccctcaccccagggtcgcccgctcctagtgtggcccaggcttcccggcctgcccctcccagccctaggaagacgtcccccgggccccctcagccctccgcctccccttctctccctttctccccgctcctggcaggctgcagccgtctcctcccggtgctcgctccttccttgagctctgtccaccgctgcccactgggggctagagcttcccggctaccctggaagctggaggctgggaccagctcttcaggtgacaggcctctgtgtctccacagtggccagaggggagcctgcctgactgatgagcaaggctccactttgtcaccaaggcagagaaggggcccggggtcttctctggcccagcctttgactgaagctggtctggagacaggggcgttagagaagt

SEQ ID NO: 117116 - DNA, 338 bp, Homo sapiens
agagccaggaaagggtctgggtctgggtcagggccaggaacaaggcagagcagggccagggccatggcagagtcagggcaggtccttgacaggaccaggttccaggccagggccagggcagcagcaggggcagggcctggataagggcagggccagggatatggcaggaccagggctagggccagggccaggccatagtgagggcagggcaaaagccaaggcagggtcagggcaggtccagggcaggtccagggagcggccagcaccaagcggggccaaggcacaaccagcgcaaggtaaagcagggcaatggcaccactgggccatgacagggcaaa

SEQ ID NO: 117117 - DNA, 587 bp, Homo sapiens
aggctatgaacacctttatgagcattaactagaaaacctacaggagatggataagttcctggaaatataccaccctcctagattaaaccagaaagaaatgaaaactcacaacaaaccaataacaagcagtgagactgaaatggtaattaaaaaattgccaacaaaaaaaagtccaggactagacagattcacagctgaattctatcagacattcaaagaagaattggtaccaatcctattgacactaatccacaagatagaaaaagagagaatcctccctaaatcattctatgaagccagtatcaccctattaccaaaaccaggaaagggcctaacagaaaaagaaaagtacataccaatatccccaatgaacacagatacaaaaatctcaaaaaaaaaaaaaaaagaaaaatactagctaactgaattccaacagcatatcaaaaagataatccagcgtgatcaagtgggcttcacagaagggatgcttggatagtttaacatccaaaagacaataaatgtgatacaccacatgaacagaattaaaaacaaaaatcacaggatcatttcaatagatgcagaaaaaa

SEQ ID NO: 117118 - DNA, 499 bp, Homo sapiens
gttcccagaaacagcctccagataactttgcttacatctcattggctagaacatcaccccgtggctgcaggtggctggaaaatctcatctttattctgggtggccatgtgcagctaaaagtactgctactgtttatagagtttgggcaagaaccggctgtctgtgccatgggtggtagacgagaccagcagtccccactcacttggaactgagagtctgggggaaggatagtgacaaaataaacagatacttacagtgacaaggcctctgagaggtctgcaaaggtgtgccctgcgagtaaacaggaaggacacctaaatcagactggtggggtgggggaggggatgaggaaacgttgcctagagactaagcaagaatctctctggactgaggaaatgggcagggtattgaagcaaaggctcggaggcaaagggggcaggtagttgggtgatggaggagcatatgaggaacagaaagtagaccagggaagccagaggga

SEQ ID NO: 117119 - DNA, 237 bp, Homo sapiens
catgacctttaacactttgggtacaacttcttatttatggttctcagcagctagtatttatagctgtagaattatcttcccctgatcaccctgagctgcaggggtaataattttattatccaaagtcatgtcatgactgtagttcagttggatgctgtggtactaccaaggtgaagctattgataaaatatatgctgttgacaagagcattcgtagcatctctgccgtgcatggcac

SEQ ID NO: 117120 - DNA, 208 bp, Homo sapiens
tgctgcggtgactctaaggatcccccttcggggcttggcatgaaggttgaaggttgagtgtacttcacggggtaaattaccagggagatgatctggaacacagcagccaaggcaaggagacctccaatcactcttaggaagacaagtatctggggtacacacaggacgaagaaggagaggatgaaacagatcaccaggatgctgacgc

SEQ ID NO: 117121 - DNA, 399 bp, Homo sapiens
gttagtgataatatttactgtcatggtggtggtgatggtgccaccaataaaacttgtcagctgagggcccttgctctggaccacttaaagagggctgatttttcacaagacgaaataacttagaaacatagaggataaagtggtccatagggttagtaaggtggaggagggtgactaagtcatgaaagatgtacagcacagacagaagagtttttaaaatgattccaaatagtgtgtgagagcagactactgaagttgaggatggatgtttgcaccctgcagagaatgctgcactctagagtttcacagtgcaagatgacctgactttcatagtgggcaggaaggtctgggaggccttgctttggactcaggaagaagtaagcaagctgagtagccgga

SEQ ID NO: 117122 - DNA, 396 bp, Homo sapiens
tactgttaggatcttaatgtacttagtggaaaggttgagaggcgctggcctacggcaggcactcctacagtaagactgaacctaaactgacattggtcagtttacttgggaagttgaccatatgttttttgtttgttttctcccaggctatagtacagtggcgtgatcttggctccctgcaacctctgtcttccaggttcaagcagttctactgcctcagcctcctgagtagctgggattacaggtgtgtgctaccacacccagttagtttttgtatttttagtagagatggggtttcaccatgttgcccagggtggtctccaactcctgacctcaaatgatccgcccaccttggcctcccaaagtgctgggattacaggcgtgagccatggtgcc

SEQ ID NO: 117123 - DNA, 349 bp, Homo sapiens
ttccaatcatcatttctcaaaacacacactttcatctctatttaccaaacactattttctgcatctccaaacccctcaagcttcagtccaggtccaagtatcaatgggtatatatgaagctcctctgccaccagaaattcactatggaaagatgttatttctggtaccccagttgcaaaacaatgatgcctgtttttttctttttgagacagagtctcattctgtcacccaggctggagagcgatggcgtgatctcggctcacttcaacacccacttcacaggttcaagcaattctcctgtctctgccccccgagtagttggtattacaggcatgtgccacgacgcctg

SEQ ID NO: 117124 - DNA, 139 bp, Homo sapiens
aagggtggccaggccatgcaggagggtgacagtttggttacccagcaaggcattttgaccctgaagatattttgtactaaaagttaattctcctttattgaataatggtcttcagaaaaagtaaaacttagagcagaat

SEQ ID NO: 117125 - DNA, 334 bp, Homo sapiens
ctgaaaaataactgcttacaattcattgcattgaaaaaaaaaatccaggttttattttcttactgacacctcccgttaaccttgagacctttaactcacaacattaatccaaaaagagattatattatttcaatcgatacctaaattattagattgggtttccatgatctttggagatccttctggattattgtaattgataggtagggctggggggacaagtttttttcactgagattgctacacattattttggcatttatgagattattcattttagaaagtatatataaccagcctcctctgaaatgcagaccagtttagctagggcggg

SEQ ID NO: 117126 - DNA, 327 bp, Homo sapiens
gaagttcttccccgtccccgcaacccttgttaaatgtttggaggaggttaaaccctctcactctcaaacttaccactaaatctatagatacaaattgaaatactgttagaccaaagtcttatatacaaaagttacttttactctagcccggctaagagagaggagtcattgaacccgagaacgtccggactccacgcgccgccccgggtggagaggggttggcaggcggaatccaaacggcacagacactgctggcgcgcctggtagccttctgtaacgcacgcatctgaaatttagatctgaaaataattacgaagagagccaaga

SEQ ID NO: 117127 - DNA, 384 bp, Homo sapiens
ctgcagaaagatgcaattgcgtgacagatagtttggaagagaagagtatggagaaggcaagccctctgaggaggaagctggaccagagctgtggctggggaagtggggaacgggcgtactgaggagagctgctgaaggagaaccgatagagcctggtgataggaaaccaaggggaaagaagaacttgatataacagcacagttctcacttcgccttcctgctgagatgtggaaggatcccggtgctgccagcagcactcagtgcgctggaaagggtcatggctaggaagacagctgaggagaggacccacaagcacaaccgcctcataacagaatcaactctgctattgctagagaactcttctccctctgaacctaccatcaa

SEQ ID NO: 117128 - DNA, 739 bp, Homo sapiens
agcggaatctggtttgggagggtgaagaccgctgaaatttccaggctgcccgaggctccaccttccaccacccaacgggtgggcggtgggccgggctggcctcggagcctctccctgggtgtcggttgggccgagaaggggacggttggctgggtgggcctggcggctggtggctgtccgtaggccggggtcactctgagggcattttacattaccctaatcctgtccacttggcaagaaacttagtaagccccaaaggttcattccaaatcctgtctgggagggcgaggactgtggaaacttccagatgcctcaggctccatctttagctgttgagcgggtggttgggccgctcatggccccaaagatctggggggtcttcatgggcagttgggtcgctgagggccctaaagatctggggctcctcccaggtgtcagttgggccaaggaggaggctgggctttcagagtagaacctgcggtgctaacgatggctctgcagggctgcgggctgagggcctgggcggcgtcctgtggcccggagatggcgctctagtggtatcaggccttgagtcagcgacatcctggcttctgaccccccattcctatggcccctacagtctggtctccgcttccccactcccggtgaattgctgttggagcagcctctcctttctgggtagtggcctggccgagctccccggggagggcttgacccagacctgtcctgcctccagtcc

SEQ ID NO: 117129 - DNA, 150 bp, Homo sapiens
agggtagggaagatcgcaggcatgaggtctgaggctcgctggcagcctccccctgctgggccctcctcatggttggaaccaaagatacctgaagcgggctctccgactcagggtgctcaggccccccaggccaggctcctccagcctcgg

SEQ ID NO: 117130 - DNA, 312 bp, Homo sapiens
tgctggaattacaggcgtgagccaccgtgcctggcctgatagtgatttatcttctattccgtaacaactaataaataccataaaattaactgtactcagaactagagccttgtttctttcctttgatccacaaatggaacccctaatatgtgaatcacattttattacaaattctgggggaataagtaaaagaaaaagaatattcaggttataagatcttgtgctcttagagcttatgatttcttttgagagaaaagatttgtatgatgatgtagatatgataggtgagcacatgccaaatgaccagtatgc

SEQ ID NO: 117131 - DNA, 306 bp, Homo sapiens
aaggccccactctgtcatcgtagagatcaggaaacaggctcagaagtaggagggcttcctggtcctagggcccagctcttccctcttttcaggcctgtcttctgcactaaggacttcaggccaccagggaaggtggggagggaggaaaggagatgagatagacttgggcgggggcctgaggacagagtttcatgtcacttgggcagccaggaaagggttaaagatcccttatcccaagccatgggcactggcactgccagaggatgctgaggcctgctggggcataaggacaacaagcaacatcct

SEQ ID NO: 117132 - DNA, 131 bp, Homo sapiens
gcctcagcctcccaaagtggcaggtatgggccaccatgcccggtcctttttactttcttatttttttcttgagacaaagtatcactctgtcgcccaggctggaatgcagtggcgcaatctcagctcactgc

SEQ ID NO: 117133 - DNA, 496 bp, Homo sapiens
gttgcccataaattcaagttcctagccatttcctctttctgaacaattaattttccttaatctttattgcaactaaaattgaaacaatatctttacatacacacctgacatttaaggaactaagaaactcaagttcctacctcaatcatagaatttactatgttacgtggaagtcaagtttatgtgctaatctccactactagcctgtgagtttcttacaggcaaggaccctgcctctttgttcatttttttatatgttgtagccctttacacagtactttaggaagtttaggttattgtgtgtgtgtgagtgtgtgtgtgtgtgagtgtgtgtgtattgggagtggggatttgtgcaggaaatgaggaaagaaggaaagtgctgtgaatggaggaaggggcacaagcaaagcccagagactcacggccaatgatatctaagccctaacatcctccctctctttttagaaattgtgaccagggtagttggccctaa

SEQ ID NO: 117134 - DNA, 1452 bp, Homo sapiens
ggtggaaggagaggggcgggacttctccgggtcaaggccaggtctcttccctgctcggtgctatgttcctgttccacggggtggcgggtcctgggagggagaagcccagacccagtggacactgacattgtctctcgctgttcccagccttttccaggcgtgtgacttaatccgtttccacagccagaccttttctccgtgagttcctcagccaggactgctgccatgccggtgactgttacccacccaaccgtcacgaccaccatgcggtcccccaccgtcgtagggtcctctagggccctgatccagcccctgggcctcctccgcctgctgcagctggtgtccacctgcgtggccttgtcactggtggccagcgtgggcgcctggaaggggcctatgggtaactggtccatgttcacctagtgtttctgctttgccatgaccctggtcatcctcctcgtggagctgggcggctcccaggcccgcttccccttgttttggcgcaacttccccatcacctttgcctgctatgcggccctcttgtgcctctcggcctccatcatctaccccaccacctacttgcagttcctgtcccacggccgttcccgcgaccacgccatcgccgccatcgtcttctctggcatcgcctgtgtggcttacgccaccgaagtaacctggacccgggcccggcccggcgagatcactgactacatggcctccgagctggggctgctgaaggtgctggagaccttcgtggcctgcctcatcttcgtgttcatcaatagcccctacgtgtaccacaaccggccggccctggagtggtgggtggcggtgtacgccctctgcttcgtcctggcggccctcactatcctgctgagcctggggcactgcaccaacatgctgcccatccgcttccccagtttcctgttggggctggccttgctgtccgtcctcctctatgccactgcccttgtcctctggcccctctaccagttcaacgagaagtatggtgtccagccctggcagacgagagatgtgagctgcagcgacagaaacccctaccttcaacctcaataggcttgtatcctgggagacagaatgtgtttctggtcactcattctaacccaagaaatcaaggaaaataacagacttccacagaagctagactgaccaggcgatactgtgaccgggcaagcatggcttttgacagtaaatcccggagaggaacagagagatgcagatacttgatcattctttgcctataaacacaatggttacatacccccagatctgaccttgctgtagatccatctgaaaggaaggaatcaagcctctgtgttcctgaagtcaggtccttttcactcccaaaaacacaggttcatttgcggtgggtctgaggctaggtgctctgggttatctagtgcttcctgaagccctagttttgaaagaaga

SEQ ID NO: 117135 - DNA, 726 bp, Homo sapiens
agacattatagagccaaggaacttccaacagtcttccatgaatgaggcaatctgaatgaagaggccttttataacttcattttgaactctgcccacaaatcaaaggtcagcaggcccttcaattcaaagaggctgcaaaatgcctggaggtgctgctgtgccagttgttgctcctgtgtggtaggcagagggaaaaaagaaacaaggaagaggaggcaaaaggcaaaaagagggaactggaaaaagaaaagagggagagaaggaaaggagaagaaaaaggaagcactaataactattgtttgttgagcaccaccagccaccatgctaagtactttgcaaacttgatctcagtcctcacagcagccgtatgaggtagtactggcagtacttttgttttactgattaggatattgaagctaaaagaagataatttgtcaaaagtcatacagctaataagtagcaaagctgaactttgaacccaggtctgtctgccttcaaaatctagcactcctcactacaatgccacagaggaaacatgttcacctattaggatctgagagatacctaccactgacgatgactgagtgggctcttctgtggctggcccctggattttttttaagtttgtagacaagtctttaacaggataaagatcccttaattggatttgcctgttatccagtattgcacaccacatcacatgctgtgcttcagttccctacatga

SEQ ID NO: 117136 - DNA, 335 bp, Homo sapiens
tctcgctctgttgcccaggctggagtgcagtggtgcaatctcagctcactgcaagctccgcctcccgggttcactccattctcctgcctcagcctcctgagtagctgggactacaggcgcccgtcaccacgcccggctaatttttttgtatttttagtagagacaggatttcaccgtgttagccaggatggtctcaatctcctgacctcgtgatccgcccacctcggcctcccaaagtgctgggattacaggcgtcagccaccgcgcccggccctctttatgactatttttaaactatgatgaaaattagaatatataaataatcctttaatatc

SEQ ID NO: 117137 - DNA, 243 bp, Homo sapiens
ggtactgaccaccgcacaacaggagactctgtgtctttttctctaaccactgattttcccaccccaacccagaaggagcccccgtcggagggcaacaagtaaatgaagtgggaatacagacaagcctcctccatctcccctctgcaggctagaatgaggggaggtacaagagcttggagtggtggtatagcctggtggtatagcctggtgtatagtagtggtatagggtggatagggtggtat

SEQ ID NO: 117138 - DNA, 813 bp, Homo sapiens
cagattatgggagggagcgtctgtgacatgaagccctggcttaaatcttcccaaggttttaacgtgccttaccatatgaatattttgttattttatttggcagtatttccacaggaggccaggaaggagagcactgagtaagccaggggtagggcaaatctagagatgggagagattagaacagtattgtggctaatgagactaacaccactgaggtgtgtgtgtgtgtgtgtgtgtgtgtgtgtgtgagagagagagagagagagaaagtgctgaatcccctgtaatcctgtctcatacaaggccctggtgctaaaaccactgtaactgtttatgaattcactccagctacatagtgagaggaaggaaagagaataagaagaacccaatgctggaatgaatttatgcttaagagcttgtctcgggaatgcagctgggtttaagagtcgccaagccaagacaccctttttgggaaaagggaaaagaaaaggaaaggaagataaaaacccaggagactggagggacagtgggaggaagaggaaagaaaacgtgctgctcccagatggggaagccttgtctgagtgaaatggcattataggttgtctgggtgttagccccttaaagtggtttaatttcccactaaatagagatcactgtgaggactaagaaccaagcaaatgctttcgattgcgctatcttgattagaagccctgcattaaggcaagagcattggcagagcccgagagagctgaggcaccctgaggcatgcagcaaggtccatggcaggctagacttcaagtggctttgccggag

SEQ ID NO: 117139 - DNA, 645 bp, Homo sapiens
catggtggcttacccctgtaatcccagcactttgggaggccgagctgggtggatcacaaggtaaagagatcaagaccattctggccaacatggtgaaaccctctctcttctaaaaatacaaaaattagcttggcgtggtggcacacgcctgtagttccagctactcaggaggctgaggcaggagaatcgcttgaaccaaggaggcggaggttcgagcgattctcccgcatcagcctcccgagcagctgggaccacaagtgcttgccatgatgcccagccaatttttgtatttttagctttagatgaattttagaagagataatgcctaattaatactatgggtatatttgtctcaaatgaccttcaaatttacagagaaatgtcttcatctatttgcagccttaaatttaaaaactgatcttatgttgtagatatttttgaattctctacatctgtaactctcagctagatataaaaaagtcagtttccagcaagacagtgttccaacatcagtatttgttggatttatttctcttattttttctgctgtgggaaacacaatgcaaatatttgtgccctaaggcagactgtatcatggaagcagctattaaaattgttcaggccgggcatggtggcttatccctg

SEQ ID NO: 117140 - DNA, 428 bp, Homo sapiens
tgatgcagacagccttcgggggtggggattagtctctcaatcagagttcaaactctcagagcagcacccctacataaatcctatccaccattttagtggggtgggagtaggggacatggagagtaggggtgaagaatctaaaataaagaaatacagtgtaaaaaacaaaaagtacaaaaaggtaagaaatataaaagagaaaggagaaaaaatatgacaaaaaatgttcaatatactttcaaaacaatatactggtgattaaaaagaagagaaacctaatgcacttcaaataagtacaacaaacaaaaagaaacttcctagaaaatggttattagatctttggcctagaatcttatgacaaattagaaaagacataaaactaaggtaaaattactttttccataggcaaaaatttaattatcctgctt

SEQ ID NO: 117141 - DNA, 171 bp, Homo sapiens
ttatactccaccctctctcctccattctgggttcagctgggtaggcttcttgtgatccttgcttctttcctgaaagcctcagggatggagctgcccacaccagctgcccgtcagtctgggctctctttcatcaggactaagttgtagatgctacaaaacaacaatttcaac

SEQ ID NO: 117142 - DNA, 496 bp, Homo sapiens
ttcagcttaatgaccttgagatggtaaaaactattgtgcatatcaatattcagtttgtttttatttttgagtaatatttcatggtatggatggttaaacagtctgtttaaccactgtttttttcccaaatatattagtttacaggttttggttattgaaaataaagctattatgaataattgtgtatagatatttgtgtggacatgtttccatttccatgaaataaatggccagctgtgccattgctaggtgatatggccgttgcaggtgtatctttaaaaaaaaactgccaatgtattttcagactgaatgcaccgttttactcctctaccaacaacgtttaagagatacagttttgggaggggggagggatagcattgggagatatacctaatgctagatgacgagttagtgggtgcagcgcaccagcatggcacatgtatacatatgtaattaacctgcatattgtgcacatgtaccctaaaacttaaagtat

SEQ ID NO: 117143 - DNA, 586 bp, Homo sapiens
atcccagcaaccatacttcaaccactcttacactactgagtgttcaaactgtgctcaactaagatggtgtcagaagtaggatctgaagaagagacttaacaatccccaggagtgctgagtgaacaagcaaggtacctgcaaggacctacttttgtcccttgatctctcaaagtggctggggatcatggatggatacatgtgaccaagcattgcaagttaaagatatttctgaatcttggacctcttatttacagtgaagccccctcatgcatagtaaagcagagaggaatgtaaaaggttgctgcatggataatcaatttctgatggagtctcactctgttgcccaagctggagtgcaacagcatgatcttggcttactgcaacctctgcctcccgggttcaagcgattctgctgcctcagcctcctgaatagctggaattacaggcacccaccaccatacccagctaattttttgtatttttagtagagacggggtttcaccgtgttagccaggatggtcttaatctgctgacctcttgatccacccaccttgccctcccaaagtgcttagattactggcatgag

SEQ ID NO: 117144 - DNA, 720 bp, Homo sapiens
agcggaactgctgttaccaactcccacgaaggaggatctgccttctctaacatgtcactcagcatgggtgcccccaggcacaaatcacgtagtgccagcaggttggtggtggctagaagtggtgttccagcatcagccctcctctcctgcccaccagtcctggcacagcacccaggtcaacagtaaaaatcctacagatggtgtcagaagtaggatctgaagaagagacttaacaatccccaggagtgctgagtgaacaagcaaggtacctgcaaggacctacttttgtcccttgatctctcaaagtggctggggatcatggatggatacatgtgaccaagcattgcaagttaaagatatttctgaatcttggacctcttatttacagtgaagccccctcatgcatagtaaagcagagaggaatgtaaaaggttgctgcatggataatcaatttctgatggagtctcactctgttgcccaagctggagtgcaacagcatgatcttggcttactgcaacctctgcctcccgggttcaagcgattctgctgcctcagcctcctgaatagctggaattacaggcacccaccaccatacccagctaattttttgtatttttagtagagacggggtttcaccgtgttagccaggatggtcttaatctgctgacctcttgatccacccaccttgccctcccaaagtgcttagattactggcatgag

SEQ ID NO: 117145 - DNA, 184 bp, Homo sapiens
ctcacagcttctgctccttagctgtccttcgggcccggctccttcacagatggtctgctggccagggtgctatggagttggaatgtccagagcctcccctcgctgatgcattcactgctttggaacctgctggctttcctctggagtactgaaatagctttacctgtgttgtcggttcaggcct

SEQ ID NO: 117146 - DNA, 378 bp, Homo sapiens
agagggagacggggggcagggagggctctctccgggggcagggagagctttctctaggagcacagcacaggcttctgtgcttagccttgggctgttctgcatttccatcagttacttaactgatgatctaaaagtcatgcttatcaggtcagaatagattcgagtctgggagagatggacattttgccaggtgccagactctggcacactctggaattcacaagattccaatggcctggaagcacagacgaaccaacaaggtgaaatatcacaggcctagatggagaggccaaggtttcatgcaaaacctctgcctggggctgcctaagggctggaggggcagcctgcctgagagcagctgaaaggaagtgagtctcg

SEQ ID NO: 117147 - DNA, 812 bp, Homo sapiens
tatgaaaagaaaaccaagttccatatgcttctccctaccccaatatatttcataacttctccaggcatcattgaactctatcttctctaaatcactctacagttcaataatggctaacatttttttttaatctatgtcaggggttgttctaaaagttttacatattttaaatattttgatcctcacgaaagctataaagtaattactctatatgatttccttttacaagaaagaaaactgaaatatagaggagttaagtaacttgctcacaattacatgactagtattattagcaatcaagtattctgctcaatagggaaatatcacatatacatcacattggtatgccacttttcaaaaaataaactaaaattttaataagataactttttgcctttgatttttataattacaattaagagtgacactaataattataatgattgatataatgctaattttataagcatgagcaaatacaagatactttaattttaagtcctcgaagagaataatgactaatatttattaggtgctgctgtgacaatgttctaagtgctttattatgtatattgacttatgtaatcttaaaaacaacagcaaactcaagaaagattgtaatattattctcaatttatggaggaggctgggtgcggtggcccatgcctgtaatcccaacactttgggaggctgaggtgggtgtatcactcgagattaggagttcgagaccggcctggccaacgtggtgaaaacttgtctctactaaaaatacgaaaattagccaggcgtggttccaggcgcctctaatccca

SEQ ID NO: 117148 - DNA, 374 bp, Homo sapiens
acattattacccacagaaattgaaaggattataagggatttgccatgatcaactttatctcaccaaattagacaacttagatgaaatggacaaattcctagatacagatgatcaaaactgactctagaggaaatagaaaatgagaccttataacagttaaaatgaattagtaattaaaaatcttcctacaaagagaagcctaggcccaggtgtctccattggtgaattctgtcaaacacttaaaagaagcatgctgggtgcagtggcttacttggtgatgaacacctttagtcccagctacttgggaggctcaggtggcatgaggccaggagttgaaggctagcctgagcaacatagcaagactaccatcttaa

SEQ ID NO: 117149 - DNA, 484 bp, Homo sapiens
accgaatatgacatgatttgaccaccaattaattaaaggtggtgattaattatagaacattaaaaataggaatccatggtccatttttatgataaatctagatagatgatagatagatagatagatagatagatagatagatagatagatagatagatagatagatgatagagatagatagatgatagatagatagatagatagatagatagatagatagatagatagatagatagatagatagacagaaagacagacaaagaaaagaaggctgtcttgctgagtcctgactggtaaatatagaagttctgaagttggaaaaaaaaatcatcatttcgtaaccatcatagtataaaactggttcagacaaaagaatcatccatggatgttaactctatggggaaattttgataaggagaatgatatgtatttgcatgaccttaaaatgtctctctacattttgctaattggtaagagaaagaga

SEQ ID NO: 117150 - DNA, 720 bp, Homo sapiens
gactttgaagagcaagcggcgttgttcgcctgcggaagcagtgctgccggtctctggacaaatttctcccggaggtggagacaaggaagctccagcttcgctttcccttgtggcccagagtggaacatactgagctgcactgaatcatctggatgcactcgcaactttaggaactggtggcaatttgtaaaaagacagctctggaagttgaagagaccagtggcttcaagcaaaaagtaaattgaaaatgggagatatctttttgtgtaagaaagtggaatcaccaaagaagaatttgagagaatccaaacaaagggaggaggatgatgaagatccagatctgatctatgttggggtggagcatgtacatagagatgctgaagttctctttgtcgggatgatttcaaattcaaaaccagtcgtttcaaacattttgaacagagtcaccccaggctcaaagtcaagaagaaagaaaggccacttccgtcaatatcctgctcacgtgtcgcagcctgcaaatcatgtgacctctatggcaaaagccatcatgcccgtttctctgtctgaggggcgatcgacagatagtcctgtcactatgaagtcttcatctgaacctggttataaaatgagctcaccacaagttgtttctcccaattactcagattcgctccccccagggactcagtgtctagttggagctatggtctctggaggaggcag

SEQ ID NO: 117151 - DNA, 595 bp, Homo sapiens
ggcctgatatttaaggagtcggctatctgttagccaaaggcttcctctagagtacagtagtcctgccacattatgtagggtgtaaacagttaaatcattccccagggttaatttggaggcttctgggaccagcagagccaccgaggcaatggcttggaggcatgctggccactctttagccaccaaatcaagttccttacttagataacccactggttgagctggtcctccagcctgtgttaaaactcccagggctattcccttcctttctgatacatacagattgaagaccttccctacaggaaggctgagagctggtgccttgagcaagacttgctttagctggttaaaggccttttgagcttcaggttcccaggttaaaagatgagttttagctccctgagtttcttttatgaagttatataacagacgggctatttcaccatacccagatatccatagcctacagaatcatgtaataccccaaaatcctcttagttgcttgagagttttggggagggagaagtaggagataggcttaatcctctcttcccccaactccagtgctctggtcccctttgacagcttacattgt

SEQ ID NO: 117152 - DNA, 428 bp, Homo sapiens
gctaggtaactgaacacatgctacttcatctatctgagcctgggcatccctgtccaaaaataggaatgctaatggcagctacctattcgaatcaaataagttaatacatggacacattctaagttaagaatggcaagagtggcaggcacatcgtggatgttcagtagacattaactatggttattgatagtccagagtaaaagaaaatttgggtgaagctgcaaacctgggatcttagcaatctcagtgtcagcaaaactttgagtcaggatcaagattcaagacagagtccagacttctcagattcttcaaggcatcaccaagttcccactgttagttcctgatcagagcccagggaaggttaaaagccccccaacacaaggagcctctgaagaactggactataaatgtcacaagcgacatcaaag

SEQ ID NO: 117153 - DNA, 199 bp, Homo sapiens
taaagatgaaaaaaggtagtatccagtagttaaaactaccatattcttaagatgatatttagtgttggtgaaactgtaggggaatgtaaaacagaatatagcctttccagcaagtatcagattttcaaaatgtgcacagatcattcactgtcatcctcttattcctagaatacaaatcagactaatgaacatggcttac

SEQ ID NO: 117154 - DNA, 281 bp, Homo sapiens
ggataatgccacccttgacaatcatttgtttgagttaaaccttgtccttttgagggcatgcttttaaaaatattaattcctagcgggagaggtaatgcatgaagtttatatcgtatcagctccagagcgtggattagctcatcactttcccaccaggcctgaggccctgaacaggaagctgcagttggggagggagtggggtgattcagagcttggaatcctggaggaccgggtgctgagaggtgcacaggagggagaaagaaggttgaaaggatttgaaa

SEQ ID NO: 117155 - DNA, 658 bp, Homo sapiens
gtgagaacacgcaatgtgtgtctttctgtgcctggtttgtttcacttaacataatgacctcccattccatccataccattttctgcttttgtacaaggcatcaaggcataaaaagcagggcaatgggactcaatggattttccacgctgctctaacacactactgcaaacctggcagcttcaaacaacacagatgtattctctcatagttctggaggtcacaaatccaaaacgagtcttcctggactaaaactgaggtgttgccaggacccttggtaaaagccctagaggagaatccattccttgcctcttcggtggctgctggcattgtgaattgtgggcacatcactccaatctctgcctccacggtcgcatcaccttctcttctgtagtcgaatctcctctgcctccctcttcatctataaggacactttgtgattacattgcgtatccacacagataacccacgatagtctccccgtcgcaaatctttgaagtaatctcatccacagagtctcttctgccaacatcccattcactagttctggaggttaggacgtggacatctttgggggttatcattccccctttcacaggctatctgggctgtatacagaaccagagatctgagaatcatcttggcggcctcactctgtgag

SEQ ID NO: 117156 - DNA, 470 bp, Homo sapiens
tcttcgcttgctgcttctctttcctagctctggtttcagcttacatttttgttgttgtttacttctaacaagtccagcaatgcattaaacctatattttatgtagagaagccaggagaacagagaaaaaagtgtattttatagatttagcaaggatgggacaaattttctgaagaatgtaaacatcccagactttgagaaattttactttaagaactctactgaggaagtaattagaaatgccctcaaacatttatgctctgaggtattcactcaaatggtgtttcatataatggaataaaaaactaagcctttgagctagacctttctcactcatctgcctatcttaatcccaatttcatgcatctgtagcattaaaataaaatgaaaccaaactacatgaatccataccaaaagcactgtaaggtaaagcagatcattactgaaaatgtctggggaagagagaggact

SEQ ID NO: 117157 - DNA, 270 bp, Homo sapiens
cagccaagtttcagctctgccttttaatggatgtgtaatcttgaacaggtcacttcccgtatctaagcctcagttctctcatctataaaatggggacagctatgataccttctctatagggtgaggagtgatgaaacgcaacgatgttcataggaagccattagttcagggctttgtggttctggaaatgtgtctgttttgtttgtcctgcagatcccatggtagacataaaccagtcctctgggtctgtgtccccagtcctctcttaaa

SEQ ID NO: 117158 - DNA, 766 bp, Homo sapiens
gcagagtcaagagaaatctgcacatattccagatctctctttccccctcacccttcttactggttataggcaatgtgtttaatatgttcttttccctcttctgccctccaccagagggtgctcataagcaactaaatggcataaagctgtagtgataggaactgtgaaagaagggctattttaattcacagtgtggattattggcctctgtgaaaaaaaaaaaaagttgactttgaaacagagttcttgattgagctgaaataactttggtttaaagttgccttacaaataacatcttgagcacttacttacctgaggatagtacttttttatataggtaaagttgaccattctctctaaaaaggtatgagggactatgccattagacagtgttaggctggtctgggttgtatttcttattgtgtaacttaatgctcttcagaagtattttaatgacgtaaaatacttcagaacctcttctagtgtactcactaaaatcaataagtaatgaagtacaagaatattgatgtctgtgtttagttataaaagcatatccatttagaaattgtgctaattctgttacagtgagcagctctttatctcgctatgacataatctggttttaggggatgaaatgccctagaagattaaaaaaacaaacaaacaaaaaaaccttttatattgagcaacctctgtttgatagccaaaatctcaagataatgttgggacagtataaggaagcataaaagtgggtaattataatgtg

SEQ ID NO: 117159 - DNA, 652 bp, Homo sapiens
ccaccaggaaggcccaagaagagatgatttctgaactcaggcaacagaaattttacctggagacacaggctgggaagttggaggcccagaaccgaaaactggaggagcagctggagaagatcagccaccaagaccacagtgacaagaatcggctgctggaactggagacaagattgcgggaggtcagtctagagcacgaggagcagaaactggagctcaagcgccagctcacagagctacagctctccctgcaggagcgcgagtcacagttgacagccctgcaggctgcacgggcggccctggagagccagcttcgccaggcgaagacagagctggaagagaccacagcagaagctgaagaggagatccaggcactcacggcacatagagatgaaatccagcgcaaatttgatgctcttcgtaacagctgtactgtaatcacagacctggaggagcagctaaaccagctgaccgaggacaacgctgaactcaacaaccaaaacttctacttgtccaaacaactcgatgaggcttctggcgccaacgacgagattgtacaactgcgaagtgaagtggaccatctccgccgggagatcacggaacgagagatgcagcttaccagccagaagcaagtaaggagggttaacaaggt

SEQ ID NO: 117160 - DNA, 156 bp, Homo sapiens
ctttcaagagattaaaggaacctcagtgatcatccatttcagcactttcactttatagtgaagaaactcaggcccagagaggtacagtggcctgcccagaatcagaaaggaaaccagtgcataatagctgagagcagcatacaggaatcccctctc

SEQ ID NO: 117161 - DNA, 648 bp, Homo sapiens
ggacgggatcagggtcctgtgaacggggtatcagtgtaaactcctctgagagatatcaggaaaagcaggaagaagcctctgggacccttcgggagggttttgctctgtcacccaggctggagtgcggtggcatgatcttggctcactgcagcctcgatctcttgggctcggttggtcctcccacctcagcctcctgagtagctgggactacagtctcacaggtccttccccaggtccaagaggctcttctgtgtcctgatgacaagtagctgcctagccgtggtggcacctcctatcacatgttaagggacccctccccagggccacacctggcagaaggtggcttatgatgttcgcagcttgaaagtagtgtaaaccaaagataaaaattctaagcccactcccccagccattcggaatggaccccctcctcttggccagggccactccaaaagttaacctgagaaaaccggttcaggctgtgacgaagaaaggtggaagtggacattgccctcaattttatggtccttcagtccgcgtgtttggcacatttcaagcgaaaggcttgaccgaggcgagttgaaccagtttaaaccaccaaggaccctttaaagttcctgaattacaggtgggcaattttaaccaaag

SEQ ID NO: 117162 - DNA, 614 bp, Homo sapiens
ctgccttctacttctattctagccacttaacacactaactgagataacaaaaataggaaacatcccagtccgtcactctgtagtcaaagaaaaacttgtcatagttaagagactaggaaaaagctgttgtaatagttaagccacacacctattcacaatgcctattctccaaatgctaggcagttaggcagcatgatgatatttactacaaactaggtaatgtcattcataggacttattcttagataaaataacatgttaaatataaaactaaaactctttgcccacccatccaataggagtactcactgtatgagagccatcaaagacgtatcataaacatttacagtgtaacacgctaagtgctataatgaaagcagagaggaagaagtgactaaatctgctttaaaaaagggaagtcaaggctggacacagtggctcacacctgtaatctcagtactttgggaggccaaggtgggcagatcacgagatcaggagatcgagaccaacctggctaacacggtgaaacctcgtctctactaaaaatacaaaaaaaattaggcggacttggtggcgggcgcctgtagtcccagctactcagaaggctgaggtgg

SEQ ID NO: 117163 - DNA, 708 bp, Homo sapiens
gagccaccgcacctggcctacattttattgataaacaaattatggctacagagtttaattgtggaacagcagttctacagtgcttgattggacattgttggtatatgaaattactgctccaaggtaccctctagcacaaataattccagagtggaaggaagtaagatggggtagcccccagagttgcttcatatctgattgatggtgtacagacctggccatgcggatccacattccatcttacatggcagaggtggatccccagcctggaactgtgaagaacagggacaggcagcatcccaaccatggggagcatttaactccagccatgggatctttgcactttgaaacaagcagtgtgggcagggcgatgcttgaccctctctatgaaaccttccactctcactccttcatcccctagaagtgtccctccaagaagcttagctggcttgggctctaaccggccctccttgacccctacctcccctggaagccttttctggttaaaaccactgggacgactatgcctggtccactcttctgtctggctgctcagtgagttctagttccccagtgttgtatgcccctgtagtccatgggcctcggccatttctgtaatgaacgtggaccaacctaggacatgggtagcagagtccttgctcccccctgcgcaggtatgtgagcagatattcttgagcttcataagag

SEQ ID NO: 117164 - DNA, 193 bp, Homo sapiens
attttcaactcaacttataaactcatgccctttgtctcaaaggcaaaggagtaaggaaatatttgtggtacaatgcaaaacgtattaacgctgaacagaaacaacaataacagcagcaaaagacacatatcactcctagaactgcttataccaagatacatatttctaccaaccagtcataccctcacttggc

SEQ ID NO: 117165 - DNA, 357 bp, Homo sapiens
ggtgcagcaaaccaccatggcacacgtctacctatgtaacaaaactgcatgtcctgcacatgtatcccggaatttaaaataaaataaaataaaattttagaaagaaagggaaccttaaagcaatcttagtttagatgacttggtaggctcacatatctgctacttctagcccatatatttgcttaatgtgccaaagaaagctctttgatgcactaaaacaaaagtctatttgtggatgacaactacctagatgacactatgatgaggaactcaatttggggggatccaaaacatatactcctactgtcttcaaacaataatcacttgattgccacaacatgcttgttgggtaaacca

SEQ ID NO: 117166 - DNA, 311 bp, Homo sapiens
ttacatgtaaccctaccagcagttttgtgggattgctatgatcatacccatttcacagattaggtaactgaggttttagtgccctggagatgaaggcattctctagtctcccagaagccctgaactcttgaacaaccccaaatgctaaactcagcagtaaaatggctggtggctcctacctgagggttcacagaggggctgcctgtgcttgcctcccagcccttccttcctgcatcccagccctttcttcctgtgtattaagagggttgcagctacttcagggccagtgtctccacgagtcatcatgacgg

SEQ ID NO: 117167 - DNA, 321 bp, Homo sapiens
cctgatgatagcaatctgcagtggcatcataagcacattaaattcagactgaaacattcagcgaagttaatattgacttcacaatgttctaagatgtaagtgaagctatgctctttttgccttataaaattagactgcaaaaaaacaatttttgaggatattcccagtcaattgacttggttacagagtgagcaggaaatcaaactctagttaagttcatagatactggtgttttattcatttggaaacagaagagaaaaagagtatgctgtagtaaattgtttataaattctttttaattctaaaggagggggagaaagt

SEQ ID NO: 117168 - DNA, 385 bp, Homo sapiens
aacactacccttacagactagaaggtcctagaggagaaaagcagaaacaacatttaaggttttaggtatgtttttgctccaccggggcataatgtagttttgtactgttaacagtatatattctgaaaaccaagtccaattgccttaccactcaaacccaacctcagttatttcccaaaatacaaagtcccatgtaaatggtgaagtatttaaaatagagtcctttttaaatagttacctgactgaaaacaaacctttctcataacttgagctaattaggagacctgcatgcttactggagaatcttaggcatgactacattttaacataatcccaggacaaactagtgtacagtggataatctcatacacacacacacggcctc

SEQ ID NO: 117169 - DNA, 554 bp, Homo sapiens
gtcaaagccaatgtgcacgtttattcttttgtaccaccaaataaaccgaatttttggaccaactttactttagtcaatatttggttatttgctttgaagctatttgtttgcaataatgcaattaacatcctcaacagagccaaagtctgaccctgaaatggcagcatcttaactaattttatcatttgaatagaaattgaaccctttgagggcatgaagtactatttcttttctctatacttcttgtttttggtttttgcttcaccaccgatttatgactaccaaaaccccacagatcctgtaattaactcacagctgccatcttgccaccgtagatagaattcaggagctggtgatgaatggggagagaatagaaaaactaatagactgtaagaattttagacctctgtggccttgcttcaccacgcccggccatgtgtagcttttaattgtggttcattaacccagtttctaagcaaattagaaccttctgtgtatctcccctagttctgtatgccccactggttcctgtagagctttatttctgaagggaa

SEQ ID NO: 117170 - DNA, 370 bp, Homo sapiens
aaatcagttttttatgtcgtttcccttaaactcacaatttccaaggacctatcgatgtcattaaatgaggacttactgtggtccaaggatcatgtttgctgagctcagtttgttccaggtcgcagggagaaacagaaaatagcagcagaccttaggttggaaccaggtcttcaacccattctgaaaggtgtgttttccatttgaagcttctatcaggtggtgaaagaaagaacgatggtactgtctgcctaatctctccctttcattttaatttcctttttttgccaaaagactgaattttaaaacataagattatgttttagaaacaaccagtaatacacctcacaaagacattcctattcgtggcagc

SEQ ID NO: 117171 - DNA, 502 bp, Homo sapiens
gctggcatggcgaggttggacaggctttgagacccggctctgggccctcctagctccaggacagcggttcccatcgcggctgccattgagatcacctgggaagttaacatcacctatccagggcctcagcccaggctgattcaaggctctgtgagaagtgccaggattttgaaaaactcccaggtgactttaacagccagggatgggaacccctgagctagggccactgtgggaacaggtggctttactcttgcagcctcagtttccctggctgtaaaactgttatgacaccagccttgcaggaagtgccaggtgtggggtgtggggctgccaagtgtggggagaaatgaccctcggggagccagctggccggggcctagggggtcctgagctgggggtgccgtgccgcctctccgctgagaccactacttccaaagcatccggagccaggctctgggctgagcctgccatttgcactcctgcattcaaccctcacaccatc

SEQ ID NO: 117172 - DNA, 254 bp, Homo sapiens
tccgctcggcttctctggaggcttcagtaaaattataatcatggcagaaggtgaaggggccgcacatacctcacgtggcgggagcaggagcaagaaggaggggaggcactgcatgcttttgaacaaccagctctcatgaaaattcactgactatcacgaggacagcactgaggggattgtgctaaaccattcatgagaaaccgcccccatgatccaatcacctcctaccagccccacatccaacactggagatt

SEQ ID NO: 117173 - DNA, 422 bp, Homo sapiens
gtgccctctttcatgtcctaagaaacacattgcaagaagacagcgttccttctgattagccaggcaggtctatgcaaggctgtcatctctagcactggcacctcatcaagagctcctcagtgaccacttttgacttttcctgctgggtctcatgaatcctccttgtcatccattcatacagcaaatattcactgagcttctaccctatgcccagattctgttctagagaaacaagctcatgaagctgctattccagggaagaaataccagggaagggtgttgtggggaaaatcagagtatacgtggagatcgagaatagcggtcagtgagagaagcaagacactgggtcggagtctctggtacaccacccttctctatcttacctactgctccatgccagatctacacagcacatcaattct

SEQ ID NO: 117174 - DNA, 421 bp, Homo sapiens
agcggagtcggtaggcggcggcggaaggaggaggagctccagccgtgctctctcccggcagtggctgtgcttcacagcgcttgttgggttccccaccccttttaaataagccgggctggtcaccgccctcgcagacgagtcagcttaagggaggcggcggcagcgcggcggtgggggtgcggcctaggcccgagccctgcccggggccgggccgcggggcgggcgggcgaaccgcgggcgaggcggcgtctgcttgcgcggtgcagccccagcgtagcccggggctgccggtgccggccgcgccattgttgggggagggggcggctgttgaggtcggcggagtagggggcgagcgaaggcggtggcagagaggagcggaggcttcccatggggaacacgctgacctgttgcgtgtccccca

SEQ ID NO: 117175 - DNA, 903 bp, Homo sapiens
accaggagaagcagaagaaaaagtggtgatcagtcaagagacttgcagttgagagcggtagcaactaatatcaccaacacacaaatacaagcaacagatacagataccacttctttcaatagccttaaattctcttcctccagatacacattatctgtatatcaatggtataaatttacgctcctccctctataaactagcctttgtataaaatgctgaagacaattacaaaaaaccatttatatcaaatacatattaagtcaatcaagtgtctggagagctactcgatggccacaatattcaaatctcccctacttaactttgttaagttcttcaaaaaggtaaaagaaatgaaatcaacatttgtattatacatatttgtattatacgtgaacctatatttacataagccaacaaaaatttgtgtctgcctggaggaacggagaggcctctgggcaaccgtcaggattatgaaaggaaaagctacagcctaccccaaatacgcttgtttcctttgcctccggaaggctgaaagagaaggctggctgagaggcaactctggaagccagagttggagttttatctcaaaagacaagttttaggccgggcgcggtggctcatgcctgtaatcccagcactttgggaggccaagacaggcggatcacctgaggtcaggagttcgagaccagcctgaccaacatggagaaaccccgtctctactaaaaatacaaaattagctcggcatggtggtgcatgcctgtaatcccagctactcgggaggctgaggcaggagaattgcttgaacccaggaggtggaggttgtggtgagccgagatcgcaccattgcactccagcctgggcaacaaaagcaaaattccatctccaaaaaaaaaaaaaaaaacc

SEQ ID NO: 117176 - DNA, 513 bp, Homo sapiens
ccagccacttagagatgacaaggaagtttgtttcagcccaggttctggatggggtaaggagtctcccataagaatttaaaaccaaagtcgtcttccttacatgggcttggtattcatttattctcaatccataggagatattactataaaaactggtcttaggatggagatatcccaggatgcctcacagaagcaaacacaatattgctttagtgtgacatgccctcaactcaggctgcacaacggagtcctctgaaaatgacttcacaatccaaaatcacaaaatgcatgaggaaacaatgtaccataagcaacagttaacacaatagcaagatcagatctctcaaaacgttagcacacacacgttgattaaacacacaaaagaagtttaaaatacgagaaaaggatagatttgaaaaacaaatacaacatctaaactgaaaaatatgccaggcacggtggctcatgcctgtaatcccagcactttgggaggccgaggagggatcatgaggt

SEQ ID NO: 117177 - DNA, 304 bp, Homo sapiens
ctgcccctcagcccatccccatctctcccaaggcttgcatctaccgccagcctggcggcttccaaatgcgcagcccctcacgggccgctatctagctgcctttccagatggcatctgacacatccgcggccagactcagttttcctccaagcctgtggtcccacagccctcccatctccagggagggagactccactcgtgctcagactaaagccctggaggcatcctggcctctctcccgcacagcccacaccaggtcctccaggaactcccatgctcattctctgaaatgggtccgcagctc

SEQ ID NO: 117178 - DNA, 260 bp, Homo sapiens
gagttgaggtgcccggcgctccctatttggctcgctccctgcacccaggggtggagaactcgcccatccctggcaggctgtgtccctctagctgagccctgggcagtaactctgtgacagctgtcatctgcctgactccccgtggctaccccactaatgtggcttacagaagaggaaactaaggcctagtaatgctaagttgcttcccaaattcacacaggtcaggtctgggacagtcccaggccccagtgtggttctgc

SEQ ID NO: 117179 - DNA, 421 bp, Homo sapiens
tacctggggcccttcgttgagacaacagcggttagtgcgtaagtgagggtaaaccaaagtgtgcagagatcacaggctgagaaaggaagcaaaagagcaaaaccaaggaagccagactccttttaacaacccattctcactttcaagggaactaacccattcccctgagagctagaactcactcaccctagcaggaaggcattaatctattcatgagggatatacctctatgacccagacacctctcactaggccctatctccccacactgccacactgaggattgaatttcaccatgggctttggtgggaaaaaaacacatccaaaccacagcacctcccctccccagactccaaagaacagaaccctcaggaaattgactgtgatgcatggtaagaactgccatgtttttctatgaatt

SEQ ID NO: 117180 - DNA, 967 bp, Homo sapiens
  misc_feature (182)..(182): n is a, c, g, or t
gctcgcttgagcccaggagtctgagaccagcttggacaatgtggtgagaccctgtctctacaaaaatttaaaaattagctgaggcaggagaattgcttgaacccgggagggggaggttgtggtgagctgagatcacatcgctgcactccggcctgggtgacagagtgagactccatatcaanacaaatatatgctcttggggacgggcgtggtggcaatgcctgtaatcccaaagtgctggaatattacaggtgtgagccaactcacctggccctaatgtgcatctcattattactaatatcacatttttcccctggtagaaactaggatgtaacccaaattggaatcttacagaattttagtcctggccaatttaaggaggactgttgctaaaaaaacagtgaagaaggctgtgtgcggtggctcatgcctgtaatcccagcactttgggaggctgaggtgggtagatcacttgaggtcgggagtttgagaccagcctggccaacatggtgaagcccgtctctgactgggaatacaaaaattagccgggcatggtggtgcatgcctgttgtcccagctactcaggaggctgaggcaggagaatttcttggatccgggaggcggaggttgcagtgagctgagactacgctactgcactccagcctgggggacagagtgacactccatcttaaagaacaaaaacaaaaaaacagtgaagatgaaagtatgctgttggaggcccagcgcagtggctcacacctgtaatcccatcactttgggaggctgaggcaggcggatcacaaagtcaggagttcgagaccagcctggcaaacatagtgaaaccctgtctctgctaaaaatacaaaaattagccgggcgtggtggtgcatgcctgtaatctcagctactcaggaggctgaggtggggggatcacttgagccccagaggtcaaggctgcagtgagcca

SEQ ID NO: 117181 - DNA, 207 bp, Homo sapiens
taaggtctctaggactcagcatatcgcacagcagtgggctccaattatgtcctattttaatgccctgtcacggagcagggaagagaaacccccttctcttattggttgagtgtattgtgagagggtggaagctgggggtcctgtgtcctggattggttgggagctaggacattggagagagagagagagagagagagagagagagag

SEQ ID NO: 117182 - DNA, 424 bp, Homo sapiens
aagagagcatacttttaaaggatttcagcacattaatggaatgcaaatacatactgctaataacaaatgagtctaatttagtctttgaaacaggtcttgtagtacctgtatttggtagcagatggttccaattactgtatatatttctaagttctgtgcatatttctttaccgtgtctattacttatattttgtggaatttaagcctactcattttcaccaatcactatcttattttagtctctaaagcatctatgtcaattattttttaaatgtataatctttttaaaaatgtataatctttaaaaaaagattattcttctagattttcttccaaggtatataccttgattcttttgtgggtttcttaaatagggttttataagtgaaacaacaaaaggcctttaagaatcaatttagacaca

SEQ ID NO: 117183 - DNA, 169 bp, Homo sapiens
agactgggaaggaaacccatttgaaatagtgacagcccagtgagaaggggatgctagtactcacacatttacttatttatttattattttttgagacagggtttcaccctccatgcctaggctggagtgcagtggtgcagtcttggctcactgcaacctccttctctct

SEQ ID NO: 117184 - DNA, 366 bp, Homo sapiens
tggacaataagcaaacccattagtgaatatatgattataaactgtgtgaagaaaataaccaggatgctacaaagggtattgaggcagggaccttcagatgggaagaagatggtaggaaaagcatctgtaagaacaggactttagactgggacctgagggtgagtggagtagggaaagcattcccggcagtaggagcagcatgtgaaaagtccctggggcagaatcaagcttggcatcttcaaggaaatgacagagaggcccatgttgcatgggtggagactggcatgagatgaggctggagaagggtcaggccacacagggctggataaagggctctgacttcattcttggtgtgatgggaagccc

SEQ ID NO: 117185 - DNA, 729 bp, Homo sapiens
ctcccacctcagcctcagcgtatgccctgctaatttttgtgttttttgtagagacagggtttccccttgttgcccaggcaggtcccaaactccagggcacaaactctatacccgcctcagcctcccaaagtgcagggattacaggcatgaatcactgcacctgaccccagctcattttcatttaactgccgaactatgtttcatagaaaggagggactggattatttaaatatatctttattggtagatatttaggtttgtttttctttctgttgtttttctattggtgaaacagatgcaatggacatccttgaatatgcatctttgggcatatatggataatatctctctataatagatatcaagacatggtataactgggttaaagaataagaacatttaaaatgtaagtaatgtgaagcaaaaaaaaaagccagacacaaaaggccacatattttatgcttccacttacctgtagatgaaatgtccagaacaggcaaatccatagagacagaaagtagatttagtggttgccagggaaagggagaaggaggaaattaggagtgactgatactggccaggcacggtggctcacacctgtaatcccaacactttgggaggctgaagtgggtggatcactggaggccaggagcttgagaccagcttggccacatggcaaaaccctgtctctacttggccgggtgcggtggctcacgcctgtaatcccaa

SEQ ID NO: 117186 - DNA, 6393 bp, Homo sapiens
cagagttcaaactctgtgtcttccacttcatctagagaagggcttctctacacctcagtgtggtggtgagggttctgtggaatgaggggtacgctaataaagcaattacatacacacatggcattactaatagattctcctataaatggtagctttaattattaccagtaataaaattataaagaaagaaatgaggttagcttagggtaacttattctcagtaaattcacactggcatccagtggagaagaaatttgtttctaaatatccatatatcattttttgatcattggttcttgtggtttgcatgggtttaatatcatgtatactgtcctggggtttctgccgtctattcttggctaaagtttgttatcccacatttctgactccagtccttgtcaaatctcctatatactgaaattcttaaatattactaatggtctttttattttcagaccccctagtcctgcgtataatttttttgagcatgtgaatatgaacacatggaagcagccagatatttctgtataatctcctgtgaggcttctcttcagctgaaaaattggatatggggttaagagctctggatcaggagtaaaaacctctaatactggtgttaatttgcttcttaactagctgtgtgacctgagatgggctgtttaacctctcttaacactagttttattccttggtaaaaataattggtttctaccagatgctgtccacgagttccttcttgttctaaaatctcataatcataagcaatctattcagaatataagagaaaccctttgaaatgtttatagggagggaacatgcatggaactattcagtaaacatacaagtttcctgtaatgactgagaaaattgtggtggcatgtatattctgtaggaattcagagaagagagggattcatgggtgtcatatttttgggaatggattatctggaagaagtataaccaaaagagagaatagagatggaaaagggttgatatcggagattgtttttaattcttgcaaaatgaagataaactgtatctaagctcttcccttgctccagaagcttagaagttctcttcatgctgtctgtgagtatagcagagtcaaaagagaaatttttggagtcatacagaccttggttcaaactctgtgtcttccatttcatctagggaagtgcttctctacacctcagtgtggtggtgagggttccgtggaatgaggggtgcgtcaataaagcaattacatcttgttgatgttttaatcctctccaggatgaatgttagtataagatggctgccgaccactctttagaatactgccttgacctgatctcagaaatgggcaagatggtgccaattatttccgagcacaccattttgagacaatatataattttagttggagtgaaacaacattcaacaagtatagctgttttgaagtggtcctctggcctcagaaaatttctgagtatttctttttagcaacttttgaaggcaaacaactcagataattgctactaagtttttgtttcttaatgttcaatcaaggttgagagaaaaaactgtggagtagtagatggcatcagcttagggtgctcttttgagggatgcaatgaaatatgatggttgggcatataggttctggacacactggttttaactgaataaagttagagaagtaacttaacttttttacctcagtttcttcatttttaaaatggccttaatataaaacccatcactattttgttagggtgaaatgtgttattacctacagagcttacactagttgttggattaaagtaaatgcctactaaatctcatttattattattcttagagtttttgtatgctcccacaaatgcatacacatgtcgttaaaagaaaacaggactttatgaaaactgatgaaacatacttatgaaatagtatgaaatgaaaaggagaaatgtgaaaaattctgggggtttctccaggcataaattatgatacatgggaccattatatatcctcctttatgtataggaggaatgactggcctctctgacagtcagtcccatcacatctccttactttttgaattgaaaattgttatgcaatttttaaaaaagatcttagaattttgagtgacctctctggaccttagaaatcattgtatcatatgactctaatcagtgattttatcatttaagattaatttgtttattatcattggaatgtcaaaatctaaacatcgttttgcctaacttgtgaattcattttagtagatcaactgtgtaaaggatttcattatacaataaaataataggaaatctgttttaaaatgattaaaaggattagctaaagatgaatgtattcctctaggagtttctggcagaaaaaaaaaaacacattattcccattaaatgggtgtaatagatcttcctctttcagaatttctgcaactctttcatcttgcgttaactcagctgtggaaatcaacacccaaaggatgtagtagggtgagacataacatgtgggaatgaagaaagcataaaaggcatttaaaaaactaggggtactgagtagaaaattcatctgctactgcagggaatcaactaactcataaagtgcttcgtgcattcttcattctgtagcagaattaaaaactagttcttcaactctttgttttctttttgaaggcttctgacaatcaattctctgtccactcttttttttcctctctctccataacaattgttactggggacaaaatagggtgctggaggggaacagtaaaaagaaataatggtttgaacttagttcagtgtacgtttagtataaggaaggaaagctcttggatggtgaagagtgcttatgcagtgaaaggctctttgcttggtatatttaaaatgggattatgtaaagtactagaaaacacatgccatgcaacaatgccactttggcaggaagatggcttagaggcctccatagaggttttccatcttaaagttctctattttggtagcacaagacattagttcatcaaatggtggagtggaaatattgtttgcttatgcaaaccggctagatttgaagaattgaaaacacagccaataaggagctacgacacaatggtttgtgtacaaaactaaaagaccttggtttcacagtgagcctcttgctggctgccaggcttagttctcttccaggtaggaagtcacctgtgaattgattaaatgtggatagactcaactttgtttatagagttggatgacaccgtagagaagacacatgcaagtatttgtcaccaaagtatttatttgtcaatcattctctactgtcttttttttttttccctcttgaaatacaacttggccttctctgcaaaacccatttttttctacttgaaggacagatcatagttgaaaagacacaacaaattccacatactatccttccacaaaaggattcaaaaccactgagtatcatggaaaacaaatttttataaccttttcaaatgttttgacttgtaacatccttatgttggacttaattttcacctcctgcctgattatccatcttcaccttgacaggaagagcgtgttctcctctgtgatcttctctcttaaaatgagtgtgaaaagtaaaggccacctgttaccatttagaagtacagtttttctttaaatccacttgacatttcaagccttcacatttgctactttgcaataacattttcctttatggactatgtggtttctagaatggtgccatgtgggtcaaaatctagccaggaatgaatggtgttaaaatccctaagcttgaggttgttttaggttttcatctcctacaggggaaagattatactatgtccttatgcagaaatacatgaagcagatttcttcttatataccaggtctgatgagttggaaatgactgcctggatggctgcattgagattggctatttatggacagccaagaaaaagtctgcaccaatttgggatgtgtgtcctgggttaggggttgggcagtgtcctgtattagcctttccttctttagaagcctcttccaggatgtcactgctatactacacccccccacatttttagctgagaaagtagcatggccatgggtgtgtggcaacaacttctgccctgctccttcctcctctttcccctatatactgccttagactgatggatattcgatccctgtgcattttccaaacaaagaggtacaattactggcctggattgaaaagcccaggcaatgtgatatgtgctcatcaagataaatatatatctgcaagccttccctctgagccttaggggggtcttagtcaccaaagaagtgcaggttgcagcagtatttgctcttggtgaattttcagaggctagggtaattcctcagcctgtaaatggagacaagcttcaggctgcagactgggcagcagttgtgggcagataagagtgtgtcattccgtgccagaggttaatgggaattgtcagtgtggtggtgatttttccaatcctttgttctcattttgacagaggttgtggtctgagccaaacctaggatcctatttccaagaacacctgttgcttcatggatcaaatgtaagagatccttcttgggaactcctattccaaatagcaccatgtctgtccgtcgcatactgtctacattcctgacatacgctttcccctggctgagcctttggtcaccaaatggctaatctctttgctgcatgttgttttcttgcaaagctttaaaaatacttatttcctttttgtttctgagtagtatataaatatacctagaaatatatttcaagtcagcacttaagtctctctgccggctttagcagagagttctgtgtaataataatccgtgaagtaatcaaagttcaagtttattttaatatttatatttagaatacaatcaatcaaatgcacataaacacacccactcagtacccaagtctcctctctctccatgaccggtcttcatgtgagtccaaacccgggaaaacctggcccctgaaattataaatcatttgtacccagtcactgaatgacttgcattagttttcagtagattttttttccttcagcttatctgaatagctgcaaattacttctattatttttaaaatgaaaatatttagtggaccaatctataacatgacaggttccatttagcctaaagagagcaatttacaataataagatcgtttcacctggaaaagagaaagggcatcttgagaaagtaaaaagtcttgttggctttgttttaaaggtattagcattgtgttatttgttatctcctacaataatgccatatcccatttattgagtgttcaccatgtgccaagcgttgagttaattttgcatgcatgatcagacttaatcttcacggaaattcctgaggcagttatagatttctagttgatggatgaagatactgagttggagtgagaaaggtgataaagcagcttaccagaggtcacacagacaagacgttgaactagaatttgaacttaggtctttctgcttccaatgtccttgttctttcctgcttcccaataaagcaaaagacctggccttcgagcaaacagtgttgagagatctctttccaattatttaatatctcaagtcttcttagttttctgggcttgcctaagatcttgaatataagtgtccctaacaaaaacgagcccttggtgagaagggtatagtgagggtccatatctcctggccatctaactcaagacattttctggatttcaccacctcttgataggaggtatgacattggcaaaccatttcataagaccttccttcgatcacccttcctagccaccttccatcctgccctcttttgttgcaaaactcatctgcagagaccaaatccctccttaacattttattgcacattgttttgttttttatcatgtttccccaaatagaacctctgtccctggagaagaagactttatttcactcactgttgtatcctcagtacctagaatagtgtcgtccatagtaaacccttgctaaatatttgtgggatgagggaatgaaaacataaggcttagttagatggttccattttcttgtgctcataggcatttggaatttagccaagagcctctctctttcacatagcgtatatgatgagctgtggatacatttttatgtactctcgggtttttgttttataaaataatttaatgcatcattagtatagtaatgtttcatattcaggacatatctatctgtaagccctgtccttttggaaactcaagccaatttgtaattaaatacgcttcagaaatattgctgtgatttatcaagcaacatcacagagcttgaaaaacatgttttcctcacctaccctctcaaaatgc

SEQ ID NO: 117187 - DNA, 1020 bp, Homo sapiens
agttcctaaggccgcctgcggccggcaattaccccctgggtcctctcacacttagcagtgggtgtcagatggtggaagggaacgctcagggaggccccgggcggtgagttgtccctcgggcggggacgccctcgtgggcagtgcggcgtggacggcgcaaggaagaacccggagagatcccaagccacgaggcaccgcttccggcgcattgtgaggtcccacctttcccgccgcctgaggtcgcggcggctgctctttcccggagcagcgtccctggaggcgctgccagggggtgaggcacccacgcgtgcaccgtatgtaccccccagcgcggcgcttagaacgactcgcatgagtcgctgccttgggttggaaccggttactccgccgcttcgtactggactgcaaagtaacaagtacttcgccgggcagcggtgccgaccccgtgtgctacggcgagaggtgcttagcctagagccgacgaaaacatgtccccaggactccctttccctcccagactgcgtcccaccagatggagctttccgtctgttttaaccaccagtgtattcctgatgcctgacccaggcgctgaaatatttgttgaacgaataaatgtgtaggttaggactgacgacagtccgcgaattctggaacacgggctgattttacttttgaacaaatgatgcactggaacttcctgacagagctgaccttttataggaacatcaatggcagtcaccgctggcattttagcaaaggttgtcttggtcataatttccccttgactgtgtttccagcccttaatctatatcgggtgggacctggaagtctaccttctcgccacccctcggcaaaagtttgagaaagtgtttgaggcagagcctcctctctcatatgccctccatctgcgaattagaacgaattataagttctacggtgtcacatagggggttagcggagaggaagagggaaagaatcaaatacaggacgctgccttaaccaaagttctaaactctaaat

SEQ ID NO: 117188 - DNA, 273 bp, Homo sapiens
ctgcttgtcctgcctctgaatggagacaaagtgtggagtatatgaaagttgaagactatcttcggtccaagcctacaaatggctaaaggaggtatacagaggcaggacaagcactgcttgtcctgcctctggatactaaactagcagctgctctctgaatattctttggcaagacttcaccttccatcttgagggcgcgcttgctgagtcaacatatgtggaactaatgaaaacagcaaactctgaaccgaccttcagaggcaggacaagcag

SEQ ID NO: 117189 - DNA, 269 bp, Homo sapiens
tgttggcattgctgtttccttccggaggctctaggtgagaatcccttttcttgcctttctcagcttctaacgctgcattcttggatcacggccccgttctccatctccaaagccagcagtgtagcatcttctctcctctttgccttctgtcttgctcttgtaaagaccccagtgattacatagagcctgtttggataatccaggataacctcctcatctcaaaatttttaacttcacatctacagagttccttttgccaaattaggtag

SEQ ID NO: 117190 - DNA, 414 bp, Homo sapiens
ggtgggcagatcacgaggtcaagagttcgagaccagcctgaccaacatggtgaaaccccgtctctactaaaaatacaaaaattagctgggcatggtggtgtgtgcctgtaatcccagctactccggaggctgaagcaagagaatcacttgaacctgggaggtggaggttgtggtgagctgagatcgtgccacggcactccagcctaggcgacagagcaagactccatctcaaaaaagaaaaaagaaaaagaaaaagaaatttaaatgtgaaatatataaaacggaattaaaattggctaattttgttttaaaattagcacattggccaggcgtggtggctcatgcctgtaatcttagcacttggggagtctgaggcgggcggatcacctgaggtcaggagttcgagaccagcct

SEQ ID NO: 117191 - DNA, 433 bp, Homo sapiens
agggcaggagaggaatgggtgggggaagggaagatgggggcagtggatggtcaccatgggtaaatcagtaatttactttttaaaaaattagtttctgatatataattcacctaacataaaattcactgttcaaaatccgtacgattcggccgggagcggcctgtaatcttagcactttgggaggctgaggcaggcggatcacttgagctcaggagttcgagactaggctggccaacatggtgaaacctcgtctctaataaaaatacaaaaattagccgggcgtggtggcgcatgcctacaatcccagctgctcaggaggctgaggcacaagaatcgcttgaacccgggagggggaggttgcagtgagccgagatcgtgccactgcactccagcctgggtaacagagcgagtctcagtctcaaaacaaaaaaca

SEQ ID NO: 117192 - DNA, 364 bp, Homo sapiens
aatgtggacacaggcctagtaggtagtctccaactacctgctattctggactagaatctaggtctcctgaacccagaatcctttctctttccgtgaggccaatcctctaagccatgaacaatagccttacaaaatgaggtcagagggttaaaataaagtgaacagtgttttacagggtccctaaaaattaaatcctaagtggagcatgcttaacactggttacagagccatgaaagaggtatttagggcaccagatcatattaatcataataagtagttagaagtcaatcccatctgccactatgccaggtctgcctgccccaaagtgtaaacatttattaagtcccacaggatttagctttag

SEQ ID NO: 117193 - DNA, 661 bp, Homo sapiens
aggccacaactacaaagccattaaaaatatatatatatatgattaattttttgtaaaaatttttatataaatatgtatttccctcctctttgataaaagctcttaatatcacagttggcttacttctacctggaagaactccccacctaagttggataaggtttagaagtgaagtcattaggtgagaaaattggcagcagtctcgaaatccttttcccagctatgtagcagttgcttaagcccctagcttcctttccatctttgtcaggtgaaatgagtgaatcaattagagaaactggtattatttacccaggtaaactcaagaaaaatcagttgcactaattgtaggctaaagatagaccacgtttgaaatctcccagttgaaaaattattttaaaaacagacatgaggctgaatgtgggtgtcacgcctataatcccagcacttcgggagactaaagtgtaaggattgtttgaagccaggagtttgagaccagcctggggaacatagtgagaccacgtttctgcaaaagaatttaaaaattaggtgggtgatggtatgcccctgtagtcccagccatacctgggcatcctggccaacacaacgaaaccctgttgaaaacaaataagtaaaaacagatgaaatgtaattcaccacatta

SEQ ID NO: 117194 - DNA, 1222 bp, Homo sapiens
agtgttgctctggtgtctgtattctggcttatgaagattatttgaaaaagaactcttactacattgaaatgcagacttttaaaaatttaaatattggattaggcagtcaaaaaaccaaacaagcataaaaggtcagtaagttgtaatcttaaaagtaaaggtggaaaactcattataaatggaagaaaagttttgatttccttttttgtttgatgggcagtatgccatattatatccaaagttggtttaaaaaatacttccatcaactatttttatttaaaataaacatttgagggaagttaccaaggcagcttttttcctcaaaagtaacctgttcctctttggaacagcacattttaggggcatggttaatacctgagatttttactcagtaaacctgatggttaccgtgtgtaaaatatctttaagtaggattgaaggcctctgtggggaatataatgttaccaaagcctataaaaataaattttacatgttcttttttatgacagagagcagcactggttctgttattttttaaaatgaataactgatttcttgacaggtgtttagtatttcttccctcactgctgattcttggatagaaaccattctttatatttgatagactgttttcagaaaactcttatcaacaagtgtacaatagttatctaaaactgtacatttagaatggagcagtttaatactagatctcagaaatttgaaaaatagcaaagaagactggatttggaaagcatggtctacaattgcttgtcaattctgaagctatgaagaataaatgtttcagctttggattatgaaaccccgtttatgatttttaaaacacacttgaaataaaaatgattgaactaaattttggtccggtgacatcattttgcactgcatagcccattatacattgtaagtctttttgttttaatttattactgagagttttctgtgaagctacagcatatctaatcagagaatttctgatttgtttccttatactgtgattatgttatattaaggcatttgtagtgcagcttaagactgaatttatgctttttgtaaacatgatcggtgtaaatgtcttataaacattctggagtatgtataactttaatgaatgaaatttaatggacctgattaaaataaagggatttaatctttgttaaagtgaagttagtggaataaattacctactggaatatagtccaagtca

SEQ ID NO: 117195 - DNA, 869 bp, Homo sapiens
agtgttgctctggtgtctgtattctggcttatgaagattatttgaaaaagaactcttactacattgaaatgcagacttttaaaaatttaaatattggattaggcagtcaaaaaaccaaacaagcataaaaggtcagtaagttgtaatcttaaaagtaaaggtggaaaactcattataaatggaagaaaagttttgatttccttttttgtttgatgggcagtatgccatattatatccaaagttggtttaaaaaatacttccatcaactatttttatttaaaataaacatttgagggaagttaccaaggcagcttttttcctcaaaagtaacctgttcctctttggaacagcacattttaggggcatggttaatacctgagatttttactcagtaaacctgatggttaccgtgtgtaaaatatctttaagtaggattgaaggcctctgtggggaatataatgttaccaaagcctataaaaataaattttacatgttcttttttatgacagagagcagcactggttctgttattttttaaaatgaataactgatttcttgacaggtgtttagtatttcttccctcactgctgattcttggatagaaaccattctttatatttgatagactgttttcagaaaactcttatcaacaagtgtacaatagttatctaaaactgtacatttagaatggagcagtttaatactagatctcagaaatttgaaaaatagcaaagaagactggatttggaaagcatggtctacaattgcttgtcaattctgaagctatgaagaataaatgtttcagctttggattatgaaaccccgtttatgatttttaaaacacacttgaaataaaaatgattgaacta

SEQ ID NO: 117196 - DNA, 394 bp, Homo sapiens
tatttggtgtttttaagaacaaatgtgaaaatgcgactgataaaattattatttatacactatgtatgtgttacatacgtatgtttataaatatatatatatgattgtttgtgtgtgtaagtatatttctcctaaatccctcacttcagtcttatttcttctataatctagtgtcaagaggtgaacattcgtaatatatccatggttgtaaccaaaatctctgattgtaattaatccatatattatttctttgttttttagtagattaacagaaaaaatattcaaataaattagattattccctaaatgggtcagaatcatttatatagaaggtcttatgaaaaatatttaggaaattcaggtttggaatttctgcattctatgaatttccaca

SEQ ID NO: 117197 - DNA, 924 bp, Homo sapiens
acagatggatcgacagcagctgtccgccaggatgcatgtgctctgccttcctaggggttgggcacgtgatcatgggatggtgtcaacccaagagaaggggtcttaacatgcaaacccttgaataccagaaaacggcagctgcaaagggaaaagataagaacaagggaaaatttagtattttaactttttgctttctgtatgggtaagaacaaaaccccagaaacagagggcaggctaattgggtgatcaaaggcacaggacaggggttggagcacgccaggagctgacagtcctgttagcagaagcatgtgagccggggagcagctgtccccagacccctgaggtgcaggatgtggggcattgcgaaccacacgggccccaccgtcctccccaccccggggcgatgacagtgtggactaaggctaacatgcttttcctccatcaatctttgaatgaaatgtggatactttgttcagagcctgtctttaaggctggtgtgagagcaggccttgggtgagatggctgggcagcgtgctgcccggcaggcatgtgcttttaggcagacactaactaaaacatcccaaacaaatgaacatggagtgaggaacatggctgagtccaggcctcagatcccagatatggctgtgggagaaaggagacccggtctgcatctcaggagggccagagcaagttctgagctgctctgtggccagggtgggctcattcatccctgcattccaactcccagccctgttcagaaacatctattgaatgagcacatgaatgacaacatgaatgaaatcacagtatattgtcccattcctggggtatatgaaaaacagagggaaaggaattccaagatactccttcaccgttccagcctgccctgttccactccaggcctcacgactgcactcggccccg

SEQ ID NO: 117198 - DNA, 276 bp, Homo sapiens
ctggtatcacatggtagtagcctatttagaaatttgtgaatctctaatcacaaaaagaattgacttccttaaaaatatattatatcacctggaaagttctgaatatattttaagtcagcgatgatgcatttgtaaaacatatacttcctttctttagacaaaggatctttatgattctagaagctctacatttctgtggacttgtattttattttttattctagcattttatgttaaatatgataaatgaatttcaagcagcaatgtaagcaaatg

SEQ ID NO: 117199 - DNA, 104 bp, Homo sapiens
ggtgtctgccatatctttgcatccttcaatgacacttttgtccatgtcactgatctttctggcaaagaaatcatctgccgtgtgactggtaggatgaaggtgaa

SEQ ID NO: 117200 - DNA, 3091 bp, Homo sapiens
  misc_feature (1)..(1): n is a, c, g, or t
ngacgagggaaccatcattaattgaagtgagatttttctggcctgagacttgcagggaggcaagaagacactctggacaccactatggacagcctcttgatgaaccggaggaagtttctttaccaattcaaaaatgtccgctgggctaagggtcggcgtgagacctacctgtgctacgtagtgaagaggcgtgacagtgctacatccttttcactggactttggttatcttcgcaataagaacggctgccacgtggaattgctcttcctccgctacatctcggactgggacctagaccctggccgctgctaccgcgtcacctggttcacctcctggagcccctgctacgactgtgcccgacatgtggccgactttctgcgagggaaccccaacctcagtctgaggatcttcaccgcgcgcctctacttctgtgaggaccgcaaggctgagcccgaggggctgcggcggctgcaccgcgccggggtgcaaatagccatcatgaccttcaaaggtgcgaaagggccttccgcgcaggcgcagtgcagcagcccgcattcgggattgcgatgcggaatgaatgagttagtggggaagctcgaggggaagaagtgggcggggattctggttcacctctggagccgaaattaaagattagaagcagagaaaagagtgaatggctcagagacaaggccccgaggaaatgagaaaatggggccagggttgcttctttcccctcgatttggaacctgaactgtcttctacccccatatccccgcctttttttcctttttttttttttgaagattatttttactgctggaatacttttgtagaaaaccatgaaagaactttcaaagcctgggaagggctgcatgaaaattcagttcgtctctccagacagcttcggcgcatccttttgcccctgtatgaggttgatgacttacgagacgcatttcgtactttgggactttgatagcaacttccaggaatgtcacacacgatgaaatatctctgctgaagacagtggataaaaaacagtccttcaagtcttctctgtttttattcttcaactctcactttcttagagtttacagaaaaaatatttatatacgactctttaaaaagatctatgtcttgaaaatagagaaggaacacaggtctggccagggacgtgctgcaattggtgcagttttgaatgcaacattgtcccctactgggaataacagaactgcaggacctgggagcatcctaaagtgtcaacgtttttctatgacttttaggtaggatgagagcagaaggtagatcctaaaaagcatggtgagaggatcaaatgtttttatatcaacatcctttattatttgattcatttgagttaacagtggtgttagtgatagatttttctattcttttcccttgacgtttactttcaagtaacacaaactcttccatcaggccatgatctataggacctcctaatgagagtatctgggtgattgtgaccccaaaccatctctccaaagcattaatatccaatcatgcgctgtatgttttaatcagcagaagcatgtttttatgtttgtacaaaagaagattgttatgggtggggatggaggtatagaccatgcatggtcaccttcaagctactttaataaaggatcttaaaatgggcaggaggactgtgaacaagacaccctaataatgggttgatgtctgaagtagcaaatcttctggaaacgcaaactcttttaaggaagtccctaatttagaaacacccacaaacttcacatatcataattagcaaacaattggaaggaagttgcttgaatgttggggagaggaaaatctattggctctcgtgggtctcttcatctcagaaatgccaatcaggtcaaggtttgctacattttgtatgtgtgtgatgcttctcccaaaggtatattaactatataagagagttgtgacaaaacagaatgataaagctgcgaaccgtggcacacgctcatagttctagctgcttgggaggttgaggagggaggatggcttgaacacaggtgttcaaggccagcctgggcaacataacaagatcctgtctctcaaaaaaaaaaaaaaaaaaaagaaagagagagggccgggcgtggtggctcacgcctgtaatcccagcactttgggaggccgagccgggcggatcacctgtggtcaggagtttgagaccagcctggccaacatggcaaaaccccgtctgtactcaaaatgcaaaaattagccaggcgtggtagcaggcacctgtaatcccagctacttgggaggctgaggcaggagaatcgcttgaacccaggaggtggaggttgcagtaagctgagatcgtgccgttgcactccagcctgggcgacaagagcaagactctgtctcagaaaaaaaaaaaaaaaagagagagagagagaaagagaacaatatttgggagagaaggatggggaagcattgcaaggaaattgtgctttatccaacaaaatgtaaggagccaataagggatccctatttgtctcttttggtgtctatttgtccctaacaactgtctttgacagtgagaaaaatattcagaataaccatatccctgtgccgttattacctagcaacccttgcaatgaagatgagcagatccacaggaaaacttgaatgcacaactgtcttattttaatcttattgtacataagtttgtaaaagagttaaaaattgttacttcatgtattcatttatattttatattattttgcgtctaatgattttttattaacatgatttccttttctgatatattgaaatggagtctcaaagcttcataaatttataactttagaaatgattctaataacaacgtatgtaattgtaacattgcagtaatggtgctacgaagccatttctcttgatttttagtaaacttttatgacagcaaatttgcttctggctcactttcaatcagttaaataaatgataaataattttggaagctgtgaagataaaataccaaataaaataatataaaagtgatttatatgaagttaaaataaaaaatcagtatgatggaataaacttg

SEQ ID NO: 117201 - DNA, 2683 bp, Homo sapiens
  misc_feature (1)..(1): n is a, c, g, or t
ngacgagggaaccatcattaattgaagtgagatttttctggcctgagacttgcagggaggcaagaagacactctggacaccactatggacagcctcttgatgaaccggaggaagtttctttaccaattcaaaaatgtccgctgggctaagggtcggcgtgagacctacctgtgctacgtagtgaagaggcgtgacagtgctacatccttttcactggactttggttatcttcgcaataagaacggctgccacgtggaattgctcttcctccgctacatctcggactgggacctagaccctggccgctgctaccgcgtcacctggttcacctcctggagcccctgctacgactgtgcccgacatgtggccgactttctgcgagggaaccccaacctcagtctgaggatcttcaccgcgcgcctctacttctgtgaggaccgcaaggctgagcccgaggggctgcggcggctgcaccgcgccggggtgcaaatagccatcatgaccttcaaagcccctgtatgaggttgatgacttacgagacgcatttcgtactttgggactttgatagcaacttccaggaatgtcacacacgatgaaatatctctgctgaagacagtggataaaaaacagtccttcaagtcttctctgtttttattcttcaactctcactttcttagagtttacagaaaaaatatttatatacgactctttaaaaagatctatgtcttgaaaatagagaaggaacacaggtctggccagggacgtgctgcaattggtgcagttttgaatgcaacattgtcccctactgggaataacagaactgcaggacctgggagcatcctaaagtgtcaacgtttttctatgacttttaggtaggatgagagcagaaggtagatcctaaaaagcatggtgagaggatcaaatgtttttatatcaacatcctttattatttgattcatttgagttaacagtggtgttagtgatagatttttctattcttttcccttgacgtttactttcaagtaacacaaactcttccatcaggccatgatctataggacctcctaatgagagtatctgggtgattgtgaccccaaaccatctctccaaagcattaatatccaatcatgcgctgtatgttttaatcagcagaagcatgtttttatgtttgtacaaaagaagattgttatgggtggggatggaggtatagaccatgcatggtcaccttcaagctactttaataaaggatcttaaaatgggcaggaggactgtgaacaagacaccctaataatgggttgatgtctgaagtagcaaatcttctggaaacgcaaactcttttaaggaagtccctaatttagaaacacccacaaacttcacatatcataattagcaaacaattggaaggaagttgcttgaatgttggggagaggaaaatctattggctctcgtgggtctcttcatctcagaaatgccaatcaggtcaaggtttgctacattttgtatgtgtgtgatgcttctcccaaaggtatattaactatataagagagttgtgacaaaacagaatgataaagctgcgaaccgtggcacacgctcatagttctagctgcttgggaggttgaggagggaggatggcttgaacacaggtgttcaaggccagcctgggcaacataacaagatcctgtctctcaaaaaaaaaaaaaaaaaaaagaaagagagagggccgggcgtggtggctcacgcctgtaatcccagcactttgggaggccgagccgggcggatcacctgtggtcaggagtttgagaccagcctggccaacatggcaaaaccccgtctgtactcaaaatgcaaaaattagccaggcgtggtagcaggcacctgtaatcccagctacttgggaggctgaggcaggagaatcgcttgaacccaggaggtggaggttgcagtaagctgagatcgtgccgttgcactccagcctgggcgacaagagcaagactctgtctcagaaaaaaaaaaaaaaaagagagagagagagaaagagaacaatatttgggagagaaggatggggaagcattgcaaggaaattgtgctttatccaacaaaatgtaaggagccaataagggatccctatttgtctcttttggtgtctatttgtccctaacaactgtctttgacagtgagaaaaatattcagaataaccatatccctgtgccgttattacctagcaacccttgcaatgaagatgagcagatccacaggaaaacttgaatgcacaactgtcttattttaatcttattgtacataagtttgtaaaagagttaaaaattgttacttcatgtattcatttatattttatattattttgcgtctaatgattttttattaacatgatttccttttctgatatattgaaatggagtctcaaagcttcataaatttataactttagaaatgattctaataacaacgtatgtaattgtaacattgcagtaatggtgctacgaagccatttctcttgatttttagtaaacttttatgacagcaaatttgcttctggctcactttcaatcagttaaataaatgataaataattttggaagctgtgaagataaaataccaaataaaataatataaaagtgatttatatgaagttaaaataaaaaatcagtatgatggaataaacttg

SEQ ID NO: 117202 - DNA, 438 bp, Homo sapiens
ttaaacaaacaaacaaaaaacccaaaaaaactctttcccaatttactttcttccaacatgttacaaagccatccactcagtttagaagactctccggccccaccgacccccaacctcgttttgaagccattcactcaatttgcttctctctttctctacagcccctgtatgaggttgatgacttacgagacgcatttcgtactttgggactttgatagcaacttccaggaatgtcacacacgatgaaatatctctgctgaagacagtggataaaaaacagtccttcaagtcttctctgtttttattcttcaactctcactttcttagagtttacagaaaaaatatttatatacgactctttaaaaagatctatgtcttgaaaatagagaaggaacacaggtctggccagggacgtgctgcaattggtgcagttttgaa

SEQ ID NO: 117203 - DNA, 2799 bp, Homo sapiens
  misc_feature (1)..(1): n is a, c, g, or t
ngacgagggaaccatcattaattgaagtgagatttttctggcctgagacttgcagggaggcaagaagacactctggacaccactatggacagcctcttgatgaaccggaggaagtttctttaccaattcaaaaatgtccgctgggctaagggtcggcgtgagacctacctgtgctacgtagtgaagaggcgtgacagtgctacatccttttcactggactttggttatcttcgcaataagaacggctgccacgtggaattgctcttcctccgctacatctcggactgggacctagaccctggccgctgctaccgcgtcacctggttcacctcctggagcccctgctacgactgtgcccgacatgtggccgactttctgcgagggaaccccaacctcagtctgaggatcttcaccgcgcgcctctacttctgtgaggaccgcaaggctgagcccgaggggctgcggcggctgcaccgcgccggggtgcaaatagccatcatgaccttcaaagattatttttactgctggaatacttttgtagaaaaccatgaaagaactttcaaagcctgggaagggctgcatgaaaattcagttcgtctctccagacagcttcggcgcatccttttgcccctgtatgaggttgatgacttacgagacgcatttcgtactttgggactttgatagcaacttccaggaatgtcacacacgatgaaatatctctgctgaagacagtggataaaaaacagtccttcaagtcttctctgtttttattcttcaactctcactttcttagagtttacagaaaaaatatttatatacgactctttaaaaagatctatgtcttgaaaatagagaaggaacacaggtctggccagggacgtgctgcaattggtgcagttttgaatgcaacattgtcccctactgggaataacagaactgcaggacctgggagcatcctaaagtgtcaacgtttttctatgacttttaggtaggatgagagcagaaggtagatcctaaaaagcatggtgagaggatcaaatgtttttatatcaacatcctttattatttgattcatttgagttaacagtggtgttagtgatagatttttctattcttttcccttgacgtttactttcaagtaacacaaactcttccatcaggccatgatctataggacctcctaatgagagtatctgggtgattgtgaccccaaaccatctctccaaagcattaatatccaatcatgcgctgtatgttttaatcagcagaagcatgtttttatgtttgtacaaaagaagattgttatgggtggggatggaggtatagaccatgcatggtcaccttcaagctactttaataaaggatcttaaaatgggcaggaggactgtgaacaagacaccctaataatgggttgatgtctgaagtagcaaatcttctggaaacgcaaactcttttaaggaagtccctaatttagaaacacccacaaacttcacatatcataattagcaaacaattggaaggaagttgcttgaatgttggggagaggaaaatctattggctctcgtgggtctcttcatctcagaaatgccaatcaggtcaaggtttgctacattttgtatgtgtgtgatgcttctcccaaaggtatattaactatataagagagttgtgacaaaacagaatgataaagctgcgaaccgtggcacacgctcatagttctagctgcttgggaggttgaggagggaggatggcttgaacacaggtgttcaaggccagcctgggcaacataacaagatcctgtctctcaaaaaaaaaaaaaaaaaaaagaaagagagagggccgggcgtggtggctcacgcctgtaatcccagcactttgggaggccgagccgggcggatcacctgtggtcaggagtttgagaccagcctggccaacatggcaaaaccccgtctgtactcaaaatgcaaaaattagccaggcgtggtagcaggcacctgtaatcccagctacttgggaggctgaggcaggagaatcgcttgaacccaggaggtggaggttgcagtaagctgagatcgtgccgttgcactccagcctgggcgacaagagcaagactctgtctcagaaaaaaaaaaaaaaaagagagagagagagaaagagaacaatatttgggagagaaggatggggaagcattgcaaggaaattgtgctttatccaacaaaatgtaaggagccaataagggatccctatttgtctcttttggtgtctatttgtccctaacaactgtctttgacagtgagaaaaatattcagaataaccatatccctgtgccgttattacctagcaacccttgcaatgaagatgagcagatccacaggaaaacttgaatgcacaactgtcttattttaatcttattgtacataagtttgtaaaagagttaaaaattgttacttcatgtattcatttatattttatattattttgcgtctaatgattttttattaacatgatttccttttctgatatattgaaatggagtctcaaagcttcataaatttataactttagaaatgattctaataacaacgtatgtaattgtaacattgcagtaatggtgctacgaagccatttctcttgatttttagtaaacttttatgacagcaaatttgcttctggctcactttcaatcagttaaataaatgataaataattttggaagctgtgaagataaaataccaaataaaataatataaaagtgatttatatgaagttaaaataaaaaatcagtatgatggaataaacttg

SEQ ID NO: 117204 - DNA, 1389 bp, Homo sapiens
  misc_feature (1)..(1): n is a, c, g, or t
  misc_feature (1169)..(1170): n is a, c, g, or t
  misc_feature (1187)..(1187): n is a, c, g, or t
  misc_feature (1189)..(1190): n is a, c, g, or t
  misc_feature (1196)..(1197): n is a, c, g, or t
  misc_feature (1199)..(1199): n is a, c, g, or t
ngacgagggaaccatcattaattgaagtgagatttttctggcctgagacttgcagggaggcaagaagacactctggacaccactatggacagcctcttgatgaaccggaggaagtttctttaccaattcaaaaatgtccgctgggctaagggtcggcgtgagacctacctgtgctacgtagtgaagaggcgtgacagtgctacatccttttcactggactttggttatcttcgcaataagaacggctgccacgtggaattgctcttcctccgctacatctcggactgggacctagaccctggccgctgctaccgcgtcacctggttcacctcctggagcccctgctacgactgtgcccgacatgtggccgactttctgcgagggaaccccaacctcagtctgaggatcttcaccgcgcgcctctacttctgtgaggaccgcaaggctgagcccgaggggctgcggcggctgcaccgcgccggggtgcaaatagccatcatgaccttcaaagcccctgtatgaggttgatgacttacgagacgcatttcgtactttgggactttgatagcaacttccaggaatgtcacacacgatgaaatatctctgctgaagacagtggataaaaaacagtccttcaagtcttctctgtttttattcttcaactctcactttcttagagtttacagaaaaaatatttatatacgactctttaaaaagatctatgtcttgaaaatagagaaggaacacaggtctggccagggacgtgctgcaattggtgcagttttgaatgcaacattgtcccctactgggaataacagaactgcaggacctgggagcatcctaaagtgtcaacgtttttctatgacttttaggtaggatgagagcagaaggtagatcctaaaaagcatggtgagaggatcaaatgtttttatatcaacatcctttattatttgattcatttgagttaacagtggtgttagtgatagatttttctattcttttcccttgacgtttactttcaagtaacacaaactcttccatcaggccatgatctataggacctcctaatgagagtatctgggtgattgtgaccccaaaccatctctccaaagcattaatatccaatcatgcgctgtatgttttaatcagcagaagcatgtttttgttgnncacagagatgttggtgngnnggggtnnancaggtggtacctaagacagtataaaggcttaaggggggaggaaaaaaccataaggggtttgatgaattggaagaactttaggcgtagaacccatctattattcaggaggtgatgggaaaatggggcaaaaaagagggtgggtgtcggaaggaaaaagatttggaggaatcaaggttcatcacaaaataaa

SEQ ID NO: 117205 - DNA, 722 bp, Homo sapiens
gagaagctggagtgagcgggcatgctgccgcgggtgccagcaggcgctcttctgaggaggtgacatgtgggtgcacccgatggagctccaagacacggaagtctctgccgggatgcagtttgcctacacttcctgcctggatgatctgccacatcctctaaggagtctccggcctctgagcaccccctcggcacccaccctgttcctcacctttcttagagcagccagaatgatcttatcacctgcaccccacaccacagcttgaatctctgcaaagacttctgaacatgcttggcatgaagttcaaactcaagacgtgactcccaagagaatgcctgacgcggagaccatggtgtcttcaccagcatggagaaggtggggtcattgggggggaggcggagggtatcattctgccctctggtgatgcccgatgtcgctgagtgtgaaccatgagaagtatgacgacaagcgctcgagatcatcagcaatgacatcctgcaacatcaatctgcttagaacacccctgtgtcaaggtcatccatgacaactttgtgtatcgtggaaggactcatgatcagcagtccatgccatcatctggcacccagaagactgtggatggcccctccggggaaactgttggcgtgatgggcgggggctctccagaacatcatccctgcctctattgggctgcagtgctgtgggcagggtcgttccctgagctg

SEQ ID NO: 117206 - DNA, 648 bp, Homo sapiens
gaataaacaaaaagtggaaagaacccaaatgtccatcaactgataaataaacaaaatgtgatatagccatacaatggaatatgatttagccataaaaaggaatgaaatactgacacaacttcaacatcgatgaaccttggaagcatgctaagcacaaaagccagacacaaaaggccacaagttgtatgattccatctatgtgaaatgtatagaaaaagcaaatctttagagacagtaagtagattagtggttgccagagactgtagggagggcaaatggggagtaactgttcatggatatgtttttttttgggaggggtgatgaaaatattcagaaattagatagtgatggtggttataacagccttgtgaatataatttttaaatccactgaattgtgtacttgaaaatggtgggccaggcgcggtggctcacgcctgtagtcccagcactttgggaggctgaggcgggcggatcacctgaggttgggagtttgagaccagcctgatcagcgtggagaaacccccgtctctactgaaaatgcaaaggattggctgggcgtggtggcacatgcctgtggtcccggctgcgtgggaggctgaggcgggagaatccttgaaccgggaaggcggaggttgcagtgagccga

SEQ ID NO: 117207 - DNA, 359 bp, Homo sapiens
ggataacaggtgtgagccaccacgcccagccagccctgcacacttctaattagtccaatgacttaggcaagtttcttcatttcattaagcctttttctttttccctaaaaaaggttatggttttggaaatactttccccgtggggttgttgtgagagtccagtgaaataataaggagtggtgcttattacaaaatcaaacgctcaacaaaaataggattcaaagccatttttaaaaatcacatttccttttgttggcttgattaaattgggtaccaataagattaacaaatcttgattaggttaagattagtataaaagacctttcttccagggtattcaatcatttagagcttgtctt

SEQ ID NO: 117208 - DNA, 492 bp, Homo sapiens
aaattgataatatgcatttcatcaaaattaaaaacttccactcttcaaaatacactgttaagagaatgaaaagacatagatcaagaggacgtatttttaaatcacgtatctgtaaaggacttctatgcagaacatataaaacccttgaacctcaataataaaatgcaaacatgcaataaaaagaggaacgaaagatttgaacagacacttcaccaacagaaatattgatggcaaacaagatcaggaaaagatgcttaatatcattattcaataaagagatgcaaattgaaactacaagttgataccactacacacctgctagaaggtgtaaaattaaacagactgatataccaagtgatggcaaggatgtagagaaattagaaacctcctacactgctcatgggaaggtaaaaatggcacaaccactttggaaaacagtttggcagtttattaaatagctaaatacacctaccatatgatccagccattcca

SEQ ID NO: 117209 - DNA, 376 bp, Homo sapiens
caggaagtttcacaaaggctttcccttttttcacagaatgtctagtaggactggtgactccgaatgggaaaaacacaggacctagacctgccctgtccattagtgtagccccttggccacttagggccactgagcacttgaaatgaggctagttcgtttaggaggcactggaagtgcaaaatacgcacgggtgtcagttcgacgaatgtgaaatacctcactgatcactttttatattgattgcacgttgaaatattttggatatattgcagtaaagaaaatgtaagccgggcacggtgtctcacacctgtgatccagcactttaggaggctgaggtgggaggatcgcttgggcaggagttagagaccagcctggg

SEQ ID NO: 117210 - DNA, 219 bp, Homo sapiens
tgagaagcagttttcctgccttcttggaaagacctcagtcaacacaggaaacaatgggagaataacatttgatcctacctaaatggacaacattgtgtaatatgggcggagagggcttagaaattcagaaagagatcagtgtggaccagaataaaaggctttgagaaagaaaggtggaccttgaggaactggtaatatttaaatagaaatgggtactgg

SEQ ID NO: 117211 - DNA, 242 bp, Homo sapiens
gctctgtgaacagggatgggacaatcagatgaaacatcattaagtttcctggtagaaagcacgatgagccctttgttccaaggaaagaagacatttagattttatcctcttattttggagaccaggccagggtaaatcaaattctgactttacattctgccttttccaatgaaggaatgcagtctccaggagagaagtagcagagcagaggagtcaagaccacatgcatgcacccaggcaga

SEQ ID NO: 117212 - DNA, 450 bp, Homo sapiens
gtgaaaccctgtctctaaaaataaataaataaataaataaataataatctgagaagtcctgagaaataaactctgtggaaatgtgttcagtgcaaagtttcacaagctatttgaccacagatttgtttttgttgttgttgctgagatggggtcttgctttgttgccctggctggaatgcagtggcatgatcttggctcactgcaacctccgcctcccaggctcaagtgatcctcccacctcagcctcccaagtagctgatactacgggtatgcaccaccatgcccagtgaatttttatatctttatttggtagagagagggtttcaccatgttgaacaggctcattcttcatttaatacctaatgtcaagttgtgctgcagtcagctttaaaggcctgaatccacacaagtcattctcagggctttgtgagtggcagggtgcccttcttg

SEQ ID NO: 117213 - DNA, 189 bp, Homo sapiens
atctaatgctacacaaaaagggcaggatacaaaataaggtgtattggaagaaagagggtggcatggttgtccatccactgctttcagggactggactaagtgacctggatcagagggagggcaagagatctgcttcctgcctgagccctgtgaacagttgaaatcactcgtgtgtctgcaggaatcatt

SEQ ID NO: 117214 - DNA, 259 bp, Homo sapiens
cccacctgctcctatccaaagtaattcccagccgtgggacggggcctggacgggcccctcctacttccagagtcggcattcatttatgtatgtgtgtgtgtatgtatgtatgtatgtgtgtatgcatgtatagctctgtcgcccaggttggagtgcagtggtgcgttctcggctcactgcaacctccacttcccaggtttaggtgattctcctgcctcagcttcccgactagctgggattacaggcgcctgccaccagg

SEQ ID NO: 117215 - DNA, 510 bp, Homo sapiens
agttccatttacaacagactcatccacaaaaccgaagtggtagaaacaggtctttttgaagccaggcgtggtggctcatgcctgtaatcccaacactttgggaagcttaggcaggagtatcgcttgagcccaggagttcgagaacagcctggccaacatggtgaaactctgtctctacaaaaaaaactttaaaaagtagctgggggtggtggtgtgtgcctgtgtggtcccagttactcgggaggctgaggtgagcggatcacttgagcccaggaagttgagccacaatggcaccacggcactccagcctgggtgacagggcgagatcctgtctgaaaagaaaaaaaaaaagaaaagagaagaaaagaaaagaaaacaggtcttcctgggagcacctagacaaaggcctttgtaaagataaattaccgaggaatatttctagttgcctgttttcttcaaaatcacagtcaagtaagctgggcgtggtggctcacctctgtaatcccagca

SEQ ID NO: 117216 - DNA, 770 bp, Homo sapiens
tcctttccgtgctacctgcagagggatccatacggcgttgttctggattcccgtcataacttaaagggaaactttcacaatgtccggagcccttgatgtcctgcagatgaaggaggaggatgtccttaagttccttgcagcaggaacccacttaggtagcaccaatcttgacttccagatggaacagtacatctataaaaggaaaagtgatggcgtctatatcataaatctgaagaggacctgggagaagcttctgctggcagcttgtgctgttgttgccattgaaaaccctgctcatgtcagtgttaaatcctccaggaatactggccagagggctgtgctgaagtttgctgctgccactggagccactccaattgctggccgcttcactcctggaaccttcactaacgagatccaggcagccttctgggagccacggcttcttgtggttactgatcccagggctgaccaccagcctctcacagaggcatcttaagttaacctacctaccattgctctgtgtaacacagattctcctctgtgctgtgtggacattgccatcccatgcaacagcaagggagctcactcagtgggtttgatgtggtggatgctggcttgggaagttctgcgcatgcatggcaccatttcccgtgaacacccatgggaggtcatgcctgatctctacttctacagagatcctggagagattgaaaaagaagagtaggctgctgctgaaaaggcagtgaccgaggaggaatttcagggtgaat

SEQ ID NO: 117217 - DNA, 759 bp, Homo sapiens
taagtttgacacaaatcccagaagctataacataaaagactgatacatttgacaacatcaaaatgagatccacttcataagagtaacactgtaaacaaagtcaaaagatacatgataatctgagaaaaataatttggaaaaaatatgataaaaggagttaattttcttaatatacaaagagcccttaaaaataaataaaaagggtcattaattgaaaaatgggcaaaaggacatggatagaaattcacagaaaagaagtgtaagtggttcttaaatatatgaaaagacccacaaccctcttataataaaaagtacaaatcagagctgcaataagaaggcatttgtaacctatcagattggaagagatcaaaatatttaataatacactgatttggtgacagtgtaaagaaaaattactttcatacattgctggtgagagtaaatggatacgattgctttggaaggcaatttgtgatatttatctaaattatgaatgcccatctcttagaacccagcagttccactaataggtatctgtcctagagaaacactcacatgtacaatgttcattggacattattgtaatcatggaaaattgaagacaacaatgtaaatatccatcagtgggagatgggctaaataaaacctgggttgttcagacctttagtgcgtcaataaaataccttagtgggttttgacaccgtgtgaaacaaaagaatagaagataacggagtgcattgcacataatgtggctgaata

SEQ ID NO: 117218 - DNA, 901 bp, Homo sapiens
acggccggcggaggaaggggagggagcgaggagcgcgcgctgctctcgcgtgctctcgcgccgctcgcgtgaccggccggtgtgtgcgcgaggcgccggctcccggggcacggacggccgggcgcgcgcctctgcgaggggcgtccgggtccgagtcggcggtccgggccggcgcgaggtgcgtgcgggcgggccgcgggggtcccggacggacacaagcgcacacactcccggaggagccttcgaggctgctcttcctcggccagacggagagcggcactgtctccccgcccagcgctcactcgccccgcgtctccccccgcggcggctgctcctcctcggcaccgccagccccagcgccgctcccgggcgggcgggcggcggcggcggcggcggcgggacccgcggagccgctttgtgtgcagcccgactaggggcggcggcgcaaccacctgacagaggcccgggcgctcgatgcaccttccgcccgcatgaggaggagaggcggttgaaggactgtgaaccataagttgtcccccaggatggaccttcactgcgcaggcccaaggcctgcagatggcctctgtgggcgtcgtgaagtgccgaggggaagatcgttaacctcagggggttaaagagaatcacgaacaagaatcacccagcggacggaaattgctcaagcgcctgaaagaaatgggtcggttgaaaaaccctttattggaattctgggatcaaggacatcatgaaggatggagcacacggcaggtatattccccagtaagcctagtgcattttgtggagttctgagaatctttccctcagggaacccccaataaaaagaatttgcggtatctcatggagacagtggtgggtgagggggacaataatttaggatattata

SEQ ID NO: 117219 - DNA, 280 bp, Homo sapiens
tggataggaaggggtgcataaggacatcttctaaagcactggaattgttctctgttttgatctggatatttgttacatacacatatgtaaaaattaattgaactgcattaggtttcatgcactttattgtttataagttacacctcaatttaagaaaatgcttaaaaatatatgaagatgaagtgttcaaatgcatgggcctttgaaactgaataagcattgagttccagtcctagcttgctacttagctatgtaacccagagcaagtcactggccattg

SEQ ID NO: 117220 - DNA, 336 bp, Homo sapiens
ctcatctggatgtgactcgtgactcgagattccctctttcctctcactctcctttctgtacgacagtgggtttccagcatcaccttctgttgagccttcagaggaagcatggttccgctggcaccttgttgagccttcagaggaagcgtggttctgctggcaccttggttttggacttctggtctccagggccatgagaaaatacgtttctgctgctagaagccgtccagtccatggcgatttgtcatggcacccctaggaaactaacacagtttctaaagctctccttgctatagatgtgtatgaatagagtttgatgaccaatgtgtataagtt

SEQ ID NO: 117221 - DNA, 597 bp, Homo sapiens
gaacttacagttccacatggcttgggaggcctcagaatcatggcaggagtcaaaagtcacttcttacatggtggtggcaagagaaaatgaggaagatgcaaaagcggaaacccctgataaaaccatcagatcttgtgagacttattcactaccatgagaacaatatgggggaaaccacccccatgattcaaattacctcccactgggtccctcccacaacagatgaaaattatgggagtacaattccagatgagatttgagtggtgacacagcgccaaaccatatcaaaaatgttctataaaattaccttcaggttatgtgtataatgtatatatgaaacataaataaatctcatattaagacctgtgtcccattccccaagataccttactatgcagatgcaaatattccaaaacctgaaaaaaatcgaaatttgaaacactctggtcgccagcattttggatgagggataccaagtctgtatctattgttattctgcttttttagaatgtgaagttatattttgtgggatatgccccagctaacattgccatatgatgtccgatagctgaggttgcgttcttaagcattagagaa

SEQ ID NO: 117222 - DNA, 258 bp, Homo sapiens
agctaagtaacaaaaagtcttcatttatcaaggggcagaaacccagatatctatgagtaacagtgagaaggaagagccaatggttgggtacatgtttggcctctgaagaacatgagctttcataggaggatggtctagaagcagcagtggggagccaggagaatgtcacttccacaccctgattccagcctcctccagcccagggacgcatgagtgaggtgtgaaagtataggaagaaaacattagcagagcctgcaa

SEQ ID NO: 117223 - DNA, 307 bp, Homo sapiens
atgcccattaccaaattgagcaagttttattctagtgccagtttgctgttaatttttataataataatgtgataaatttgctgaatgtttttctacatttattaatataatcatgttttcccccttattctcttattatgggagactgcattggtcagcttttgaatgttagcccaacattgcattcttgatgtaatccaattggtcactgttatccttcttgtatatatattactgtattcaatttttctgctagttatttaagagttattcacctatgtccgtgatggccattatcctgtggttt

SEQ ID NO: 117224 - DNA, 505 bp, Homo sapiens
tgcagagagaacacatgtacgaagattctaaaaggaagagtattccatgatcaactcccttatgtaaaaggtaagagggatgcagaaagaacaggggaatctggtgtgaaatgaggcaggcaggagtcaggcagacaggccttacaggccagaccaagggtttttggtctttatccccatagcaatggcaagccagggccaggttttaagcagcaatatgatataatcagatttggtaattcttgaaggattttttttaaaacaaagacctctgctaaaaccaaaccaaaccaaatcaaatcaaataaaagctgcaagactcctgaaggtccctctagctctacatttttagtactttcctatgatatttatatatcccacatgctggttcacttggtcatctgagatgagactaatctgtgtccatctgggatagaaatttcttccgtacttggatgaaaagcagtgtagtcctgcaagatgtgagtctatttccccatacttt

SEQ ID NO: 117225 - DNA, 276 bp, Homo sapiens
aggtcacatgacttgcccaaggacacgtgaagattaagtggctgagctggaactttgctgccaatttgctttcctaagcagtctgaggtcacagcccttttttccccatactctcatccctatgtactgtgcccctacctctgcgtgaccctagcaaagggacgttgggtgcagagctggcccctgctctgtcttcacaaaccctcaataatgcattagaacacgggattcagaatgttaagataagaagaagagctgctaaaagtcacgaccctt

SEQ ID NO: 117226 - DNA, 376 bp, Homo sapiens
agaaaacaaacacgagcaggccagggacggatcctggagtttatgtcccaggggaaacagcatagtatattaagaagggaatgcaaaaaaaggaagggatgcaagagttcagggttactaatcggcagattaatgaatgagacaaccaacagagaacacaagtaaggcaataatgaatcttgcagggcacatgtttaattaaagtagcattctcaaggaggaatattagctttaaagagatgccagttcatttgaggccaattcgctgctctctttccccttttcactgttgctgccttaaagatatttatgtgactgcttaacagaggaaccagactatgtggatacagggactgatgggagatcaagttttaac

SEQ ID NO: 117227 - DNA, 882 bp, Homo sapiens
cgtgacactttctcattataggtccatggctctctttaataaattaaatcaatttatttttataagcaacttaccacccaagtgggcaattttttctcatctaaaaagtgattagaaaaatgaagataaagcatccttcatggtacaatgcaaggtaccaagctaggactactgcctagcaggtagcatgaatgatgctttctctctctctctctcttttttcttttcatactcttcctccaatgtagatggggtgccatggtacctgctaggcattggtcactcaagtgtgagtcatcttccacctttacccttgggtttgctatgtggacttaagtatttctattttttgagttttgttagtttagtggttagcctaatttttttgtttccttttccctggtcccacatatctaagggatataatacttatcaataatcaatcctgggaggggttattttggggtggagcagagaaaggaggaggagataggaaataaatatataaaagcccttcaggtgattgtgatatactccgtccttgacaatcactgaggggaagaacattcccattgctcatgcttattttttaatagtagtgcccttttaacaacaacaaataacttaattctattacctttccaccacttttatatttttatatttcctcttaacttttttatatgcatgttattatattaaatattagatgattattatgtgtcttgctttttcagttaacatgttatatacaggtttatacattataatgatgtcactttagtggctttattaatgaattgattcattcatatattcattcaatattgagcaatgtctatgtgccagatactcttccaggctctggggtacagcaggcag

SEQ ID NO: 117228 - DNA, 675 bp, Homo sapiens
gggcccacttggaccactataaaaggaagcaatgggcacctggacatattagcaccaatttcactaccctgggtggaaaacaaaaatgtctgtcctctaaaccacatatcctcatatttccccggtccataaatgaaattcccttccaccagtggcctgtctcttcctctttagtgattcctaaatccctatacccctgtctctccttggccagacacactgcctgagaatgactcttctaaggactctaacaaaatcagatggtcttatagctgcatttagcatatatataggtgacctaaacatattttcactaatttttatacacttaaaagttcctgtaaatacttgtattctaaccttactctctaagtgacttgcagctctgtgtaaatcacttcatctctctgtgtttcagtttcacgagtataaaaaagactggaaaatccatagagacagtacattagtgtttgccagggtctgggaaagggaggaatagagaacgctaacagagatgaatttttggcaggtggcagggggtaggggattatgataatgttctggaattcgtgatacaacagttgtgcaaatgggcaaagcactggtgtacttttaaagactaaaatgttatggtatttaaataatatctcagtttttaaaaatacctcaggaaaa

SEQ ID NO: 117229 - DNA, 848 bp, Homo sapiens
aaaagaaacaaccaaccctaataccaagttccactgtgcagaggccacaggccctgcaggaaacagagcttgtgctgtacaaacactggaagctccctccaggtggagactcatgtcctcagtacctccccaagccacaggctggtccttgtgttcaggttacacgaagaggcctggggcagggagtctggccagtggagccactctgccacttgggaggtcatgagcagctggtggtggtgagcagagtagggagaataggcttccctgtccttggggacagctcttctccctgcctgctctgctaaccctcacagcagcccggtgccacctggggaagccagaccaggaacccccagggcccagccttggaccagggaggctctgcaggttcaatgtgagattgcagaaaaagacaatcggaaaagcacacggctgatggctcctggggaatcagctagacttgggccatacgacaggagaaggggcagtgagcaaaacctcaccctgcagcctcagatctggttccccaggctgttaagggccccaagggagagtccttggccccctgctggcatcttacacttgaccagggctctcccagggcctcagccaccactgtgggttctatgggcacaggatcttctgtgtcaggctgggtggccaccatctgtacaactgtggctcccagtgtgagttagaacaaataccccttcttcctccaagacacacacacatgctagaagtttccattgagatgagaaaaccaccagacagaagggtacctgtaaatctacactttctttagacaaaggacctgattaggagaatggggaatggctgtggga

SEQ ID NO: 117230 - DNA, 425 bp, Homo sapiens
gggcacggtggctcacgcctgtaattccagcactttgggaggccgaggcaggcagatcacgaggtcaggagatcgagaccatcctggctaacacggtgaaaccccgtgtctactaaaaatacaaaaaattagctgggtgtggtggcacacgcctgtagtcccaggtactcgggaggctgaggcaggagaattgcttgaacccaggaggcagaagctgcagtgagccaagatagtgccactgcactccagcctgggcaacagagcgagactccgtctcaaaaaaaacaacaacaaaaaagaaaatggggactaagacacagaagaatatagctgtggggagtagcttcagggaactgaaataggtccagaggaagctcgaagtggccattctgaagtttatgcaaactgctggccaggagaggcga

SEQ ID NO: 117231 - DNA, 449 bp, Homo sapiens
tcccccatgaaattgagataaacatgaaacagtcacagttatcagacagaggaattcagcaggatttgtttgatttaggacttacatccttaagctgagtaaacagtaagcaatactgcacactgaaatctcagcgagttagtgtaattagggagtaagaaggataactcaagtcaaggatccatgtaaacagaaatcttcacatttggtgagctgtaaaccagagtaggtgaatgcagagatctctcaggttacactgctactgttctaatgcaaaaatgctcatgttccatgtcatcattggctgcttcctcccatgagcccacactggaagatgataaagttttccacttggccaaccaggctcaatttcttagtatttttccttactaagtattaaattttctagtttatttcagcagtacctgtagtcagttctacactgtaaa

SEQ ID NO: 117232 - DNA, 862 bp, Homo sapiens
gttcttttcctcctgggaacaccaccaggctacatttcccagccaccttacaattaggtgagacccatgagactagtccatgccaatggaatgtgaatggaagtgcatctaattttctggctcatgaaaacagcagcattttctctattttctttttttctttctttgttttttttagacggagtttagctcttgttgccgaggctggagtgcagtggcgcgatcttggctcactgcaacctccgcctcccgggttcaagcaattctcctacctcagcctcccaagtagctgggattacaggcatgtgccacaatgcctggctaattttgtatttttagtagagacggggtttctccatgtttgtcaggctggtctcaaactcccgacctcaggtaatcagcccgcctcggcctcctgaagtgctgggattacaggcgtgagccaccgtgcccggcaagagcagcattttctaaaagcaatcagtactcaacaccatcctgctgaggtagggcagcggcggactccatgttttgaaacttaggaacttagaccatcttttgtcaaattcagatggttttctcaaagtaaagatcattcaagttttgtttcagtaatgggccgtatgatcagatctgtgtgattaggctgaattcattattattgagacaaaaattgagttaaaggggattcttggtattggcctgcaaaacctgtcataacttaaatgtaaagtttctgatgatttagtcactttactctcagctcttagctctttcactcacctgtccttgttctacacaacctgcctgatgggtaacttgaatacatattttctctcttcaggggatgggaacgccctaa

SEQ ID NO: 117233 - DNA, 174 bp, Homo sapiens
tgctcacaccatagtctaagccgccattgtgcatggtgtagagagggcatgaccgcaacagtgaatgctgcgtttgatgaactgaaggacaataactaaaggactgtggcttttactgcaaaggaaagagagagaacagagggaggaaaggctagaaaggtagggaggggccaa

SEQ ID NO: 117234 - DNA, 484 bp, Homo sapiens
gttcaagctattttcctgcctcagcctcctgagtagctgggattacgggcatgtgccagcatgcccagctaattttgtatttttagtagagacagggtttctccatgttggtcaggctggtctcgaactcccgacctcaggtgatcctcctgcctcggcctcccaaagtgctgggattacaggcatgagccaccacatctggcccttgcagtaaactcttaattctaccagtggggtcaagaatgaaatagattgtcttaaatctacttaccaaacctcattttagcagataactttaacttcaagctttattccagagaggatgatgagggctttaacttcaatttgttcacttattgagtatccttagataagacatcatgtaaagctctatgggccactgaaaaatgaacattttttgccttcagagagcttccaatataacagagatgaaaaaaggatgtgcatgggcacacacacagac

SEQ ID NO: 117235 - DNA, 285 bp, Homo sapiens
aaggagagtgcctctctgtggttggagaggaggcaccagtatgagaatcatttggtctctagagtgctttttacctctggcatgtcattcatctataaacaatgacttgactgagggctggggagtcaggagatgaaagagcaggtacttgtgttggggacaaggttgccaatgaagaaggaggaagagagatgagtgggcttttcttgtgtcctgtaatctcccccacgataatcaatatcatgtggcattgagtgttacatgtgtcccaggcacagtaccagg

SEQ ID NO: 117236 - DNA, 3036 bp, Homo sapiens
  misc_feature (514)..(514): n is a, c, g, or t
  misc_feature (1415)..(1415): n is a, c, g, or t
  misc_feature (3030)..(3030): n is a, c, g, or t
  misc_feature (3032)..(3032): n is a, c, g, or t
  misc_feature (3035)..(3036): n is a, c, g, or t
aaagggcatctggaggcctagcctctgtcatcctgggccacctggttcttctgtgacttgttttctccatgtataaagtagaaggcctgttccttggagaaaaaggtcaaggcgggtggaattattacctggcagccagcggggctcacagtgcaggctacttcagaagcctcgtccctggctaacaccacaatggttataacgccaagcggggcagctgagactggcccacctggacacacaggcaatgagtggaggtcacaggaggtctggccaccagcttccctgcacctccacccctgcccccacactagtctctcctcagccccacagggagccaggggcctctagaatggcctctcctccacccacgtgcatgggccctggcacaggagaggcgctgaggaggaagctggaaggcacccagccacccactccagggtgaacggtgagcctgcccaagcatgagctcttatgaggcccagactgccagggggccagggtgtctgaggcncacacattcctcactctctgggagttgggagtggaggaccctcctccccttctctattctattgggaagctttccacgaccccatgtgggatcagagacctcttctgatccacagcctcatcatcctgtgttggtggcactcaaccatctttctctaccagactagcagctcggtggaggcaggcactgaggaagcgtgtgctgaaggcatcgcatgcaggcaatctggaagcctggggcttttccatctatacagaatgtacagcccaggacacaaaccctatttaccctccagcattctgcatacctaggaaaagcagtaatcattgaagccttgcttcagatcctccattcatgcaggaagtggggctctggtctgttctagtgctgtctagctgggtggcactcccacatccttttctccaggcatgtgaactagctcttgtgtcctctttctcttgccaaagacagtggtatggtaccaaggagaacagagccaggggccaggaggcctgggttttggtcccagctctaccccccgagctgctgcgtggctttgagtaagccactccccctctctgggcctcagcgtcaacaccagttgaggggttggatcccactgctccctgggtctgttcctgctttacttcactgccatgagccatgtgtctggggctggagttggaggagagtgctggcaccaggcagatggttctgaggacaggttcagagtctgcaaggctgggagggcacctgcctctgtcctgggtcccacctcctggcctgctcctcaggaaaccctgggacacatgaacttgggcctcagctttggctctgatcgtattgtgatgccatctctgggccaggccctcatctgtctacatcacctcacctcatctcntggtttacgaagccctttgtatatgtctcctcatttagttcttacaatcacccctgaggttcagagagggacaggatgggcccaggtcacacagcagtcagaggactatcaggcccagcattctccagcagccctgatatctcctccttgaaacaggaagaacacaggatgtgcagtgggaatcctgaccttgccccctgagcaatactgagtagggggggtggtactctctcagaaccactttgagccaccatgaaaatctaacagcataaagatgccaaaagcataggtgccagccagggcagcagcccgctggaacagaaagagcaccacgcagggagccccagagcccaggctccagttttgggttttcccatctgtcaaatgagggcaaggatgcctgccctgcctcacccactgaaggccagctgtgcacttgccacacttaccccgtcccaccttctacacagctgtctgtgcccaccacctcagccaggaggagtcacgagccccttccctatctgcacacagctcagcctggctcactgcaccaaaaaggcaggcctgagcatggaccacacacagaggtatgttcagacagacgtgcagacactcaggcacatgcacacagcgcatgtacttgcagatgggcacccgtgcatacagcaaggcacacaccacccacttgcacactcaggtgtgcgccacatactgaacatactcagacacgcatgtcatgctggacacacactgcagcacacagaccgcatacccacacatgcacagttggcttcatatgatgctcacacactgcagacaaatatgcatagattttcttgcctctcccatgacagccagatggtgggattctcccagagggctgccatttaatgctctaattaattttttaaaattctaggtacccaaagcctgggtttgttcaattggtccaggcacgacccagtctgaggccaaggcgggaagcaggacctaggacgagggtgtcccactatacccaggagaggcttccccctcacctggtgagtagatacctagcctagcaaggggctggggtcacaggcccagaatctgagcctgatcctggttccaacagtgctcctatgacccaggacagggagagaccccttcccagcagccctggcggagtggtctggccccaggtgcacacctcaggatgcagggcgctcagtccctgcggaggctgctggctctcctatcagactgcactgcagcgaggctttcctgacatggaggtgggctcggggctgcacatccaaatccaaacacacctttgctgagccctactgtgcagggcacacttcaaggcactgtgggaggacagcgcagggaacgggatgttcacagagcacagagctaccagagagttagtgctgagacagtgctcaccgcatctccaggcagtatgctccgagcaggccagaatttcattctcacccaggtctcctggggagccccaccttattctctaggccatgaggatcctggggggttcaggctagcaggaaccaagcatcactggccctccaggtctctcctctgcctttcctggggcaccgtctttgctgctaaatcntnggnn

SEQ ID NO: 117237 - DNA, 1789 bp, Homo sapiens
  misc_feature (1783)..(1783): n is a, c, g, or t
  misc_feature (1785)..(1785): n is a, c, g, or t
  misc_feature (1788)..(1789): n is a, c, g, or t
agtctcaggtctctgctgctggaagccaaaataatcaagcagcaggccaactgtgcgtgagggaccctgctagatgctggcacgccctgcagttagcttgaagaggaagccacttttaaacagcctgcccagtgagcactgctggctgcctgaagatgattccactcaccttggtttttcctgcaagtgaaccttcctcccagaactaaggtttggaagatcccagtctgctgcctgacatggccattctcccacaaaaacagatcctgactcggagggcagttggttgctagatcacgtctatcagtgcccgacataagggatggcacacagaaaatattcagtgaccgaagttcctcctccctttatcccagccgctgtggcagccccaccaccaggctttgtacacaccccacagggagccaggggcctctagaatggcctctcctccacccacgtgcatgggccctggcacaggagaggcgctgaggaggaagctggaaggcacccagccacccactccagggtgaacgcctcatcatcctgtgttggtggcactcaaccatctttctctaccagactagcagctcggtggaggcaggcactgaggaagcgtgtgctgaaggcatcgcatgcagctgtctgtgcccaccacctcagccaggaggagtcacgagccccttccctatctgcacacagctcagcctggctcactgcaccaaaaaggcaggcctgagcatggaccacacacagaggtatgttcagacagacgtgcagacactcaggcacatgcacacagcgcatgtacttgcagatgggcacccgtgcatacagcaaggcacacaccacccacttgcacactcaggtgtgcgccacatactgaacatactcagacacgcatgtcatgctggacacacactgcagcacacagaccgcatacccacacatgcacagttggcttcatatgatgctcacacactgcagacaaatatgcatagattttcttgcctctcccatgacagccagatggtgggattctcccagagggctgccatttaatgctctaattaattttttaaaattctaggtacccaaagcctgggtttgttcaattggtccaggcacgacccagtctgaggccaaggcgggaagcaggacctaggacgagggtgtcccactatacccaggagaggcttccccctcacctggtgagtagatacctagcctagcaaggggctggggtcacaggcccagaatctgagcctgatcctggttccaacagtgctcctatgacccaggacagggagagaccccttcccagcagccctggcggagtggtctggccccaggtgcacacctcaggatgcagggcgctcagtccctgcggaggctgctggctctcctatcagactgcactgcagcgaggctttcctgacatggaggtgggctcggggctgcacatccaaatccaaacacacctttgctgagccctactgtgcagggcacacttcaaggcactgtgggaggacagcgcagggaacgggatgttcacagagcacagagctaccagagagttagtgctgagacagtgctcaccgcatctccaggcagtatgctccgagcaggccagaatttcattctcacccaggtctcctggggagccccaccttattctctaggccatgaggatcctggggggttcaggctagcaggaaccaagcatcactggccctccaggtctctcctctgcctttcctggggcaccgtctttgctgctaaatcntnggnn

SEQ ID NO: 117238 - DNA, 428 bp, Homo sapiens
caggaaatgcttggagcagccagcagggtagggccaagtcatgatacacctaggagtgggaggggaggcctctttggatattacctggtttatcatttagctgttggggtggggaaggaggtgggaaagacagaaggctctcccaggaattggcaggcagccaggtcagggacaatggcagcccccacttgtgctagaaaggcaggcaggacgtgaccactcagatagccacatcaacaagtacaaatcacggttgccctggaaggaaatggctcaggtttttcccagtagctcaatgcctaggcacccccacctgtggtttgggcatttcactctattagctcttctgctcagtggcccattctgctagccacagctcacatttactccagttatgaaaaaggttaattttcccatattgagtttct

SEQ ID NO: 117239 - DNA, 406 bp, Homo sapiens
cataagaagtgatgtctgatatgtgctatgctatggataaaacttgaaaatactatgctaaaggaaataagtcagaccagaaaaggacaaatattgcataattctatttttatgaggttctagaataggcaaactcccaaggacagaaggaaagaggagcagcacgatagcagttgtcaagaacaagcaccttatgaaaggcagcaaagggagccaaaaaggtagttgatccattttcttagaaagattggtatgatgtgaaagctcctgctatgtccaagaaatatcagaaagacactaatcaccaaaaccaaggaacaaaaattgcatctgatggtctcaagggttatgtgtttgcagtgagtctttgttgacttgcagaatgatgaagttgcatttagaaaat

SEQ ID NO: 117240 - DNA, 151 bp, Homo sapiens
ctggctgagggaactaggtgtgttaccccccgcgccccatccacacccagctctggaaaacatgcctagctcggtgacccactcggcgtccagcccttgacagaaataattcacaagtgtctcagagcaagaaagtcacgtgggagtgggt

SEQ ID NO: 117241 - DNA, 361 bp, Homo sapiens
agcagtgggttggtctgtctgagatggggccgagttcccagggggaggggtggctgctatctttgtggtttggttgactcagccactccagcctgatggctatacaggcagtctggatgaggaagggttcccaccaatgcagcacacctgctgtatcaaaaagcagccagactgcttctttgtacaggtccctgatctcattcctcctgactgggtgagacctcagaacaggggcttccagtcacctcctacagatgcatgtgggccagcaacaggccaataacccccaggacagaacttccagaggaaggagctggcttccatctttgctgttttgcagacttcactggtgatacctcca

SEQ ID NO: 117242 - DNA, 428 bp, Homo sapiens
aagacagagtttccgtctgttgcccaggctgagattgtgccactgcattccagcctgggcgacggagcgagactctgtctcaaaaaaaaaaaaaaaggaatgactatttatgagttcagaaatgacggtgactttcttgaggctgttgtatccattggcagtactggcaccagctatatctgacgttccatcttaccagagggcatgtgctttgagtagttactgagtagttctagatgatgttggttacatgatagactgaagtattttattaactctgaattcagtctgagaattggaaacgtgctattatccagtgtagactgatggagttgatttcattttacttttcccctttttgttttcccttctatttaagagctctagtgattgataatgtctttccttatgggaaagattcatttttt

SEQ ID NO: 117243 - DNA, 360 bp, Homo sapiens
gttcaagcgattctcctgcctcagcctcccaagtagctgggattacaggtgcccgccaccacgcccagctaatttttgtatttttagtcgagacggggtttcaccatgttggccaggctggtctcaatctcctgacatcaggtgatctgcctgcttcggcctctaaaagtcctgggattacaggctttagccaccgcctggccctggcttacatttttatcacagatttcctgatttctaatctggagtcattggctttgaaccagattggaatgctcaagattctgattgtttcacactgatttcacaagaggacttggcttctgattttaaggaaaacttagggggagtagcagattt

SEQ ID NO: 117244 - DNA, 782 bp, Homo sapiens
catctcgcagacttcgggcagcgatcgtggcggccgcctccccggggctccacggccgacctgccgcctgccgcggccatccccggcccactcctgccaggcccccgaccggagccccggaggcacccgctctgagcggccgcgcagcccggctgcatggagcccagcgcggtgctccggctggccaagccagacacggcgcaggaaaccgccacccaccaaggcaagggcaggaagaagatggcggcggctgtggcggccgcgacagcggtggcctcagctcaatatttttttctcaaaggcatatcatagttttagctttgctgcagccatttcatccataatcatttgctgtggctgggtaaagtgatacacacatactggtttagagaaatacatgcgcacactggtttagagaaatacaaaacgcaatgcctagacctgaaatgtatttatttagatttgttagatggtgcagtcaagtaaatatttgtgttatgctttaagcttttaagaaatctcttgtatctaagatataagacacatatgtaaatgacatccaactaagctggatcaggccaatgtactgaaaaagggctaccatatgttgctacagggcctcacctgttggccaggctggtctccaactcctgagctcatgtgatccacccaccatggccttccaaattgctgggattacaggtgttagccaccacgcccggtctaaattctcaacataaataataaaagccagaagataatttgacagcgctgaaaggttc

SEQ ID NO: 117245 - DNA, 298 bp, Homo sapiens
gtggcaatgagtgtataattaggtctggggtaggaaatgggtcaaatctagcgtcatgggacagcctagccccaatcctgtttgttaaggtctcatcagcccagtcttcttgttggagtagctaattttaacagcttgatgttttcccccttctcctgtgaccacacagcattcctattttgtgggtgtttctttaattagagagtggaataattattaggtattctggaaaaggagggaaattcagggacccacctggttactgccccctttctctcttatttggctttgcccagaa

SEQ ID NO: 117246 - DNA, 620 bp, Homo sapiens
gcatctgggaaaaatgagctttcaaccccaggaaaagactaagagatggtcagtaaagaagctaagaaccatgagtctagactcatatatatttcagtgaaaacctaacttaggaacttacccatgtctataatttggttaagggctgttaatttgtcctgtggtaagtaggaataaaatgccttgaagaaaaccctcagagattcaaagatcttgtggctgggaggggagatgcaaaagccatgaagtgcatcctattagggaagcaacccaagaggaagaaagggaactagctcagggggtcagtgaatgggcatgtcgggggggcagtgctggaattccgaatccaaatttctcacacctagattctcctagcttaaggtggggggatacggcgggcaggatacatttaaaagcacagcataagcataaaaaatggagcatctgttttctagagtgtcaattttattccaagatttctgagaggagtaccctgtgatggttttatgtcaaagatacaggggtggttaaaatacaaaattcaaatggatcaaggtaaatcaaaagacttgagacttgaatcgattgtgttcactgttccaggtaagcattataggatg

SEQ ID NO: 117247 - DNA, 365 bp, Homo sapiens
gccaagggatggttagacacatctggagaagaggaggttcaaaagttgagcgtgtacagaggatgaattcagtcccatttggaggagcaacctgagaggagagagtggaggtagcataggtcgagccctggattaggagttgaacgcctgggctgcaagctcctcatggtcactgagaggacttgagcaagtcacaaccatctgggactaagctctctcttcccctgaatgagggattgggcagtttacttggaaggtcctctccagccacaaatttctgggattccaagtgtgtcatcacaccaggaagtgatgagttgggtacctagagagtgagacttggggagtttctgcgggcaaagaaa

SEQ ID NO: 117248 - DNA, 426 bp, Homo sapiens
caggggtgactgaccatgtgcctttcactttcttgcagactagatcaggcttgttcccatggcagcagtacagtttaaagagtgtgaatacaagcattcttaaggtctaggctcacaactggcacattgtcacccctgctggcctagctacagccatcctaaatcagtcagcctcagaccaacctgtcagctgactacagatgcatgattgaactcagccatgattaaccaagcctgattaggattagcagaaccactcagctgacacgtaaagaataataaatgcttattgctttaaactgcctgatttaggggtggtttagtaaataattcggtcgattattactgagttctaaatatttcttaaattattttatgctttcatttttaacctgatatttaacactgtgtgattttttttaaaaa

SEQ ID NO: 117249 - DNA, 451 bp, Homo sapiens
ctgggtggcacgatcacggcactgagtcaggggaagtgccctggaggtgccagagacactggcatcctggggccaggctttgtcaggcgtctttttactgaagctgtgtctttcaggatcattcatgggcaaaatgcagaagcatagtgacttcaagttacctttgctttgtgatgatgctggccacagtgtgccttcgtgtgacagggtgttttctttcaacatcttaaaactcacagttcttggccaggcacagtagctcacacctgtcatcccactactttgggaggccgaggcaggtggatcacctgaggtcaggagtttgagaccagcctagccaacatggcaaaactccgtctctattaaaaatacaagaattagccgggcgtggtggcatgtgcctgtagctactttggaggctgaggcaggagaatggcttgaacctgggcgg

SEQ ID NO: 117250 - DNA, 234 bp, Homo sapiens
ctctcagccccagcctcatagtcatgttactgattattcagtctgtgtgtggcccctcacagagttccctgactagcaggaaaatttaagcatcatctttaggaagtgtaaatgagaaaagaaagcaatcaggaaggcataggcattatactccaggaatacaggagcagagcttctctactgctggggttgggcaaggttacagatcccagcgcatctcctttatacaaatgt

SEQ ID NO: 117251 - DNA, 223 bp, Homo sapiens
ccccaatatctaaaactgggaaaagtgcagcagctcagtggagtcctgcctcccctccagacccccggcaattgcaagtcagcctcgttggaagcagatgctgcaatggagtttgacaggcagagtatttattagtgatcaatacctatgggtgggcaggggaggaaggaggattggatggaggctgacactttagccagccctgtggggaatgtatgggacc

SEQ ID NO: 117252 - DNA, 679 bp, Homo sapiens
ggcaaccggctcgggtcccagtccacactgtggaaggtttgttctttcactctttgcaataaatcttgctgctgctcactctttgggtccacactgtttttatgagctgtaacactcaccgcgaaagtctgcagcttcactcctgagccagcgagaccacgagcccaccaggaggaacgaacaactccagacccgctgccttaagagctgttaacagtcaccgcgaaggtctgcagcttcactcctgagccagcgagaccacgagcccacctggaggaacgaacaactccagacccgctgccttaagagctgtagcagtcaccacgaaagtctgcagcttcactcctgagccagcgagaccgcgaacccaccagaaggaagaaattccgaacatatccgaacatcagaaggaacaaactccagacgcgccaccttaagagctgtaacactcaccgcgagggtccgcggcttcattcttgatgtcagcaagaccaagaacccaccaattctggacacaaaacctcaagtagtccctccaccgaaagcacattataaggatcattttgcctcaaagccctcctacaggcaagaggagcttactgtgacttccaagaagaaaatgatgttgtggcatgaagcacttctctgatcatatcactgctgtactaaaggtacgttc

SEQ ID NO: 117253 - DNA, 941 bp, Homo sapiens
cgcggctggctcggcagctccaggctattccgaggaacagtcttcagagagcctggggtgctgatggggaaaagctgttgctgagatttgacaagtttggtcctgagatgtcagaaaggatttcagctcttctgccaccccaaggacggtggcgcgtaaatcacagtgagctggcttatgtcaggtcaactgtggaatttgatcctagcgcattgctccctcctcttccttgcctgcgtctctccctctctcagctctagtttgagatcagcacagattccctgggtgatttttgagaaaactgcctcctctttaggacttggcatcccctaacctgcatcaggaaagggtggcgacagatactctcacacccagggaggctgcaaggcccaccctctaccctccacctgggttctctggcgtcgagacttgtgccctacagttctgggccgttggggtgatgtcccagtgggaccagggtgagggtgcaggtatctgagggagtagtaggaccagaacctctaaccttagggaggcttcctgggagccaagcttggtgacttagaatgtgaatgtctgacccatatcccactaccttttggtgggtgctgcagaggacaacggagagagagtcaactttgaagagtggtcttgtggaagaggcagctggctggttcagtgtggcactggcagcctccctaaggttcccaggtagaagtttctgacaggtacgatttcagctggtgtttaaggaagaactttgaagttgtcagaatgagctgtcttgtgatagtgaagctccctggtctcccagaggcatgcaagccaggacactttcacttatgcatttcaagctgacctattgcaaggcgttggtggctaagtgctaaggagtgcagcagggagaaacgagaacccagtggggaaacaggcccttgcaa

SEQ ID NO: 117254 - DNA, 274 bp, Homo sapiens
ccacttcagaggggtcggtgagccttgccaccagcagaacagccatgggcatctgaactcaataacagaaacatccaacagcccaacactgagagctgctcccttacagcccacaagggacccaagtgacatggcagtgtttgaggtattgtgatgtgcgtattggagactacatgatttttgttgacaagtttctcttaacgctgaaaatatgagtggtcggaaggcttgcagttgggaagaagttttcagttttacaggaaacttccctggg

SEQ ID NO: 117255 - DNA, 540 bp, Homo sapiens
taagtaacttttaaccattgcttgtggctacctggagggctgtggccagtgacttctgacagctgaatcagaaacttgccttcatggatttgcaatgtctgaatgggctggggtggggcaaggacagcctcagattgccagaacaccatctctgctctttcattgcttttaagacagtatttttcatacttcagtgaattatttacttatataaaaatacatgtacttgtatttatttacaagtacttatgtagtactttctatattccagacagtcttctaggggtcttataaatattaactcttttaatctttataacaatattgaagcagaggttgtttttatcttcattttttaagtgaggcaactgaaacacagagaggttgagaactttgcccacagttgcacagctggtaaatggcagagccaaggcagtctgtcttcctaatttgtgtcaagctgtttatatggggtatatataagttaatggcaaaataaagcatatcaataaaaacaaacaatgtattaaattctggtta

SEQ ID NO: 117256 - DNA, 196 bp, Homo sapiens
aaaaaacctaaaaatttaaataaataaataaatacatacatacatacacatgtatggcatgggtaatgggtatttacacatattttatatatatatatatggcaaatacttacctgtgctatataggttttgaatatgttatgtttaggtttctgggttgggtttgggttggtttgctagtgaacattctctcttg

SEQ ID NO: 117257 - DNA, 350 bp, Homo sapiens
gtcactcttaggattaccagtggtaggtttggtagccaacctgaccctgtacgtcactccatttcatcctcatctgttcatattgaactgccacgggcaaagatgaatatgacgcagtcacctctactgtctgggaactcagtggtggggcttaggggccatgtcagccaattacaaactgaattctggggaggtaagtgctgtagaggaggcagacagctggttgaagggagaggggtcaccacagagccgccgaggagtctgggccgacttcatggggccggggagaagccagctggtgtggaaggccagggcggtgggtaaaatagcaacatggtgtgacataaata

SEQ ID NO: 117258 - DNA, 88 bp, Homo sapiens
atcctcggtcaggccaagaagcatccgagcttgatccccctctttgtatttattggaactggagcttctggagcaacactgtatctct

SEQ ID NO: 117259 - DNA, 170 bp, Homo sapiens
cctgttattgtccccaaaactacagccactaagatcaatatgaagaagcttcccagtcatactaggagtattttgccttcaggcatgtgtattgagcatatcagtaacaatctagatcctaagtcttagactaatgtactttaaaagttggctggtcacggtggctcacg

SEQ ID NO: 117260 - DNA, 320 bp, Homo sapiens
ctccaactccattataagcaaacaaaaacatgggcactcaagtcgaagtatttatttatataatggtgtttttttaatccaaaacagagttatgttaacttttagattacctttgaaataaagctacaaaactaaagattttttgtgagaactcacaaatactaaagaatatgttagtgggccactagggatttaagaagcaagattatgagcgtaagggttttgaatagctaagatctgcaattttatctaaccgaaacacatgcaagcttcagtgccctttgaaaaaaatgcagtattttaaaaattacttctacaaa

SEQ ID NO: 117261 - DNA, 385 bp, Homo sapiens
ttgggagcctggctctgttaggaaggtgcgggcaaccctgttcccccgccctaggattgaaccaggatgaagacatatccaggaaagccgctgtggccagcctgagcgtaagagagactgcgactccctgcccagtggaaatacactatactgcaagatgccaaaatgagccacttgaatcctttttttcgggaagtcaaaagtacggtgaggcatgagaagaaggatctccagctccaagttgttctccctcttgtggctgaacacactgttaccatatgcttatgaaaccatttgcatatggtacaagcccatgtgggagaaatgagagctctgacaacttctacctgtcttctgtcctctcctgacaatgcatctccatcac

SEQ ID NO: 117262 - DNA, 348 bp, Homo sapiens
agaccacgtatatgacagtaggtcccatcagattataatggaggtgaaaaattcctatcacctcatgatatcactgctgtcctaacatcacagcgcaatgtgttactcaagtgactgcagtgatgctggaataaacaaacctactgtgctggaagctgtataaaagtctagtacataccattatatacagtacataattcttgataatgataataaatgggctagatgtggcagctcacacctataatcccaacactttaggaggccaagacaggtgggtcacttgagaccaggagttcaagaccagcctggccaacagggtgaaacctcatctgtactaaaaataca

SEQ ID NO: 117263 - DNA, 330 bp, Homo sapiens
gagtcacctgccttgtgcgactgcttgcaggatcacacacgatgatggatggtccttggcgcctagagagactcacacaatggttgctgctgttgtcagcaataacactcattctagaccagctggcagctgctgtaatggacagtgtaacaatggatatgtgtgtgtcagtgctgtgggagctcagcagagggacttctctcagggatgggaacaggtgttggtggccagggaagtacccacactatagcacgtctgggggcagcttggaggctgggtcagagtttgccaagtggaaaaggcacagaggcacgtggatcagcatgggca

SEQ ID NO: 117264 - DNA, 362 bp, Homo sapiens
gttaccatatgccctcatgaaagttacttaaaattaacttatctgagacccaatttcctgctctgtaaaatgaaaataccaccaacccacctcacagatatactgtgaggactaaacccatgaaaatatacttgtgccgggcatggttgctcacaccttcaatcctagcactttgagagctgaggcgggtggatcacttgaggtcaggagttcaagaccagcctagccaacatggtgaaactctgtctctactaaaaatacaaaaattagctgggcacagtggcgcacgcctgtagtcccagctacttaggaggctgaggcaggagaatcgcttgaacccgggaggtgggaggtggcagtga

SEQ ID NO: 117265 - DNA, 297 bp, Homo sapiens
aagaaagcagcatttgagttgaattgagacagaaggtatcatagtcctctgccagcctctaagtcaagtaaagagattccaggccaaaggaccagcagtacaaaggcagagagagatggaaatatggagtatgcaaaaaatgatcaccttttcaccttaatctttctaactagtattagatagagcaaatacatcatttttttattcaaccttgaatctcaaggctaaagttagatgacttaagaattttttaaaggtccaattatttcatttagggctaacattgcagctaaatta

SEQ ID NO: 117266 - DNA, 279 bp, Homo sapiens
ggcccttgtccacactctccaagcacattacagggtacctgattgctacacgttcagaatgcatttgctgttatcctgcttggcctggccaggcctggcacagccctggcttccacgcctgagcgtggaggacacgagttagttgtagtttggcttgcggtggggctgacttcctgttggtttgagcccttttttgttttgccctctgggtgttttctttggtcccgcaggagggtgggtggagcaggtggactggagtttctcttgagggcaataaaa

SEQ ID NO: 117267 - DNA, 261 bp, Homo sapiens
gtgttcgtctactgtctctttcctactcagtggcattgcttctgcagtttcttcctctctctgtttgtctgttgttggtgtataagaatgcttgtgatttttgcacattgttctttcgagggattttgcattaaaaagaaattaatatttgcatgctgatgggaacactcaggtgagaaagaaaactttataggaaagcagagagaggaagaaactgcagaagcaatgccactgagtaggaaagggactagattcagagca

SEQ ID NO: 117268 - DNA, 859 bp, Homo sapiens
caatgggaaaataattctagggagaaaataactatgtaggaaaaaatattctttgtcttacatcttacaacaaaataaaatctaagaggcttcacaaggtaattaaaaatatatatatatttaaaaagagctagaagaaggaaaaagagacagaaaataaaatagtttagttgaaaaacagatctccacatggagatccactttctaaagaacaacaatgcactttgggaggccgaggtgggcagatcagctgagaacaggagttcgagaccagccttgaaaccccgtctctactaaaaatacaaaaaattagccaggccttatggtggacacctgtaatcccagctactcaaaaggctgagggaggagaatcgcttgaatctgggaggaagaggttgcagtgagccaagattgcaccattgcactccaatctgggtgacaacagcaaaactccatctcaaaaaataaataaatgataaaaaataaaataacaatggataaaaatcatgaagggaaaacatctatatatttcactacttaaaaatgtaaaattttgttaataagaccccataaacaaagttcaaataggagaaaatattaacacataaatagaaaaatataacaacaacagacaagtcacgaaaattttctagtctaaacctaaaaactcaataattttaaaatgaaaattacaagataacatattttctatcaaattactaagacttttacattaatagcacataatatacttggtatattgcaagtgtttcataagtatttgttgtatgaaggagtgatgaagtatattaaaagttagctactccaggccatgctcagtggctcacgcttgtaatcc

SEQ ID NO: 117269 - DNA, 142 bp, Homo sapiens
actcttaccttctctactctccgtcttccacgacatcatgactagtacaacccctgcgcattcagttgtttctcaaaaagacatgcaaaatattttttgtatgtcttgataaatgtgtgtaggtacctctatggactagatt

SEQ ID NO: 117270 - DNA, 465 bp, Homo sapiens
gttttcccagggttatccagttaatacttttgctaaaagctataattttaaggaaatacaaaaacactgtactttgaatttaaagatatttaggcagaagccatcagctcattatcttaatttaattaagcttttcatagccccatttgagaagaggaggaaccattaaagcaaaaataagttgattgttaggacaagttaatgttggtagaaaaagtttttttttagttgttcttttccccctttcttgtggcccttccaataaattaagattattaccatttgcttcatgagaatttgctttatttatttatttatttattgaggactgagtttcactcttgttggactgaattgttataattggtaaatttaaaaacttctgtgttgtgatcaccaaatatctacagtatccaaagtggctcctggatagcacagatgggactcagggcctgtggaaaagta

SEQ ID NO: 117271 - DNA, 938 bp, Homo sapiens
  misc_feature (780)..(780): n is a, c, g, or t
  misc_feature (874)..(874): n is a, c, g, or t
  misc_feature (900)..(900): n is a, c, g, or t
  misc_feature (910)..(911): n is a, c, g, or t
aattcataccctatcattaaatccaatcaactctacattcaaaataagtccttaatctgaccacctcatctcctctactaagaccacctggccaagccacattacaacccaccaactagactattgcaacagcatgctctctagtctcctagctttcacttttaccactctataatccattccccatatggtggccagagtgactttttaaaatttgaaagaaagctgcggaaaggcatagtacaaagaactttttcatactgctttgaagtacattatcttctccattatttatagtaatcctgagaaataactatagcaagtttactttctttttcatggatagacaaggctcagagaagtgcactgatttgcccaatattacacagcgaataattggcaagatcatgactggccttctaaatactatcaattatgccattcaagtccctctgcatgtatgccacttattaatcaccctcataaatcctaacatcctttcaatgcccagaattacagtaatgtttcaaaagaacagctagaggtacagaaacactatgattttcaacccggcctacaaatttctttcctgctaaaagcataatgcatgctctgactacaggtctaccacatggcaagtgtttttgtaaagaattaaaggtggccgggcgcggtggctcacgcctgtaatcccagccgggtgcggtggtatagtcctgataccacctggatctgaggtaaactgaatactgtaatcaacaaactggcttacagcttgcnattttctattgattatggtttcctcagtaaaacacagatgtaagaaacaaaaaggactactactcagcaataaaaaagaatgtattactgattnacacaataacatggatgatctcaaantattaacaanntatgatgtgtatagcgatcctctaggc

SEQ ID NO: 117272 - DNA, 265 bp, Homo sapiens
gagatttttaggcagctgattttgtgtcttttttctccagctattcatcaagatcatgaggctgggtgtggtggctcacacctgtaaacccagcactttgggaggccaaggcaggaggatcatttgagctcaggagtttcaggccaacctgggcaacccagggagaccctatctctacaaaaaatataaaaattagctggttgtggtggtgtgcacctgtggtcccagctactcaggtgggaggattggttgaggccagaagttt

SEQ ID NO: 117273 - DNA, 586 bp, Homo sapiens
tccttacttactccccttcttcggctagagctcagggagctagagatggtcctggttagagaactaccttatttcctaaaagtcctattctcattctgctggagtcccctctggctatgcaaatgctgaggggaaggagttttggaggacttaggcagtcctgatgtaagacactcccaacaggatcctatcatcattttgggtagtgggaaatttaccagggcccagctcttctctggaacccagcaccaactgctttaaccaacagttaaagggaagagcttgggaaaagccctgcgtttctccttgggtggggaaatccttccttaagaagaccatctgagttacattctgcttcttcttcttctttttttttttttgagacagagtctcactctgtcgctaggccagagtgcagtgacgcagtctcggctcactgcaacctctgtctcccagcttcaagcgattcccctgcctcagcctcccgagtagctgggactacaggcgtgggtggcgggcacctgtaatcccagctactcgggaggctgaggtagagaattgcttgaacctgggaggtggaggttgc

SEQ ID NO: 117274 - DNA, 177 bp, Homo sapiens
cacagtcaggcccacagcaagtgcttagaaatgctgggagggtaggtggctgggaggcctgtctcaagtttacttttgtgcctactatatgccagacactgtgacttaggggagtggaacaagctttgtcacacacacacctaggttgaagtcctgctccaccattaactttctagc

SEQ ID NO: 117275 - DNA, 253 bp, Homo sapiens
ttatttgagagatggctgttctctcacctgagcggaaattgaacacacagcttgttttattctatatcataggttctatgggcttgtcctctctttataggaaataatagaaaaccttcaacagatcggccgggcacggtggctcatgcctgtaatcccagcactttgggaggccgaggcgggcggatcacaaggtcaagagattgagaccatcctggctaacatggtgaaaccctgtctctactaaaaatac

SEQ ID NO: 117276 - DNA, 276 bp, Homo sapiens
aaagctaggtgtagtggtgcatgcatgcacgtagtcccagctacttgggaggctgagacaggagcccaggagatcaaggctgcagtgagccatgattgtgccactgcactccagcctgggtgatagagcgagaccctgtctcaaaaacagaaacaagtttgtatgagatgctaggctgtttctgagactatcacaccccctttcctatgactcctgttacggtgaggaaagacagaaggctgttattactgagacctcaattcacataacatgaat

SEQ ID NO: 117277 - DNA, 2574 bp, Homo sapiens
tctctttctcctccacgtggggacgcaggatggcggcagcagtggcggacgaggcggtggcgcgcgatgtgcagcggttgctagtgcagttccaggatgagggcgggcagctgctgggttccccgttcgacgtgcccgtggacatcaccccggacaggctgcagctcgtgtgcaacgcgctactggcccaggaggatcccctgccactggctttctttgtccacgatgctgagatcgtctcctcactggggaagacgttggagtcccaggcagtggagacagagaaggtcctagacatcatctaccagccacaggctatcttcagagtccgggctgtgactcgctgcaccagctccttggagggtcacagtgaggcagtcatttctgtggccttcagccctacgggaaagtacctggccagtggctctggagacaccaccgtgcgcttctgggatctcagcacagagacaccacatttcacatgcaagggacacagacactgggtccttagtatatcctggtctccagatggcaagaagctggcctcaggctgcaagaatggccagattctcctctgggacccaagcacagggaagcaggtgggcaggaccctcgctggccacagcaagtggatcacaggcctgagctgggagcccctccatgcgaaccctgagtgccgctatgtggccagcagctccaaggatggcagtgtgcggatctgggacacaactgcaggccgctgtgagcgcatcctcaccgggcacacccagtcggtcacctgtctccggtggggaggggacgggcttctctactctgcctcccaggaccgcaccatcaaagtctggagagctcatgacggtgtgctgtgccggactctgcaaggccacggccactgggtgaacaccatggccctcagcactgactatgccctgcgcactggggcctttgaacctgctgaggcctcagttaatccccaagacctccaaggatccttgcaggagttgaaggagagggctctgagccgatacaacctcgtgcggggccagggtccagagaggctggtgtctggctccgacgacttcaccttattcctgtggtccccagcagaggacaaaaagcctctcactcggatgacaggacaccaagctctcatcaaccaggtgctcttctctcctgactcccgcatcgtggctagtgcctcctttgacaagtccatcaagctgtgggatggcaggacgggcaagtacctggcttccctacgcggccacgtggctgccgtgtaccagattgcgtggtcagctgacagtcggctcctggtcagcggcagcagtgacagcacactgaaggtgtgggatgtgaaggcccagaagctggccatggacctgcccggccacgcggatgaggtatatgctgttgactggagtccagatggccagagagtggcaagtggtgggaaggacaaatgcctccggatatggaggagatgagacggcccgaagttctctctgacccccacctcgactcggcctctgccagctgccttccctgccagagaacaaaggctgagatggcagtgcacacaccctccccaccagtggggacctgagaatgcgtgtggcctgctgtcctcgatagaccggaatggggttttcccacagatccccgcctgtggcacaccccagagccagaaatcgaaggtcacaggaagttgtcactgaacttggcccgtgtctgctactctgtaccttgctggtacagacaggggtggtgggcagccaggctctatgagtgggcccctagtgtcagctctgtacagggtcagatcccaggttctatgaccaaataagtaacttaagttttgtgtgttgggttctaattccttgtcctagaatccccatgactcaatcaaggactgtgctaaatgagattgtccagcccccgcccttgcactggactacgccaaaaccacactgaccaggcacttgccttccctctcttcccccgtgttggtaagagagaggccagttgtgatagtggccaaggagaatctagggctgtattgttgtccactgcagtaggcaccggccacatgtgactgctggcatgaaatagaagtgcagttcctccatcgcactgggtaaggcctccagtattggacagcacacagaaaggttttcatcatcaagagagttctgctggtcagccctgctccaggggatgcctctgccttcgcatagcacactgcttgaggccctgccaggcaccaagcactgccctgggcccatgggatagagcggggaaggtgatggctcttccagaggattccctcagatggggaggcagcagtatgagctctgagcagaagtgggtattgttgatacagaggaagttctttgccacgagaactttcaagcagtgaaaggaattcccatcaggactcagaccccaggccgagatcttgccctgaatgtaccctgcctctgctttctcctgcatcccatgctaagcagggtcatggtctgaactactcagattggatttccaaaccatccttgtataaactgctcagaacta

SEQ ID NO: 117278 - DNA, 1002 bp, Homo sapiens
  misc_feature (44)..(44): n is a, c, g, or t
tggacaggcccgcgcgtaaatcggacgaggggcggcagcagtgncggacgaggcggtggcgcgcgatgtgcagcggttgctagtgcagttccaggatgagggcgggcagctgctgggttccccgttcgacgtgcccgtggacatcaccccggacaggctgcagctcgtgtgcaacgcgctactggcccaggaggatcccctgccactggctttctttgtccacgatgctgagatcgtctcctcactggggaagacgttggagtcccaggcagtggagacagagaaggtcctagacatcatctaccagccacaggctatcttcagagtccgggctgtgactcgctgcaccagctccttggagggtcacagtgaggcagtcatttctgtggccttcagccctacgggaaagtacctggccagtggctctggagacaccaccgtgcgcttctgggatctcagcacagagacaccacatttcacatgcaagggacacagacactgggtccttagtatatcctggtctccagatggcaagaagctggcctcaggctgcaagaatggccagattctcctctgggacccaagcacagggaagcaggtgggcaggaccctcgctggccacagcaagtggatcacaggcctgagctgggagcccctccatgcgaaccctgagtgccgctatgtggccagcagctccaaggatggcagtgtgcggatctgggacacaactgcaggccgctgtgagcgcatcctcaccgggcacacccagtcggtcacctgtctccggtgggaggacggtcccaatcttgctccagacggacacaagctgagaccagacggggggcgactggagccggccgggaacaggcccagatgatccggcggcgacgggcaggtaccaacaagcgcaggggagccgcaaccgcgcggagggtggcactcctgggcggaagagaagacaaaggctcaagcaaaggaaccccgctccgcgcgccaactcaa

SEQ ID NO: 117279 - DNA, 2853 bp, Homo sapiens
tctctttctcctccacgtggggacgcaggatggcggcagcagtggcggacgaggcggtggcgcgcgatgtgcagcggttgctagtgcagttccaggatgagggcgggcagctgctgggttccccgttcgacgtgcccgtggacatcaccccggacaggctgcagctcgtgtgcaacgcgctactggcccaggaggatcccctgccactggctttctttgtccacgatgctgagatcgtctcctcactggggaagacgttggagtcccaggcagtggagacagagaaggtcctagacatcatctaccagccacaggctatcttcagagtccgggctgtgactcgctgcaccagctccttggagggtcacagtgaggcagtcatttctgtggccttcagccctacgggaaagtacctggccagtggctctggagacaccaccgtgcgcttctgggatctcagcacagagacaccacatttcacatgcaagggacacagacactgggtccttagtatatcctggtctccagatggcaagaagctggcctcaggctgcaagaatggccagattctcctctgggacccaagcacagggaagcaggtgggcaggaccctcgctggccacagcaagtggatcacaggcctgagctgggagcccctccatgcgaaccctgagtgccgctatgtggccagcagctccaaggatggcagtgtgcggatctgggacacaactgcaggccgctgtgagcgcatcctcaccgggcacacccagtcggtcacctgtctccggtggggaggggacgggcttctctactctgcctcccaggaccgcaccatcaaagtctggagagctcatgacggtgtgctgtgccggactctgcaaggccacggccactgggtgaacaccatggccctcagcactgactatgccctgcgcactggggcctttgaacctgctgaggcctcagttaatccccaagacctccaaggatccttgcaggagttgaaggagagggctctgagccgatacaacctcgtgcggggccagggtccagagaggctggtgtctggctccgacgacttcaccttattcctgtggtccccagcagaggacaaaaagcctctcactcggatgacaggacaccaagctctcatcaaccaggtgctcttctctcctgactcccgcatcgtggctagtgcctcctttgacaagtccatcaagctgtgggatggcaggacgggcaagtacctggcttccctacgcggccacgtggctgccgtgtaccagattgcgtggtcagctgacagtcggctcctggtcagcggcagcagtgacagcacactgaaggtgtgggatgtgaaggcccagaagctggccatggacctgcccggccacgcggatgaggtatatgctgttgactggagtccagatggccagagagtggcaagtggtgggaaggacaaatgcctccggatatggaggagatgagacggcccgaagttctctctgacccccacctcgactcggcctctgccagctgccttccctgccagagaacaaaggctgagatggcagtgcacacaccctccccaccagtggggacctgagaatgcgtgtggcctgctgtcctcgatagaccggaatggggttttcccacagatccccgcctgtggcacaccccagagccagaaatcgaaggtcacaggaagttgtcactgaacttggcccgtgtctgctactctgtaccttgctggtacagacaggggtggtgggcagccaggctctatgagtgggcccctagtgtcagctctgtacagggtcagatcccaggttctatgaccaaataagtaacttaagttttgtgtgttgggttctaattccttgtcctagaatccccatgactcaatcaaggactgtgctaaatgagattgtccagcccccgcccttgcactggactacgccaaaaccacactgaccaggcacttgccttccctctcttcccccgtgttggtaagagagaggccagttgtgatagtggccaaggagaatctagggctgtattgttgtccactgcagtaggcaccggccacatgtgactgctggcatgaaatagaagtgcagttcctccatcgcactgggtaaggcctccagtattggacagcacacagaaaggttttcatcatcaagagagttctgctggtcagccctgctccaggggatgcctctgccttcgcatagcacactgcttgaggccctgccaggcaccaagcactgccctgggcccatgggatagagcggggaaggtgatggctcttccagaggattccctcagatggggaggcagcagtatgagctctgagcagaagtgggtattgttgatacagaggaagttctttgccacgagaactttcaagcagtgaaaggaattcccatcaggactcagaccccaggccgagatcttgccctgaatgtaccctgcctctgctttctcctgcatcccatgctaagcagggtcatggtctgaactactcagattggatttccaaaccatccttgtataaactgctcagaactagcatcttgctccttcttaccctcctccacccttgtctgtgcttttgggttttgcgcgtcacctagctgtggtgcttggcctccaccttgcacatatctgcagtgaggctacataagaagcgaacaaaactatcagccactgagctccttggtgccagctgtttgtctgctgtgctctcagactgcaccaggcctggaaggttctcaagctccaaaacttttgatgaggaaacaacataagaaatgattagcccatgccctcacatctagtaagagaaag

SEQ ID NO: 117280 - DNA, 2709 bp, Homo sapiens
tctctttctcctccacgtggggacgcaggatggcggcagcagtggcggtgggtgtgcgtggatgggggcggggggcgtcgccgcggggcgctagggcccgggtccctgaggcctgagagaggcgaagtggggcccttctgggcgggcgaccagactgactcccgccccacttgctcgcgcaggacgaggcggtggcgcgcgatgtgcagcggttgctagtgcagttccaggatgagggcgggcagctgctgggttccccgttcgacgtgcccgtggacatcaccccggacaggctgcagctcgtgtgcaacgcgctactggcccaggaggatcccctgccactggctttctttgtccacgatgctgagatcgtctcctcactggggaagacgttggagtcccaggcagtggagacagagaaggtcctagacatcatctaccagccacaggctatcttcagagtccgggctgtgactcgctgcaccagctccttggagggtcacagtgaggcagtcatttctgtggccttcagccctacgggaaagtacctggccagtggctctggagacaccaccgtgcgcttctgggatctcagcacagagacaccacatttcacatgcaagggacacagacactgggtccttagtatatcctggtctccagatggcaagaagctggcctcaggctgcaagaatggccagattctcctctgggacccaagcacagggaagcaggtgggcaggaccctcgctggccacagcaagtggatcacaggcctgagctgggagcccctccatgcgaaccctgagtgccgctatgtggccagcagctccaaggatggcagtgtgcggatctgggacacaactgcaggccgctgtgagcgcatcctcaccgggcacacccagtcggtcacctgtctccggtggggaggggacgggcttctctactctgcctcccaggaccgcaccatcaaagtctggagagctcatgacggtgtgctgtgccggactctgcaaggccacggccactgggtgaacaccatggccctcagcactgactatgccctgcgcactggggcctttgaacctgctgaggcctcagttaatccccaagacctccaaggatccttgcaggagttgaaggagagggctctgagccgatacaacctcgtgcggggccagggtccagagaggctggtgtctggctccgacgacttcaccttattcctgtggtccccagcagaggacaaaaagcctctcactcggatgacaggacaccaagctctcatcaaccaggtgctcttctctcctgactcccgcatcgtggctagtgcctcctttgacaagtccatcaagctgtgggatggcaggacgggcaagtacctggcttccctacgcggccacgtggctgccgtgtaccagattgcgtggtcagctgacagtcggctcctggtcagcggcagcagtgacagcacactgaaggtgtgggatgtgaaggcccagaagctggccatggacctgcccggccacgcggatgaggtatatgctgttgactggagtccagatggccagagagtggcaagtggtgggaaggacaaatgcctccggatatggaggagatgagacggcccgaagttctctctgacccccacctcgactcggcctctgccagctgccttccctgccagagaacaaaggctgagatggcagtgcacacaccctccccaccagtggggacctgagaatgcgtgtggcctgctgtcctcgatagaccggaatggggttttcccacagatccccgcctgtggcacaccccagagccagaaatcgaaggtcacaggaagttgtcactgaacttggcccgtgtctgctactctgtaccttgctggtacagacaggggtggtgggcagccaggctctatgagtgggcccctagtgtcagctctgtacagggtcagatcccaggttctatgaccaaataagtaacttaagttttgtgtgttgggttctaattccttgtcctagaatccccatgactcaatcaaggactgtgctaaatgagattgtccagcccccgcccttgcactggactacgccaaaaccacactgaccaggcacttgccttccctctcttcccccgtgttggtaagagagaggccagttgtgatagtggccaaggagaatctagggctgtattgttgtccactgcagtaggcaccggccacatgtgactgctggcatgaaatagaagtgcagttcctccatcgcactgggtaaggcctccagtattggacagcacacagaaaggttttcatcatcaagagagttctgctggtcagccctgctccaggggatgcctctgccttcgcatagcacactgcttgaggccctgccaggcaccaagcactgccctgggcccatgggatagagcggggaaggtgatggctcttccagaggattccctcagatggggaggcagcagtatgagctctgagcagaagtgggtattgttgatacagaggaagttctttgccacgagaactttcaagcagtgaaaggaattcccatcaggactcagaccccaggccgagatcttgccctgaatgtaccctgcctctgctttctcctgcatcccatgctaagcagggtcatggtctgaactactcagattggatttccaaaccatccttgtataaactgctcagaacta

SEQ ID NO: 117281 - DNA, 2603 bp, Homo sapiens
tctctttctcctccacgtggggacgcaggatggcggcagcagtggcggacgaggcggtggcgcgcgatgtgcagcggttgctagtgcagttccaggatgagggcgggcagctgctgggttccccgttcgacgtgcccgtggacatcaccccggacaggctgcagctcgtgtgcaacgcgctactggcccaggaggatcccctgccactggctttctttgtccacgatgctgagatcgtctcctcactggggaagacgttggagtcccaggcagtggagacagagaaggtcctagacatcatctaccagccacaggctatcttcagagtccgggctgtgactcgctgcaccagctccttggagggtcacagtgaggcagtcatttctgtggccttcagccctacgggaaagtaaggacagctgcagactcatggagggggtacctggccagtggctctggagacaccaccgtgcgcttctgggatctcagcacagagacaccacatttcacatgcaagggacacagacactgggtccttagtatatcctggtctccagatggcaagaagctggcctcaggctgcaagaatggccagattctcctctgggacccaagcacagggaagcaggtgggcaggaccctcgctggccacagcaagtggatcacaggcctgagctgggagcccctccatgcgaaccctgagtgccgctatgtggccagcagctccaaggatggcagtgtgcggatctgggacacaactgcaggccgctgtgagcgcatcctcaccgggcacacccagtcggtcacctgtctccggtggggaggggacgggcttctctactctgcctcccaggaccgcaccatcaaagtctggagagctcatgacggtgtgctgtgccggactctgcaaggccacggccactgggtgaacaccatggccctcagcactgactatgccctgcgcactggggcctttgaacctgctgaggcctcagttaatccccaagacctccaaggatccttgcaggagttgaaggagagggctctgagccgatacaacctcgtgcggggccagggtccagagaggctggtgtctggctccgacgacttcaccttattcctgtggtccccagcagaggacaaaaagcctctcactcggatgacaggacaccaagctctcatcaaccaggtgctcttctctcctgactcccgcatcgtggctagtgcctcctttgacaagtccatcaagctgtgggatggcaggacgggcaagtacctggcttccctacgcggccacgtggctgccgtgtaccagattgcgtggtcagctgacagtcggctcctggtcagcggcagcagtgacagcacactgaaggtgtgggatgtgaaggcccagaagctggccatggacctgcccggccacgcggatgaggtatatgctgttgactggagtccagatggccagagagtggcaagtggtgggaaggacaaatgcctccggatatggaggagatgagacggcccgaagttctctctgacccccacctcgactcggcctctgccagctgccttccctgccagagaacaaaggctgagatggcagtgcacacaccctccccaccagtggggacctgagaatgcgtgtggcctgctgtcctcgatagaccggaatggggttttcccacagatccccgcctgtggcacaccccagagccagaaatcgaaggtcacaggaagttgtcactgaacttggcccgtgtctgctactctgtaccttgctggtacagacaggggtggtgggcagccaggctctatgagtgggcccctagtgtcagctctgtacagggtcagatcccaggttctatgaccaaataagtaacttaagttttgtgtgttgggttctaattccttgtcctagaatccccatgactcaatcaaggactgtgctaaatgagattgtccagcccccgcccttgcactggactacgccaaaaccacactgaccaggcacttgccttccctctcttcccccgtgttggtaagagagaggccagttgtgatagtggccaaggagaatctagggctgtattgttgtccactgcagtaggcaccggccacatgtgactgctggcatgaaatagaagtgcagttcctccatcgcactgggtaaggcctccagtattggacagcacacagaaaggttttcatcatcaagagagttctgctggtcagccctgctccaggggatgcctctgccttcgcatagcacactgcttgaggccctgccaggcaccaagcactgccctgggcccatgggatagagcggggaaggtgatggctcttccagaggattccctcagatggggaggcagcagtatgagctctgagcagaagtgggtattgttgatacagaggaagttctttgccacgagaactttcaagcagtgaaaggaattcccatcaggactcagaccccaggccgagatcttgccctgaatgtaccctgcctctgctttctcctgcatcccatgctaagcagggtcatggtctgaactactcagattggatttccaaaccatccttgtataaactgctcagaacta

SEQ ID NO: 117282 - DNA, 2611 bp, Homo sapiens
tctctttctcctccacgtggggacgcaggatggcggcagcagtggcggtgggtgtgcgtggatgggggcggggggcgtcgccgcggggcgctagggcccgggtccctgaggcctgagagaggcgaagtggggcccttctgggcgggcgaccagactgactcccgccccacttgctcgcgcaggacgaggcggtggcgcgcgatgtgcagcggttgctagtgcagttccaggatgagggcgggcagctgctgggttccccgttcgacgtgcccgtggacatcaccccggacaggctgcagctcgtgtgcaacgcgctactggcccaggaggatcccctgccactggctttctttgtccacgatgctgagatcgtctcctcactggggaagacgttggagtcccaggcagtggagacagagaaggtcctagacatcatctaccagccacaggctatcttcagagtccgggctgtgactcgctgcaccagctccttggagggtcacagtgaggcagtcatttctgtggccttcagccctacgggaaagtacctggccagtggctctggagacaccaccgtgcgcttctgggatctcagcacagagacaccacatttcacatgcaagggacacagacactgggtccttagtatatcctggtctccagatggcaagaagctggcctcaggctgcaagaatggccaggaaccctgagtgccgctatgtggccagcagctccaaggatggcagtgtgcggatctgggacacaactgcaggccgctgtgagcgcatcctcaccgggcacacccagtcggtcacctgtctccggtggggaggggacgggcttctctactctgcctcccaggaccgcaccatcaaagtctggagagctcatgacggtgtgctgtgccggactctgcaaggccacggccactgggtgaacaccatggccctcagcactgactatgccctgcgcactggggcctttgaacctgctgaggcctcagttaatccccaagacctccaaggatccttgcaggagttgaaggagagggctctgagccgatacaacctcgtgcggggccagggtccagagaggctggtgtctggctccgacgacttcaccttattcctgtggtccccagcagaggacaaaaagcctctcactcggatgacaggacaccaagctctcatcaaccaggtgctcttctctcctgactcccgcatcgtggctagtgcctcctttgacaagtccatcaagctgtgggatggcaggacgggcaagtacctggcttccctacgcggccacgtggctgccgtgtaccagattgcgtggtcagctgacagtcggctcctggtcagcggcagcagtgacagcacactgaaggtgtgggatgtgaaggcccagaagctggccatggacctgcccggccacgcggatgaggtatatgctgttgactggagtccagatggccagagagtggcaagtggtgggaaggacaaatgcctccggatatggaggagatgagacggcccgaagttctctctgacccccacctcgactcggcctctgccagctgccttccctgccagagaacaaaggctgagatggcagtgcacacaccctccccaccagtggggacctgagaatgcgtgtggcctgctgtcctcgatagaccggaatggggttttcccacagatccccgcctgtggcacaccccagagccagaaatcgaaggtcacaggaagttgtcactgaacttggcccgtgtctgctactctgtaccttgctggtacagacaggggtggtgggcagccaggctctatgagtgggcccctagtgtcagctctgtacagggtcagatcccaggttctatgaccaaataagtaacttaagttttgtgtgttgggttctaattccttgtcctagaatccccatgactcaatcaaggactgtgctaaatgagattgtccagcccccgcccttgcactggactacgccaaaaccacactgaccaggcacttgccttccctctcttcccccgtgttggtaagagagaggccagttgtgatagtggccaaggagaatctagggctgtattgttgtccactgcagtaggcaccggccacatgtgactgctggcatgaaatagaagtgcagttcctccatcgcactgggtaaggcctccagtattggacagcacacagaaaggttttcatcatcaagagagttctgctggtcagccctgctccaggggatgcctctgccttcgcatagcacactgcttgaggccctgccaggcaccaagcactgccctgggcccatgggatagagcggggaaggtgatggctcttccagaggattccctcagatggggaggcagcagtatgagctctgagcagaagtgggtattgttgatacagaggaagttctttgccacgagaactttcaagcagtgaaaggaattcccatcaggactcagaccccaggccgagatcttgccctgaatgtaccctgcctctgctttctcctgcatcccatgctaagcagggtcatggtctgaactactcagattggatttccaaaccatccttgtataaactgctcagaacta

SEQ ID NO: 117283 - DNA, 1019 bp, Homo sapiens
tctctttctcctccacgtggggacgcaggatggcggcagcagtggcggtgggtgtgcgtggatgggggcggggggcgtcgccgcggggcgctagggcccgggtccctgaggcctgagagaggcgaagtggggcccttctgggcgggcgaccagactgactcccgccccacttgctcgcgcaggacgaggcggtggcgcgcgatgtgcagcggttgctagtgcagttccaggatgagggcgggcagctgctgggttccccgttcgacgtgcccgtggacatcaccccggacaggctgcagctcgtgtgcaacgcgctactggcccaggtacctggccagtggctctggagacaccaccgtgcgcttctgggatctcagcacagagacaccacatttcacatgcaagggacacagacactgggtccttagtatatcctggtctccagatggcaagaagctggcctcaggctgcaagaatggccagattctcctctgggacccaagcacagggaagcaggtgggcaggaccctcgctggccacagcaagtggatcacaggcctgagctgggagcccctccatgcgaaccctgagtgccgctatgtggccagcagctccaaggatggcagtgtgcggatctgggacacaactgcaggccgctgtgagcgcatcctcaccgggcacacccagtcggtcacctgtctccggtggggaggggacgggcttctctactctgcctcccaggaccgcaccatcaaagtctggagagctcatgacggtgtgctgtgccggactctgcaaggccacggccactgggtgaacaccatggccctcagcactgactatgccctgcgcactggggcctttgaacctgctgaggcctcagttaatccccaagacctccaaggatccttgcaggagttgaacgagaggctctgaaccgatacaactcctgcgggcaggtccaaaaagctgtgtctggccgagattacttttcctggggcccgcaggaaaagcctccc

SEQ ID NO: 117284 - DNA, 616 bp, Homo sapiens
  misc_feature (1)..(1): n is a, c, g, or t
ntatcgatgccacctttctactcctatctctttctctacttccttcaaggctaataactcttaaatttgtccttttgaggctattttcttgatcctataggtgtgcttcattttttttattcttttttcttttgactcttctgtgtattttcaaatagcctgtcttcaagctcagtaattctttcttctgcttgatcaattctgctaattaaaggatgatgatgcattattcagtaagccaatggcattgttcagcttcagaatttctgcattattattcataattattttaatctcttggttcagtttatcagatagaattctaaattccttctctgtgttatcttgaccttttttggagtttcctcaacacagctatttggaattatctgtctgcaaggtcacatacccctgttcctccaggactggtccctagttcttattgacttctctttcagtttactaataacatcttcctgttcaaactgaattttaatttcattgtgctctgaattccagatatcgtattttcagtactagaatttccatttgatttttttcacatatccaattatatgataaaattctccattatttcatctattttatttctctt

SEQ ID NO: 117285 - DNA, 389 bp, Homo sapiens
tggagatgtacatttgaaagttgtgtgtctttgctatacaagccatgagactgggtgggatcaactagaaaatgagtctagaaagagcagagaataagtctggaggctgggaaatgccaatgtttggaggttggaaacgtgaggaagaaccaatgaaggaagcttcttaaccttgtgctcttggatgttgtaccatcaacctcaagctcttggatgttgtacatgatgatcacttaagcagatcaactttttggttaatatcactgaattttctatatctagttttagtttaggattccaatgaacctaggaaccaaaatttggaggctattactaggtgctaagtcacacattcggataaggaaagtattaagcttatttccgactag

SEQ ID NO: 117286 - DNA, 413 bp, Homo sapiens
ccttgagtgaagtcctgggagaccttcactcaaagtctcctagtcactcaataccttcacgctagacccttggagccccatgctactggacaccccaccagagggagatggatgcctagtgctggctgcatggtgggaagggcctccccatggaaggaaggttggtcaaggcttggtggtgagagcagggcctagcagtgctctactctgcagacattggctgtcaggcccttccctggaagttggctgagcatctcagcccaatgtgaggtgtgggcaggggtgggggtgatgcaggctctgcccatagaggcttgcagtctcagggcagacagcaaccgaaatggagaccccatcgtgtggggaagtgggaggtgctatgggccgggagaccccgacccagaccaggaggt

SEQ ID NO: 117287 - DNA, 329 bp, Homo sapiens
cccccctggtctctgaacttaggcctggtctggacatgaaggtttggcagcaaactgtcaggacccccggagagaaccctgactcctgtgccaacccaactgtgtctggctcaacgctcgacgctcaaacacagcaaacggcaagaaggcaagtccaggatatacgttttggcaaaaatggcagccgtgggggtggaggtggaggaggacatgcacggagggcttaaacagggctgtgtttttttttttttcttttagatggagtctcactctgtcacccaggttggagtgcagtggcggatctcggctcactgcaaactccaccccct

SEQ ID NO: 117288 - DNA, 436 bp, Homo sapiens
cttctcacgcactccaagtgcagccggaatgagctttgcaaaatgcaaatcagagcctgttgttcccctgctcagcaccctcctggggcctccccagttctcctggtaatccccaatcccacctggtctcccaggcctgcagggtggtctcagccacccacaccagcccagacctcaccgccccttcctgcctagctccctcctcagggtccccacaggcccgtcgcgcctggagtccccctgagatgtggtcacttgtttcaacgtccaacttctggacacccgacattccccaatgactgaggtccctgccccctccttcagggagcaccacgcctgtgccagtcctcccacagctctggcctaaatcagaccctccaaaggaggaggaggctactgcctccgtctgcctgtccctaagtctggcagcggcata

SEQ ID NO: 117289 - DNA, 345 bp, Homo sapiens
aggagcacggggagggctcagtgtagccgaggcagagcaaatgatggggacagtgacaagaggcagggcaggagggacaggaacagtcaggccacgcaggccttggcacccatggcgaggagatggattttgttccagaaggaattgggaagcctttgagagctcttaaatgggggaagttgtataatctgattgacattttaaaggatatttcaggctatgcttgggagaatcagtggtgatgggccagaatgaatagaggacgccaacgtggaggtcacagtggtgagcggctttggagatggggaagtaagaaagtgctttctgaacatatttaggaggctg

SEQ ID NO: 117290 - DNA, 325 bp, Homo sapiens
gccaaaatatggaattgctcttaactcttcccctcctatctcccaccaggtctttccccacccactgccctaaataagcactgggtgtggtcagtgctgcttagaaccacctctcacttccattccctctcagtcccactgaggccaacctaattcgggtcttcctcatctctcaggtagatctgtattaccaaatagtatccttactggtgtccatgtctttaatctttgtatgttttgttttttttaatgacctgttttaaatacatgaaacagtgaaaaagattttcttaaagcacataacccaacacgcagatcaactgtt

SEQ ID NO: 117291 - DNA, 223 bp, Homo sapiens
ctatggaacatggactttgaacctctcttctttttcgtctccttgctttgatttaatccatcatttctaggtgcatgacaacactccctaacttaacccccctgctttcccattttaactaccatcacaataatcttaatactggcaggtatctagcacttggcgattttcaaagagcttccactagttccttgctcggaatcttgtgatgcaggcaggatag

SEQ ID NO: 117292 - DNA, 483 bp, Homo sapiens
gcttggccagacgtggtggctcacgcctgtaatcccagcactttgggaggccgaggtaggaggatcacttgggttcaggagttcaagaccagcctggtcaacatggtgaaacctcgtctctactaaaaatacaaaaattagctgagcatggttgtgcatgactgtaatcccagctacttaggaggctgaggcacgagaaccatttgaatccgggaggcagaggctgcagtgagccaagatggtgccactgcactccagcttgagcaacagaatgaaactgtgtccccccaccccccagaaaaaaaaaaaaaggaattggctctaatggtgcaatgactcatcctgaaattcgactaaggttctaaatacaaacttggaattgtcatcccagactcaagagtgagacctaggacctagggttagttcttttttattcacattttcacatggtacccatgtgtgcagaactgactaaaccagata

SEQ ID NO: 117293 - DNA, 262 bp, Homo sapiens
  misc_feature (45)..(45): n is a, c, g, or t
  misc_feature (71)..(71): n is a, c, g, or t
ggcttctcatcccctagtacacaaagcatcaagccttggcctctnggaggctctgggaccccaccggaggncaggaccatcaccccctcagcccccagaagaccaggaggcctctcaggtcagcccctctggtcagtcaaggaaattgaggtccacggaagcagcagggcccaaactcatactcccagcccttttcctggaaccagcagaacatgaaccctgctggggaggggcggaccagctacaccaggagaccaggacc

SEQ ID NO: 117294 - DNA, 677 bp, Homo sapiens
tcggaggcacttgcagccaacaggttgcctaagcaaagccagccagtttatggcagcattgactgggagcccagtgggagccctagggagctggttccttctgtaccaagtaatgagcaactgacatcatccatgggtgactctggaaaatctcaggctctctctggtggtttagcaactgctcaggtccctcaaggtgatgtttaatagcttttttcagcaacaggggccgtctgccatagatacggaaaggcactatttattaggatgcttgttaaatgaagtgctgataatcaagaactcatagtaggacaaagctgactgtattttctaaaacactcataaaatatcccagaacctcatgctgttgcaaaatcctgcagttctccgatcaacagatggagtcttggccgggttgaggctcacgcctgtaatctcagcactttgggaggccaagatgggaggattgcttcaggccaggagtttgagaccagcctaggcaacttagggaaaccccatctctacaaaaaatttaaaaattagtcgagcatggtggtgcacacctatactcccaactactcaggaggctgaggaggcaggattgcttgggcctgggaggtcaaggttgcagtgagccatgatcagaccactgcactccagcctaggaaacagagtga

SEQ ID NO: 117295 - DNA, 1003 bp, Homo sapiens
ttagataagtgctaaataatccccagctgtaaaattctaagaataattaaaacttcctttcttaacattcttagtgaacaacttacaggttaaaaaacaaacccaaagagattatttcctgcaaagagcctttagtatggtagcacctacttctagaaggcctgtcataaactgtcatctagtgaaagtgatgaagaagagtggctgggagtcaatcttatcaggagctggaacaggtgaagccctcaccagtgaaaaatcttgacagatgcagctactaagatttcctactacaaagaataacagcagttagaaaagcagactccctgtggtggcgaccagtatcttcaaactcataccagagtaaagccttatccatttggagttctttctgatgcattatgtgagaaaaacaagcaaacaaatgaacacttatttgtatttgaattgcactaaatttatacatgaaactgaaaaaaactgatatctttatgaagctgcataatcctatccaaggacagacgtctccttccatttgcttttgctttactaatttgaatctatgttatttgttttggatacatctggaattgacttttttgcatggtgtaagaaataacagttcttcctggatcagccctctcccgtctgtcatctccaacagatacaaagccagctttaagaagaccaaacctacaaaaatcattcatgctttctgcctccatgtttttctttccaacctagttcctccagaaaatgtaaaagagcaaccgaaccgtcaactggtacaatgacttctacacatcagacctcggccacgccacagtcatcagattattctatcacagggtctctcaaccgtggaatatggtctccaagggaaacaagccacagagggctcaggagcattgctataaagagtaggcaaatggaaatctttccccaaagggcacactgggattgttaggcgagggctgctcaatccattaaaagtttaaactcg

SEQ ID NO: 117296 - DNA, 484 bp, Homo sapiens
taacacccacttattgtggcttagtccttgtacatataacgaaacacacacacagaaactggagtttcaaggcttattttcaatatgtataatcctgactctgaagttgtgtcataagtcaagaaataactttcttcaaaaccgtttccaatattgctattattttctgtgaaaaaaggtgaattttcttctacaattatgtttatttaactcaatttcaaaagccttttccaccttcctagtgtacatttttctatcaggttaatatcaaaggccttaatcgtatgtttgctttacgaagatccaaggtatctgtctcttatttttctcattccaggtccttaaatatgactaaatctttagagacagttgtggtcgtatcaatttttaataaccaaaaagtatgtttcattgaagttcttgaaatataaattatgtatcactgtttaccactgctccaaaggaagagctaaaaatcaacagt

SEQ ID NO: 117297 - DNA, 454 bp, Homo sapiens
caggggtgtgtcgtgcgtgggctgtgtgtgcaggggtgtgtgtgcatagcggtgtgtgtgcaggggtgtgtgcgcgcaggggtgtgtgcgtgtgcacatctgtttatgtttctgtgcacatgcctgcacatctgtgtgtacaggggggtgtacaggtgtgtgtatgtatgcatgtctgtgtgtgcctctgtgtgcatgtcggtgtgtgtatgtgtatgtgtccgtgtggggcatgcaggtatgtatgtgtgcatgcaagtctgatacttgaatccagtagaaaccagagaggaggagaagctggtgttagctctctcttcatgactcccagctctttccttttataatgatcagagaaggactcttccaggtctctttggcatcaggaagggacccacgcacacagccctgcacacacacccctacgcacacacacctctgccaggaacccacg

SEQ ID NO: 117298 - DNA, 644 bp, Homo sapiens
caggggtgtgtcgtgcgtgggctgtgtgtgcaggggtgtgtgtgcatagcggtgtgtgtgcaggggtgtgtgcgcgcaggggtgtgtgcgtgtgcacatctgtttatgtttctgtgcacatgcctgcacatctgtgtgtacaggggggtgtacaggtgtgtgtatgtatgcatgtctgtgtgtgcctctgtgtgcatgtcggtgtgtgtatgtgtatgtgtccgtgtggggcatgcaggtatgtatgtgtgcatgcaagtctgatacttgaatccagtagaaaccagagaggaggagaagctggtgttagctctctcttcatgactcccagctctttccttttataatgatcagagaaggactcttccaggtctctttggcatcaggaagggacccatgctttggcaggccttcctaggaaaggaggggcatttacaccaaaacagtacgggattgtgtctgttgccacgggtagctgatgccagaaacagccagatctgtgagctgcaggaaaggctaagggacagccacagtcgatatggagtccccctccactgctccttcccttctttcatcttagtctatgtggaaccaggctaagcctttggagtcaaacgtagttgcagctgaagtcacatgtagtt

SEQ ID NO: 117299 - DNA, 303 bp, Homo sapiens
ccattcattctcaaggtgcctgaaagaaaaggctggtgtattcaaaccagtttgaggagtgcttcacaacgggacatttctagggggaccagcagggtggaaggaagccagcaaggcgtacggcaggcctgggggttaaggggatggcgaagcattgtcggggagggggctgcctagtttcactgtagaggcagcagagaagggaccaacccaggctcttatgcctcatgccctctgcccactgttcattgccctgatcagccaaaccccacaggagccctcgatgtgccactgtgggtgagt

SEQ ID NO: 117300 - DNA, 1662 bp, Homo sapiens
accgcctccacttcctgtgtccacggctgtcgcgagagcccggggcgagtgggcctctgctcgtgggtggttctcgtggaggtcagctcccgcgtgtctccgctcgacagggtgcttgggcagagcccatcgggtaggcgcgggccatggcgcagtacaagggcaccatgcgcgaggcaggccgtgccatgcacctcctcaagaagcgcgaaaggcagcgggagcagatggaggtgctgaagcagcgcatcgccgaggagaccatcctcaagtcgcaggtggacaagaggttctcggcgcattacgacgccgtggaggccgagctgaagtccagcacggtgggcctggtgaccctgaacgacatgaaggcccggcaggaggccctggtcagggagcgcgagcggcagctggccaagcgccagcacctggaggagcagcggctgcagcaggagcggcagcgggagcaggagcagcggcgcgagcgcaagcgtaagatctcctgcctgtcctttgcactagacgacctcgatgaccaggccgacgcggccgaggccaggcgcgccggaaacctgggcaagaaccccgacgtggacaccagcttcctgccagaccgcgaccgcgaggaggaggagaaccggctccgagaggagctgcgccaagagtgggaggcgcagcgcgagaaagtgaaggacgaggagatggaggtcaccttcagctactgggacggctcgggccaccggcgcacggtgcgggtgcgcaagggcaacacggtgcagcagttcctgaagaaggcgctgcaggggctgcgcaaggacttcctggagctgcgctccgccggcgtggagcagctcatgttcatcaaggaggacctcatcctgccgcactaccacaccttctacgacttcatcatcgccagggcgaggggcaagagcgggccgctcttcagcttcgatgtgcacgatgacgtgcgcctgctcagcgacgccaccatggagaaggacgagtcgcacgcgggcaaggtggtgctgcgcagctggtacgagaagaacaagcacatcttccccgccagccgctgggaggcctatgaccccgagaagaagtgggacaagtacaccatccgctaacacccgcctgccagagcggaaaccgggggtggggggagacactcatttctaggccccatcaccagtcacttgatttcgtgaccttgatttcttcccccaaatttaataaagacagagggttctcatgattcacattggttgtgctattgctgatgttatgctttggttgcttggttggtcttttctgagtattttagtgttgccacctggatttgctgcattgctctgctgagctgtattgaaaccatgactgggcccactgtcagacagaaattagaataggaggcacattttttacctggtggttatgagcatggacttgggggccacagtgactgagtttgattcccgacacagcctcctccttgctgtgtagttttgggtaagcttattaaacccccatgcctcagtttggtcacctgtaaaaggaaataacaagagcacttactttataagattgatgtgagtattaagtgaattaatatttgtaaaacgcttagctcttaataaatgtttctgttgttattaaaaaaaaaaa

SEQ ID NO: 117301 - DNA, 1964 bp, Homo sapiens
accgcctccacttcctgtgtccacggctgtcgcgagagcccggggcgagtgggcctctgctcgtgggtggttctcgtggaggtcagctcccgcgtgtctccgctcgacagggtgcttgggcaggtaagggtccgctcagtagcccaaccctctctgtatgcagctccccaaattcagcgctgcgctcaggcatggcagccacccgttacgtggggccgttcgcatttgcatttattgaggtcaaataaaatgctggaaattggtgcctggtgacactgtcaggttggtggttaccctagcaggtcggcccagcccctgaacgcttccatcactgccgaaagccctgtgaggaggcgcagagctgagcattccccgccgttgcgtgggcccccctctacctgccgcgtttttcctctttgctgcagagcccatcgggtaggcgcgggccatggcgcagtacaagggcaccatgcgcgaggcaggccgtgccatgcacctcctcaagaagcgcgaaaggcagcgggagcagatggaggtgctgaagcagcgcatcgccgaggagaccatcctcaagtcgcaggtggacaagaggttctcggcgcattacgacgccgtggaggccgagctgaagtccagcacggtgggcctggtgaccctgaacgacatgaaggcccggcaggaggccctggtcagggagcgcgagcggcagctggccaagcgccagcacctggaggagcagcggctgcagcaggagcggcagcgggagcaggagcagcggcgcgagcgcaagcgtaagatctcctgcctgtcctttgcactagacgacctcgatgaccaggccgacgcggccgaggccaggcgcgccggaaacctgggcaagaaccccgacgtggacaccagcttcctgccagaccgcgaccgcgaggaggaggagaaccggctccgagaggagctgcgccaagagtgggaggcgcagcgcgagaaagtgaaggacgaggagatggaggtcaccttcagctactgggacggctcgggccaccggcgcacggtgcgggtgcgcaagggcaacacggtgcagcagttcctgaagaaggcgctgcaggggctgcgcaaggacttcctggagctgcgctccgccggcgtggagcagctcatgttcatcaaggaggacctcatcctgccgcactaccacaccttctacgacttcatcatcgccagggcgaggggcaagagcgggccgctcttcagcttcgatgtgcacgatgacgtgcgcctgctcagcgacgccaccatggagaaggacgagtcgcacgcgggcaaggtggtgctgcgcagctggtacgagaagaacaagcacatcttccccgccagccgctgggaggcctatgaccccgagaagaagtgggacaagtacaccatccgctaacacccgcctgccagagcggaaaccgggggtggggggagacactcatttctaggccccatcaccagtcacttgatttcgtgaccttgatttcttcccccaaatttaataaagacagagggttctcatgattcacattggttgtgctattgctgatgttatgctttggttgcttggttggtcttttctgagtattttagtgttgccacctggatttgctgcattgctctgctgagctgtattgaaaccatgactgggcccactgtcagacagaaattagaataggaggcacattttttacctggtggttatgagcatggacttgggggccacagtgactgagtttgattcccgacacagcctcctccttgctgtgtagttttgggtaagcttattaaacccccatgcctcagtttggtcacctgtaaaaggaaataacaagagcacttactttataagattgatgtgagtattaagtgaattaatatttgtaaaacgcttagctcttaataaatgtttctgttgttattaaaaaaaaaaa

SEQ ID NO: 117302 - DNA, 634 bp, Homo sapiens
ccagggcttttgtttgactcatttaagtagtgatgtatgatatcagaatagtcttttgctcgtttgtggcctaatgttttaaaaaacatgtgatcacccaggcactgtggctcacacctgtaatcccagcactttgggaggccaaggtaggtggatcacgaggtcaggagatcgagaccaccctggccaacatggtgaaaccccatctctactaaaaaattaactggacgtggtagtgcacgcctgtagtccccactattcaggaggctgaggcaggagaattgcctgaacccgggaggtggaggttgcagtgagcagagattgcgccaccgtactccagcctgggcaacagagtgagactacatctcagaaaaaaaaacaaaaaacaaaaaacagtatgctctcctccagttcagtcaactaaaagcagttgaactcccacaatgtaaacagcaatgtgtatgtagtgctgtgggtaacccgggatgttaaatggcccttccctcctctcccccgaccacacagaacatatgtccttgttgggaagatataacacatgtaagtggaaatacaccatgaaccccaagagtgtttaaaagcagtatgcaatgagatccagaaagtcttagatgca

SEQ ID NO: 117303 - DNA, 292 bp, Homo sapiens
ctaagcggctctccaggttcttctcatttccctgtggtgtctgcacacatcctgcttaggattttcccgcccgatacctgtaccccgggttttgcgctgacacatgctccattgcttcctcgtgagagctttgcctttatctcaggcggggtgcgttttccgtgttttctgtggcaccctgtagaaacacgtggcacccttgccctctgtggctacagctgagcagacgctgggcggtgctgccctctgcacctttgggccaggttagctggggcggcctctctgccatcgg

SEQ ID NO: 117304 - DNA, 614 bp, Homo sapiens
ctaattttgtattttttttaagcagagacagggtttcaccatgttggtcaggccggtctcgaactcccgacctcaggtgatctgcccacctcagactcccaaagtgttgggattacaggtgttagccaccacacccagctccaaggcatattttctatggaatatatcaagacaataaatctgggggatctggaattagcttttgtttgtctacggccacccactaataaaatactttttgatttggcacttctaggacatatctctagtaactcacttatattcatttattcttcgacatacaatgttgtctaaaaatcactggacatggagttagaaaacctcagtgcaaatcctggctttgttatagtgtaaccttgaacaagtcacttggcttctacaaatctcagggtttttttgtttgttttgtttttttgagacagagtctcgctctgtcgcccaggctgaagtgcagtggcacgaatctcggctcactataagctccgtctcccgggttcacgccattctcctgcctcagccccccgagtagctgggactagaggcgcacatcaccacacccggctaatttttgttgtattttttagtagagacag

SEQ ID NO: 117305 - DNA, 417 bp, Homo sapiens
ttcaacctctgtcaccagaatcatatgattcaaatgatcctcctgcctcagcctctcaagtagctggtactatagtgaaggaaactcatgttgactgaacacctcccctgggatgtgtgggacctgggatgagaactttcacatagctgctgtgttcatgtccatcaccaccctgtgaggtggatcccagcaagatgacttctaccctacaaagaggttgagaatcctgtttcaaatgctggatggatccctgtgaatctgtcactttaagaagggagactgcccagtgaaagcagtggaaagaaaaagagcgttaaaagatgaggacactgaagcaccgagaaggaaacagaagattcaggacaaagccagctctgtctcctgtaccaaccttgcatgaaaaacaaccaaggaaat

SEQ ID NO: 117306 - DNA, 713 bp, Homo sapiens
aggctccaattcctcctgattttgttctgtttttcccttcgggcatccaaggcagccacctgcccaggcctgggcctgttcaaacactgtctccgctgtactccctagctccttgaacccctacattgtctgcattcaggaagttttgtggctttttaggattttttttaaacacagggtctggctctgttgcccaggccggagtgcagtagtgtgatcatagctcactgtaacctcgaactcctgggctccagccataggaagcttttaataaaacaacctttgctccgaccgcaccctggccttgctggataaagccaggcctctctcttgggttacagcaggcccttcaggacttggctgcccctctctgttccagcttctcctgatgttcctcgctcaccccagaactcctttcccaaaactgagggaactccagcttgtccttaagatctcagctctgcccagtggtctccttagactgggtgtgagggtcccgctgtggactccctgagcttagggagagggcagatttgttcctgctctctcaggcccagtttaggcctcaagacaagagcccaggttgtctcctcagagctcagaatgctgccaccacgtgtggtcagaccactattggcccagctctaaccagtaactggagcaaggcttaggattgctgagaaagattgggggcagcagagaagcttctaaga

SEQ ID NO: 117307 - DNA, 659 bp, Homo sapiens
gttgatcactgacagcaacccacgtggttattgggagtttctgagttaaagaaaaaagggtagatctgtttaccttaacattaagatgttacatttatggaattatacaacaaaaaagataaaacgataaatccaccaggagagaatattttcaagatgcgacggtcaaaggattgataactagaatgtataaagaacctctctaatgaaagaaaacaatacaacatgatgtaaaagtgagcccagaacacaagttgacatttcatagaagaaacacaaattgccagtagacatgaaaaaatactcagttccattaggaacaaggaaaatgcaaaattaagccacaaataatagactattatttacccatcagttgctatgtgctgacaggaatgaggtacactgctggtgggaatagacattggcacaaccattttggaaaataatttagtattgtctttcaaatttcaaccttcataatttctgtgatcctgttgaaatatctgtacatgtataccatgagaccttttagacatgtttaaacaccattattctcttaaaagacttaaggaacccagaagaccatgagcaggggattgcattttttaaaaatgtcatatacatggccgggcacggtggttcacacctgtaatcccagc

SEQ ID NO: 117308 - DNA, 428 bp, Homo sapiens
atgaggccacagttcccagaaagaagggaatggaagagcagagagttcagttcactctttggctccacttttcccctcatggcatttgccaatttgaaagtggaagacaagaggctaagaagctgaagggctctggacagcctctcaagactggggaaataaaaactggaattcagaaatatcgaagagaagccctggtaaatactccaaactcttgagttgggacccagtgaaggaaacaagaaatataccactccttaaaaagactgatacgttaggccacaaaataagtcttaataaattttcaaagactgaaatcatataaaacatcttttctgatcacaattaaataaaactaggagtcaacagcaaaagggaaactagaaatttcccaaatatgtggaaattaaacaacatactcaaaaaac

SEQ ID NO: 117309 - DNA, 243 bp, Homo sapiens
tcatatttcactcctacaatattctccagtcagctggtaagaaatttggaaaagtctctttaggagaactcatatctctacacactaacattgtgggggccccagcctaataaatcagctcccagtggtgtggtagtaaaccagctctctgggaggaagtatgctcttgcttgaagaattttttggccaggagttcaagaccaacctgaccaacatagtgagacttcatctctaaaaaaaaaa

SEQ ID NO: 117310 - DNA, 542 bp, Homo sapiens
atgttgaaagtatttcaattcatctctatttcatagcatctcagagatgtatcacagccactccaattcctaacaagactgagcaaaaaccagaagcttctgggtaaaagggatttaaagtgtttagaaccctttctgagaattttaaattgaggtataaaaggtataaaaggaatctattttttataatctctcttctcttgtctaagtctctgaacttttaaaggagggtgatagcccatgcagagtagtagtcatgaagggtcaaaggaccgcgagtcagaagagctggatgtgaattctcaccccacccctgagtagctatgcaagcttgggcaagtgtctcaacttcccttagtgtccttgcaaaagccatctttgcaaaacacttcctgaccaagtcttcctctgcttgctgtgtgtccccaaggctgtagatcatttagaagcccagttgacatgatttcctccatttactcattggtagaagatgtcaagaacaatacaaatctacatgaccttcattgtccacacaaagctct

SEQ ID NO: 117311 - DNA, 265 bp, Homo sapiens
agaattgcttgaatccgagaggcagaggctgcagtgagccaagatagcgctgctgcactccagcctgggcgagagagcgagacttcctctcaaaaaaaaagaaaattaaaagcctaagtgaatggaaagatctcatgttcacggattggaatacttaatattgttaaaatggtaatgctactcagttgatttatagatcccacacaattcttatcaaaatctcagctgtctttgttgttgttgcagaaattagcaagctggtcct

SEQ ID NO: 117312 - DNA, 817 bp, Homo sapiens
atcctttgtctcagagccatcatgaactatcaggtaagggggaagcactagccataggtgctctacttcttctgcctcatctgcaaaaccaggagagctaggagggcatcagcttataaaagacaggtttgctggtgggcctacggtcaaggagattggctgggctcccccttccccaccatcaaggtcccctccttctgtcctttcccttgcagtacggattcaacctggtcatgtcccacccccatgctgtcaatgagattgcacttagcctcaataacaagaatccaaggaccaaagcccttgtcttagagcttctggcagctgtgtgtttggtgcgaggaggtcacgaaatcatccttgctgcctttgacaatttcaaagaggtatgcaaggagctgcaccgctttgagaagctgatggagtatttccggaatgaggacagcaatattgacttcatggtggcctgcatgcagttcatcaacatcgtggtgcactcggtggaggacatgaacttccgggtccacctgcagtatgagtttaccaagctggggctagaggagttcctgcagaagtcaaggcacacagagagcgagaagctgcaggtgcagattcaggcatatctggacaacgtgtttgatgtcgggggtttgttggaggatgctgagaccaagaatgtagccctggagaaggtggaggagttggaggagcatgtgtcccatctcacagagaagcttctggacctagagaatgaaaacatgatgcgggtggcagaactagagaagcagctgctacagcgggagaaggaactagagag

SEQ ID NO: 117313 - DNA, 338 bp, Homo sapiens
atcctttgtctcagagccatcatgaactatcaggtaagggggaagcactagccataggtgctctacttcttctgcctcatctgcaaaaccaggagagctaggagggcatcagcttataaaagacaggtttgctggtgggcctacggtcaaggagattggctgggctcccccttccccaccatcaaggtcccctccttctgtcctttcccttgcagtacggattcaacctggtcatgtcccacccccatgctgtcaatgagattgcacttagcctcaataacaagaatccaaggtgagttccttccctcccctttcctccccactctgtccagggctct

SEQ ID NO: 117314 - DNA, 177 bp, Homo sapiens
actactttgaatgaaaagaaaatgtgctaatgtgctgtacaaaacacacgggtcccaggaagaaaataaaatagcagcccatattttcaagtgatagcaggttgtaccctgactcagcaccaatccatccaaatcctttagcagctttaaaatgtggatgtcagccgggcgcggtgg

SEQ ID NO: 117315 - DNA, 355 bp, Homo sapiens
ttcactgagccttgtgggctggagatttgagagtttatggctgaattcttacaacaataagaaaacccactattggtttgttgtatcatccattatacctgaaggccaagttagtgaagaacagagacagcatcattaccaaatgaattaagacattcattcatttgttcatttattcaggcaacagttatcacccatgccttttaaccaccaagtccttgcatgctgtacactatgctgaacacttaaagagaaataagacagaatcttgggggaggaaagcagttgtacaaagggttgattgaaatgccaaggtagagtgctatgatggaggtttgcacaaggtactgtggac

SEQ ID NO: 117316 - DNA, 218 bp, Homo sapiens
aatatgagcggcaccccctggagttagttgtgcagtgtgtgacatgcacagtgggagacttagccctgcaggactcttggtcctggggcggggacagccctagaagctggtcttcctctttgagggtcaaataaaacggcctcaacatgaagatgagataaaaagcaggacacctgggagaaatggggagcctgggatcttggggacaggggccagcc

SEQ ID NO: 117317 - DNA, 291 bp, Homo sapiens
tttaaacattttaccgtaatagctatcgaggtctcaaggttgtaataaactcttttcctcttttctgaattcacaagcaagtgagctattgatgaaagagtcatacagatggaagctgaaaaagcttctaatttctaaaactgggctggagtatgtggctcagagatgtagccaccatgagtcttcctactactcccgccccattcatctgtgatttttctactggctggacctgaatggcatacgcaccttaggacaacctgaattctaaaagaggagctaaagatagat

SEQ ID NO: 117318 - DNA, 562 bp, Homo sapiens
ggaagagacacgaagagaaggttgtgcatagttagtacttttatctttctccaaagagcaacctaagccaattcctcagagtattggggtgacagagtttgtccacactctttggaaagatggacttgtgcagaggaaaaggtggagaaaggtctgtgttggaagaggcagagtatcccagttgacctacatggctgcccttagccaaagccggaagaattcagtttaccttcctaactagattgtatgtgtaggttgattgccaagacgactcagagaacccacggaatcattttaagaaaggtgctaggaaagggccccaggagaacacacctaatgcttccatgtgaatggaaagtgggaagaaccaactttgactcatgcagttaaagatcttcttttgtgatcacaattccctttgttcttttgtttttcttgggtggtttttgaactgcaagtgcagagctcactcatctgtgcaaatcctctggtatggatttttaaattaatttttcccttcatctccgatcttttctctcattctcctacacacacatcatag

SEQ ID NO: 117319 - DNA, 348 bp, Homo sapiens
gtaagagctggaattcaaacccagaacgctccgcctgcaaaacccaagtgtcttcactttttccagtccaataactctgttatgtctttagcccgacctaaattccagccttagccaatgtcttagagtagtcactggcaccctatattcctttgatctcatggccttctgtgccatcagtcagccagaggtctgccccccgcactgggtcttctgtcctgctgtagtgctcaagatgtctgccaaagaaattcagagattcttccagaagtggctttttacaaagacaggatactcaattacatttagacaaagaatgcccagtccaccactcacatagcaccccag

SEQ ID NO: 117320 - DNA, 461 bp, Homo sapiens
tagttccatgagcaaggtgttaaaaaaaaagaagaaaaatgtattagatctattcacagtttaagaagtttgcaaggcacacactatagcatgttatgggtttttatggagaggattattttacttgtaggttggagaggaaattatacaattgacttgatatcaaatttaagaatttgaacagaaactagtttttaattaattaattaatttatttatttatttttgagatggagtctcgctctgttgcccagactgaagtgcagttgcgcgatcccggctcactgcaacctccgcccccaggttcaagtgattctcctgcctcagcctcctgagtagctaggattacaggcgggcaccaccacacccagctaatttttgtatttttagtagagatggggttttaccacgttggtcaggctggtctcaaactcctgacctactgatccacccgcctcagc

SEQ ID NO: 117321 - DNA, 666 bp, Homo sapiens
agcagcctttccctgggaggagttccctgtttaccctcccttgctggggagaaggcagagcatcgcaggggacttggcctcacaaaggacacagtgagatgagtccttcagggcagggctgccaggaaacagccatagctttgctggaagagggacaggagacaatgacaattgatcgaagcctccagcccctcctgggagagtttggctgtttctttggccttgtcctgatctttcctggactcacctctgtcatccagctggatttgcagtgctggctcaaattgctacttgaaaccagggccagaccaggcatgtgggcacctctggcgagcttgtaacttgacatgccatcaaaataaggcactttaaatgtttgcacaatgaaaacttactagggccagacagaaatgacaaacagatttcctttattattccttttcattggccaagcaattcatgtccaaaaaaatttttaaatcaaaatatctagtaaaacatgctccattattttcaataattctccttctcttaagatatctttcctgtagtttcttacaggaggtaactcttaggaggcatatccaataatttgaaatataaacaagaaaactcattcttaattcatagcagcacatagtacttagtgtccaaaatttctactgg

SEQ ID NO: 117322 - DNA, 230 bp, Homo sapiens
tatggagatgaacctagagccaggttctgtgggaaccagcctggtgattgagttatcctaggctttgagtcctcagggatcctaagtcaatatagaccagcttggaaccaggggttgtaagtgctggcctagagcctggaaccacatgagccaacctggagtctggagtcactagtgctggtcgggtgctgaagtgggtctaaagcctggttctgtggatgcaaccctag

SEQ ID NO: 117323 - DNA, 667 bp, Homo sapiens
gcacgagcctaatcccagaatccagaatggtccaaaattcaaaacttattgagtgcctacccgatgctcaaaggaaatgatcattggagcatttcagattttggatttttggattagggattctcaatctgtttaacacaagtattccaaaatttgaaaaaattcaaaatttgaatgaattctggtcccagacatttcagatattgtgtcttaagctcattatattattaggaaattataggctattatgtaaaattgggctgtgataagttaaagatgcatatttaaaccctagagcaatcaccaaagatttaaaacaaagaaatatagctgataaatcaatagaggagataaagtagaatactagagaactggctaggcatgatggccaatgcctgtaagtaaacactttgggaggccaagggaggaggatcacttgagtccaggagtttgagaccagcctgggcaacataatgagaccctgtatctacaaaaaattaaaaaattagccaggcatactggtgtaaacctgtagtctcagaggctgaggctgaaatgagaagataacttgagcccaggaggttgaggctgcagtgagccatgattgcgccactgcactgtagcctgggcaacagtgtgagaccctgtctcaaaaaaaaaaaaaaaa

SEQ ID NO: 117324 - DNA, 320 bp, Homo sapiens
ttgagcccacaccctctgatactccacgtcagcaagctcctgggctcggccttcaaaatccctgagtttacactttctcacccccattgctgcagcctgccctcgtccccatctcttgcctggagcaccacagagcctccagctgcccctgccctgccctgtccatgcacctgccagagtgagcagcgccatcctagccgcccctgctctttgccccatggctttctgccttggactgggctctgcggggcagggctgccagtttggggtttgcatgttgattttgtacatccagcatctcaggatggctcgccacgtca

SEQ ID NO: 117325 - DNA, 230 bp, Homo sapiens
tcagggccactgccacagaggccacacatctcaccaacttcccagtaaggagcccagtagaacgcttgctatgtggctatgtgcctgtttctctcgcactatttcactctcttgcttccagacccctccgggtagcattcatacccggcagctattccttaggacaaaagggctatttaactattttaaaatctttttcaacaatactttttttcctaacaatgaagatg

SEQ ID NO: 117326 - DNA, 809 bp, Homo sapiens
atctttagagtgtgggacagtttcactctttattttttatttttattttttccttggtagagtaggtatgtaaagagtgtattcccataattattctgaaaaacctaacaccgttaaatagtgttcacttagtcctctgtagagatatttttccttatcatgattttatatcatcttatgttgagccatgctaaatactcactagttgccatccattcactaccagataaaattaaatgatccctaagatattctctcagaactttcttttatcactctatagtttttctatggatgtcttccattatcattgtttcaactattatttcatgaatataagtatcaagatgtactttgtacttttaaggcaaaatatgcatgtttttcttttatttaaacttgcattttcaatattaaacctcttacctctctacataaagtcattctccatctacactgtaacagtgtgttacttgaaaagttcttcaaaaatgtttattgatttatattgttaaagcaaactaaatatggcctgagaatgactacgcccttgtggatgaactgtaacctagcataactggcaaaaatgaaaacctaacttaatagtatgcacctgtaacaataactgagtgttggccaatcccagtggccgtacttcagccactcatagactgctgagtgttcaaactatgttcaagtaaggcaaatgacgagctgtaaccaatctgtttctgtatctcacttttgattgctgtacattactttacctttttgtctataaatttgttctgaccacgagacacccctgg

SEQ ID NO: 117327 - DNA, 166 bp, Homo sapiens
gaagcgacaggccgagaagagaggtggttgtgggaggtctgaagattcaatacttgaaattctagactcgaagggaaaccctccacacttcgcctgcacttacgggacacccagcaagagcagcccccgtctccccaacacacgctcacgccacccgctccccgcc

SEQ ID NO: 117328 - DNA, 338 bp, Homo sapiens
ctaatccctgctcacgtggataggcatgaggcttcagagacagcacagagagtgcctggcagagcaggtaggcagctaacagctgccatttgtaccttcactgggttatttatatctaaggtcattctccctgtgagatgaagagcgctttgagggcaggggtggggtctttttggtatcccaggacttagcataggttgaaacaatgaatggatgaatgaagtgtctggggatggtcagggtacactctgagaagtctgcccctcaccataagattctggaaaacatccttcacccctcacacccagctgtgctcagccctcaggccctcctctcca

SEQ ID NO: 117329 - DNA, 263 bp, Homo sapiens
tgtgcctgcagaaatgccaacctctggggtagaagaaacgtcatactttgatcatcttccacattgaataaggaggaaaagcagaagaaaagaaactgagggtaccaatgccagacagtcgctaggtagtaaatgcagaagaatttaaagaaagtgaaaatcaaaggaaaataccacgttttgttgacaccctattcctcacccagccccttaatgtctttctacagaaatcagattcctggcgcaggcagttcattgtttga

SEQ ID NO: 117330 - DNA, 469 bp, Homo sapiens
gcacgaggtaagtttagacaaaagtaggggattgggcttctggatggtaaattgtgaaaaggtaaatatatggagattctaatgaaagaaaaggattatttagtaaggtttgttatgcataccaaagttggtgtcttctccattgataagcgtcatctctggtaaagaagtgttgccctcggccgggcgcggtggctcacgcctgtaatcccagcactttgggaggccgaggcgggtggatcatgaggtcaggagatcgagaccatcctggctaacaaggtgaaaccccgtctctactaaaaatacaaaaaattagccgggagcggtggcgggcgcctgtagtcccagctactcgggaggctgaggcaggagaatggcgtgaacccgggaagcggagcttgcagtgagccgagattgcgccactgcagtccgcagtccggcctgggcgacagagcgagactctgtctca

SEQ ID NO: 117331 - DNA, 177 bp, Homo sapiens
aataccagaaatgaggaagcaaacctagtaatacttagtatttacttttgcacggcaatttatgactttaaaaatgttttgtctgcctcatggcaactctgtgaggtggaaagaacaagtagccttatcccccttgaccgataaggaaactgaaacctagtttgagacaggagctcc

SEQ ID NO: 117332 - DNA, 417 bp, Homo sapiens
atgactgcacactgtcagtgtcataaatgtcagctgctattttttcttccacctggaagtcccttcctgcctctccctaccgtctccccatacttcaaggcctagcttaaatgccacctcctccaagaagccttccagactccacccagccataagtcatctctcctgcctcctcatggtctatgttgttgtttttctcagtggaattcatacatttgtacctattttctctccctatcagacagacgttcctcaagggaagatcctttacactctgatctcagaatcttccaagctactgagtatgtagtaggtgcccaataaatgtttgtcatatgactagagagtaaccatttttcttgccagaccaatgagtggcttcacttcccagctattcagtgagcactttgttctaat

SEQ ID NO: 117333 - DNA, 288 bp, Homo sapiens
attctaatgaaacctactgaggagaccctacaatctattgactgttgaatctcattcatattagtaaactccagaaattgtaggatcattgaccattttgtataatgaatggagaaaagcatcctgttttttataatatacttgagctatttgaaagggtaaacaagcaccaggaaaaaagcaagaaacaatttgtttagactttcaaggagtcaaaaagtttcacaatgctattccaaattgtgttaccatggtattaggagggaaatttcaccacaggtaggtatt

SEQ ID NO: 117334 - DNA, 254 bp, Homo sapiens
cttcagtttgggctagaaccttacacccacataaactaaagctgtatggggtcctcagttttcaagcacataaaagtattctgtatccaaaaagtttgtgaaccactgccctagagaaactttccatggcgtgcaagatgtatgtaagaatgcccagtagagacataataagaaaccagaaaaagtggaaatctcaatgcctgtcatcaagagagataaatgcagcgtggtctatttctgttctcctcacattg

SEQ ID NO: 117335 - DNA, 795 bp, Homo sapiens
cacaaaatgaaactgctgcaatccaactttagaagcaaagaatagtcttacattgttaaatatagaaaatatataactattttaagaatagtgttagaacctctgatatgtaaaacaaatattaggaaaaaactatggtattatttgatataggctgaagtaagtagatgaaaattctataattcctttttgcctgcagcaaatttaaatttataagtaattattttagtaaatatggagtgcctactaattatctaatttatttcaggcataccatgcaaattctagcatattgtcctaactgtataaatctaaaattatagacaaatttgatatagaaaatagaaagtaaaaatgtatagggagagtgacatcagtaagatgaaaagactaaaagtgctcattttcatctccccttacagcaaaacaatgtcagccttccctggcatgcctttattagagaacgagacattatggctcacacctgtaatgacagctacatggtacattaaggttatggaactgcttcaggccaggatatggagaccagcctgggttatgtagcaagacgccatctccaaaataatgtctctaagagttatttgagatccagggttgcagttgtgaaacactgttaaagcttaagattgagaagtgttctattcagaaggcaggtcctcattcatgtgggaaactacaggaccgctcttcctggctacagaccaggatcgggttcacccaacttggtcccagtaagaattcagaacttactctgtaaccatcccaaattcctcc

SEQ ID NO: 117336 - DNA, 561 bp, Homo sapiens
ctcgtatttctacttctatttaaggggttttgctgacacccctgctcctcttcagactggaaacaaccaactgttttgtgtgccatgggatctcccttggggcctggcacgggacctggagtgtgctggaaggtagaggaatagctccaatgcgatgactaatctcagcccgtcaccatagcaataggtagcccagaggccacaaggatggccacccgggttccaaacctttgccacacccccagtctggatgcccacatcctctccaatttcggacatcagcccaatggcacaaccgtgatgttcatgcactcaacactatgtggtttcctggaacaccaaggagtggccactcccaaagcccttggcactaaaaacaaacaacaaacaacacactccttgcatgtggcacttcccataatagtgactctcaaccctggctctacgctagaatcagctggggaggtttcaaaactcctgaagcccgagtcttaccccagactccctggggactgcatccaaggcgagtgttgttcatgctccccaggcggttcgccaggc

SEQ ID NO: 117337 - DNA, 217 bp, Homo sapiens
ggtgacagagcgaggcctcatctcaaaaaataaaaaataaaaaaatttgattaaatccatattttgaggcctccagtaatcagtattaatctgttctatcagttgactggtggcaaaatagggttgactggaagcttagacaatggttataaggaggaaaggagtaatgtttccatgagcagaaatgatcaatagaactgatttgcaaggtatgtag

SEQ ID NO: 117338 - DNA, 278 bp, Homo sapiens
gatgggtaggtagatgggtagatgggtggatggtgggtagatggctgggtggatgggtgaataggtaggtggatgggtagatgggctggccagcgagctggctataccttggagcagtcatccttgcctttgccaaccctatgaggcccaggtgactgcactcccctgtaggccctacatgggcttatttatttcatgtttttgaaaagcactttttctgtgacttcccccattattaagataatacacggttattgtttaacattttaaagttacag

SEQ ID NO: 117339 - DNA, 743 bp, Homo sapiens
gtgctgggattacaggcgtgaaccaccacacccagctacagccaattttaaactaacaacatgacatcactaaacatagacttgtgaagacatgtgaacagtcagctctacatgccagtgtaagtcagctccaacacaccactggctacaacttccacttacattgttattgtttttaatagtagccttttaaagatgtttaaagaaagatagatatgaaatatcttttaaagattcattatgcacatctaatgttcattctgtctggtgtcctttatttcttcccactgggtttctgtctgttttattctctttctgaaaatatttgtgatagtaaatgtctgctggagatgaattcttccaggttttgtctttctgaaaatgtctttgttttgcttttacttttgaaagatgttttcactatatattgaattcctagttaaaaattttttctttcaatgtgttaaacacggcattccatttttttctggcttccattgtgtacagcgagaagtcagccataattcttgtcatttttctctgtatgtaatgtttctgtttacctatggttactttcaagattttctctttatatctgtttttcaacagtgtgtttgtgatgcaccaagtttggttgtctttgtatgtatcttacttgggattcactgagcattttttatctatggtttggtgtcatcagcttggaaaaattgttggccattgtcttttcaaaaatatccttg

SEQ ID NO: 117340 - DNA, 321 bp, Homo sapiens
aacctgaaacaggttaattcagcaatttccaaattttgggcaactgtaatactctcttaaaggttcctctaacctctaaagagaaaaaaacattgcatggcatgtgaatatgaatgttaatggaaattggggtaaacagaaaacaatttttaaagtttcacattctcaacatgtgacactccatggaaccataaaatcagatccggcaataactggtctgaataagcagaaaaatgactatgaaaggcactaaaccaaaacctgtgccatagtcagcaccatacagtagccaaaaggttatgtcacagggcaatgttggaa

SEQ ID NO: 117341 - DNA, 353 bp, Homo sapiens
tatatatatatatatatatatatatatatgtttttcaaatttaaaatttctggctatgtacaattttagttctccatgaaagatttgtcttcactatgacttgcagcatttctgctaaattttgtataatgtctttgcaacatatttaaaaattcttttgaaatgtttgtgtaccatttgcagcagtgtatggaagttactatgagaattaccttaaaatttaaaacagaagtgaaaagttttgcataattggaaggactttctgatatcaagtttaaaatgttaggattttaacataagctatatctatgtgtgtaggtctgttcttatttggatataatttttgagattat

SEQ ID NO: 117342 - DNA, 581 bp, Homo sapiens
ccattggaggttagagttccactgtcaaaaattagtaattatcattcttcttacaagtttaagactcaaatggaactgactttttcagcctatttgttgtctatggtaaactaacagcaaacagctggatgttcttctgtggttacataaccttaatggagattagttccttttatccttctatactgcttccctaccaaatgattagattttttgaggggcagatataaaccccttccattgtttaaaaaacattgttaataacccttcgcactacacaccaaagtgcagcctttaatatagttgccagaagcagttctgagtgaaacactgaaatgaaaagtaaactcatgtcatttggtctatgataagcattcacagtttgaaaaaccccaaacagggatagttaagttgcaagcactatttccagaatgagagttgaaaattatatacataatgtggaaacaatagatcaatgaaagggagtatagaacaaaagagagaagaatttccatagccactccatagaatattaggtctatagaatgtcaagaggggttatgtccaaaacagggttctag

SEQ ID NO: 117343 - DNA, 459 bp, Homo sapiens
cctgccccagcatgggatggtcgtgggcttagcaggcaggaggttattagggagtgtcttggggtccacaaccgtggaagggaaggtgaggaggcaggagtgggtcagggagaagctgtgctgccaaggaggccaaggccagcccaaggacactttgcagagctagaggagtccttcagcacagtagcgggagagccctggggcttagtactcctgggatgtacttagtactccacagtgatggctgtggcccgggaagagctcggccttgcaccagtgactctctgcagctgagggcctgccagctgcacttccagcatcggggtgagaggttgcttctgggtggcatatcctaacacccagcactttttcaactgaattttattcccaagagtcctgaccttttgaaggcaaaattgctctttctggttcaaagcagtcatggtgtttcatgctgac

SEQ ID NO: 117344 - DNA, 121 bp, Homo sapiens
agtgtccttgttggttcatctcactgatctacccactcaggacctcagttcctcgagggatgtcagtcctaagacctgtgatcacacttgctttcttcttgcctgtgggtttgtatgtcag

SEQ ID NO: 117345 - DNA, 212 bp, Homo sapiens
tccactgcacgataatctgtatacaggtccgtttctttcatcagactgtaaataacatgaggacataagaatggcatcttggccaggcatagtggctcacacctataatctcagcactttgggaggccgaggcgagcaaactacctgaggtcaggagttcaagaccagcctggccaacaggatgaaaccccgtctctattaaaaatataaaa

SEQ ID NO: 117346 - DNA, 286 bp, Homo sapiens
ttgaggtgccagcagggttgaagatggagcccccagccatcagctgaaccgtggatggggcacaagtaaaatagcctacctacaagcataattggaatcagaacttactctttaaatctgtgactgtgtgcctcaatttctcataccagctttctccataggttggaaacattaccacctagactcttatcattccactttcactaatcaggagagattgccctctttccttagttccaatttttaaaatcctcagaaaggagtctgaatggttcatcgtgggtca

SEQ ID NO: 117347 - DNA, 497 bp, Homo sapiens
tctgtgtgctatggttgtgagtctcataaatacccacaacgattctatttcccaagccaagtggggtcaatctctaatcggtcacactggtttatggcccactagggccatttatatccactgtcaccctgggccaagtctccttcatttccactttcatttattactccttgatagctgacacttaagtaaatacttaaagagaacaaaaaaacgggcttttctgaaagcagttattaatattttaaggacctaataaattcatgaacaagaagatggaaagaaagaaggggaggaaacatatttataaaatttagcctaagttgtattttttataaataattatttcttttaaagggaatgtttgagaagcaccaagttattcttataccagaaaacaattcttccccatcacaagctaagtaaaaactagcagaaatgatcaatgaaaatgaggccacatggataagaagagttcagctctaccaaatatcagt

SEQ ID NO: 117348 - DNA, 357 bp, Homo sapiens
tgtcaggtgctgcctcatatatattacttaatccttatcacaccctatcaggtaggtttactcttttataaatcaggaaactataaagaagttaagaaacttaacagctgcctgtaaccccagcactttgggaggccgaggcaggcgaatcacctaaggtcaggagttcgagactagactgaccgacactgagaaaccccatctctgataaaaatacaaaattagccggacatggtggcgcatgcctctaatcccagctactcgggaggctgaggcagcagaatcgcttgaacccgggaggtggaggttgcagtgagcgaagatcatgccactgcactccagcctggcaacaagtga

SEQ ID NO: 117349 - DNA, 511 bp, Homo sapiens
cccttcacctgttcatttgcccagtgtgtgtctaacccagccatccacagctatgtcatgaagacctgtgcatggatccccacctgcctttcccatgttacctgcgagcttaccaaagacttgggatttttccagcatggtgaaagatgaaaatgtgcttgggtttactttgtcatttccagggctgggttaaagccatcatgtaatgaagccagatccacattaaaatgtggttcatggccaggtgtagtggctcatgcatgtaatcccagcactttggggggccgaggcaggtggatcatgaggtcaggagatcgagaccatcctggctaacacagtgagaccctgtctctactaaaaatacaaaaaattagctgggtgtggtggtgggagcctgtagtcccagctactcgggaggctgaggcaggagaaccgcgtgaacccgggaggcagagcttgcagtgagctgagatcacgccactgcactccagcctgggcgacacagcgagac

SEQ ID NO: 117350 - DNA, 321 bp, Homo sapiens
gggcctggggacgtggagaaaggagagtgattcctaatgagtatggggtttcttttttgggctgacgaaaatgttttatattagaaagtggtaacagttggccaggcgcagtggctcacacctgtaatcccagcactttgggaggccaaggcaggtggatcacgaggttaggagatcaagaccatcctggccaatatggtgaaatcccgtctctactgaaaatatatatttaaaaaaaatgagctgggtgtggtagtgcgcacctgtagtcctagctgctcgggagactgaggcaggagaattgcttgaacccaggaggtg

SEQ ID NO: 117351 - DNA, 468 bp, Homo sapiens
caccgtgcccggcctagaagtttgtttaatcaaatccctgtgttagagatctcaacattcaaattatgtatctaattaatgtagttctgctttaatatataatggatctgccagtaacctcagtatcacaggaagtttaagaaattttaaacattaggaccaaaagtactagattgttcatctcttacattacttgaagcttcaaagcttcatcttttagtagaaactctagtatctaagaattttcccagcttttgcccttttggggttgagattcacatttcatgtttcacatgcaaagaatatctacatcattataaatatatattttatttagaatgattcagctagaaatattgatgtaacccaaagtctgtgttacttcctggcatgaatttcatctctaaggctactgctctaaaagtaattttgaaggcatagggtgatatagattcattttctacataa

SEQ ID NO: 117352 - DNA, 751 bp, Homo sapiens
catgaatgcctagaccttgtctgtggtagtcactatatttctagaatctagaaaaatatatggcacatgagtccaaggtatatctaattacttgtctcttgaaagatttgtattatacaagttctgagtagggtgggagccatgtgtttgtataggctaggcatttacgtggagcaacttcaagcagatactttaaagattaattggatatgggtggtaatgggaggaattgaaaacatctgagatgtctgtttatggaagtagttcctcagtcacctggaggtgggggctaggaggggagagaaacagaaattatattcttctaaaggtagacgggggcaatcagaggagccagttgacaaggctgggttttaatcattttgatttttagaaaaaatcatttgttacaaacatgtcttcatcatagatttcaaggtataaagatgagattggtattctgaatacttcaggtaagaaaaggttttgacggtggtagttgcatcaccagtgttaatacttgtagagaaggcaaggatgatgagaactgagggggaaaaatacttttatttttcttcctgagacagtttcactcttgtcacccaggctggggtgcaatggcgcgatctcagctcgctgcaacctccgcctctcaggttcaagcaattatcctgcctcagcctcccgagtggctggaattacaggtgcctgccaccatgcctggccaatttttgtatttttagtagagatgggg

SEQ ID NO: 117353 - DNA, 317 bp, Homo sapiens
gtgtctgaccactactcctggctcctagaccttgggcctgcagactgatcttgccacatatgaacatatcttctaaaggttaacttcctgaactcctggtatctacccatctgaccgaagctctggaaggagtgaccgattgcccttgggcattgtttttcctctgtcgtttttcctctatctatttaatagctgcttctccaagattgacatcagtgtatgtagagggtcatttccctccacacctgttggaccaagacatgtcaacccaagtctctctgtttatgccaaatgaggagaaggaatgcgccaaagca

SEQ ID NO: 117354 - DNA, 371 bp, Homo sapiens
agatcactgtgagggttcaggacttcagtggaggagggactgtagaggttttagaagcagcaagagaactagaatgagaaggacttggagatgtgactgcattgtcgctgtctcgcgagaaaactttaacacgtgaggagttgcctctgaagggtgagcaggggagttgcttcagttgcgctctagtcccagtgaagattctgtgaacctgggggtaatgaggacaaagaacttggaacagcccggaacctcggttgatgaagccgcggccgggttgagaggaccgactgcagttctgaaagacgttctgctgtgggtaatcaatgctatcagacagcatcacgccccacagagaaatctttcatgaaagg

SEQ ID NO: 117355 - DNA, 119 bp, Homo sapiens
attttttagacaagtactatagtcaaagtatttaaatggctattctttttcttttctttcttttttcttctgcatctttactccaacaagcaacaacctttagggaatttttttttttt

SEQ ID NO: 117356 - DNA, 444 bp, Homo sapiens
gagatcagcttcctttagttccactggggcgcaatttctgcctcaggcctgacccgggccaggtctgtaggtgcatcactttctgctgccttcttgcccacagaacatcccttgagtaagaatttgttctttcagtgcacttttcttgggttaaggaagagagaattgttgagtgtatttctgtcatggacccagggtatcaatttagatccttaggcctcttctgggagtgccttgggcatcttgcactgtgttattgactcaccgtagttaatattttattgtgtcttgagcattgagcaaaggcccctgcccagggtttcaagtctcagataaagcccaaacaagaagtgtaggaagggcctgggcagccccaggacaaggtgggaacaggaagaatggcctgcacgaatgatttatatcttcacttgagtttggctgctt

SEQ ID NO: 117357 - DNA, 291 bp, Homo sapiens
atgatgtagtgtctcatgggccatggtgaaatgtgagttttactctgagtgggtgggagccataggcgagttctggacagaggagggacatgttctgatttggcctttagcaggactcctctcactgctaagtcccacaccgaggaggttggatgtgttttgcaggcagtgggagccatcgaaggtgttcggggacttacagaatcactctgggagcccatgtggaaggaaggtgggttggatgtggctggggttagagtttagaggggcaaaggagcaagtcagaaatgt

SEQ ID NO: 117358 - DNA, 495 bp, Homo sapiens
aacattactccagcaaaatcagtctttgtgtagcattaattcatccagctaatatttactaaaatgtcgctttgtgccattcatttgactgaacttagaggatctaactagtaagagagatgtacccctaccctctgagagcctacagctcagtgatacatgcagaaatgtatagaggtgattgtcacccagcgcagcaagtgctgtgagaggggaagtgcaggacgctaggagaagcctgagggagattctgaccccaaactagagatggtcagggaaagcttcccaggggaagtgataggtcaggtgagacttgagagaaataaaggaggtggccaggccaaggtttgggggtagagtgcagtgctggtggtccctgccaggggagagatatttgcatgtagccagagtctggcatggtcataggtactgcataaatgtatgtcagatgaacaaatgcgaaggcctggtggtaaagagttgatggggagggga

SEQ ID NO: 117359 - DNA, 356 bp, Homo sapiens
ccagatcacacaatttacaaaagaaatgtgagatataaacactggaaggaaaaagacacactcttatttaaaaagatgatatcgtcatctacaaaaaaccaatgaaaccaacagaaactaataaaactactcagaggagtaacaagttataagagcaacctacaaaaatcagatgttatcctcattaacaataaccaaatagaaaccaatatggactataagatgttacaatagcaactaaaaccattaagtagctaataattagcctcccacaaagacacatcagacccacaaaggaaaaattttagttctatcaaagaaactaaaaagaggtgtgatcaaatgggggagattta

SEQ ID NO: 117360 - DNA, 219 bp, Homo sapiens
gtacgtatgctttctcaggctaaattttagtttgatttcagaattccacctgtttggtcggcctctcagttttgagagattaacctaaattctgagcatgggcaccactctcattacagttgtaaatgactcctttgttctgagtatggaattcacagatgacaatgtgaaactagctgaataattctttcttacttacctagttgaagtgagaccatt

SEQ ID NO: 117361 - DNA, 400 bp, Homo sapiens
tcccctcacaactgtctttcaaggcagtccctagtgggactatagtgcaacagtagtttatttgcagtttgtaccaatgtaccaagatgacctatccattaatcaggcccaggtttattcctcgtttcagcttgatgtaggaaatgcccctaacgcttgttcttgtcatctctttcttacttgggcccaattccaatatacctgcttccattttatgatgaattgctgttgtactctcctggtcttatcacttcatgggtgtgatagcacttagctcctgatggttagctctggttgcacagtcccttgatgaccatcagtcagatgctctgtctcttccagggcttaataatatgccaagagtagtatgccatactttacagatgaggtataatttttg

SEQ ID NO: 117362 - DNA, 739 bp, Homo sapiens
gtactgctacacttgattaaacttctgtcatattttcagacatcaaagtgtgtctgtgaaagaaagtggcttttgtcggattttctgatctatttgtgatgagtggctattttatgttttatcattacttacttaacagtaataacctgtcacttggcctgtcatatagtagacaatccatcattggtttaacgagagctacaggttttatttacataataacaagttctggtatgtatagcagaaagtttcctatttgtgtatttttacaattatttatcaaacagagccccccaaaaatgccctgaaataagacaaaagctaacctatgtttaggcaacttagctatatcatactaacattgaaacagggctgtttttctaccactaatgatgtttggttgtgttcacattctctcctcttcttctcttctccccatccacatcaataggtgattttgtggataacttgtggagttataaaacttgatgctttgatctgtgcttgagagagattaatttgcaggatgttttacataatttaagaaatataaaatcacaagttggatagtttttaaaatcacctttactgaagtataatttatatacaataaagcataaagtttgaattttgatagttgtgttaatgacagtcaaaacataaaacattttcgggccaggcgcggtggctcatgcctgtaatcccagcactttgggaggccgaggcgggtggatcatga

SEQ ID NO: 117363 - DNA, 417 bp, Homo sapiens
ggggggaagggaaaaaggtggaggaaggagaaggtagacggaaaggcaagtacttaagttactggttcagtaaaggaggatggcattaaagacatcaaccaaccagttcttcactcactttcactgttaaagaagctgtgtttctcatacaactttctggccactcaattcttctttatcctctaatgtacgtcaacataccacaagaccactaatgctcatcactgcagattctgaaatgctgaaatgtaccaaaaataaaccccacctactatttggttatcataacctccaaacttccaacactaggtcaactacagctaaccgacaaagaatggtaccagaaaaccagataccataccatatcagtcttcaaattacgttatcttagaatctttaacaactgaggagagagag

SEQ ID NO: 117364 - DNA, 382 bp, Homo sapiens
aatgctagggaagacaggcagggaagaacaaagagggctaggagtgagagagtggcactgttttaaattgggtggtcagagaagataatacaacatttgaacaaattgccgaagaaggtgaaggcatgagtcttactatggttggctgggggatgagcattccaggtatatataaatgttagttgaaaacccccatggcaggatcatgcctagacttaaacacaataagaccaatgtaactgcagcacagtcatcaagggcaaagtagcagaagacaaggtcaaaagatgctagggatggggcaggaggtggggtgggtagagatcttgtagagccttgaaagcaattataatgagtgtttgctcttagactgggtggaata

SEQ ID NO: 117365 - DNA, 690 bp, Homo sapiens
caaataattgagttcctcatttgttactatcttgtctcagcccccattacttaaaaagattcccattccgatttacaaaaaaagtttccaatagccctgcaatcagtcataaagttaattggaattcaacttctgtaacatttctcttcttcttaaacccacctttgatagactactctcatggaattaatgtagtatctcttcacaagatgacagcgtagagatgcacatgtaattaattatatgcatcactcaaaactcttcatatgaagatcttttaggaggaatgtttcagataataaaatagaaatgcctacataagttttctggttccatttaataggtaagaagtttttcctgaaatgtttataggctaatatttaacttttgactttcttttatagttgaaaactggataccattttagaaaagggtattaatgatacaaatatgatgtgtggagtcaggttaaagaccaaactactttcctcgctcaaatactaaaggattatctgcaaggagtttacttagaagctactgaaacaggttactgctgcatttagtttataagcaatggatggacttctgtaaaacttcttaattttaagtagttgcattatatttgggatgttaaaaaagtcttcaggataatataaaatacactgaaacatatgtcctaccaaatgaaac

SEQ ID NO: 117366 - DNA, 285 bp, Homo sapiens
aacctgtatgacccccgaaaagagggatggcccctcttggcacctgggagagggcatgggccgagtgtatagcctcagccggtgcccctctgctgctgcagcccgtgttgctcagtcctgttggtgacccagccccacctggtgcttctctacccaaaggacatacgctcctagatgcaaacaggcaaagtaagaaaggggcctctaagcgggccatggaaaccagtcatctgcttggtaaagaaagggtaggtcagaaccatcgggcagtgagtgctgttttga

SEQ ID NO: 117367 - DNA, 288 bp, Homo sapiens
ccttggcctcccaaagtactggggttacatgtacatgtgtgagccatggtgcccggccgctctctttctttatttgtaaaatggaagtaatatttgtccagcccttcttgtgaaattgttatgagactcaaatgaagaaatatatgtgggggcattttgttaccttgtatgtactgcacaaatacatttttactgagccattgctatcctttgtaaaaagatgaatacttccaaattatttgagtcaagattgataaagaagttctaaaacaatattaaatatatgtt

SEQ ID NO: 117368 - DNA, 117 bp, Homo sapiens
ttggaaacatagaccagggtcagagccatccagggaggctggctgtccttgaacttaagatgatcagggccaaagggaagggctgttaggtttggaagacactggcctagcaggagt

SEQ ID NO: 117369 - DNA, 799 bp, Homo sapiens
tgcatagtaggtgtatatattgatgggctacatgagatgttttgatacaggcatgcaatgtgaaataagtgcatcaagaaaaatggagtatccatcccctcaagcaattatccttcgcgttgcaaacaatccaattacactctttaagttatttaaaaatgtacaattaagtaattattgactatagtcatctcttgtgttatcaaatactaggtgttattcattttttctatttttttgtacccgtggaaagatcatttattgccctttattaacagttcatctttatcacttatattcccacagctgtggatacattcgtaagaacaattattagtgatgacatcgccacatgattttctttttaaattatatgcacctgtgttgttgtatttttttctgtgtcgtgtctgatgtctttctgcaggacttaattttgttatttggtttcctctctttctacttagcagtaagtctcaaaaaaataggttcgtcttattctcgtattatatactttagccaaaaatctatagtttaaaaattggtattgaatttatcacagaagtataatttaactacatagcaagaaatttagaaataaaaggaaagagaacaagatcatctatccagcttcctcagggaaaaggagctgatctatgttgaatcccttctgtgtttctagagctgtgtttgttggatttaacacccattatctcatctcaatccagcagatctctttgtccattatcttctcatatgcagattttcccatcccatctccttcatctctccacatgtt

SEQ ID NO: 117370 - DNA, 543 bp, Homo sapiens
cccgattatttcgcggcgtattagtcccaaccttggctaggcctgaaactttttggaggttgttccatgtctagggtactccgactttggagttttggagagccacgtaacgagggtgcggctaagatgaggaaaaggcacttccgggattagatttcgttcttgcccagacatcgtctttacggacccgctcctggtggttgatttggtttgttatgagagaaattgttctttagaaaattggagcgtaagtctagaggttatgtgacagctcctaaacgattgtctgcccaagataggctcggtaatgctccctaaatttagactgccagttaaacggagctttcgctaagtcatctgaggttaggaactatttctaagagcatttcttaagggtggtcttctgtgtttttaagagaaacttggtgatgtttgtgtatctcgatctaaatcgctgtttacagatacctagcacaatgccttgcagttgtaggtgcccgctaaaggtttgtatgaatgatgttgctagaatgaaagcgagga

SEQ ID NO: 117371 - DNA, 300 bp, Homo sapiens
gacttggtagtaccacatttcaggagttaatggtaacgcagaaagggattcacagattccatcagtttcccactttgtggcagaatatttgacatctcttatcagtacacttcatcataagttcatgaattcatcttgctcctttctttgctgagaatcacagtgagagaattggagtttggctgagaggaggagtgaggaaggaagaaggaagagtaagtttttttttgttttgtttttgttttttgagatggagtctctctctgtcgcccaggctggagtgcagtggcaccatctcgg

SEQ ID NO: 117372 - DNA, 602 bp, Homo sapiens
gatcaatgcacatgtaacctttgactctcccaaaacttaactactaataacctgttgactgaaagtcttagtgataacataaccagttaacacattttgtatgttgcgtattatatactgtgtttttacagtaaagtaagctaaagaaaatgttgagaaaatatatttactgttcattaagtggaactggatcatcacaaaggtctttattttggataggaagaaaagggattgggcttgcttgtctcaagactgacagaggcagaatgttcaaagccacgttgttcaagggtcaactgtattggagaaagtcacattgatggcttttgatttggtagcttccgtttaagctttggggtgtgttcttagaggaatgtttcagtgcggcttcctgtttggctttaaaaactcatacaagccctaactatattatttcttctcctaaattcattttctctatcagcttcctttaaccttttgacatttgtgtttgatttattcatatcataaattgggctgtgccagaaatccagactgagttttatcatcctaaggtaaagttaaattaaaatattgtgagggcaaaccctttcaataaggta

SEQ ID NO: 117373 - DNA, 187 bp, Homo sapiens
tgtccctctcatgaccaaggacctctggcttgtcgtgagtgttctggccagctgcacagcacggattaatgggccaaagggagccgctctctgatctgcgctaagcttttcaggttctgtggccaccgccatcagccacagatttaatgagatccgaggcttaattaccacagtgcagggctgccag

SEQ ID NO: 117374 - DNA, 378 bp, Homo sapiens
tcctgatccaggggttttattgtgtgtgaaaacataatacaaaaggtagttatttcacccacagattaaacacagaagacgcctcaataccaagcttgccaatccattgaaaacattcaacgtttcaagttcctttacacccagcttcaggaatatgtgcatggcatctcttaagcttctcctccactgcgggctgctttgctgcaagacagtccacttgcctttgggttaggggagaaggcagtttcactttgggaaatatcctaacagataaattaaattcagagatgaaacctttcttccctgactgcagagcacattagcaacagagtcaagcccagatcttgtcgccccaggtttgcttccttgtaagacttg

SEQ ID NO: 117375 - DNA, 594 bp, Homo sapiens
caagactctgtctcaaaaaaaagaaaaaagaaaaacagagtagagcaaatgagtaaatatatactgttaggtaccagggttctctctgtgggaaaagggccttctcatatggaatgggggaaggcggtggattggagttggggccatcattatgctcttttgatggtataaatatgcaattgacaagtcataaccatagaaagaagagcaagaagccatgtccccctgtagcaatgcatgtatctagtgcccacatctctctatttcttgatgccagtctccatcagaaggagccaggtctccttggacaagtggaggatgccaggcatgaggcagtggaaagtaaaatgcaactagagccctttgtccttccagaaagcaagaatgcattcaaagacagatgggtccaaaagacccaggcactggctgaaagggactcctgctggcaaagatgggacaattgaacatccaataaaataataaaagaaatgggtgattcaagggggaaaggagggcctgtaatcccagcactttgggaggccaaggcgggcagatcacgaggtcaggagttcaagaccagcctggccaatatga

SEQ ID NO: 117376 - DNA, 452 bp, Homo sapiens
tataaatggtttttccagtacattgtggccattcatttctgatgctaacagcatgtgtcgttccaacacatgctcatcttcgccaggggacttctttgtttaaaaatcaggagtgaagcagattgcccaggttcccctcaatgatgtatttctccaggcttccttgtagctctaagtttcatattagaaggataccaagaaggaagatgtagttttgaaggactattgtgtcaatgtaaaattttcaaaaagttaaaatatgactcttgtacaatatagaatgaacacctgccaaagctttatctcacccatttatgaggaaaccagtaaatagtaaaactggttcaaaaaatgctttgacaaatgatgtatttgtagtcaacttagaaaggcagtctgtgataagtttgctgagttaaaatccaaactggtaacatcctacaaggcaataa

SEQ ID NO: 117377 - DNA, 748 bp, Homo sapiens
cctgcactactctgtcaaattaaaaaatataatagctatctttattctcattttaaagcatgataatcatcaaaatgttgaagtttatcacagttctacattaaaaataagtcatttttgtaggtgagttatccaatacagcaaaggccatcaaagagaaagccaatactttcatggagagctcagagccttaatagatcccagcagcaatgcttcaaccattcccaactccatgttccttgctagatgctcctcaccccaaactcctgcaaatttcaagaatttctgtgtatgtgtgtgttaagggaggagttttaaagtatctctgtattcaacaagatacgtcagcttgtaagcagcagaaacctacttaaactagcttacatgagaaaataacattataaagacataggagtgtttctacaccaagaactggaggtattgtttggtttcatgaaggattaaaatctgtaattcaaaagtagactcaggcagctgcacatcaatctgtgtcttttctctggtactgtggactctatcctgtctgacttgctttgttcctgggcatcattcttgctctggaaaacacactttccctgctcatttttttattttaatgcttaggttcaatctgctcatttttccctacagcagaagacagcttactgtgttccagcaaacaacagagcctgaccagctctctgaatatggggccccattctcactcacaagtattcttaacctgggg

SEQ ID NO: 117378 - DNA, 1000 bp, Homo sapiens
gtgggaggatgacttgaggccaggagctcaagaccagcctgagcacagtgagacctttttttctacaaagaaaaaaaaaaaaaccctaaaaattaactgggcgtggtggcgcatacctgtagtcctagctattcgagaagctaaaggtgcagtatagcatgagcccaggagctcagggttacagtgagctatgatcctactactatacttcagcttcagtgacagagtgagatcctgtatctaaaaagaaataagtaaaaacatactaccaaatctgaaacaagagtggaacaaatcgggatacaggagggagaacagaatgggagatggacataaactttgtaatattttacttcttttttaaaaaaaatctgacacaagtatggcaataatttataaatctgagtattggaaacatctcagttttttcgattttctgattgaattataacaaaaaggatatatgaatcaaaaagaagaaaaagtaaataggcctcacaagaatatgaattccacagggcagagatctttggtttgcttggttttacttatctgtccaaagcactgagaacaatagccagcacccagtaggctacacatagatactttttgaaggttatggtactcatgtcactgtttggaaattgagatccaacatcatacatgtagggagtgacaaagtggggatcaaacctaaggtctggaagttgcctagatagattagattctttggtttttgtttttgtttgttgttgttggagacagggtctcactctgttgcccaagctggagtacagtgatgagatcatggctcactgcagccttgacctcctggggtgaaggaatcctcccacctcagcctctctagtagctgggaccacggatgcacaccaccacacccagctagttttcgtattttttgtacagatgaggtttagccaagttgcccagacaggagctcaagaccagcctgagcacagtgagacctttttttctacaa

SEQ ID NO: 117379 - DNA, 499 bp, Homo sapiens
tagctccggagcgcgccaagttgaaggccaaagtcgaggttgggatgcccgatgcctggcgcggggagacggaggaagcaaagtgctgctgcctggtggaaatacagtattatataatgacatgctactatgcatctctacctaactcctcgtctggtgatgccatattgaaatcagccatactgagagtatttacacactgctgaagtcagtaaatgctacaaatcaaggcttgaatgtaacctacatgagaaagagttgccttgctcactgccgtatcccagtatcccaagaaccttggagatgctctatgaatactgaatgaatctgagaggaaactagcccgaagggggaaggctctggaagcaagccctcatggaccaacggagagtgagtgtcatcattttatgttttctccaaatcttgtaaacaatgtgttttagtcttagcctgtcatatgcagctgaaatctggggcaaataaaatcacatagatgcaa

SEQ ID NO: 117380 - DNA, 590 bp, Homo sapiens
taaatgctgagagataggccaaagcagtaagaaggaggcattacttattttagaataagcgccatgtcattaccttattgctgaaatcttgaagctcaggtgttgactattactacgattaggtctgatggtatcgcacacccaggatgccaacagcgccaactcccgctgattgagttcccactgtgtgccaagaaagaagacactaggccttcatgtacattgtttcattcatcaaccagcaccctaactaactctcttttcttggtatttcctgtatgtcagaaaaggaaactgaatcttggggagattaagcaactctttcaaggtcaaccggggagcggcagaaccagagttcgaaggaaacctttctgaatctgacgtctgccccttctaaattaggactctcatctatcagcctgtgagaaaaaatacagaaagcatcattcaggcaacacatgaactcaagacactgagacttcgctaaccttcctcgcacacaaggtcctaaaggaactaccacacgcatgtccacatttgatgcacataacagactctcaccgcattgaaataaaccccagtatgatcat

SEQ ID NO: 117381 - DNA, 695 bp, Homo sapiens
tagctccggagcgcgccaagttgaaggccaaagtcgaggttgggatgcccgatgcctggcgcggggagacggaggaagcaaagtgctgctgcctggtggaaatacagtattatataatgacatgctactatgcatctctacctaactcctcgtctggtgatgccatattgaaatcagccatactgagagtatttacacactgctgaagtcagtaaatgctacaaatcaaggcttgaatgtaacctacatgagaaagagttgccttgctcactgccgtatcccagtatcccaagaaccttggagatgctctatgaatactgaatgaatctgagaggaaactagcccgaagggggaaggctctggaagcaagccctcatggaccaacggagaaaaaggaaactgaatcttggggagattaagcaactctttcaaggtcaaccggggagcggcagaaccagagttcgaaggaaacctttctgaatctgacgtctgccccttctaaattaggactctcatctatcagcctgtgagaaaaaatacagaaagcatcattcaggcaacacatgaactcaagacactgagacttcgctaaccttcctcgcacacaaggtcctaaaggaactaccacacgcatgtccacatttgatgcacataacagactctcaccgcattgaaataaaccccagtatgatcat

SEQ ID NO: 117382 - DNA, 431 bp, Homo sapiens
gagggctgactcttcatgatttcattacttacaaagttacagtaaccaagacagtgtagtaaagggacaggcacagatcaatagaacagaatagagtccagatagagagccacataggataattaattgtagggcccaggcatttcaatggtaaaaggatagtcttttaaccaatggtcttggtagccgggcgcagtggctcacgcctgtaatcccagcattttgggagaccgagacgggtggatcacgaggtcaggagatcgagaccatcctggctaacacggtgaaattccgtctctactaaaaatacaaaaattaggccaggtgtggtggctcatgcctgtaatcccagtaccttgggaggccgaggcaggtggatcacctgaggtcgggagttcgagaccagcctgaccaacatggagacaccccgt

SEQ ID NO: 117383 - DNA, 397 bp, Homo sapiens
gctaatggtgtaattgaagtgtcaagacattataggtacaactgtttctagctcattatgatagaaaatggactaaggcaagggtccttcatcttactttcattaagccacacactacctttgcagtcgaattccttttcataagacattttaatcttcgctatttgttgttcttcataacagccttagatagctaggcttaatattttagctattttatataggtggaagcttagagaaagatgtggaggttaatgcaactccatcttggatgctaatccaccatattggtttctgattaaccccagtttcaggatggcctctcagatgtccagtttatctatttttccttgtgtaagagcatgtacgtaccataattccagaccttaggtcaaag

SEQ ID NO: 117384 - DNA, 215 bp, Homo sapiens
gcaaaaaaaaaagctataaaagacaatttggagatagttggggatgtttgaatatggattgcatgttagatgatattatggaattggtgttaattttcttaggtgcaataatagttcattcttgtggttacctagaccagacaatccttattctttggagatgtggatattggaggtgaagtgtcatgacatctgcaactttcagctgtgtcaga

SEQ ID NO: 117385 - DNA, 793 bp, Homo sapiens
agggtttctctttctttttctttctttttttgagacagagttttgcccttattgcctaggctggagtgcaatggtgtgatctcggctcacggcaacctcttcctccagggttcaagctattctgcctcagtctcccaactactaaagagacttaggcaggaagatttccttgagcccaggagttcaaggttatagtgagctatgatggcatcactgcacaccagcctatgtgagacagcaagaacctgtctctaaaaatatataaaaaataaataaataattgaaaaagcatcactacttaccctgcctcccattatagaaatcttttttttttttgaagcagaatttcgctcttgttgcccaggttggagtgcagtggtgtgatctcagctcgctgcaacctctgcctcccgggttcgggcaattctcctgcctcagcctcccaagtagctgggattgcaggcgcgcgccaccacacctggctaattttttgtaattttagtagagacagggtttctccatgttgatcaggctggtctcgagctcccgacttcaggtgatccacctgcctcggcctcccaaagtgctgggattacaggcttgagccatcgcacccggccggaaatcttggaagttatcttaaacttcttcctttctctttggtcacacatccaactggtcatcaaatcctgctgattctaccttgagaaatgtttctcaaatcaaagtcctttcatcctttcccattcttttttttttttcttttttcttttttgagacagagtctcactct

SEQ ID NO: 117386 - DNA, 93 bp, Homo sapiens
ggagtatgactaaagtgatttcccgtttcttgcttggatgttgtgttagagtacaggccaaacttccatatcaaagaggccctggaatgtaag

SEQ ID NO: 117387 - DNA, 234 bp, Homo sapiens
ataactgatttcttctaaacttgaatgccatatagagtatattttgagaactaaatcggcttttagtcgaatgttttattcgatggtatccagctccccatattgttactttctgccaagggctatgggatgcacttttaccacctttcttctaccccttctccaacccccctaagatgattagaggagcctccattttacagtgaggtaactgcctcaagtcttatagctggt

SEQ ID NO: 117388 - DNA, 217 bp, Homo sapiens
aagagggtacatagttggcacacagattccccttaaagcccttcacactccaggaggaggggttggtggctcatttttaatcacccagtacacctggctctatttccaacctgatggactttgccccctcagtgcagcgcggaaggtgagagacttagttgagaaaatgactccaagcccagtcatgaattttgagcttggaggtcttctttgtagt

SEQ ID NO: 117389 - DNA, 328 bp, Homo sapiens
cgcacacggagccgcagcacaggctctattcagcggcgctggctggagctgagatggaagttagtttctatgtagcagaaatatgaaacaaatgaagcaaaactgcccagagaggggaaatgccccaaggatgggtctcactcacgcgcgtacacagacacacacgcagagagcactctcacgctgggcaagctcgggatcgcgctacccttcccgagttgaatgatagtgtttggtttctgtctcttgccatgtgcatgtgtataaatgctgcggattggcatctgtgtaagtcttgtcctgcgttatttctgcagcctatgcaagt

SEQ ID NO: 117390 - DNA, 413 bp, Homo sapiens
aagctgagggtgttgcaggctgtttgggatggatctggaggtgaggagccaggtggagttggctagacctcaccatgctagggtccccagagtggcaacaaggcaattttcaagtgtgtgtgtggacacggacagagccagacaatggtctagaggactgctctgtttccctgtgtgcgatccttatgtggtacctatgccagaggttttagacagaaaatagatgttaattgaggacatggagaagcaagattgaagcctccacaaatattacgtgagcatggcagaggaaaaggcccgttatgtgccctttggggaaaaggtctctgggctaggctttccagggacctgaatccataaggttcacaagagagcaatttctgagctaccaagaggaatggggcggacctggg

SEQ ID NO: 117391 - DNA, 539 bp, Homo sapiens
gtctgttgtttcttttccagttgaaatgaatttggctgtggcctgccctccctttattctttagagagaatctttcctttccaggctagggatgtagttctgcctgggtgcaagacctgatacgctgaagaagaattataagggacaaagaatcaagcagaattaagaaaggacgtgagatgacctagctcagctccctcgtcgtggggatgatagggccaaggcacagggagaggaagctgggactttggtatcagacacacttgaacttgtgtcctggctctactatttaatagctgtatggcctggggcgacttatgtaacttagctgaacctcattttccttatccgtaaaggaaaataacactgttatctcaccaggttgtcaggattaaatgaatgcctgtaacacatgtttattatatgtaattttcttctcccttttcaaggatatataaaaagataagggcagagtgggtctagaacccagatgtctaggctgccagctgtcagtcctgtcctcttgtcagaagggcccg

SEQ ID NO: 117392 - DNA, 283 bp, Homo sapiens
ttttgcatttttaatagagacagggtttcaccatgttggccaggctggtctcgaactcctggactcaagtgatccacctgcatcggcctctcacactgctgggattacagacgtgagccaccgcgcccggcaaagcaagtgcatttacatggataaagattggaagataagaggaatgaaaactgtgtaaaagtattgatatcacgtggtgtcaccatccagtttgtctgctaagccaggagcctctgggtcatcccgacaaccccagtctcctcttccccca

SEQ ID NO: 117393 - DNA, 985 bp, Homo sapiens
ggaatcccactctggctatgtctgcagggatggtagatgaagaacacagaacaagaatcatagaagataaggagccacaaaggttcactctgttttcaaaggtgcagtcaaaatgttacacttctaaactgtggcaacgagacacaccctgaagaaagagagcgttacaccttcacaagaaaacagagaaaccaagataccttgtgatgtcttgtacataccaagaaaaatatgtcctaaccttgaaagcccattttgggtgtgagtggaaccacatcattacaaaaccaaaaagctgtatctttctcatccactataccccttcttttccaaatggacacctgagactttgagctacttcatacaacagagtttcacactgggacctcccacgtctacctgcatttcaggcccgaatctttcctggcatcagatttatcatcaagaacctttctgtggttcatttcttggggcacaattctctcgtgatggggactaatcccgtcaaatcatccatttttgttaacattaattgtgatatccattccaggtatctgctttgtgtataaaaaggaaatttctgaagataaaaaaaaaaaagaaaaaaaaaaaatgaaggaaataaaaaaaggagagcagacacacaaaaggatacaagacaaagagaacatggtacacaaagcagatccgagaacaacagaaacaggacaacgaggacacaacgcacagaaacaccatacaagagacgcaccaaaacaaacacgaaaacgcgaagagataacacacgagcacatcaagtacaatgggcgagaagaagaagaacacgcagcaggaaagaaagagacagcaaagacaaacaacaacacgacagaacgcagaacgacaggcacgaaacagtagaaaacaaccaagaacacagacagacaaagacacagcaacacccaacacaaacaaagaggacagacgacaaccagaacaaaacaaa

SEQ ID NO: 117394 - DNA, 395 bp, Homo sapiens
gttaggtaacttgcccaaggtcacaatgctagtgagcagcagagtttggtctcaagcccaggcactctggctctagatcagcacaatccaacagaattctctggaatgaggccaggtgcggtggctcacgcctgtaatcccagcactttgggaggccaacgcaggcggatcacgaggtcaggaatttgagaccatcctggccaacatggtgaaaccctgtctctactaaaaatacaaaaattagccagcggcggtggcctatgcctgtaatcccagctactcaggaggctgagacgggagaattgcttgagcccaggaggtgaaggttgcagtgagctgagattgtgccattgtactccagcctgggcaagaagagcaaaactccatctcaaaaa

SEQ ID NO: 117395 - DNA, 399 bp, Homo sapiens
ttgtctggtaaaaagctggaagttgcctaaattcttgaagtctggtgatgctgccattgttgatatggttcctgtgcaagcccatgtgtgttgagagcttctcaggctatccacctttgggtcgctttgctggttcgtgatatgagacagacagttgcggtgggtgtcatcaaagcagtggacaagaaggctgctggagctggcaaggtcaccaagtctgcccagaaagctcagaaggctaaatgaatattatcccttaagaactttaaacacagtggagtgctacactgtatggtttatgtgccctgctgtctaccaaagggcctgtatcatcagattgttttggtttggacatgcttcaaatttgaacttaaatagctctttagaacattatcgagg

SEQ ID NO: 117396 - DNA, 580 bp, Homo sapiens
ccagcctcaggaactgggactcgaagggaagggaggttctccccagtggggacaaagggtctccaaactcagagttaatgaggtttcccgtaccccaccagagaggacacaaagacgtgcccccttcacccagcaagggtgatggtggaggggatgctgctgggcttgagcgctgccaggcacagaggggagccctgtcctttgcacccctatctggaggtgaggccctccctccagaaacagcgtccgcatcccaggtcctctaaggcagcccctgctctccacctgctctggggccaaatgtgcagcctggtgtacagagaagcccaccccctgcctacgggctgtgatgccacatgctggggacaagagtgtggggtctgtggcccaccccagccatcagccagctgagaaggacaggctgcaacatggtgccttcacgcaacgctgactttccaacactgtgaggggctggcagtttcacagcagatcctggtcctggagaatgggcgtgtgctctgcgtcctggcagtcttaagaaccacttctcccagagaaggataagactcttcctgctctc

SEQ ID NO: 117397 - DNA, 211 bp, Homo sapiens
ggaatggctgctggtttccctttaagggctataacctgtcaactcattgtttgcttctcagactcccacctagctgtagaatggagggggaagggctgacctaaatcgcagggaaacaattaggttcgctaattctccgcctccattacttgggtttctgatggtcttaaggggttcttctctcttctccactcccaccacttgcacactt

SEQ ID NO: 117398 - DNA, 387 bp, Homo sapiens
tataggacctaattgtaatacgtttaaatattaagtctccaccacaaaataacatgggtcatatgttacatgcatatttgttgaatgcacatgggtcaggaccaccttcatgaatattcctagcccctcctgcaacctgttaaatatgtaagttcagccaacatgttgtcatattcccacaggacctccaagcacgattgataggggagaatgtgcactataattaagactgagtggtatgtgtacatcctagataattctggaaacaaatcctcagccctatgagacatgcataagcaaattaatgctatgtcttatcccacaatgtcctaagtcagtggctctcctcatggtttggatcaggcccctcttggtgaaaaaaagttg

SEQ ID NO: 117399 - DNA, 337 bp, Homo sapiens
gagaagctgccccttctctctttctctctctctctctgtgtctcttgtacagggaagggggtttcaagttgcaactaactcattgctgataccaagcaggatgggcccaggcaggaaaaaagtacacacccttgcccagagtcacagcttctataaggggaagggggagactgggttctgtgatgaaggggtgaggcagacgtcttggtgtgagactcagtcccgtgataaaggggcgatgcacacagacgccttagtgtaaggatccaggtttctgccctcgcatcacagaaagccctccaccccacgtttgtcccttactctctggggcttagcc

SEQ ID NO: 117400 - DNA, 142 bp, Homo sapiens
ggtgttatgcctgctattgggtgcaactgaccttgtcctcctgtcccttccatcactaccaacaatcatctggacatttaagattttttagctgacaacgtcagcagctatccttttcttgttacacttttactgctgtcat

SEQ ID NO: 117401 - DNA, 536 bp, Homo sapiens
tcttgcattatttttgtctggcattaatatcagggtaattctagcttcagaaagtgaggtgagaagtattcccttctcttctatgtgttggaacagtttgttaaggattgatgttaacgctccattgaacatttggcaaaattcaccagtgatactatctgggctcaggctttttttggcaggaagttttcttttttttaattgtgaattcaatgtttacttattataagtatattgagatagtctattacttcttgagtcagtttcaggcgcttgttactccctaggaatttttcaatttcacataggttatctagtttgctggcgtttaattttattttatttcttatgctccctttttctttctaaaagatccatggtaatatcctctcttcattcctacttctaataattagtgtctttcctctttttttcttggttagcccaactaaagatttgtcaattgtgttgattttttcaaagaaataacttttggttttattgatttttctctgttgtttttctcttctttaata

SEQ ID NO: 117402 - DNA, 301 bp, Homo sapiens
ctgggattgggggagtggtgagcattggaaggaggtactcagaggggagagggcttcagcctataatctgatatctaggtagacatttgccctattgtgaaataaatgaagtaaggatttctaggatcttttatatgaaataaaattaggcccagatggtttcactggtcaaattttctaaatgtttaggagagaaacaataacaatgctatacaaagttttccagatgatagaaaaaagggaacactttctattatgaggcatctaccctgaatatcaaaatctgacaaggaaaagacag

SEQ ID NO: 117403 - DNA, 449 bp, Homo sapiens
cggatgtgtatgcatgcatatgaaaaccttaagtcaatatttgatctctgtcccatcataaatccatgggagcagaaatacttcacccatgaatatttaattatttttctggaacaaaaattcctgaactatttaagcacactcacttctgcaatattttgcccattcctattgaattatattttttaaaaagaaaaaaaaaactctttatttcaaagatttcagctacaatattacattaaaaactaacctttaaaatttaccttgctataatagttttgaacgaagcggtttaatagctactgcagttgaaacctggtcatgatgtttaattgctcatttcagaaaagctctggcaggagtcagatacaaacttaaactgtgattatctgtatgattccacaaagcaagcttgtccaacctgcggcccacaggccacatgcagccca

SEQ ID NO: 117404 - DNA, 233 bp, Homo sapiens
agatgaacaggcactgacttaaagcttgtttggattttgttttgggtgaaatggactgttgggaaattaatgatggattcgtctacaagcctaggcctttggaaaagccaaaggaccacaagtttaaccttgaagaacagaccacaaacacaggttttccttttcaccttttttttttttttttttttttgagacagagtctcgctctgtcacccaggctggagtgcagtggc

SEQ ID NO: 117405 - DNA, 746 bp, Homo sapiens
ctccatccaggaatctcatcacgatgctattgtgataacatgctgcccctcccacacctactgtccatcagaattcagtcctcttttctctaaacgaaggctttctgcacaaaaggtaaaagaaatccaactgtttggcccatttaaaatcaagtcactgaagtttctctgagctcaatcacactcttcatctctgaggttcatctctgttcttaccacatgataacgtgaaaaaatagtttcttaaagagctggccccatcatctccagaaatgatgttagggaaggtccgtggaaggcacaggcctgcagtactgaaggcagaggcataactgccaaccacaagtcactgattacaatccaagagcaccattttcttccttttatggggcatacgactcttccaaacattgtcctgcagatacttaagaaaacaaaacaaagccccaaacaaaaacccgagctccttactccacaagcgttgtgacctcccggctcagggcagcagccagtcgttcttggctgtgggagagaacctgggagggcggcgaagagcagccagacattttttcagcttgcgtcttcaggggacagaaacaaggcattctttccttctgcaaatccaggctagcagctcaggaaaacaatcactccttttcccagctgcagagatggctggattgccttggctgccttgcacgtttctcccctaatcttccagataaaccatccctggggtcccaggt

SEQ ID NO: 117406 - DNA, 243 bp, Homo sapiens
gtgaggtacatggacttgctgacgtctgcgcccacatcgttgctgaccttgcagaggtagtagccactgtcttcctccacgacatgcttgatcagcaacgacccattgctgagaacttggattcggccatttagggcaaagcagtcatcctcaattgttctgctgagggttaccctgtacctaccatcgtgtggaaattctctaaaggtgctggggttccccagttccagccaattgccctaa

SEQ ID NO: 117407 - DNA, 404 bp, Homo sapiens
gaaggtatattatacttatatttatcacttacttcatctttatcactctttgtagtaggtatcgcttattctttttacagaaagaggaactgcaacccagagaagtgaatatatgtttaatgagctaacacagaagaagaaaccagggctggagaaccccctgtattgtgaggggtcatttggaatcaccttacctggcttaaactagcaaacgagaaggaaggaaatatattgactaatataatagacaagtctggagttaagactgcaatcaggctgcaccgttgattcaggggctcagttaaagccttcaggatgctgtttcccccccgttcatctctattgtatgcttcctcattttcaggcttcttgtggtagcaggatgcatcccagcaagttcagac

SEQ ID NO: 117408 - DNA, 246 bp, Homo sapiens
ggaggatatggagagaaatcacaggccggaggacacggagagtaatcacaggctggaggatatggagagtaatcacaggctggaggatatggagagtaatcacaggccggaggatatggagagaaatcacaggccggaggacatggagagaaatcacaggccggaggatatggagggtaatcacaggctggaggatatggagagaaatcacaggccggaggacacggagagtaatcacaggctgga

SEQ ID NO: 117409 - DNA, 283 bp, Homo sapiens
ttttttatggttgaagagtctgagaattagaattgattaatttgctccaggtcacatagataataacaaatagggttgaattttgacccatgtctgttgggttgcaaaatgtgtcttttctcccatattgttctgtttcctagttgcttctcagtatttattagcacagtattcaatttgtttcattcatctttagatcctccatgttacaaacagtatatttagctgctgattgaatgaatgaaatacaaatacaaagtccactattttcgccaatgctgtg

SEQ ID NO: 117410 - DNA, 548 bp, Homo sapiens
actttaggttaacagttggttaaagagggaacaaaaggtacggatgtggagccacatacagaggaatcatttgaagaaactggacggtgagaggaaaaaggaagactttcatattaatttattcaacagtatttattgagcactggacactaggactgtggtaataaacacgagggccacaatccctatcctcgtggtggttttattttagcagcaataaattcagaaagaaacaaggccaagaactaagactaggtggagtagaatctgaaatgcatccctaacctagtgaagtcctaaaagataagccaagcctcccaaaaaaaaaaagtcacttggtgtcagatatcattaattttagtaatcaatgtatctcatgtttttatattgcatttttagtttcagaatgtgtatttttagagcatatggattatcattccaaagtgactgttttcttagacaattaaaaactttacactctttttgtaagctccatagtacctggcacaatgagacgaacatagtagggtccccttaattgttggttg

SEQ ID NO: 117411 - DNA, 680 bp, Homo sapiens
catcatttggggttttcccaatgtttctctattggaaataactctgtaatgaacatctttgtgccaaaagattgtctacatgttggattatttttgtaggatagattcccaaaactagattaactgcattcccaaaagtagataccaaggacattaatttcctaaggtaaaaattgcttttctaagtgttgacaaaatgtatattctcagaagcacacttaccagtggtgaatatcagaattaatagcaaagcaaataaatacttttttatggtaaaattgatagataactctatatcttgctctcttaatttacttcttatgattaccaggaaggataaagatgatatttaattaagtgtgctatagtttatatattatttgtttttgctctttgccaatttatgtattgggaccttggcgtgatgcctctcaattttatgaggttgtgaaaggaaaataaaaactcaggaccttgattcactataccaaaaggaaaaaataagctgaaaactgagtagtgcaagaagctgcctttccttctgttcctaagcagacagctacagataaaaagttaaattatctccacaggtggctactctatgttcaccttatcttatgtaaaatcctgatttaccgagcctgagatgaatacataattgactatttccctacctgccc

SEQ ID NO: 117412 - DNA, 639 bp, Homo sapiens
aatgcatgtatgcatgtatatgtttatgtgcatatatatatgaatgaacgcttgtatataaaagctttatttttattatgtatagattttatttgtcctctataaatcagtgctttccaaccttgatgcacataaatatttgtacagcacactgtgatatataagagagattgcttgtggctgaagggcaatagccaggaagcttttgccatcccaagcattgctgagctgcctgaagggctgaggtgatgagtatcttaagcacatatatatcttatttgaggcccacaggttagaaagctccaatgttgagagagttgtgaactccttgagtaggtagatcctcagagcacttagtatggtattctctgtatagttatttttgacagaccatatttgacatatactataaaacttttttaaatgaatttctttcaaaaggtaagaactattagtcttctcaaagacataattagtaaacatctaaaagttattatgcttagtatttcctttctatggtttttaaatcattacgatatgtctttgttattagaaatgccactgtgtaatgagtgttacatataataagtaggtatgggtacaaatgaatttggtgtcttagaaggaagccatctggta

SEQ ID NO: 117413 - DNA, 169 bp, Homo sapiens
ctggctcctgcatctagtcagtgatcaagccccatccacgtgctctctctcctcactacacagcccacttgtaggtttctccgtaagccctcttcttcccacactctgtctcctacctgctccccctcccgctgctcctgcctccacactccatgcaaaccacactgga

SEQ ID NO: 117414 - DNA, 290 bp, Homo sapiens
gaagtgacacacagtgctttagacacggattcctgcatccaacctttgatatcctggatacttttctggggatacagcgcaagaatcagtatttagaatgttttaatttgtgtgtcggcaggtatgtgggtgaacgggtaatatgtatataaggtacagaagtcagaaggtcccagtgggattatatactcatacctttttttcatatctttctaaggataggccttttttaaattatacaatttttggtcaggcatgatggctcatgcttgtaatcccagcacttttgg

SEQ ID NO: 117415 - DNA, 214 bp, Homo sapiens
tcttttgagattttgatgaaaatatttaagtgtttgctaagctctctaagtaaaattccaaattctgtctcctttgaggcggacagaaactgaagtctctgctcatctttttcaagttttcagttattgcttttcactagcccctttggaggtccctcttgcattagcggtttaagagtcaactaaatatttcagaggagttcacatgcagact

SEQ ID NO: 117416 - DNA, 205 bp, Homo sapiens
aaagaggtggtgagaagtgcgtggcgcagcgtgtgggatgaatgtgcaccgtaagaggtccagtcccactgcggtgccctagcaaagtgggacgcttcgggaaaataaggcaggaagaggagttgaggtcacatggtgaatatccttggataccatgttgagataaagatattttagaagatgtcccacattctggaactgattc

SEQ ID NO: 117417 - DNA, 368 bp, Homo sapiens
agtggaagacatgaacagaatttgttccagttgctggcaattgagttctatactatctgtggtttcagtactatctgtgaattccatcatattcattgtgggtcttagaacatgtaccctgaagataagggggaactactgtatctagaatattgtcagtcccaataaggattaattgctgtcttttttagtgtggaaaaaatctgacataatcaatatgctaccaaatgactggttttctcaagggatgcccttggatcagggtctcagtctttgctgttaaccaactggacattcagcagccacagtagataaaccttggtgaaggggaacccattttttatagcttctatctgccaccatggctg

SEQ ID NO: 117418 - DNA, 322 bp, Homo sapiens
cgtttagaggtaccagctgtggggtttgcttcttgcctttcttcagaatcacaagctaatcattagctttcctgctccttgcactttccagaactctggccagaagaggcaggcaggggtgtttactctacacgctccggagacccttttgcttccctgttagaagcttctggtgtctagcagatgcagatctcagtggagcaccagaggctgcatatgctcactgagccagtagtgggtcaaaacccttatgctgtttgtggaactccatgcatcagtttgccaaggctgccataacaaggttccacagactgaatagctt

SEQ ID NO: 117419 - DNA, 612 bp, Homo sapiens
ctctgtcacataggctggagtgcagtggcgtgatctcggctcactgcatgctccctctcccgggttccagcgattctcctgcctcagcctccctagtagctgggactgcaggcgcccgccatcacgcctggctaattttttgtatttttagtagagacggggtttcaccatgttagccaggatggtcttgatctcctgacctcgtgatccgcccgtcttggcctcccaaagtgctgggattacaggcatgagccaccgcgcccggttggctcaggttctttccaccctttgtcgaatgtgactgagccaggctctgcggcactgaccttggtcctgggatggcttccaagtctttgaccttaagagttcacaatgcagagaggggagataggcttgtaaacagatcactgattaataggacagtagtggggcatcacgcacgtagaaaccacgtgctggggagagaacacatcatcctttcagaggagtcttgcctgtaccgaatagattaaaaatgggcccgtccaaccccacagttgtcccacggtgcaaacaacttcagtctacattctctacagaaataagataaagggtctcaggcagcagcacact

SEQ ID NO: 117420 - DNA, 314 bp, Homo sapiens
gatggtggttactaacaacacagtccacggcagtcacaatggtgtaataactgccaccctgcccgggcctgaggtgatgaggccccaagtgcttatgtgcaggatctcatttcaccctaaccctgcgagctggggattatccccacattacagatgcagacactgagattggttcagcaggccgggcgtcttgctcgtggtcatgcagtagaccagaggcaggaccacagtcacatcaggccggactcagtccagcatcctactgtatgtaatgaagaaaaaaagttggcttgaggcctggcttggccaacaca

SEQ ID NO: 117421 - DNA, 256 bp, Homo sapiens
aacagtggtgcccctggtgactgtgtgaggaggagccccagaaaagccagagatggccaagcaaagccatgaaaagcccccaggctaaataagtaactgtggacacaaatcttaggcacccacaggtacatctgtccttatgtgatgagagctaccaggtttccttaaattccataatcatctagcagtccccctcccccaactcaccagaaacagcattgttccccaaactgaaaggttttctattagaacacaa

SEQ ID NO: 117422 - DNA, 748 bp, Homo sapiens
cagctgcttgtactgaccggggattaagggccaaactagacaatggatgtcagagatcctgtgtggacacgtgaccgggaaagctataagcccccctctcctccaccacacacactgccacagcaacacataaatcctcctaaacttagatctgatggggaactaagctaaatgagaatcttaaaaaaattgttgtattacagaagaatgaacaagtacaattccttgcacacctgaccttgtgctatgcaagtctttcagcttcttgttaatgcattctatttaacaagtttgttttggacaatattatttctgtttaatctaactcccttgctagcaaggaagcttaaaggtctgtgaaatcaaaatatttaatactgcatttctcgctcccaaaatgatttcaatgtgaacgacgagagacagagagagagagagagggagaggggctgtgcttagctgatgactaagggcttcctaagggacaattttattcagccctagcatcttattagcagcagagaataattaagaagggagaggtttgagggaatagagaagagggctagtagccttgtaatcagacatcccaaagtcaattcttaattttacttgaaaaattataaatttccatttagaagatgcacattttaaaattaggaagtctatacttttgtttcagttatcttctacttcttaaagccacgaatagactgccagtccttgttactttaagttcaagtaccaa

SEQ ID NO: 117423 - DNA, 790 bp, Homo sapiens
ataaaatgttgagtacaaatgcctttgaactcagaaactggagaatttgtaatattttacttttgtctgattgtgaaacacatgcctgttcattggagaaaagttgtaaaacactaaagtaccaagtaaaaaatactaattatatcattcagatataccattaacatttagtatatttgttgtcattaaaaattctataaacattttttttaaatctacataatgctttgccattcctaagagattaacccgtataataattttcccctttttctagtgagggtttatttttgacattaaaaatactttttttttttttttttgagacagagtctcgctctgccacccagcctggagtgcagtggcataatctcagcttactgcagcctccacctcccaggttcaagcgattctcctgcctcagcctcccaaatagctgggactactggtgcacaccactactcccggctaatttttgtatttttggtagagacagggtttcaccatgttggccaagctggtctcgaacttctggcctaaagtgatccacccacctcagcctcccaaagtgctgggattacaggtgtcagccaccacacccggcctaaaaatactgttctgatgaccatccttgtgccaaaattggtgtctccatttttgtctatgtcattaggagagattcctagaagcaaaatactggtcaaagggttatggacaatttaacactcctctggaaataaaggacatccatataatgtggcaaataatttataaagcatttcaccaggga

SEQ ID NO: 117424 - DNA, 321 bp, Homo sapiens
catggcttggaatgtcaccttttacctccagtaaataaagccaacatcaacactcttccgtgtcttttattttgtatgcactcaatattcttcacatgacaatctggactcttaaagggaaattacagtagtgatctatgtcttggcaaagagaattgtctttataatatatagttacagtgtatccatcaatttcttttgtttcttagactgttcacattggattgagtaaatctaaaatggaattaaaagagacatgattaatagtggactacaaagaaataatgatatcataatactctcttaaaatgacctgacgtg

SEQ ID NO: 117425 - DNA, 280 bp, Homo sapiens
  misc_feature (212)..(212): n is a, c, g, or t
  misc_feature (225)..(225): n is a, c, g, or t
  misc_feature (242)..(242): n is a, c, g, or t
catggcttggaatgtcaccttttacctccagtaaataaagccaacatcaacactcttccgtgtcttttattttgtatgcactcaatattcttcacatgacaatctggactcttaaagggaaattacagtagtgatctatgtcttggcaaagagaattgtctttataatatatagttacagtgtatccatcaatttcttttgtttctcccccntaggcacattggnatgtatactaatagggnccctgtggtgggcccaacgcataccttttttaccctaa

SEQ ID NO: 117426 - DNA, 358 bp, Homo sapiens
gcgctttggtgctgccaaacattttccgttacttcacagaaccttgatgtcacctataaaaaccgttttacaaatgaggaaggctcaaaggtcaggagcttactgatggtcaaacaactatcaggaagccctacaatgagggaccctggagttctgagcagctgatctaacccacattcctcacacagtgccacaaaaggaggctaggtggccctaggacagaaagaaataagtaatgtggacaagtagaagtggccaggcacggtggctcatgcatgtaatcccagcactttgggaggccaaggcgggcggatcacctgacgtcaaaagttcgagaccagcctggccaacatggcga

SEQ ID NO: 117427 - DNA, 683 bp, Homo sapiens
ccaatctttctttttttacgtttactaactttatttttgtttcggcaaagcatacagaataataactgatgtttaaaatcatggaaaaaggtacccccagtctccctcatgttccaatagatgcttgcccggacacatcacctttgctactgagaaagtgtagagaaaaggtgtgtgggaggatgagggcgtactgaagacagtaaatacatcctaacatcgtgttggcttcttaatttgttacactgaaacttaggtgtacctaaagccacaccaccattacaacatcgataactgcccagtaaccatttggaatacctccaacaatgaggaacaatatttcttggactctcagtttatgataagtgcgcctctgtcatcaaccaataccattcaagtaaggtacagtgatggctctggaaaaggaggtggctttaaatatctacattcaaaggggaaaaaaaatacacgcacacacacaggctgccttaatatccctgtttgtccagcgggcaatgggactgggaaatgatcgcgcctcctcagagccaatacagtaggaggcgaacatggggcagtgcattactcaatgccctgcagactgacccttaggaatgagacaggaagaaaagtatttggagatagaatagagaacctcccgtcaagagccctactaggatggg

SEQ ID NO: 117428 - DNA, 662 bp, Homo sapiens
tctactaacttataaccgcagcaccaaagcatacagaataataactgatgtttaaaatcatggaaaaaggtacccccagtctccctcatgttccaatagatgcttgcccggacacatcacctttgctactgagaaagtgtagagaaaaggtgtgtgggaggatgagggcgtactgaagacagtaaatacatcctaacatcgtgttggcttcttaatttgttacactgaaacttaggtgtacctaaagccacaccaccattacaacatcgataactgcccagtaaccatttggaatacctccaacaatgaggaacaatatttcttggactctcagtttatgataagtgcgcctctgtcatcaaccaataccattcaagtaaggtacagtgatggctctggaaaaggaggtggctttaaatatctacattcaaaggggaaaaaaaatacacgcacacacacaggctgccttaatatccctgtttgtccagcgggcaatgggactgggaaatgatcgcgcctcctcagagccaatacagtaggaggcgaacatggggcagtgcattactcaatgccctgcagactgacccttaggaatgagacaggaagaaaagtatttggagatagaatagagaacctcccgtcaagagccctactaggatggg

SEQ ID NO: 117429 - DNA, 321 bp, Homo sapiens
tgcctcggcctcccaagtagctgggactacaggtgcccgccaccatgcccggctaatttttttgtatttttagtagagacagggtttcaccatgttagccatgatggtctcgatctcctaacctcatgatctgtccgcctcagcctccccgaagtgttgggattacaggcgtgaaccaccgtgacccacctactttaagtagcttttgtgtaaagtaacccaagaactaccaccaatagttaaatagaagccatatcttctagttttttttcctcttctttgctattatgattttcttgaattttgctgattgtttccttc

SEQ ID NO: 117430 - DNA, 605 bp, Homo sapiens
gggggaagagtagcaagagagctttttacaaaaggttacttactataggtaaaagaagaatgtgtttaaaaatttatcttagggctgggtacggtggcttactcctgtaatcccagcactttgggaggctgaggcgggtggatcacctgaggtcaggagtttgagaccagcctggccaatgtggtaaaaccccgtctctactaaaaaatataggaaaattagcctggcatggtggcacgcacctgtaatcccagctgcttgagaagctgaggcaggggaattgcttgaacccgggaggcagaggttgcactgagcagacatcgcgtcattgcacagcagctgggcaacaagtgcgacactccatctcaaaaaaaaattattttaatgagtaggacattggcatgtcagtagaatgtcttaaaattgcttatcgaaagcaattttatagtaataaaattaaatgcatgggttctcagaaagaactttacttgtggtgaatttaaatttttaaactatgcatgtgtagctttccatgtagagaataaaaatattggtaacagcatttcaaaactttattttaaactttagatattcattaactaatg

SEQ ID NO: 117431 - DNA, 246 bp, Homo sapiens
aaagtgctgggattacaggcgtgagcccccgcgccgggtcagcccagagggtcttgagaggaagacgggaaagaagagaaacatctgtttggagaggacaaaaagagggtgttaaaaagaggaggaagtgtgggggaaggcgacgtgaactctaccccttcccttccccctcacctgcctccctcccgcccagagccaggcctggcttagactccagaggggtcgctgacaaactccaaattggca

SEQ ID NO: 117432 - DNA, 445 bp, Homo sapiens
agccctgggcgttgggggcgttggccaagacgggcgagtgggcttctcgggttctactctgtgaaggccaaggcaagggcgtcgtcgcgcgctgcctggcggagcccagccccttccccacactgtcgctgacacgcccgcctgtcaaaggctccgaggcccagatgagcagggcgattttaaatgtcagatcctgccggccatccgcgaccgtcacctgtgcgtcttcagctcctcaggctcctccgcttgtctcagttacaactgggagcccgggtgggcagatgattgcaagagaattctttggagtgagaagattttgctgtgagaaaggagaagattaatcaggaaagtctgtctgaagaaggaagtttcccaaggaaacttctaactcaagggcataggagagccgaagcagtgtgcctcaccttcaactgtgtatctc

SEQ ID NO: 117433 - DNA, 116 bp, Homo sapiens
agtaggcatctcacttaaaaaatcaaaaatctgcagtaagaatgtgccatacagtaaagtcataaagagtcatagctgagccaacacaaccctggaaggccaccccagcttccaag

SEQ ID NO: 117434 - DNA, 343 bp, Homo sapiens
gttgtaggactgtggtcactgttcctgctggcgtcagtcagccaggggctgctctcagctcatcgaggccccctcccactgggcagcttgctttctcaaagccagcaaggacactgacttctagaccctcttttaaagggcttgcctgattagggcaggcccataggataatctgtcttttgagcaaggcagtcaactgacgaaggattttaattatttttttaatactttttgccatgtaatacagcctaattacagtggtgtcatccattatgtccatggtcccacgcactcagtgggagaggggtatgcagggcaggtacactagtggtgggagtcttgg

SEQ ID NO: 117435 - DNA, 428 bp, Homo sapiens
cccacatgtggccacaggaggaactcggctgagggctgagaagaccagataatgacacagagggctcacttcaggaaacccagagagctgcagcggctcctccagggccattccacgcattcattttctaacaagtcataagtcaaagagtgacatcaggagcggacagcctggtgtccaggcatgagccatggcaacagattctgatttcccagaacggctttggtctttacctggtgttggatatggtagtgttagctggagtgggaggagattcacattgtatatttgtttagtgactccaaagattttaaattatattgtgttttttattattttattccatttttttagagacagaggtctcactctatctcccaggctggagtgcaatgatatgatcataggtcagtgtagcctcaaactcc

SEQ ID NO: 117436 - DNA, 174 bp, Homo sapiens
tctgagactgagaaagaggagatagaaccagctcaaaatttgaggaagcagccagacagggtggcttatgcctgtaatcccagtactttgggagcggaagcaggaggatcacttgagcccaggacttcaagaccagtctgggcaacaaagtgagaccccatctctacagaaaaa

SEQ ID NO: 117437 - DNA, 398 bp, Homo sapiens
gaaaacatcatgccacgactcgatacattgctgtgagaatcgaatgaaatattagttttgaaaacacctggtgtggaccgggtgcagtggctcacagctctaatcccaagcactctgggaggccaaggcaggtggattgcttgagctcaggagatggagatcagcctgggcaacaacagcctgggtgaaactctgtctctacaaaaaattagctgggtgtggcggtgtgtgcctgtagtcccagcgactcagtaggctgaggtgggaggatggcttgggtccaggagaccaaggctgcagtgaaccttgatcacaccactgcacttcagcctgggtgagagaaagaccatgtctcaaaaaagaagaaaaaaaaaagaaaacacctggtgttaacaaaa

SEQ ID NO: 117438 - DNA, 188 bp, Homo sapiens
ccgcccctggcctctgccagtcttcccttgtgcacaatgatactatctttgtggatatggctcttgccacatccttcctgcttaaaaaccttcaacagttctcttctgcctgctagatgtaagatgcccgcctacgtaggacacgaacagccctctctattctcctgtaagctctcagcatgtggttt

SEQ ID NO: 117439 - DNA, 556 bp, Homo sapiens
gcatacctgtccagtaaatccctcagctgggaaacaggtcaagcaatccaataatgggggtaaaactaatcaataccaccctccaggcactcactacgcatggcactctaagtacttgggttggaaaaagacacaatgcccagcagaagaaagggatgctagaaacaaagatctgggggcaggggtgaccatgggcctctagaaaaggagaggactttggctgctgctgaaggatgtacactagcaatgcgaaggataacttgaggaaagtaatctggggacttgtgtactcagtggagcaaaggtgggctgatgggcaagatactacgtttgtaacagctttactaatgacagtgttaagaataaattggaagggagtgctgctagaagtaaaactaccagatttagttctctgaatcaaggtgatgggggtctgaattctaatgcagttagaaatgtacaaaatattatcgagacctcatataactcggtgattgactgcattgggctgtggcctaggagagaatgaggaagtatgaaagtttactgcaaagtg

SEQ ID NO: 117440 - DNA, 730 bp, Homo sapiens
atatctgctccagttaggacagatttctttcctgtccatgatgggagtaatccattgcaatcatcttgccaccaggtggatggtcccccccagggaatggtgcccataaggagctcagcattgttctctgtgtttgacaggttaatcattcaacagtaacagtatcaggccagcttggtaagaggaagcccatgcatagcctccatccttaccaccatggctgttttatgcataagtccgttaagcaaaccctgggtgactaaagaaagatgctgtctaacatacataggtcatgccattttgtccacctgattattgaaagactgttttcatcatgtcctttgataaactctcacatggggcacaaatatcctcttactctgtacctatcccaagaggtccatccacctaccttttccccagacctccttatcaccagtcttgctattttgttctttccaagtccctgatcatccagctaaaccattagcaactgctcatgaatcaatgtagtgctaaccatcccctggaccaaagtatacaactaaatttaccacttgaagtcatgtccactgtccttcaccattaccttttattggggctgtgaagctgccaccttacacttctagttggtgccaacatttattcacaacaacttgtaaaccaagcccaagttttttctccttggtcagctgctcttaaggaatccccagtgaggccttagatgtgg

SEQ ID NO: 117441 - DNA, 318 bp, Homo sapiens
gaaaggaggacctagggaaaagttgaggacaatggctgcagagacagcctaggagccacctggagatggacgagtgaaagcaggaagggctcagagaatggaaacagggaggtcagaggactcatcgcaccaagtgaccaagggagagttgggagggatgggggccatggtcagagtgaaaccttagaaatactgactcccggctgggcgtggtggctcacgcctgtaatccctgcactttgggaggccaaggcgggtggatcacgaagtcaggagatcgagaccaccctggctaacatggtgaaaccccatctctac

SEQ ID NO: 117442 - DNA, 362 bp, Homo sapiens
aactccccatcacaaggtgatattctacactgatttaggtgattatccatttaatgcccatctatcccactattctatgagctctgggtttgacttgttttcctcactttcaattcccagggctgaagcatattttctggaataaaggactgaacaaaagatctcgaccacagagacttgacctggcttccactcttggaggcagtggtctttccatcacaaatgcatgctattttttttgagatggagtctcgctctgtcacccaggctggagcgcagtagcatgatctcggctcactgcaacctccgcctctcgggttcaggcgattctcatgcctttcagccacctgagctaggatcac

SEQ ID NO: 117443 - DNA, 299 bp, Homo sapiens
tatgagttaactttacctgctaagagagagtttggtcaagggatctgaagagtggtgagggtttgtggtacttgaccaaggatgagtaaaagaattgatgagtactttaagatcctgataatggattttataaacttttaatacccagttcttccgcattttcttcatctgattttccctatacaaacaagtggaataaaattgtgatactgatttaagatgggaggtttgcaggaactgtgaggttgaagggtaaagggaggatgggaactgagagtgctagtgagaagacaatgaaa

SEQ ID NO: 117444 - DNA, 375 bp, Homo sapiens
ataggcatgaagccttcgtctcacagctgcatgcgtagtcactgttgaagcaaatgcctacctaatttgacactcttggtgtgtttaaaaaatttttttgagtttgcaaataagcatattaagtctactgatggagccttcgggcagtgaacagttatttgaggaccctgatcctggaggcaaatcccaagatgcagaggccagaaagcagacagaatcagaacaaaaattgtctaaaatgacccacaatgctttggagaacattaacgtgattggccaaggcttgaagcatctcttccagcaccagcgcaggaggtcatcagtgtctccacatgatgtgcagcaaattcaggcagatccagaacctgaaatgga

SEQ ID NO: 117445 - DNA, 668 bp, Homo sapiens
attgtgaaaaatatggtaaaatatggaagcatcaatattgtttcattttatgtatatataatgaatatatatatatacatatatataaagtatttgaaaagtaggaaaattagaactttcatcgttcagaaattcttggcagtaacagcaaaattaaagcacacccacatacatctgtgggttgaatagtggcctccaaaagatgccttcaaatcctaatccccacatgtaaatgtgattttatttagaagtaggattgttgcagatgtaaaaagttacggatctcagtatgagatcatcctagatttagcgaaatctctaaatctggtgatgagtgtccctataggggaaaagtagtcagagagagataccgggagtaagtcatgtaaagacagaggagcgccaagaattgctggagccattagaagctggagagaggcatgggtatattttcccttagagtcttcaggataaacccaccatggttttgaacttctgctctcagaccagcgagagaataaatttctgtgatttcaagccaccaagtttatggtaatttatttggcagctctagaaaactaatgcacacaccttcagtctctgccttatattcaagccttgatgtataatcagtagttttgatttttttcctttgtttgatggaatat

SEQ ID NO: 117446 - DNA, 174 bp, Homo sapiens
ctcaagagcaagtcacctgggggggccaaactgtgtcctgcctgctgctgtgcattcagctgctctggagaggcctgcgctgctgagaccatgttgggaagtcagtctaattgtgccatttgctactataaagcttacttggggctgggcatggtggctcacgcctattatccc

SEQ ID NO: 117447 - DNA, 485 bp, Homo sapiens
gcttctgactccctccataatcccccaaattttaatttctaccatatttgattctataaaattttctgatgaattcattgaaagagccaatatttggggcctacaaagaatccagcatagtatgttttcaactaaccatactctggaagacaatgataaatttgaagctgtccacagaaaaacagtgatcataaaaataacttcagtaaatggaaaattttttcactataaattcattataaggggactaaataaaatattgtatatatgctaaattgaatatcatgtagccattcaaaggattgggctggatttatgtattgatgaggctaggtcttaagtatgttattatgtgtgaaagctaggtacataacaatgtatacagtatggtattttggggggtaaaaacaaggaattaaaaagaattctataaattgtcactctatatttgaagtttttactacatacaagtattatcattttcc

SEQ ID NO: 117448 - DNA, 435 bp, Homo sapiens
ggatggcactgggctatgggggaccagagatgaaacccacaggaaccccaaactcttgcagtgaagggaatatgcctactgcacagaacatggaggtttctatcatgttcaagagaaaatatttagccgaaagtactcttatacctggacccttgagaatttaagcctctgaatcacacaagagcttcagggtcacccaaacaaccaaaatgacccaaagatcagaaaaacaaccgaacaaatgagacgaatgtgttaaaaagcccaggagagagtgattagggagaaaatgggatgccagcatttaaatggtagggcaacaaactcccagctgagggtgatgtttccagagaagcggggaaggaaaagtaaattatcagggacagatggcaaacaatatcaggtggcataagcatccccagaagaaagtgttag

SEQ ID NO: 117449 - DNA, 253 bp, Homo sapiens
aatattcaagaccagcctgggcaacacagtgagaactcatgagaacaaaaagaaaggaagaaagaaaagacgagaaaagaaaaaagaaaggaacatgatggtatgaatccctgctcttggtgctgcagagaaccaccctagggcttcccctttgacacacagatctcaactctcaaaaaactcaagctctggtgactttggatttggccttctagccacggatgaggctgcacatccaccgccatcatttgca

SEQ ID NO: 117450 - DNA, 163 bp, Homo sapiens
caaatgggttccttgctcgaaaaatctgtaataggttctgtacttaatatttcattgtaggtttaagtcaactttaaagtacttacgtgttctgagttgtatgttatatatgcaacatactgttatatattgataatcaccaataaatacattattttaaaag

SEQ ID NO: 117451 - DNA, 624 bp, Homo sapiens
aaaaggccactcacggtaaaaacttctagagcaaaagaccaagactacaaaagctctgagccacgtgagaataaagaagaatgcaagtacagcacggggagaatgaagcagttgcagaggaaactggaaaaaaaaagggtcggggagatggagaagaaatgaagaaaaaaacgtgtttccgtatgacccggctgcttatattttctgggctcaatattctcttcaagaaccaggggatgccagagaagagtttataagtggacaatgggatcagatttgattttaaagaaatcaccagactgaaaagctgtttcagtacacatgtcaaaaatgaaagggcaagattgtcttcccctgctaaacccatggggctacagaaaaagcaggctgtgaggaacctgttctaccattagctgaaagggtgtgtggcacatgagaaacacttgctgcatgccaaactgactgctctggtcccagcaacgctctctggagtgtccctgaccatgcctcagctaaaagtctcagtcaagtaaactctcctaaaattttagcatatcattttgcaaaaactaaataaacttcatgttgtctttctgcaaagttgctaatcccagatataaagga

SEQ ID NO: 117452 - DNA, 344 bp, Homo sapiens
agatattggtacttctgcttctatccttcacataccttaatgctttatctatctcacacactctctctcaacttctattgctttattccttcctgccagtttctaagacagtttatcaatttgatctttcatctcactaatttgttctccaactatatccatcctaaaatttattccatccattctttttatatcaatgtatattttatacctaatatttacatttttttctaatttcttatctttgtcatatattacaaatatgttcctttatcttcttaaatacattcagaaatcatttgttgtatttttaatgttgttgttttaatagctatttctttctc

SEQ ID NO: 117453 - DNA, 398 bp, Homo sapiens
gagagttaactgggtttaaaagtataatctgttcaacagggtggagtcttagtccacagaaaagtaaattatataaactcaattccttcatctttaagttgggtataacaccaactactcgacacctcatagcattaatatgaggacacaacgacgtaataaagacattagtgttactgaagattggcagccaatgctgatgtagtagtatataccatctgatggtcaagagagcaccataggctacaaaagtgtatgtattaagtaagcagagtctatacccttcaagatttttattttgggtatttttcatggaacgttttaaaaatatgatttatttaaacatactgtggtcttccctgtgtcctgaaacaaaacatgttaacaaatatttatcc

SEQ ID NO: 117454 - DNA, 514 bp, Homo sapiens
ggtggggcagcgagggtcctgctcggtttctgacctttaggctctgaagcacaacatctgcatcctgaagagaagttttgttggtggcagggcgcttggggcactcagagccccagtacatactcagcagtgatcacaacaactgctcttgatatgatgctgggcccacaagctcccccaaacccttggaaaaatccggtgggcgcagtccaaatctaggaagtgcaacccacccaaccacgggggcgacggcttctgcagggggaggaatggttttgactcggactcaggtcgccctcactggttctccttgtgccaggctcagcagacagtgacaaacatgtgccatggcctctctctgtaccaggaacacctttctcattatgccctgcccggtatcagagaaggactggaggccccatgtcaggcattgggacagggagtgcacggccaaaggtcagtgcctagactttgccctgtgtgcatgggcttggagaattttgcctctgaccac

SEQ ID NO: 117455 - DNA, 904 bp, Homo sapiens
tgaaaggtgactggcaccagcagtttggatcgcctcctgtggcgggaggcccttgtagaggatacctttggagaacagctcacaccccagagggaagtggcttggacaaagggggctgctcagcagacttcgatctcctctgggggatgtggataccgctcaggcccgcacccctccattggtcctggagactgatatgggaggcggtatgtgccttggctccggagggcacctggagcacccctcacctggagaaccctcatccagagcactcctttcctggagcacccctcacctgaagcaccctcagttggagcatcctctcacctagagaaccctcacctggagcaccctgttacccggggcaccctcacctggaaaaccctcatctggagcaccttctcacctggagaaccctcacctggagcaccctgttacctggagcaccctgttacccggagcaccctcatctggagcaccccctcacctggagcacccctcacctggagcacccctcacctggagagcccctctcctgcagaacccctaccaggagcatacttcaccgggaccaccccttgccttgatgcctcagcactgaggagtctcccatctaggtggctgggagggcactctggagccatggggatgaggaccagaggctgctggtacatcttgccctgagactttggaggactgcaaggggacccacattcacttcagctctgcacctgtggtgatatccccacactggagagcaaagtgattgctccgggggccagatggccacgccaccatccccccacacactgcccctgccccctgcctggagcacagcccgagagcacccaggatcatccatgtgaagcagcaggctgtgggtatgtttggccgtcccgacccc

SEQ ID NO: 117456 - DNA, 196 bp, Homo sapiens
tacattgtagggttttggttgtggttttaccctaatactatgaatataggactcaataattctttgttgtggggggctgccctgttcaatgtcctgtagaatgtttagctgtatctatagcctctacccactagatgctagttttaccttcacctaccccattcatgacaaccaaaaatgtctctaggcattgaca

SEQ ID NO: 117457 - DNA, 633 bp, Homo sapiens
tctcggggtggcagaggtgggagaaaatctgcatataatcggacacgtgcagttcaaacctgtgttgttcaaggttcaatggcaattagtttttattagaaaaaatatatcaatgtggagaagcccttgaaggaatttaagcacagaggtgattgataggtgtaaccgccgggtccagacaggccagaacttgaactcaagttgtgctggtcaagggaggtaaaagaatcaaaccttgatgaccagaagacactggagtaaaaggcaagagtgaaaaaaaccttgatttgttacacggtgaaaagcagcagaagaaaaatggcacccgaatcatcgatgtcactaccgttggttggtcaggtaggccatgagaaccaaccagagatcaaacagagcaaaatcgaatatgcgataatttgttcatttccattccaccattcgccctcagtgtttatcccatggtaattaaaaccaactgtagctattgaacaatggaatttgctggtcaagctcttcagagcccaatgtcatcagccttggggtggcccctgcaagtccttgctgtgtccattctgttctcactgaatgcagaaggtgcagcccagctcagggatgagttacagctggcctcaa

SEQ ID NO: 117458 - DNA, 910 bp, Homo sapiens
ctgatcctcagttttctgtcaaagaacttctgctcatatccaattcctataaagtgggagtactctaacctgatattaccaacattaggttagattttatcctaatgttaggtattagaatatatcctaacattactagttcttcactcttactaaagtgcatgttagatttcttcaatgatttttttaaattggcatggttgatacaaagcatccttctatccaaatactgtgctcagtcgcctaagtgatagtttagaaccatactatctctctgtggaaagaatgctggggctcctggctacacactttgagtagaagggaaaatacccctcttgtatttatgatgttttttctttctacttgattaagaagaaagtacaaaaaggtgcttattgaagcattgtcaatttgggaacaagattctcaggaatgaaatatttgtgactgttctcagcatgaaaggtagagagaagattacttgatcattatgtgcttatttgaaagtcactttcctcccatgcctcaacatctcactttttagaatgcacactgaatgcctggaatctctttgttttagaaaagacaaagttgcattgttaaaaaaataatatttctggggaaaaggctcagtgctcaacggttactctataaagagatttaaaaagaaagtcaagggaagataaggaaggtagcatggctaacaacctcgtgggttctactagcattatttcatgcaaaatgtcattaacctttatataggagagaataagtctgggaatcaactggcatctaaactccatttcttgttttgtcactgcttccctggttgactatggaaaatacatttggtcttttgataccttggtttcaacaactataacatgacttaagaacttttatgcatgga

SEQ ID NO: 117459 - DNA, 535 bp, Homo sapiens
aaggacatgaactcatcattttttatggctgcatagtattccatggtgtatatgtgccacattttcttaatccagtctatcattgttggacatttgggttggttccaagtctttgctattgtgaatagtgccgcaataaacatacgtgtgcatgtgtctttatagcagcatgatttatagtcctttgggtatattgaaaactggcacaagacagggatgcattgttaaaaaaataatatttctggggaaaaggctcagtgctcaacggttactctataaagagatttaaaaagaaagtcaagggaagataaggaaggtagcatggctaacaacctcgtgggttctactagcattatttcatgcaaaatgtcattaacctttatataggagagaataagtctgggaatcaactggcatctaaactccatttcttgttttgtcactgcttccctggttgactatggaaaatacatttggtcttttgataccttggtttcaacaactataacatgacttaagaacttttatgcatgga

SEQ ID NO: 117460 - DNA, 744 bp, Homo sapiens
accagttcttgccggtgcccttcgggttggggttttgccctgtagatcctcttcagtgacagctgcagattgtgaacccctccaggcctggaaccaaatctccgattcagtgttgagaacctggactcgggagtcagcccctgggatctagtgctgcctctgacagttacttgctgagcaactttgggcaggctcctcatctgtaaaactgggttcattactaggttcttgcgattattaaatgacgtggggaatacgcaaagtatttatgtgaccccgcgtgtggcccatattaagcactcagtaaatgttattttcattctttattcttgtatgccccagttgttagtgaatggcagaagtttgttgtaagtagataaatgaaggttgagatatttagttcagttgagttttattgcctattgagtcagggcattatattctgccttaaataggaggtttaaagaaggtgtgattatctaccacaagtcacctgggatgccttctggcacccaaatgagtagttttcattaataattgtgctgtataacaaaagctaccaggtattgagtgattttcctgagcccagcaatatgctgattgtttacttgctttcctttgaggaagatatcgatctcattaaatagatgaattcagagctaaagttcagagagggcaagttacaagcctgaattctgaggtctaggaattgatgacgctgtaattcagggaccaaacatataa

SEQ ID NO: 117461 - DNA, 517 bp, Homo sapiens
gtttaagttaggaaattagttgccatgttggttcagttgtgtatcaccaccaaagaagtgagttgctaaattaaatataaataaatacttagccatagaactagaggaaaagattaaacaatgtattgttggatcaagaaatcatgtttcaaaatttaaatcaatgacttttatagttcaagtgtctgtgaagtctaaaataaaaatacagacattaattgcactaccttattggtagaagaaatagcaagtaccttaaaaagtgcatgtcatattggaatcaaatctcttgaaggctaggctagtggtaaaagaaatagtaggtaccttagaaactacatgtcatatttgaatcaaatctcttgaaggctaggcaattcatcttgactatatttttgtcaccaaagagcttaatattgaaccatcaaaatatattcactttaccatctgggacattttaatcaaacctctcatctgttcaatcacatctttcacttcagaaagaactttcacttct

SEQ ID NO: 117462 - DNA, 362 bp, Homo sapiens
ttttaggtcttggtcttcagccctcttatcctgatttattctctcattggggtctcactgtctctagtattttagctaccacttgataaggatgacttccaaatttatattcccattcccaatatttattccaagactcagttttgcatttctgactgctaatcatctatatatcagtgtcccagtggcctcttaattgagcattatcaaaatcctgtggtatttatatggtcccagttatccatccctgaagtctgtcaattttgatttctctaaattccttgccatgacatcctatatatgatcacatctctatacggcttagcattgtattccgatgcccagatgtcaaacttgaagct

SEQ ID NO: 117463 - DNA, 371 bp, Homo sapiens
tgtggggtccaggaagacgaagaggttcggggggctgagaacgaggaggccgggagggatcacgtgaggaggcctggagggcccaggaggaaggagccaagaaggcccaggagggcccaggaggaggaggctgggatggcccaggaggaggcgacagctcccagctccgacagctcccagctccgcattaggccgcagcagcccaggggcattctcttctcagccatcttcacacccacttgctgttgtcttctctgctatagtgtcttttgcaatttaagatgccttttcaatggtgaataattagcacctccttacaaggcagaagttccatgacttaatgaggaggaaggaggtcagaggccactccc

SEQ ID NO: 117464 - DNA, 335 bp, Homo sapiens
gcaaatgctataaatcaggtctttctcctgcaccccctcttcagagagcaggttgttaaatatttaccagcacatctctggctctgtgcccaaagattgcttaaaaaactgaatgaatctgtgatttagaaacctatctctggcagagggtgaacaaaaaaccggagtctaggggagggaaggaggcttaagatagaagtggtaggaggctcctgcagtgacctaaacaggaactggcaaagcttgaaccaggaatgtgaaacgtctaaagttaatgtttgtttaaattatagtcattcctttctcagcgaactgtttctacacatgaaagcacc

SEQ ID NO: 117465 - DNA, 318 bp, Homo sapiens
  misc_feature (126)..(126): n is a, c, g, or t
ccaccgcacccggctacggggtttcaccgtgttagccaggatggtctcaatctactgaccttgtgatccgcccgcctcggcctcccaaagtgctgggattacaggcgtgagccactgcgcccgccncggccaacttattcaaagtcttaatctgtccatgtgaatcgaggttaaagcagtagcaacaacaacaaaatgctatcattagtaaatgttttgtttattacttagtgttaacagagctctcagagtgtgctcttaggaagacacgcacctcttaaggtaggtgtgtcttgcttagtgaggttgaacaaatca

SEQ ID NO: 117466 - DNA, 427 bp, Homo sapiens
tcctgcctcagccacctgagtcacagggattacaggcatgagccaccatgcctggttcacctgcaagtgtgtttatgttcaatttgatgccacctacaggcaccaacttcctacctgctgctccatgcagtgggctgaacctccaactcagaatgtagccaagaacttgcagctatcactctttggaagagtgctacccaaagaagggctggcttccagtttgtcagccagcagaagaacttgtgcaaggagaatggaaatgagctggtgttttagctctgatttttatctagaagccaccaggctgtccagtggctcacctacctctgtagctcctgctttacttttctggtaggtcttaggagctgggtggcagagtggttcaatggatggagtgtgagctttggactcatcgcatctgggttca

SEQ ID NO: 117467 - DNA, 516 bp, Homo sapiens
agtatgacaaaatcaaaaggtctgttggtcctgagcttgcagcttagctatatggtggatggtccaagcccttcctctgtgatgcttactatgcatgaactacactggccggccataggtccttgagggacaatgagattttaaacattatccctagccttaaaaggcttacaatctagtctcatgacaagagcctatgctactctgaagaagttttaaataacatatatgaagcatgaggggaatggtaaattgtcaaaactgctatactctgacaaggatcaggagcagtaaataatttaactgaggcttgaacaaagactgagccttgggcgtgtggtttgtagaaagaaagatatcccacatgttcttgtttttactatgaaactgtggttaccattcttaggtgtggtttaaatgataccatgggaatgaattccacattgtgtattaattagtaactgattttaattcaacacatttatgagttaaggagtagatattacatctacatgg

SEQ ID NO: 117468 - DNA, 268 bp, Homo sapiens
gacatagtgtctgtcagtctccaccagctctctcgttctccagaacagaaaagacagaaatgtccaccttccccgtttcctctatctggtgaaacctctttaccctacccggcaccttttttattcctacagcttagcttcccagaccacatgaggcaatgggttaaaaaaatcgctgtgtgtcctagaaatatcaagttcttgagcatctgcttttgggagctggtggggccttctctgacccagccccctcactgctaaaggcctt

SEQ ID NO: 117469 - DNA, 427 bp, Homo sapiens
tgtgggtagcaacaaccatgagacattccatatgagtggtggcctactaaggaataagaactcccctctcactcatccataaccaggaggcacaactcctcagggtcaacagtgatgaaacagtgaagcaggcttctgacaccacctggcagtaatgagatggtggccctctgacttctgccagagcagtgtcagaaaaagccaactaaaatagaactatgaatcagatccagagtcttacaaattagtaccccaaatgtctaggtttcagtaggaagctgctcatcattccaacaaccaggaagacaacagactgaatgaaaaatgtaatcacagacactaatcctcataagatagatatgttagaactatatgacaaagatttttttttttaagatggagtctgctttgtgctacctagagtgca

SEQ ID NO: 117470 - DNA, 622 bp, Homo sapiens
actagtccacggtggtccaggtattagttatcttatgccaaagcttaatgccttaaagctacagacattgtagctacagacatttactattgtacagtacctgtgagtcaggactctgggtgcagcttagctgagtcctctggctcaggatcttccatgaggctgaaatgaaagtgttgttgagggttgcggactcatctgaaggctcaacagaggaaatgctttcaccgtcactcatgagatcattagcaggattcagttagctccttgtggtttgttggccagagacctctcttacctccttgccacataggcttctccgtagggtagctcatagtgagctagtttactttgaataggacaagcaagagagagtgagcaagatagaagctggagttttttgtaacttaatcttggaatggatatcttattacttttcccatattctgtttgtttgaagcgagtcactaggtccagcccacagtcaaggagagagcatgagttccaggaggcaagaatcattgagagttatcctaaaagcacctgccacaacctgtaagtcctacatgatttgacccctattaccctctaatctcagctccttctacttcccttttgccca

SEQ ID NO: 117471 - DNA, 534 bp, Homo sapiens
aacaaaaaaaaaacccctgcattggggtaaacagacattttttttcctcatgtaacagaacgtccagtctgcagtcagtccatccatccaggattagtgcagctgctcaacaatgtcattcaggacctggctcctcctattttggaagatccacagatcctggcaggctgtcagccctaaagccaatgctttttcttttaaatagtaagaatgatcaaacatgaaaacatttatatttcatttctcatagatttaccttttattacacttgttaacatagtaaagagagggaagcaacactagggctgattcaccttgtctgtatgaaacatttcttcaatttctgtctggaagttgggtgcttctacaatatccctgaactatttgaaaaatgaactaaatataggtaagaaaaaagagtctaggctgggcgcggtggctcatgcctgtaatcccagcacactgagaaatggtgtcacctttaagtctttctcctttagtgaggcatatgtgaaacactattaaaatgctgcc

SEQ ID NO: 117472 - DNA, 692 bp, Homo sapiens
tgtttcaaaaggcaattatttaaaataaaatgcagttgcaacaactgtgattcaattatgagtttctgaatgttttaatatacttaaagtaaatacagttttgtacttttttgtaaagcattgataaagtaatttcaccatttactttctcagctttcttaatgcagaatgattcccttttcataggatcatttatttagcatctgaagtcaaaattaataggcttgattgagacacttgtgcactttttagtggtaatgatcattcacaagtgccttcatatttactatgttccctaacttagttttatgtctttttcagcattcatttttctcagaaggcattattatggttagacaaacagtaatttttttaaactattcatttaatttaaaatttcaaaattattttatatacattacactacttaaaatagtcacttttccccaaattctaaactctcaggatcatagtcgttggatatttattcccctttaaagaaaaacctttagaagatctatgaatgttaacagttcggtggaattgaggttacattttacctttactgtaggaaaacaaataagaaattatgcccagatgtcagcttggttattagcacttgttcctggttaattattaaatgtttttattaataaagttgcagtctttccacattatatatttttactgta

SEQ ID NO: 117473 - DNA, 882 bp, Homo sapiens
atctggttctaacctccttctttatgtatctcttttcctcgtgggcttcccttacttacataaagggcaggcactgctacacagacaggcaggaaaatgtccacagtgtctgctggaggaggtgatccaagtatctgcatatggtagataccatgtgaacaattgagaagagaggaaacaactactgctaaagatattagaaaggcttcctggtttcctcatttgagctcagccttcaggatggcaagtgagttttgctggaggaggtcatacaagtaagcattctaggaagaacattaccagcatgcaaaaggtgcagagaagggaaaaaggaaaacgatgctcataaaatgatgatggactcacagtggatttgtttaggggagtagggagataagaacaaaaaatggcttagcaacacattgtggaaatttttgaatggtcagctgaagatactagactcttttcagaatcttttgctttttagtatagtacttggaatactttgtctccttgaattgcatgcttacctctcctgaatggcacagatggtctttttttgtgctacatcatttaacacagtgccttgcctagtgatggtcccaaaacagttgttgatttctattgaaagtgctgactaggtaataagaagtcattactacctaactatataaaagaaaccagaacctacaacagttcctattgccttttcaccatccctcctttctctacttttcaggcttaaattttatgattcacgtgtataatcactcacttaacacacaccctcaactctctggtcctcactcacctggctaaaccccaaccctggtttaatgcaactctaacctgctgattaacatttcattgcttacatgagag

SEQ ID NO: 117474 - DNA, 380 bp, Homo sapiens
accccatcactacaaaaaatacaaaaattagccaggtgtggtggcatgcacctgtagtcccaactactcaggaggatcacttgagtccaggaggtggaggctgcagtgagccataatcctgccattgcactccatcttgcaggacagtgagacctggtttccacaaaatcattcctagagtttgcttaaaaaaaaaaaaaaaagaaaaaaaaaataaacagaaagaagacttagcctaaagaacatagtctccaaatacaaaggatggtagcttagaaataaaagtctttaattatttgtcatattctatacaaagtttgaagtctgcattaagttattaagagccccattcctgaggcttattattcaaaagggtggaa

SEQ ID NO: 117475 - DNA, 103 bp, Homo sapiens
gtccaaaaaaatcacgaaagcctgttttcaatttcatcattctttaattcacaaatggctcacacatgtaactccagcattctgggaggtcaagactggagga

SEQ ID NO: 117476 - DNA, 493 bp, Homo sapiens
gccatggtgatgcagcccaattgagcattggtgattggccctgaaatatctggcttgcacttcacagggagtaaagcaaactgatgtcattggttccccatttatgtgttttatttgcagctcaccagttggtgtactcactgaagaaatcattaagttttttgtacaaatgccttacctatcgctgtagcacaccaaagattactttttaaaaaaatcaaatatcattcccactttgagaattccatgttttaattgaataggaccaaaaccagttcaatgcatttttgctaaatattgtgaaaggcatttttttccttgttattatttaaccatcacttacatctacattgatctactgagtttttctttcatttaggcagtaatggataccagatgaacatcagtttgacctgttcactgctgaagggcagacgatacatttctacctagtgaccttatcttgatttttttttttagtttctcttacctt

SEQ ID NO: 117477 - DNA, 366 bp, Homo sapiens
ggcaatacattgtgaggaggtcagttctcacttcctgcttttacatttcacccctcctttgactctaagttctaacagttcaaattcagttatcgttctcaggcctatcctaaggaacataataaatacagaatatttttttcaaatctatctgcactaattgtgctgggtattatatgtcaaatgatagaccaagtaattccctactcagatataaaatttataatatgcaatttttataaaaattaataaatgttgaaatagaagggaaatgtaccatgtaattcacaaaatctgaaacctttttgaaagaggagggcattaggaaacaatcactgaagattggagggtgagagtttttttttt

SEQ ID NO: 117478 - DNA, 545 bp, Homo sapiens
cctagtaaaatcagcttgcatggtttgcacactggaaaaaggccagttcagtgccccaaaacctcttctgtagcttgctttgcacagaacctggcaagcaaggagcattatggtgtcaggagctgaccagaggactctgtgatgctggatctgggatcagcttcctcctctacgaaactcccgacccttccagttctgtaattgctctgccccaggggctcttaggaagcataattttccatgaagccttgctgcttctgggctccatttctagccagaagaccccagctgtcccacaggtaactgagaaaggccaaagagctctaagcccctttccttactttctcaccgttgttctttggacagtagtaatgttaaatataaatatattttcccctgctattgctgccagaaaatatttataatggggtcagcacagagctttctcaatgacttaattataaaatatgcttataacctgtggtgtgattacataaatgcacaaaagcaacttcagaacgtggtgctgatcataacatagaaat

SEQ ID NO: 117479 - DNA, 221 bp, Homo sapiens
aagggggatggaagagacagacagggcagagcaggtgagtcttgcaggccttgagaaagagaccagagttggtgctaaggcccatggaaggtcactgaaggctggtgatatgaaagaaaatgacatgatcctatttacatcttaagaagtctgctcttcggtgtggtaagtggatgggcaaggaggaagaaaagaaagttgtgaggccatcacagtaagaa

SEQ ID NO: 117480 - DNA, 564 bp, Homo sapiens
tataacctcatgccttgtatactaccttgtttggattgtgcctgagttaagggagtgtatttttcccccaaggctacaggcagattgatcatataaggaaggcttaatttcacatatcaaagctgttcatttaaatcgttcaattaaatatttgtgattaatacagttttcaattctaatataaagattcatattcttcaattagggcataggtaaattgctttttgtagctttctgaaatgtaattcacagattgattatattctcctcagtgaattttgatactttatgtgtacagtcagccctgcatatcatatacataacttcgtacatgggttctatatctgtggattcagccaactgtgggtagaaaatattttggggaaaaaagaatggttctgtctgtactgcatgtgtatagactttttcttatttcctaaacaatacaacaattattaatatagcatttatgttttattaggtatcataagaaattttaaaaggttgcaagaatgattttaaaatatatggacagatgtttgtaggatatatgcaaatactaca

SEQ ID NO: 117481 - DNA, 169 bp, Homo sapiens
agggtgattttcttttcaattttgcattgctggggccagatgaagaaatatgggtttagaaatggagtagcaggctgggcgcaggtggctcatgcttgtaatcccagcacattggtaggcagaggcgggccgatcacttgaggtcagcagtttgaagccagcagtttga

SEQ ID NO: 117482 - DNA, 409 bp, Homo sapiens
tcaccgagaatcttcccctgctctgggcccgtccgtggtgggccagctgctgtgctttcttctatgtaagtaaattaagatggtttaggaagaggagaactcctccttgatttttacctatccaaagatattttctcactaacatgttggcactaacagcagctcaacgccatctgaacacataacatactgaatcctaactattaaccaccttcatgctcttgagaagggggacaaggtatagtttttttttgccataggataacatttaggtgctgttttgtttggagagtggtagagaaatagaatagcctctagaacatttcagcaatctgaggaacccccatcgtgggatcttgcttataatactccactatgtaagacaaaggctggtgctggaactctgggg

SEQ ID NO: 117483 - DNA, 265 bp, Homo sapiens
cactctacttggtctacttgtatactctgtctttatattttgctggatgttggccattttaaataatgtttccacacttatacaatgtatacagaagaatttttatttccaaaaaggtatctttaaaaaatgttttctccctgtagtcccagctactcgggaggctgaggcaggaggatcgcttgaacctgggaggcagaggttgcagtgagccaagattgcaccactgcactccagcctgggtgacagagcgagactccatctc

SEQ ID NO: 117484 - DNA, 651 bp, Homo sapiens
ggaaagagtggggttctgacaatgtgctctgaccaaggcagtttagcaaatttgtactaagtggctgacctttgataagcaccactccttccccacctgacctgtgattccatttttcttttgtgcaaatagttctgaaggtttaatgtttattttttactacgatgcagtagactttcttctctcgtgtagaaactgctcgaatgactgtggatgactcctagaatataggaataacagaattggtttctcctgtactctcaacacaaaatacttctgtgaccaaatgtgtgggagtgtgtccccacacaccaagcagtcaaccagttctgcagcagctgccagctggtgtcctctaatgcagttcagttcagttcagttctgacactgtctacctggagatagcgtcagatctcacagattgagggctcagtcccacaagtctgtccccagtcttcagtgccagtcacaggctccaggtggttttacctgtgcttctgacctgctggctataaactggtttcccaatatccccttattgggttccatgaaattgttagagtggctcacagaactcaggaaacatactgaccagttcattagaaaggatgttttaaaggacacaagtgaacagccagatgaagagatacc

SEQ ID NO: 117485 - DNA, 280 bp, Homo sapiens
ttaatattttttttgtagacacgaggtcttgctgtgttggccaggctagcctcgaattcctggattgaagtgatccacccatcttggcctcccaaactgctgggattacaggtgtgagcccctgtgcccagccagaaatgcttctactttctcctgtagggtggcctgtagcaggatcatccattcacattcccaagtatcctctgttcattcacctgggcaatgagaggagcaacaattaagccagaaaagatttgctgcctccctgtcttgatcccaa

SEQ ID NO: 117486 - DNA, 385 bp, Homo sapiens
tctgaggaggaagccacgagttgggagtttcctctctattgcactgccctgtggggtgatgagagtgtctgggaagtgagtgatatgaattttcctaacagctttgatacaggtggttttgtgcttgcctaggtgcaggaaccttttaactaatttctggatttttcacaaatggaattggtccatgtatttttgttgaatcggtgtctcattgagggaaggagggtctggggcttcctattctgctgatgtcactcctccactttttaaaaattaagaatgtagtatatgttttaaggctttcagcaaagttttggtaatagtctcctgtgattatgcttgtcaacaaagagaaatattgactgagtttttaacttaatgcatg

SEQ ID NO: 117487 - DNA, 709 bp, Homo sapiens
aggtgctgactgttctaacccgcccttattacacataatattcatgactaatgcctgggtggctacttgtaaagcaggcattattcagacaaatgttgcttttacccctgtgagaagaaaagagaacacaccctgcatgggtacgtgtgtctttgtttccagaagccccttagaaagggaaggaaaaaactcacatccttgaattcaaatacctctgtttcttagtactccattttaatattgtagtgattagagtcattgaatccaggctggtacttggctctagaccctttgctttctgatgagggatatctctattctaatggtatcttgtctactataaagaagaaaacaaaacatgacttaaagaaaagaaaaggtctcctctctcagtccctttcctcttctccttttttctctagttttaagagttgagagagtgaatattcctctggttggtcagcatacctcaatttacagataaaagaatagacccttggagagtcacatgactagcttgaggccaaaggcagctggaagagtttgaggtttgatttctaatctgggacttacacaacagggcgattcctccttgactcaagaaacctgggctctgattggtaaagttgctataagaagcctgagaaccatgtaatttatctctagctgcgagatatcaatgccttatgctttgtgtttgcttccaccg

SEQ ID NO: 117488 - DNA, 840 bp, Homo sapiens
gcctcaccagagcagcatgtagcaggcccccatggaggattaacacagtggctgaacaccaagaaggaactggcacttggagtctggatatctgaaacttgatgtgttgaggcttctggtacaccatgaactgatatgaactaaaggattggattcatggaagcaagcccctggacttgggcaggagggacctgagtgtctattctacctgcagagccacttggatccccactaatgtttacacacatgaagctcatggagcaagctcagttctatcatttggcaaaaagagaaggattcaaattcataagcgagtgacatccagccctttctggaaggaataacaattttcaaggccaccaccaaagaaaaggaagatgtcataagcatcagtgttttgcttaccaaaagagggagggcacaacatgggttgacctagcatctctgcttccatataacccaacttacagaacagacttctgtgaatgtcccgaccaatagtccttcatcttctgcctcaagaaaatcttttttcttctgtcaagaaatgagaaccacatggacctcttgtagaagccaatcccgtcatcaatctcatgtggctgacgccagtaacttcaaatgcctgaacttttccatgtccatcctgtagcaaagaactgggcctgttcttctagccaggcagctgaacagctgtttctcatcccacctgtatagtgtttacatttacctctagtcttgatctgtggagtgacagtcaagctgatacctcggcctgagaaggtgaagtcatatggtagtacttcctcagaaagatctgtggcactgttaaagataatg

SEQ ID NO: 117489 - DNA, 221 bp, Homo sapiens
ctgggattataggcatgagccactgcgcctggccttaagtcagatttttaaccctttttaacaaaagagcagtattttgatgatgattatgatttttttttcttgtggccagagtggaaaaacaatcactctcctctttgatttttaatatagcattggtcatcaattagaaacctcttaagatttcctgggaaaggaatatgacactgctaagatatggg

SEQ ID NO: 117490 - DNA, 328 bp, Homo sapiens
tcacggctgtactgcattgttttttaaccaaacccgaggagtgtaaatgaaaactaaaaatgttgcccagaatctaaataacacaaggactacacattttttatgatggaatcaatatgaaaacaggcaatagcattgaaagctctgctttttaagtggctaatttaggaggaacatgcccccttgccagccccctcccctcataaacatcatattgccaccactctgctttcaaaacagaagacggaaatgaaagaatgggggagcaattatataatgaagtttaaggtcaaaaacatcactgttagaacaaacaaaagatcccaca

SEQ ID NO: 117491 - DNA, 734 bp, Homo sapiens
tatgtgtatatatactcacatgtatacatgtatatgtatatatgtatgtgtatgtatacatgtatatgtatacatacacatgtgaacatatatacacgcatacatgtatatgtgtatgtatatatacacatgtgtgtatatgtatatatacacgtgtgtgtacatgcacgtgtgtgtacgtacacgtgtgtgtacgtacacgtgtgtgtgtatatacacatgtacatatatattttggaactttgtataaataaaagcatataatacgttttctatctagactttctttggttcaacataatgtgatgagattcactcatatttcatatagttgtagattgttagattgattctttttttggacaagggagtatgatttattggtgagcatgaataaggggacattacagtgaacaccctcacgaatgtagtgctcaccacttgtccgggggccacatttgtggatgtttttgacctcacaaccatctgggatgagccacttctcagccgccatgtcttcacatttatccacattaaatttggtaaagccccactttgagatgtgggtctttgggcagccagggaccttgaacttggcgctgcatggggccttagttgcatgctccttattttgcagatttgtgtggatggacatgatgacttggccactgtgaaccctggtcacggtgccctgggggctttccaaagacaccttgcataatagctctcagaag

SEQ ID NO: 117492 - DNA, 374 bp, Homo sapiens
aagggagctaccggcattcagcagacaggagtcagagatgctgaatatcctgccatgcaaaaaacagctcgatacagtgatgagtcattctataccctgcaccatcttcacagatccctctggacattcatgtgcatgcaatacttgtttacagttacctgagtccaggattcaactccaatttatacataaacacaaagactttgtatggctctaatacacatcgaacatttcaagaataataccgtctgaattgagagatgatgttattttgcttcattcagtacttcaccaggaggaaacttcatgactttggaaaatcaacatcagcgctgctgtgatatctgtgttgccgataaatcacatccctatca

SEQ ID NO: 117493 - DNA, 557 bp, Homo sapiens
tcagcctctgagtgcaccatcagcatctgtatgggcacatcgtacccctccttgcccgcctttcctcatgccaccagctagggatgtgagctccccaaggccttggaccagctgggccttcatgggtgcatctcctgtgcctgagagtatggccaggacaaagcagacaatcaaactgaaaaatgaatgaataacaaaagaatgaacgaatagaatgaatgaaagcagaaagaatgggaagagactgaatgaaaaaaaaaatgaatgaaagaatgaagcatgaatgaaactcacaggaaggtctgaaaggccatctcttccagtgcctgccagagacaggaagcaaagtccagcatcaatgacagtggctcacatctgattctacagtggcaactacatcgctctgccagagattattctctccccgtcttccagatcacactgggcctgcagaacagcgaagagccaggagctgtggggagagttcccgaagaggagtacagaggttctgtgccctcccaaggctctcctgaaagtcacaggagcctccctggtgc

SEQ ID NO: 117494 - DNA, 485 bp, Homo sapiens
tggccctttgtctctggtgaagccttctctgactccctcaagtactgcttccaaccactacaccttgaacatatacaccctccttagacaaagcatcacactgtattatagctcctggccggtgtgcctgtcttcccattccatgcaggtacacaacctttggagatgatgttccattgactatacagtcccaggtttagaaggctcagtattcacggaaggaattaataaatgggaaaactgtttcttctaccctctagcagttactacagtgtccctctgatcaaagagacggatggacctacgcccagtctttggagctatagacagatcctttaagtagaagagaaaatgatactatccataaaaggaatttatggtatattcttttcatcaatgcagccagactgcaggtcttaaagagggtccttttacggataatatcattttctccttacatataagctcctccttatataccgtaa

SEQ ID NO: 117495 - DNA, 176 bp, Homo sapiens
gctccagggcggggttggagactcccacgtggaggaatcacgtgggtgctcctccatcttctgcccaccctaaggggcctaaaactaaccccagccacttttctactgaatagtcattggctcttaacatgaggtttgagatcaaatgacctccctccccaataaactttttagaa

SEQ ID NO: 117496 - DNA, 189 bp, Homo sapiens
atatatttttaactaaaaggtaagcttgaaagcagtgtgctaaagtcaaattatgtggtctgagccaccctctgtacaacaactttaattctactttctgtacttccactttttttctgtgtaactgtttgaaaacctcaaacacccttgttctaattctacactattcctgggaatcctttctctttg

SEQ ID NO: 117497 - DNA, 463 bp, Homo sapiens
tgaaactagagtttaaagatgagatataaaagctcgagaaataaaagaagacaacagaagtattgtaagagtgagctgatggaatcagggtacaaaataagagaaaagtaacattgcagaaacattcaaagtgcaaatatcaactatagctgggggtaatggaagcaagcttgagaaatttgagcaacccaaaatggaacaaataaaaatgaagaaagactagagagagagtgacagatagggaatacagtcaatctagtatgccaataattgatacccctgaagctgtcggagaataaatcaagcagaaagaaatgtcaatacattaaggaagagtttcccacaataaaagatttgaaggcaggtgtggtgacatgcacctgtagtcccagctatggtggaggattgcttgagcccaggagttcaatccagcttgggcattatagtgcaacctcatctctta

SEQ ID NO: 117498 - DNA, 302 bp, Homo sapiens
ctcaggagatgccactgcaggacccaaggagcagggaggaggcggccaggacccagcagctattgctggccactctgcaggaggcagcgaccacgcaggagaacgtggcctggaggaagaactggatggttggcggcgaaggcggcgccggcgggaggtcaccgtgagaccggacttgcctccgtgggcgccggaccttggcttgggcgcaggaatccgaggcagcctttctccttcgtgggcccagcggagagtccggaccgagatacatgccaggactctccggggtcctgtgagctgcc

SEQ ID NO: 117499 - DNA, 551 bp, Homo sapiens
agcctcccaagtagctgggactacagttacatgccaccacgcctggctaattttttgtatttttggtagggacagggtttcaccatgttgatcaggcttgtcttgaacacctgaccttgtgatccacccacctcagcctccaaagtgctgggattacaagtgtgagccactgcgctcagccgccctttttaatactatggttattttagttgatatcttcagattgctcttgattggagtatataaaatatgtcatagattgtgttattttaattttacttgtctatgttcttatttctttgaagttgctatttttcactatattttgctgtcacctataaattataaatattagtcttaacagaagtcagatattttctatattggatttttttttgaaaaaaaggagataggataaaatgtaaggaaatcaaatctaggaactaatttagaaaagtcagaggatttttatttagtattgagaagtataagataagttaaatgtatacaccagagaaaaaaagttcttattacaatgtaatatgtggaac

SEQ ID NO: 117500 - DNA, 405 bp, Homo sapiens
attttttgttttagtagagatgggatttcaccatgttgcccaagctggtctcaaactcctgacctcaagtgatccacccgcctcagcctcccaaagtgctgggattataggcatgagccactctgcccagctgtggttattcctaaaggccagtggtggggcaggataacaaggacagcaccagagtggggaggggtgaatgaacctacagcgtccacatcattgcttccctcacagagtatgttcagccaccagttgacagtgggcgggggctgcccagcctgtccaggagctggagcacacctgcatagctttcagatcacacagaggtgccctgctgcagacgctcaggctacatccgttctagtgggtgtgtttgaaggtagacattgggaaactggctgg

SEQ ID NO: 117501 - DNA, 774 bp, Homo sapiens
agccaggatggtctcgatctcctgacctcatgatccgcctgcctcggcctcccaaactgctgggattacaggtgtgagctactgttcctggccgtgagttcttattcttacctggattagttctcttgggaatggattagttcctgtgagagacggtttttataaaatgaagtttcccatcctgtttgatctctcctcatgcgtttgtgcttcccctttggccttctccgccatgtaatactgcagcatgaaaagccccaccagaaagtgagtagatgccacggccgtgtttcttatacctcctagattgcagaactgtgagctcaatacacctttttttttaaataaattacccagcctcagatattctgttatagtaacagtaaacaaactaagacagtctcctttatgcctataaaatgcttctctttatctctagtaatcctcattctgaattctactttgtcttattttatataaccattctgctttcttataattggggtttgaataatttccccttttcaatattttaaaaatagctgggtctttgtatttaaaatggtgtcatgtagactgcatatttgttcagtctgataatttttgtcttttatcagttttcatcatttacatttagtgtgattatcaatatgtttgggttttcatctacccattgctattttaaaaatttgtctcatgttttctttgcccttttccttttgtgacttcttttaattaattatgtttaatattttgtattatttcacatattgg

SEQ ID NO: 117502 - DNA, 103 bp, Homo sapiens
tctggtctacagtaacgggtccccaacgccgcgtcttaaccaggcccgaaccgaccaccgccaaccttccctgacacgcctttgccccacccgaccccgcccg

SEQ ID NO: 117503 - DNA, 428 bp, Homo sapiens
tagcccatagttcaagggcataaccctgtcagaagattctgagactatgacagttgcctggctcttctccctatggattcttaggtaccaagattcttgaggctcaaataaaaatcatgattcataaatataaaggcctttgattcacactgtattcttagagactcactccttgtgtatctcaggacatggtgtctccactgccaatatcctgcctgaagccaagccaaggccctcgaaactcattttatttgcttgccttttatgagaattacaggggacctggtccagataattacctaattcccactctaaaaatagctagctctggggggcagggaagaaaatattaggagaaaacacttttgtaataatctctacctcaaggaaactaggagttaatgcacacactcacagcagaggaataa

SEQ ID NO: 117504 - DNA, 468 bp, Homo sapiens
tgagaggttcctggtaggagatggatgtgtgtgtgcacatgtgtgtacatatgtgtatggggttgtgcacatatatgaatgtgtgtacgtggatatgtacatgtatttgtgtgtgcctttgtgcttatgtacacgagtgtacatagctgtgtgcatttatgtgtgcatgtgtgtatatatgtgcatctatgtatgtgtatatgcgcatgtgtgtatgtaggtgtgtacatgtgtttttgtatgattgcataaatgtacatgaatgtgtgcctctgtggggggtggtgtgtgcatgtatgtgtatgcatgcatgtgtgcatgtgggtatatgtgtgcatgcatgtgtatgcatgcatgtgtgcatgtgggtatatgtgtgcatgtgtgtgtatgtgcatgagtatctgggtgtgtgtgtatatttgtgtgtgagtgtatgcacgtgtgtgcgcatgtggatatacatat

SEQ ID NO: 117505 - DNA, 567 bp, Homo sapiens
attagtcaactaagtcaacctaaatgtgaaataaaaatgttcgttcatttactaagaaatatttattgaatgccaattacgtacaaggcactgttcgaagccctagagataagaaaaacaagatttctacacagaagatcatattttaatgggggaggggagatatatcagacaagtgaacaaacaaagataaaataattaaagattataagaaacaacagagtaatagaaacttcaaacacttttttttccaagagacaagggtcttgctgtcacctagagcaagcaatcctccttcctgtctcggcctcccaagtagccaagacacaggtgcatgctaccatttccagctaattttttaattttctagtaggaacaggggtctcactatgttgcccaggttgatcttgaacacctggcctcaggagatcctcctgcgtcctcccaaagtgctgggattacaggcatgagccaccttgcctagccaaagactatttttttttcttttctttttgagatagatccgcccacctcagcctcccaaagtgctgggattacaggcgtgag

SEQ ID NO: 117506 - DNA, 832 bp, Homo sapiens
agcgggctggctaattttaatttttttttgtagagatggggccttgctgtgttgcccaggctggtcttaagctcctggcttcaggcaatccaccagccttggcttcccagagtgctgggatttataggcatgagccaccatgcccagccaaaaaaagtatttttttaaagttagaaaacacctttaatttaaacagccttttatgattataatataaaaggccaacataaaataatgtattttactatgtaatataaaaggtataattttgcttatcgtttttctgttaagatgtaatgatactagagaaaggcaactcagctacctgggccattttcagttaagatgtaatgatactagagaaaggcaactcagctacctagggcatagtagggggtaatggtgataccactgtatgaaagtataccacttattgtctagggtaatggtgataccactgtatgaaagtataccacttattgtctaacaagacagtgatatgaataaattgtactaaatactgaaaagtgtggctagatttggtcactaaatttcggttttctagaaaaaaggggtctgagaatggtgaatttagtcacttatctaatgaccataacctagcagagaaccaagaacaaagggggaaaagtggtgcatctctgagtaaccaaaaggttactcattctcaaaaggtacatgtgctcaaaggaacgtgtataaaacctattaaccttactagtaggagaggcccttacttaggttgtatttgctcttactttagacataattctagtaattgattagctggcttacctgctcaagaagagtaaag

SEQ ID NO: 117507 - DNA, 752 bp, Homo sapiens
  misc_feature (505)..(505): n is a, c, g, or t
  misc_feature (510)..(510): n is a, c, g, or t
ggccgggcgcggtggctcacgcctgtaatcccagctctcagggaggctaagaggcgggaggatagcttgaggtcgggagttcgagaccaccgtggccgacatggcgaaaccccttctctactaaaaatacaaaaactagcctggcatggtggctcaagcctgtagtcccagctcctcgggaggctgaggcggcagaatcgcttgatccccggaggcggaggtcgcagtgagccgagctcatgccactgcactccagcctgggtgacacggcaagaatccatctaaaacaataaaaaaaaaattaaaataagtaattgcccttaaattgggaaatgctcaacaacccacgtgattctgaatctgaaaaggccagatcagggagatacagagaagaataaataaaacacaaggcaagagaagatttatctctggagcatccttgttgcagctgttggataatggcctccagctgcatctgtgtagctgctaaaaacatgatttcatnctttncaatggctctatactattctacggtatatatgcagcaactacatttcttcatccaacacataattgatggacacctgggctgattccctcaatgcctcccaagattgaatcaggaacgaaatcagatccagaaacagaactcatttccatgaccaggtactgacattgactccgtaatgttccaaaaagcttatcaagtcagaacaacaaaaatatggcccaagacacccccaccaattgca

SEQ ID NO: 117508 - DNA, 480 bp, Homo sapiens
aaaataatgattgtaaggaagtagggcttaccccaggatgagagtgattcattactagaaatagattatttaaagaccaggatttactaggttaacagaataaatgagaaaaactacacaacgtatatgtgtttttaaaaaaggcattttataaagttcagtccgctttctgttttctgaatttggggggattacattgtgattgcatgtatgacaacggtacagttgagtaatgatggaagaatgacgtacctgtgtggccaccacccagatcaaagccttgaattctggtggcactgcagaagcccactgacctcccatccccaaaagtaacccctctcctgagtgctaaccgtgtaggatggtcgtgtttgaagtgctaactctgtaggatggtcgtgtttgaagtgctaaccctgtaggatggtcatgtttgatttcgttctttctataaatggaattacacagaatgcattcttt

SEQ ID NO: 117509 - DNA, 437 bp, Homo sapiens
gagatgactacttccatccacccacagggaatgtagatctgggaggcttcctggaagagcggatttgggaaagtgcagtgtaggcagaggaaacagcttgaggaaaaaacccggaggcaggggattaaagtaggggttcaagaatggggttgaggccaggtgcagtggctcatgcctataaatcccagcactctgggaggctgaggcgggcagattgcttgagcccaggagttcaagaccagcctgaccaacatgatgaaatcctgactctactgaagagacaaaaattagccaggcgtagtggcacatgcctgtagttccagctacttgggaggctgaggtgagagaatcacctgagcctgggaggttgaggttgcagtgagccaagatctcattactgcactccagtctgagcaatcagagtgagatcctgtctc

SEQ ID NO: 117510 - DNA, 380 bp, Homo sapiens
tagctgggactacgggcatgcaccaccatacccggctagttttgtatttttagtagggacaggtttttgccactttgcccaggctggtcttgaactcctaacctcaagtcatccacctaccttgcccttccaaagtggtgggattacaggcgtgagccaccatgcccggccaagactacttctgatgtgaggagtgtgctggtccagacaccacactggaagaatcactgaagaaagcaattcccatttgccctgtgtgaggaaaactcaatttccccatatacgtggcacgcttctaggtgctccttggtatgattccctttgttgagccagagccctccgttagtcctgagctttaaaacaaaagtttgtctccaacc

SEQ ID NO: 117511 - DNA, 224 bp, Homo sapiens
gaaggaaaatatccttttgcatcttgaaaggcatctcacatgttaatattttgcttaactgcaggtgaggtcttcattcaacaaagtggcaaaggcccaggaaggggactgtttgggagtggtgacacactggtgtagacccttttagccaaaggggaaataggagctgtcctaagttaccactgagggttgcagggcagccccagatggggaggggccggcct

SEQ ID NO: 117512 - DNA, 160 bp, Homo sapiens
aacggaacctgaccaacctcctaggccagacacacgacctagctcccacctaccgtatccctcctccctccttcctcctcaccctatccaaccccatcccgcccctctccttccctgttccctcccctttatccttcccttcctttccctccctcccttc

SEQ ID NO: 117513 - DNA, 265 bp, Homo sapiens
tagaactacaggtgtgggccaccacgcccatctaattttttatttttagtagagtcggggtttcactatgttggccaggatggtctcatctcctgacctcgtgatccgcccaccttggcctcccaaagtgctgggatttcaggtgtgagccacagcgcccagcagagggttgactcttaatcctaatcctgacatttgtgtcagatttatggaataatgtgatttacagatcataaagagacattatgagatcatcctttttact

SEQ ID NO: 117514 - DNA, 302 bp, Homo sapiens
gggtcctgcagtaggatagggggtgaaactcagcaaaatgtcaggttatctgctgctaacataaccccatctgtaacctccaaggtccttgggcctttcaggaacatgtttttcacatttcatagaccactgtaaatctaaatagctaatacaacagctaaagatcttaaagcaatttggagacattcatatagtaaattcccttcgtctaccaaaggaaatatgagcatctctgaggcagagcagctgcttaatggttacagagcaatattacacaacagcttaatccaggaagaaaagaa

SEQ ID NO: 117515 - DNA, 577 bp, Homo sapiens
ctctcccccatacaccccccctccacacacacacaatttttgccctttgaactggaacagtgatccgttccctgtgattaaattagtgtaagtaataagatatcatagatttgattgatttccccagcaatgattattaaccagcccaattcagagccaagcaggaccattattctaaacactgttttctgagcaggcatgcagtggaaggaaattctcagctacagagatattccataaggaattatcagataggatgatatatagttaggattctcagacatggcaacgaaccccatggaatcctcaaataccatgatacacagatgttagagtccaccaggagttgaaccaatgctgtaaatacacttcactgatgttctcagggaattcttagacacaccacaaaatgtaagagctgagaactgtattatatcccaatcatcgtacttaatccaacaaatatatacttagtaacttatccgaaccacattttccagaggctcaggagacaagaagaaacatggtttttaaggagctcacagtcaacatgcgtttcttgaggaagcttgaaaat

SEQ ID NO: 117516 - DNA, 314 bp, Homo sapiens
tgtgggttcaatttgcacttaacgtgcattgtcctagttactaataatgttggctatctatatacaaaaatatgaaccttgatgcttatcctacctcatttatcaaaattaggtcaaaatggataatagtcctaaaattaagagtaaaaattttagatctagaaaaaaagtaggagaaaaggatttgatcttggcttaggaaacacttcttagaaaaccagaaagacattctataaaggacaaattaataaattggacttcatcaaaattaaaaacttttgctctttaagatatcatttagtaaataaagggca

SEQ ID NO: 117517 - DNA, 492 bp, Homo sapiens
gggctgaagtgcagtggtgcaatctcggctcactgtaacctctgcctcctgggttcaaatgattcttccacctcagcctcctgagtagctgggattacaggtgcccaccaccacacctggctaattttttgtgtgtgtttttagtagagacagggcttcaccatgttggccaggcttgtcttgaactcctggcctcaagtgatccacccgccttagcctccccaaagttctgggattacaggcgtgagccaccgcacccagccaaaaatcaataattttaaatgtttcatacttattgacattaatgaaacctcctgaaaaagcatttaatgcaactccgctgatattttaaatttacgttcctcacattacaaggtcaggtcagttcccctgggtttcacagagccgacgttatcacatagacacgactttgttcatgctgtgtatggaacaacccttcagagggttgctgagctgtccatggtgctggga

SEQ ID NO: 117518 - DNA, 416 bp, Homo sapiens
tttctctctcatttacaatcctgttgcaagtatgttatcttgaagaaatcacacatttccatatgggaacattttcctttggttgcttaataataaacatgatcattttagcttaatcctttaggctatagaattgcaaaggttgggggaactacctccttgtattctaatcaaaaatttgtacttaatgaaacagaaactttttagtgtaagtagccatgtgcttatttaattccaagatatccatgccctgtaaactttccagtgattacaattgtaaacatatacaaagccttctcagccctgagatccaagcatggagaacgtgaccgtatctgtggtttagtctgtaagagaacaacatatcccaaggctacagcatgatcagtttggaagggaccttagaggagaatacg

SEQ ID NO: 117519 - DNA, 407 bp, Homo sapiens
acatccttcctctctcacgatctcccctctctcacttgtgtctggaaaaaaaagtgataatttgaagagattgtataacttgcccaaggtcacgtttcttttgattgagggaaccaggattcagagtgatactgacccacactcttagccactctgcttaaaatgccagtgatagtaactaactggggagggggaaggaacagccctttgaagtggtgacagctgagctgagacctgatgtgtgagaatacaccaggcatcttgtgaagtgcaagcatagagtctggctggggaaaaggtttctgggtttgaggagagaagggaggtcagtgtgcctggagcagagtgagccaaggagagagaagtggggaacgagggaacagaggatgagagggaagtgcaggtat

SEQ ID NO: 117520 - DNA, 270 bp, Homo sapiens
ctgtgattgtgccactgcactccagcctgggcgacagaaaccttgtgtctggaaaaaaaagtgataatttgaagagattgtataacttgcccaaggtcacgtttcttttgattgagggaaccaggattcagagtgatctggtggggaattttaaagaatcactctggcagccttgtggaaaggtttgtagactacttaggggacttcttccagagttcattgaaagggtgctggtggcaggcccaatagtggtggccatggcagtggaga

SEQ ID NO: 117521 - DNA, 792 bp, Homo sapiens
tgatttttttacacaaaatcaaaataagcatatgaccttttaacttctctagatcaacaattctttcaagctgatagaatgcaattgaatttttcttcatattcagtgtatacactatagcatgtctttaacttgtcttttgaagggagcgttttgagaaaagtttatttccttgaaaatgcttagatgtggactctgaattcttgagttgagtcattatattatcgcagtaattcctgagtgcctgtgtgaatattatttctctcagtattatgcacaatatctcacatgtggtcctgggccctgaaaatgtaacagatacgttgggctttcccccgagtaccaatagatttgttcatggcactgatttatttattcttctcctttatgaatgttatcttccttttcccttctttagagtatagatgtctttattagcaaaataatttttcatttacacccttgaaaccctatgggaggcaaagtgttttaaagctctcttgtgatcttatcttgtcctcattatccagagaggatgcagaggcttacctattttatttggatgaagacagtttataggaagtctgatccaattcatggcttccccctttcccctgtcctttaggtttaaaccatttcaccaagagtttcttacaatgagtgagtaagaccaaataacactgtctcttggcttccttgctgataaccaggacttctcattgctgtttttcacctgccctcttctgtctatattttggcgtcaagtttgtttctctattagcaggtctggga

SEQ ID NO: 117522 - DNA, 458 bp, Homo sapiens
aacacttccgctccctccacacttcaccaccacatcatcaaaggcctatttattgcagttccttttacgcagtatatcaagtccaactttcaacagaaaacatgacaaggtatactaaaagttaagaaaaacacagtatgaacagacagagcatgtaccagatccagattcagatacagcagggatgttggaattatcaggctgggaatttaaaacaactatgtataatactctaagggctctaatggaaagagcagataacacacaagatgcggaacataagcagtgagatggatctaaggaatttaaaaaaatgctagagatcaaaaacactgcgaaataaatgaatgccttagatgggttcattagtagaccggacttagcttaagaaacaatctctgagcttgaggatatgacaataaaaatttccaaaacagaaaatcaaagaaaaaaaaaga

SEQ ID NO: 117523 - DNA, 386 bp, Homo sapiens
cagggtgactctgtctcaatttaaaaaaaagaaagaaagaaaggatatacacacaatgtaaaatcactgcaccgagtcagtataggggctgccttaaactcagggaacagccaaatctgtttatgaattaaaagaacagtcactaaggaggcaagatcaagtatcatcaaaacattaggccttgacatagaacctgaaggattcccccaagccctagggctgtatccagacagaattttcattccataactatcacaaaatgtctctttcatttccagctctgtgttagaggtcagggacataaacggctctcatctccaggccctgccatgatggacctcacagcctaatggggaaaagagacacaaaaccagacaatgacagaa

SEQ ID NO: 117524 - DNA, 576 bp, Homo sapiens
agtcctgtggattccagggctgctcaggagacgcctccatcctggcgtggatgacctcaggatcagccccgtctgccccactcagcccgcagcctggtccccgaaagcgctcagtcagaatccgagagcagtgtggcggcgcccccgtgtggccacaggactgaagacagaggaccccgctcccctttctccccagccaggacgtcccaggctctccccctgttccccgcacctggacgggactctgcacagaagagagtctcccggtctcgtgtcaggctctgagttcatccagcttcccaaaatccatgttgatatgaacgttttctcccacaactgattgactggacttttgtctcagggcagagggaggcctccagaccaaaacagcaggatcaggtctggagctgactcaaccccaaacccttgctaatgcacgacccagtcccccagcctccaggatgggaccttggcctcctgtcccctcccttgttcctgccactgctcctgcaggtggaggctgctcatcccaggaatcagtctgtgagctccaaccttggggcctcggtccaggaa

SEQ ID NO: 117525 - DNA, 440 bp, Homo sapiens
gtagtgttacacgtaaaagagcagaatgtcaaagcttgatgagacctcatcatatatagaattggggactctatgaagacgcctctcagaccaattttttcaggttgaactacacattacatgtttcactccaagcctgagtgactaaaatacaaagcagttcctaagaagcttaagacaatataaaaaggggtaactatattgattcatcttaacacaagacaatatctattttctaagatgcagaacacagagaggagacaggccaagggcacgttttcaactgtgtgaatgatgctgccccctggcccttgccctcccgccttgcctactaccctctgtaggcctcaagactcattacccttctttggcccctatgctggtcacccccaggccacagccactacattctgacagaaagaatcctgaaggcaatgggg

SEQ ID NO: 117526 - DNA, 282 bp, Homo sapiens
aacaggtgagagaagaagtttaagttctgcttacaaatgaggtgagagttcatttaatctattcaccatgaccaaagttacaaagggctctctggttattaagcattcagttattttttcttgttttcaaaaattgatttttttttcagtctaagaaagtaaataaagcttatttctttcaatctttcaaaatattacaatgagattatttgagcctctgttctggtaaaatcatcactttttcaaagatgatttcttgctgttgtctcattatttacatgg

SEQ ID NO: 117527 - DNA, 368 bp, Homo sapiens
agcactagaattgctgagcatctgggcgatagccagagcttgggtagaatgctggccgattatcgagccagaggaggaagaattcagcccaaaaattcagacccttttgctcattcaaaggatgcatcaagtacttcaagtggcaaatcaggaagcaaaaacgagggtgatgaagagagagggcttattctgagtgatgctgtgtggtcaacaaaggtggactgtctgaatcccattaatcaccagagactttgtgtgctcttcagcagctcttctgcccagtccagcaatgctcctagtgcctgtgtcagtccttggtaggattcttttccccctacactattccacataagaacagaattccagca

SEQ ID NO: 117528 - DNA, 608 bp, Homo sapiens
agcactagaattgctgagcatctgggcgatagccagagcttgggtagaatgctggccgattatcgagccagaggaggaagaattcagcccaaaaattcagacccttttgctcattcaaaggatgcatcaagtacttcaagtggcaaatcaggaagcaaaaacgagggtgatgaagagagagggcttattctgagtgatgctgtgtggtcaacaaaggtggactgtctgaatcccattaatcaccagagactttgtgtgctcttcagcagctcttctgcccagtccagcaatgctcctagtgcctgtgtcagtccttggattgtaacaatggaattttatggaaagaatgatcttacattaggaatatttttagagagatactgtttcaggccttcttatcagtgtccaagcatgttctgtgatacccccatggtacatcatattcggcgctttgttcatggccaaggctgtgtgcagataatcctgaaggagttggattctccagtacctggatatcagcatacaattcttacatattcctggtgtagaatctgcaaacaggtaacaccagttgttgctctttccaatgagtcctggtctatgtcatt

SEQ ID NO: 117529 - DNA, 909 bp, Homo sapiens
agcactagaattgctgagcatctgggcgatagccagagcttgggtagaatgctggccgattatcgagccagaggaggaagaattcagcccaaaaattcagacccttttgctcattcaaaggatgcatcaagtacttcaagtggcaaatcaggaagcaaaaacgagggtgatgaagagagagggcttattctgagtgatgctgtgtggtcaacaaaggtggactgtctgaatcccattaatcaccagagactttgtgtgctcttcagcagctcttctgcccagtccagcaatgctcctagtgcctgtgtcagtccttggattgtaacaatggaattttatggaaagaatgatcttacattaggaatatttttagagagatactgtttcaggccttcttatcagtgtccaagcatgttctgtgatacccccatggtacatcatattcggcgctttgttcatggccaaggctgtgtgcagataatcctgaaggagttggattctccagtacctggatatcagcatacaattcttacatattcctggtgtagaatctgcaaacaggtaaatagaccctattactatattttgtttgccatttatttctttatttgtatgttttttttttttcctgaggagaaggtttcctatatggtactggattcgttatttgttatagagctctatttgtcattgttattttaccttccagtgctgtatgttcaatctagtattcgttttttgaagatcccatcttaggaatgtatcagtcattaaataaaatacaagtgccttatacagtaaagtatcttgaggttgtatcatgacatatctcaattttgtttattcattcaacaaacatttagcaccatttatgtgccagatactgtgctaggccctaggaaaaaaaaa

SEQ ID NO: 117530 - DNA, 382 bp, Homo sapiens
aaaaagtagttacataaacctgttatttcgagatatggaggtaaatatcaaaagaatcagctaaagaagttgaaagtggttgcccttggcgataagaaatatgggcagggactgttggtttttctataaagctttgtagaattatttgtctctttaacgtgcaggtacaactttaaataaatgaattttgaaaaacacagaattgggattaactgtgcacattgctgtcaattgttgtagttcaggccactggtaccacacaatttaccaattcaagtttgatatccacctggccatttttaggatgtgtggaatatttatttatagaatttagagctgaaggactttttacattttttaatttattttttcaatgggtttt

SEQ ID NO: 117531 - DNA, 728 bp, Homo sapiens
agtctcagccatggttgcataccttccaagctccaccgcctcttcttcctcgtgggcagatccctgattttgtgtaggacagcacttgaaatgtatttgtgtgctcaacattggtttcctctctggaacctgggatcacttcaggggtggacacgtggcccaaccatgactgatgagacatgcggggaaatctgcagaggcaacttctaggaaaggttgggctcttgcagccaccctgtgactatgagcattctgaccacaatgccagaagacaatacggaattactcagtacatgaagcaccaggaagatgacaacagaagagagaggacccagacattggaatcagcaggttcaaaggattctcctgcctcagcctcctgagtacctgggattacaggcatgcaccactatgcccggctaatttttgtattttttatagagttggggtttcgccatgttgaccaggctggttttgaactcctggcctcaagcaattcactggccttggcatcccaaagtactggaattacacctggctaagcctcttctatttaaaaatagaaataaaagaaaaaaaaaacagatcaaaaccaaaagttatagtgagagtggacaagccctggacaacagcaggcatgaggacttacagcccacatgctcagccaccaggtgcaatctccaacatgtgcgggctttgggaaaacacaatcgggcaagtgaagtttg

SEQ ID NO: 117532 - DNA, 636 bp, Homo sapiens
gcgagtctgcagagctcgcccggaagtagcgttgcgcgcgcagaggatgggcgctgagcagcacacagcccgcggcggggtctcaggatccgcggcgctgcccggggccgggggaaggaagccagccgaggagacgcacgtgccctgagtccgggagcggggagcctcttcatctctccatcctccctccgcgcgcgccctcagccgtcctcgtccgctcaccatgcacctcccctccaagaaagggccacatgcgtgccagggacgcgagccccggccacagggacatagcagcctagaagaaagctgacttcatgagaccgaggatctcgttcgttgatcgatgctacatattcagcatgttagataatgaggttggtgagattgatgaaatcccgcccaccagggccgacccacaaagagccactttatgaagaacatgctcctgaactccactccacaaccagcttttgaaaagaaaaatctgaaaaaatttgacctcagttaaactggtccaaatgcctgagcataaccaaaatctttcctcattcactcttcacgtggaccgtgtttaatttggttgctggtgatcatatttgttttagtaaaggctgtcactctatcttgggcgaagat

SEQ ID NO: 117533 - DNA, 467 bp, Homo sapiens
agcgtctttagtttaaaatgtcaataaagatacaccaggtgtggtggctcatgcctgtaatcttagcatttggagaggctgaggcaaaagaattgcttgaggccaggagttcgggactagcctgggcaacataaaagctgacttcatgagaccgaggatctcgttcgttgatcgatgctacatattcagcatgttagataatgaggttggtgagattgatgaaatcccgcccaccagggccgacccacaaagagccactttatgaagaacatgctcctgaactccactccacaaccagcttttgaaaagaaaaatctgaaaaaatttgacctcagttaaactggtccaaatgcctgagcataaccaaaatctttcctcattcactcttcacgtggaccgtgtttaatttggttgctggtgatcatatttgttttagtaaaggctgtcactctatcttgggcgaagat

SEQ ID NO: 117534 - DNA, 944 bp, Homo sapiens
tgattgcatcgctgcattccagcctgggtgacagagtgaaaccctgtctcaaaaaacaaaacaaaaatccaagtcaggcctcatgagattgagtccctatgacatttccaaggtgagggctttgctctgataatggggatccttcagagaaggctttctcccacctgtgcccgcgaggcggggggtgggggtggtctcagcagttgatcgggagcccacgggcaagcgtggcctctcatatcctctctccccactctgatgtctgccttcacagatacctgctttcccacaacagcaaggaagaaccatggcccaggggtcactgtcattcggggacgtggctgtgggcttcacccggaaagagtggcagcagctggacctggagcagaggaccctgtaccaggatgtgatgctggagaactacagccacctgctctctgtgggctgaactgtctgcttgcttggaaggcccagctggctcagcacaaatcctttaaccgtttctccccaagagggtgtcaagtcagcaaaccagctgtgatctccagtttggagcaggggaaggagccatggatggaggaggaagagataaggacgtggagcttcccagaaagctgacttcatgagaccgaggatctcgttcgttgatcgatgctacatattcagcatgttagataatgaggttggtgagattgatgaaatcccgcccaccagggccgacccacaaagagccactttatgaagaacatgctcctgaactccactccacaaccagcttttgaaaagaaaaatctgaaaaaatttgacctcagttaaactggtccaaatgcctgagcataaccaaaatctttcctcattcactcttcacgtggaccgtgtttaatttggttgctggtgatcatatttgttttagtaaaggctgtcactctatcttgggcgaagat

SEQ ID NO: 117535 - DNA, 736 bp, Homo sapiens
tgattgcatcgctgcattccagcctgggtgacagagtgaaaccctgtctcaaaaaacaaaacaaaaatccaagtcaggcctcatgagattgagtccctatgacatttccaaggtgagggctttgctctgataatggggatccttcagagaaggctttctcccacctgtgcccgcgaggcggggggtgggggtggtctcagcagttgatcgggagcccacgggcaagcgtggcctctcatatcctctctccccactctgatgtctgccttcacagatacctgctttcccacaacagcaaggaagaaccatggcccaggggtcactgtcattcggggacgtggctgtgggcttcacccggaaagagtggcagcagctggacctggagcagaggaccctgtaccaggatgtgatgctggagaactacagccacctgctctctgtgggctgaactgtctgcttgcttggaaggcccagctggctcagcacaaatcctttaaccgtttctccccaagagggtgtcaagtcagcaaaccagctgtgatctccagtttggagcaggggaaggagccatggatggaggaggaagagataaggacgtggagcttcccagaagaagtttggcaagttgctacccagccagatagccaacagcaacacgaagaccaacatttgagccatacgtttctagacaagaaagactggaccggaaatgagcttcatgaatgtaacgaacttg

SEQ ID NO: 117536 - DNA, 228 bp, Homo sapiens
tggccttgggtttcagtggtcagagtctcgatcccacttggagtcctcgtgaagttacctgccaagcgaaacagctctctgtggctgagatgtccaccttttgttttgcaggctgaactgtctgcttgcttggaaggcccagctggctcagcacaaatcctttaaccgtttctccccaagagggtgtcaagtcagcaaaccagctgtgatctccagtttggagcaggg

SEQ ID NO: 117537 - DNA, 1040 bp, Homo sapiens
agctgcttttacgcagtgttttgaggtgcaggactgcaatgcccgcacttccggaccccagactcttcctacggcgactgacacctcagacacgcgttgtggggggcggcgctctggctccggggctgtgcccagcgcgagcgtggccggcacccacttgctgcagagccggcactgcactggggtccttgggggcggctcctccagacgtctctgcgggttgtcgggtgctgccgagttgggttgggggacgctacaggtagtgggtccggagcagcggctggcccctcatctcactgcccttcctcggaccccaccgtcctctggaagcttgtgcagggcacctgccactgtgaccacctggacgcagatacctgctttcccacaacagcaaggaagaaccatggcccaggggtcactgtcattcggggacgtggctgtgggcttcacccggaaagagtggcagcagctggacctggagcagaggaccctgtaccaggatgtgatgctggagaactacagccacctgctctctgtgggctgaactgtctgcttgcttggaaggcccagctggctcagcacaaatcctttaaccgtttctccccaagagggtgtcaagtcagcaaaccagctgtgatctccagtttggagcaggggaaggagccatggatggaggaggaagagataaggacgtggagcttcccagaaagctgacttcatgagaccgaggatctcgttcgttgatcgatgctacatattcagcatgttagataatgaggttggtgagattgatgaaatcccgcccaccagggccgacccacaaagagccactttatgaagaacatgctcctgaactccactccacaaccagcttttgaaaagaaaaatctgaaaaaatttgacctcagttaaactggtccaaatgcctgagcataaccaaaatctttcctcattcactcttcacgtggaccgtgtttaatttggttgctggtgatcatatttgttttagtaaaggctgtcactctatcttgggcgaagat

SEQ ID NO: 117538 - DNA, 737 bp, Homo sapiens
tgaaggctagacttgcgtaggagagcagacacgaggacatgagccagttctgctgagctgttactgtatacctgctttcccacaacagcaaggaagaaccatggcccaggggtcactgtcattcggggacgtggctgtgggcttcacccggaaagagtggcagcagctggacctggagcagaggaccctgtaccaggatgtgatgctggagaactacagccacctgctctctgtgggctgaactgtctgcttgcttggaaggcccagctggctcagcacaaatcctttaaccgtttctccccaagagggtgtcaagtcagcaaaccagctgtgatctccagtttggagcaggggaaggagccatggatggaggaggaagagataaggacgtggagcttcccagaaagctgacttcatgagaccgaggatctcgttcgttgatcgatgctacatattcagcatgttagataatgaggttggtgagattgatgaaatcccgcccaccagggccgacccacaaagagccactttatgaagaacatgctcctgaactccactccacaaccagcttttgaaaagaaaaatctgaaaaaatttgacctcagttaaactggtccaaatgcctgagcataaccaaaatctttcctcattcactcttcacgtggaccgtgtttaatttggttgctggtgatcatatttgttttagtaaaggctgtcactctatcttgggcgaagat

SEQ ID NO: 117539 - DNA, 744 bp, Homo sapiens
cacaatatgtaaaaatgttcattaaaacattgtaaaatgcatctacatttgagaggaaaaagtaaaactctctattcacagataacacaaatatacagaaaatcctaaggaatccactaaaaaatcattagaagtaataaatgaactcagcaagtttacaagatacaggatccactgagattctgataaacatggaaggcaaaaacattgaaaccgtcatttataaactcacataggctccagtgattatctcttcttttctttgttaaaaaaatgcatttaaaaatcattctagaaaattgttaggcaatgttaaatttaccaataactctgactcttctttgcccctaccactttttattatctttgaaaatcaagacaatatttgcccttcttcaatcttttatcatttcttatttttctctggcttctggaaagtgagtaattacctttacgatcacttatgaaatctcttgcatggataattcatttaggcctagaaactcatttaaagcaatcgattgcttgcttaccatgctggattttagtagcctttaaatcatgtttattctaccttttttcattaaaacattagtctctttgggagaggagacaaataaattaaaacttgagttttaccttttctttgtcatctgatagcattatgtcatcagcacgaagcagtagcttccatcctttcttgttcaccctcttgtggcaagtattacttgaaaaacaaaaaaa

SEQ ID NO: 117540 - DNA, 311 bp, Homo sapiens
acatcaacacaaccaccatcagcacgcacatgggggcccgtggacaactcctggctgcaggtgcagagcgtccttgccagacgcaggtaccagggctggcccctatggccccaagtctccccagcccccatggctgagcctgggggctcttggaacaggctccgtgcccaagctggcagatgtgggtggtctctggagccatcagggagctcgtggtttatggtgtaagggctgagagcttggagggggttgtgtgtggggctgtactctgaggtggccagaggcccaggaatgtcatcctgggcacgcca

SEQ ID NO: 117541 - DNA, 717 bp, Homo sapiens
catggctgggttagctcaggtttgtatatttgttttttcaaagaggcagacttttcctaagattagaatccacagtaatgatggaagcaggaaacttaggggcaggccataggtgtaaaatcaaagttgagctgcttctgtgttacagctgtaagcacaggaagttgcccatttttttcaagcactatttctgcatagtcatatatcagctagtgttgtcaacatagacacaagagacaataggaatacgtacatgcaattccaccatcagctaaaaaacccacataagtctttgaagctctcaaataacacgcatgacactgaatggtacattttgatgcactttgaaactcttatctctttagttggtaagtacatttgaacacttaatatgtgctcagcagaagagaaggagaacaagggaagtctaatataaaatcaggattttttcttttctctttgaagccaattagaatgtgtgtatgtgtgtgtgtgtgtgtgtgtgtgtgtgcgtgtgtgtgtgtgtgtgtgtgtattatttagtgtagtaatccttgggttttttttaaaaaaacgtgttttactatgaagtgtaacatacaagaaagtgataacatatgacatatacagcttacaaatggttgtaagaattaatacactttgtaagtgccacccatggtaaaaataagtaggtggagaaggaggagaagaaaagaa

SEQ ID NO: 117542 - DNA, 717 bp, Homo sapiens
gtatacaatacagtgcactactaaggatgtgtctttaaaggcatttacagcacacagttttttttttccttataattttgctgctctttatttgtagtagtagataaggaattaagaaagcaaaaatgagtgctttgactaggtcttttgcctttgaaagtagcattagtaaaatcccctcttcttttttattcttataaaatttacccaattcactctgtcccccagcccatctgtgttcacttgctgttcttgctgctctcagtttttaaaagcttattctaaaattacatcaaagcaaccccattttgacaaaattagaattctggtaggaaacgcttgccatgaggctgtggagagaggcccagcaagacttttgtattttatttcaacctctgtcggttaaacctacaattcggcagatgatataattacctccctggggcaggtctctatctctgccttggagaaatagcaaagtccaaagtagtctcctcattcaaagatgttgcaaacgaaggctgttttgatctttatgtattagcatttgggtgttaatctttctggagctcctgacagaaaattcctttaaatttattatataattctaaaatattggacatatttgtttcaagcatctgtcagtatccttactctttccatttcactccccactgccttaattagtcatcaggtcctactgatttttaactccta

SEQ ID NO: 117543 - DNA, 483 bp, Homo sapiens
aagagctgttaccctgcatttctctgaccctgaattcatgtcttacacagatgcatctgatcaataaagcctaggtcatatgcttgtgccctagctgcaaggaatactaggaaattgagttctgactctataaaacatgaacatgcaaatttatccaacattgagaggctatttgaaatgagaaaccacaaatacagatcaagtctatgcttccaatcaagatcctcaaacctgacagattataactaagccttgtacaaacaagactctctctgttcctcatatggaggtaagaaccagagacttatcagttattgcacacagctccaatatcagaatctctcggtgatatccccctccttcctgttttctcatataacccatgaagtaaactgcaaaaagggggcagcctcctgagcagccaggaccacaggctcacgcagccatgcccaaaacacaaaagttaacttttgtgttttttgt

SEQ ID NO: 117544 - DNA, 321 bp, Homo sapiens
gaagatttcactgaggatgggccaccctagtggagaactgcgagcaaatctgtggactcatccatttattattttcatgggtcttttgaaatcttctctgtagtcttattcttattctgtagaagagtagttttctaacaactactaggtcatgtaattagttttatgggttggatctgcatttgtttaagtgatatcagagaataatgatattaaagagcatcataggtaataaaagaaagttttatttaagtgcctttctgtttcgtgtgtgtgtgtgtgtgtgtgtgtgtgtgtgtgtgtgtgtgtttgtcattatgg

SEQ ID NO: 117545 - DNA, 349 bp, Homo sapiens
aaaacatgtcatggacttcactggaagttgagcctggaactcattcagataatgccttctttatcccacgatcatatagattaagttagaggctctaagaaatttgggattgtgtgtccagagatatataatgtgcagttaaaatgctccacccttgctgggagattggtactggagagaaatgatggttaagcctgaagcttcaaggtcccaggctaaaaagagacaagatcttttattccttgagtgaaagtagtaacaacaaactaggggcaatgaaaaggagttctcaaatttgctagagaaccgtgctggcatcttaaaacttctagaagctttggaactcgat

SEQ ID NO: 117546 - DNA, 304 bp, Homo sapiens
ctggatgcaaacatccaggtgataaaaggggagcaacacaggtgagggctgggggaagtggatgcagtgaggctctgcaagatgtgtgagctgtacggtgcacagtgcctggtgatggagtggcggctgggtgggaacagggagacgatcagggaactccagggaccagccagtaggctgaagcaggggctgctcttggagaggggacatattaggagaaagtggcaggtactgggaaagggggactgtcagctgtccctgtggtacaggaccctgctgtgcttatggccagggctcagtacag

SEQ ID NO: 117547 - DNA, 818 bp, Homo sapiens
ggctgaggtgggcagatcatttgagcccaggagtttgagaccagcctgggcaacatggtgaaaccctgtctctacccaaaatacaaaaattagccgggtatggtgctgcgtgcctgtagtcccagctacttaggaggctgaagtgggagaatcgcttgagcctgggaggttgaggatgcagtgagctgtgattgtgccactgtactttatcctgagggagaccctgtctcaaaaacaaaaaacaaaaaccaacaaacaaaaagctgctatgaacatgcttatacaagttgttattatttttttgaagagatatgtcttcatgtctcttggataaaaactacaagaggaattctgggttaaagggcaggtttaactttctagaaaactgccaaacctctttccagtgtggtcatatcattcatatctacacatgggggtgtgtgagagttttagttgctccatgtacttacaacattggatgttgtcagacttgtcaggtttagccattctagtgagtatttagtgatatcttgatatagtttgaatttgcatttccctagtgactaatgaggctgaccactattcatgtacttttgggcatctgtatatcttgctttgtgaagtaccatttttttaagttatttgtcatcttatattgaattgtaggagtttatatatatagatatagatgtagatatattaggatcaaagccctttatgagatacatgttttgcaaatatttctcccaggctgtggcttacctattcatattcttagcaaaatcttttaatgagcagaggttttaaattttggtgaa

SEQ ID NO: 117548 - DNA, 471 bp, Homo sapiens
tgagttgtgaaggtgtctagagaaagggaattgcaggcagatggaacagcaagtgagaatactgagaggtagaatagaaaatactgataggtgatttcaaatttaggttgggtcagagaagctctgtctgagaaattgactttttagttaagattgaggaactagcacttcaagcagcaggaatagcaaattttcatcaatcatactaaaggacagactgacgtacattccttttgtctctgtagaaacttatataacaaaatggttgttaaacagacaatcaaagatgtagtcaaaaaatgcactaaataaggtatgttaggcactgaattaatgcctaacagcaatgcttcttttgattttgtgatgtttgtgattttgccaactttttaaaatttataatttttgagatgtcttttgtcattctaaataaatactcattacacatttttcagcctagttttaaaaaca

SEQ ID NO: 117549 - DNA, 920 bp, Homo sapiens
ggcttcccaaagtgctgagattacagacgtgagccactgcgcacagctgaatgaattcttttaactggatcctctgtaaaaaacacattacgcttatttgtgaagaacaaaggattgttttctcttcttctctcgttggggtgcccggttttttgtttctcttctacgatggctgtattcacttacttggtctgcccagtgctgcgacgtgcacgtgggcaacgattctttgcgcctcacttgccaaccctcttaccttccctgggggttcaaagcaacttcttatctgtttcttccagtcgctttccctttggaagctcagccctgcggcaaactatacaaagggtcagactctcgaccaaactcaacgagccacccgtgggcctataaagttctatcatggggtcattctctttctaacggttacgcaggcaattggggccgttcttttctgggcccccattggttttgggaggtcccaaatgcggctctttgggacacgttccacggaaaacctttccccttttgagaccacctctccaagcggttcggcattccccaattcctttggcccccttatataggggcccttttcccccataaaagaaggtgtggccattgggggcgaaactttataaccaaggcggccctgttttgcaatggccccctaaatcccggtggaaacccccgtgtgggagtccccccccccaaaacaagggggcaatttgggggttctattcttcccaacggtttgggggccacaagcgcacacccttcttgggtcttcaaacacggggcaactataaagtagcggggggggcgcggattttttaaaacccctttgtttcgtggctcaacaacatacctctttataaaacacgctcttctgatgggcggccccccaacgtcgtgtcgctaac

SEQ ID NO: 117550 - DNA, 294 bp, Homo sapiens
gttaagtacaatgcagagaactgcaacaggatgacccaggagtgattaggtggttaggtgagattgggtaataaatgaaggagtcaccacggaatctgaatagcattaagaagccaatgcaggtgagacagttgctcattctgaagcagggaacagcagaatcaacgaccctaaggaaaaaggaggctgacatgtttacagaaacagaagaaaggccaataggactgaagcttagtgggccaggaggataatgataataagatgaatttggaaaggcaagcagggaccagctca

SEQ ID NO: 117551 - DNA, 234 bp, Homo sapiens
cagagtctcactgtgttgcccaggctgtcttgactcctggcctcgagtgactcacctgactcagcctcccaaaatgctgggattccaggcgagagccactgcacacagccatgtgtttgtcttaatggccttgtatcggaactcttggtgacagaggctaatgagcagccactggtgggagagtaggggcggcgctcaccctgccccctgacccaggggtgggctcaccctaca

SEQ ID NO: 117552 - DNA, 398 bp, Homo sapiens
gttcatcttctctctctttgggcttgcagtggatctgccatgatccctttgattttcctaaatgttacccacatcttgtaatacccatatctttccttatccaaatttgccctattacatagttaggggaactatctgagacagataaactctgataaagagtgtggaatttcaaatctagaaattcatactctctaaactattaatagagtaagaaatagagatacatgtatattacctatggtcatgaaaataactaaaacgataactaaatataaaattataatgtcaagaaaatgtataaggaagacatgagagggaactagagtagtgtaaagagataagttatttgtctcccaaattcaagtgaggaaagaaaagaagttttataggaggaa

SEQ ID NO: 117553 - DNA, 712 bp, Homo sapiens
agcagagatgacagagataaatgagagagcctgaggaattcatgctgctggcattggttcatccctgcccgatgcgcaccactcagagacctcaggtcaatgagccttgcttacttctcctctaatttgagttcaattgtcatttataagaaagtcccgcatacgccaggatggtggctctcacctgtaatcccagtactttgagaggccaggcaggagcatcacttgagcctgggagttcgagactagcctgggcaacatagggagagcctgtctctactaaaaataaaaaaaattagccaggtgtggtggcgcgcacatgtggttccagctactcaggaggctgaggtgggagaatcacttgggcctgggaggtcaaggctgcagtggcgccatgatggcctgggcaacagagtgagaggctgtctcaaaaaaaaaaaaaaatttactgggtgcagtggctcacccttgttaatcccagcactttgtgaggctgaggggggccaatcacctgaggtcaggactttgagaccagcctggtcaacatggcaaaaccccatctctactaaaaatacaaaaattagctgggtgtggtggcgggtgcctgtaattccagctacttgggaggctgaggcaggagaatcacttgaacccgggaggtggaggttacagtgagccgatactgcaccactgcactcaagcctgggcgaca

SEQ ID NO: 117554 - DNA, 392 bp, Homo sapiens
gcacgaggatgattttggttagatgaaatttcaaagtggaccatagaatatataatgagactaaaccatgaataatgtattaacttatttaaaaatgcatatcaagtttggccgggcgcagtggctcatgcctgtaatcccagcactttgggaggccgaggtgggtggatcagctaaggtcaggagttggagactagcctggccaacatggtgaaaccctgtctctactaaaaatacaaaaattagttgggcatggtggcatgctcctgtaatcctagctactcaggaggtggaggcatgagaatcacttgaacctgggaggcggaggttgctgatagctgagatcggaccactgctctccagcctgggcaacagagtgacattcagtgtca

SEQ ID NO: 117555 - DNA, 287 bp, Homo sapiens
acacacacacacacacggagagagagattgattaaggaatgtgaaatatttgctttagacttaaatgggttccagcaatacctggatccacattgatttcagatcagacatttaatgtatgcaagtcctgttcaaacagaaaccagagagcgtgcttcgggagagcctagttctaatccagggagccaggcttatgtgtgtgaaagaaccagacagacttgaatgttgaattctgctttcaccaatcataaagtgtgcaaccttgggaaaccattttattttacgcg

SEQ ID NO: 117556 - DNA, 587 bp, Homo sapiens
actgacttagcagggttcttcctgaaagcagattttacaaggaagggcacaactgagcctagaagaaggttccggagcctgactgtagttcggtcaagcagagactctttgtccatcttcacaatacatgatctaagaggtagttagcattatcccccccattcacagatgagaaaagaggctaaagagggttaaggaatttgtccaaaagtgcatacctggtcagtggcagagccaaaattctaataaaacagtcagtctgaccccaaaattgaaactcttcacaaaaacctccagacttggctgggtgtgatggttcatgcctataatcccaacactttgggaggctgaggtaggtggatggcctgagttcaggagttaagagaccagctgggccaacatggtgaaaccctgtctctaccaaaaatacaaaaaaattaaccaggcatagtggcccatgcctgtggtcccaactactcaggaggctgaggtgggaggatcgcttgaacctgggagtggggaggttgcagtgagccaagatcgtgccactgcactccagcctggatgacagactgagaccccgtctc

SEQ ID NO: 117557 - DNA, 292 bp, Homo sapiens
tcatctctcagtggccataacacaagctaagtcctttaggacccttggccctgataccctgaacatgccctgttcctactctctcactccagttaccacaatttctctccagcaactggaagaatcacccctattaaaaagaggtagctcaaaagtaggaaaaagttcttgttggtctgcccttacagtgaacacacataactctgtatcgcccaccaagattacagacctttaacaggccaaaggtccctgggcttagccaaaccaactgaatcacaacagccttgatatc

SEQ ID NO: 117558 - DNA, 540 bp, Homo sapiens
ttgcattttactagaagtttgtagcggtggttttctagaaagtaacagcctgaagacatgactaggaagctgaaaatttcttttgccccttctaagatagttacaaaatgatgccatcaaattatactcttttttcttaagagcaaagctgtgtaaaatagtattcagtaatcatctttaagatattgtcaacattactaagtacaagtatatatatatatatttagtgaaaaatgctgtaatgtgcctcatgaattggtattttaatacagtaatatgctatggtagcatggagtattctaagatattctgattatctcatttagagaaaggtattttagaacttgtaccaatttataatataccaccagaaggggaatgttcatgtttaatagttaacttaaaaccatagatatttttggtacattgatacatttcccgtgaaattttcttaatgacaatggatttaataataaaagaaggtactttgtgaataataaagcttgcactattctagaaagttattctagaaagtgatac

SEQ ID NO: 117559 - DNA, 215 bp, Homo sapiens
aatttatttaatgtttcttgaatataacgtggctatgtatatcaagagccctaaaaatatgcataccctttgactcagtaattccacttgtggaaaatagtctgaaatctggcaaggttttctactcaaaatgtttggcacagcatggtttataataaggaatattgaaaacaaccaaaagttgcaaaaacattccactggtagaatattattca

SEQ ID NO: 117560 - DNA, 391 bp, Homo sapiens
gtttatgggtcagcatatactggttgatggcactcagctttgtaaactacttcctacgatgcaaggtgcaaaccgtcttcctctttgataattgtactctcctactggcaaagctgggaaagagggataggaaaccattaacaactgtgatgtgatgccgaacgggttctgccaaaggtcatggtgtcacttatttactagattctccaatttcaaacaggaagagcagaaactaagcagctaaactgtgatcaaggtactacttttgctaatggagacccaactaataaagtacagtgctgacttacatggactggtgtcagaggctatagcaggtgttttctgccgcctctccgactaaattaatgttatctaaatcccaggggaaaag

SEQ ID NO: 117561 - DNA, 536 bp, Homo sapiens
acacacctccttttatcttcaaagccgttttcaaaaactgaattcagaaacagcctagcctcctgggaggcactccatgggagggcttctgcaggccagttttaaagagaggagtgaggttcagacacctgcgggggtcagaaccagaaggaaaaaatgtctcctctgaagcaggtgctctgttctgactacccgccactcttccagagagttctacaactttgcaagcccacccttcaaagggagcagatcaacaatgattcctttgagacacagccttgaaaatgggatgtatacaatactaccgttctcatctgacttcttgttcctacagattaagtggcatggggcaggggtggaatttctatgaattgctcaataacaagccctgcctctagggtgcaggtcatcactacctagtgactctcatatccatagcattataaatcggtcaaatgataagcctgcaccctatgcctcttacttgaacatcaaacaggattcaccaggaggtctcttccactctaccttggttt

SEQ ID NO: 117562 - DNA, 728 bp, Homo sapiens
caagtgaaaacactgggtccgagttctccctggggcttatggcagaggaagccaaaatagctcgcctttatcagggctaaatcgtggaactaaatcagggttctgctagcggtggtggctaagggaaaccgctggtgataaaagcaaagaaatgggggagaagccgtgggggagggagccacagtcacactccttacagaataaactatctcgcctaggggcagtttcagcagaaggcttcagagacccccggaagcagacagaaagaagtccacatgccttgctggctgaggagcaaatcgggtcatgaatttcatctcagcaatagccaataaacacagcagctgctatacccagccctgagacatctagcacaggagactttataaagaacaagccgatctcctctggcaagcaagccacaaatggagaaggtcttggcaggatttttgtgtcctttattcatatggtatcagcacctaaaacagtgcctggcattaaagcactaggtaaatatgagtgactgaagaaatacatgcgtggggagagaatataaaccagcagcaccagttagtaactatacaaaggtaagcaagccattcagtctctaggagcctctatttcttcatcaggaaaatagggtaatgacacctactttggaagggcttataagaattaaggccgggcacagtggctcatgcctgtaatctcagcactttgggaagcca

SEQ ID NO: 117563 - DNA, 618 bp, Homo sapiens
ggtgcggctactttagccctgagcgtgctctgcggctgcctgcgggtctcagctagtgtccgacccctctcttcgcggactccacgccgagcagccaccctgagccaagagccggaagtcccggcattggcggcctggacagcctcgcaccggccaatcaaggagaacctcaagaacaacttcctctatgacttcctctacggcggtgtcggcctaacagctccacgggagtgtggacgaggagctgagcaaaaaaattccagaagtgagatgaaatgaacatcctggcgacatatcatccagcagacaaagactatggtttatgaaaatagatgaaccaagcacttcttcccatcgtattataggtgatgatgaagatgtatgtagtgatacagagaccactgaaaccatggaacgagatatcttagctaagaaattcgctgctgctgaaggctcggagccaaagtatagggttcaggaataagatagcagcagagaggaggatagtgacctctcacctgaagaacaagaaaaaaagcgacaatttgaaatgaaaaggaagtttcactacaatgaaggactcaatatcatcaaactagctagacaatttcaaaagac

SEQ ID NO: 117564 - DNA, 422 bp, Homo sapiens
gcagtgggattcttgaagccaggagtttgagaccagcctgggcaacatagcaagatcccatctgttaaaaaaaaaaattagctgggtgtggtgatgtgtgcctatagtcccagctactcaagaggttgaggtgggaggatcgcatgagcccaggaggccacagtgagccatgttcgtgccactgcactccagcctgggcaacagagcaagacagcatctctttttttgttgtaagacaaacaatcccatagcatttattgccatcttgtaataacataagggtaatcaaaacaatatgaataaatgttcatattggacaaaggacagctaaaaacaaactgtatccttctcaacaatttctcacttcattgatcatttctagctggagacactttgtagcagaggaatacctccttttagca

SEQ ID NO: 117565 - DNA, 306 bp, Homo sapiens
ctgcggtgaacatgtgtgtgcatctatctttataagagaatgatttctattcctttgagtacatacccaggaaggggactgctgggtcaaatggtattttgggttctaggtctttgaggaatcaccacactgtcttccacaatggttgaactaattaacacttccagcaacagtgtaaaagcgttcctatttctccacagccttgccatcatctgttgtttcttgattttttaataattacagaatggcatttttctagctgaaagaaacacctattcaggtaaaaacacatggaaagacccagag

SEQ ID NO: 117566 - DNA, 766 bp, Homo sapiens
agacccattcctataagaaatatgactgaagagcccagctgtctcactttgataaccaattcttccatttgcatttccattgatgtgtattgggccaagagcagagctttttcttgtggttaatatctgtttaatccagaagaagaccctaaggaaagagcttgaggaagagatgactgaagccattacagaagcagcagtagcctcaagtgaggaggtgtcagaggaaagagacgacctggggcctcttgaattacatgacagtggtacctttcaacaagtcgtgaaccttctggacatcattgacagcgagtcagcaaagacggacacaacaggggcaggccttgacatgcggaagaccctggcctcggtgataatcatggagaaggccaccactgagccttctgtagtgataaacactctcatccgctgcctgcaggtgccagagatttccacccagcgcaaggtcaacatttacaacatcctccaggacatcatccagcaggagggggagctggaggagcagtgcgtgcagaggctggtggccattgcctccaaggagatgagggagatcccagagatggagggctatatgaaggcagaggtggccagcgacacactggtggctctgtcccgaaaccacttcagcttggtcatgtacgagctgcagcaccacctcaagcccctcaacctcactgatgaatttgtcatcatcacactggccaagctggccaacggcaatggtaggggcttgagggccctcagc

SEQ ID NO: 117567 - DNA, 399 bp, Homo sapiens
acaggcacccaccaccacacctggctgatttttgtatttttagtagagatggtgtttcaccatgttggatgggctggtctcaaactgctgacctcaagtgatctgcctgcttcagccttccaaagtgctgggattacaggtgtgaaccaccacacccagcttcactgagctttttaaatgtcattactttgaattctatttctggaatttaataaatttctttgtcattggaatctgttgctggtgaattgttttgcttcttccaagtttttgaatttgcttttatagacagtgactttttctcaaagatgtacctatgatattggttgggttggcatgttggcattgattcttggcacttgtagtattgtagtctctgtataattcctttggctataa

SEQ ID NO: 117568 - DNA, 344 bp, Homo sapiens
ttgatttcagaaggcaacaaaatgaataaaatatgctgtctctcttgagacacttacagataggagtggaggaaaagaaaagggaaatcaagcataccgttaagaaaggtaataataataattgaatgcctgctgtatcctactaactgtgctgggtcatagattttttttaaatgcattttgttatgtagatttgaggttgagtcatagattttcttgtttaattttcacagcaatccttaaagattgctattattaaacctattttagagttttggaaacaatttcagagtagcatgttctagttcataccacaagtgaataacaaagttctgtccctctga

SEQ ID NO: 117569 - DNA, 297 bp, Homo sapiens
actgggttgtcagtcatggtgacccttgcaggccatggagacctgcacttccccagatgacatgaaaatttggggagagggggccgggtgcggtggctcatgtctgtaatcccagcactttgggaggccaagacgggtggatcacgaggtcaggagattgagactattctggctaacacggtgaaaccccgtctctactaaaaaaaaaaacataaaaattagttgggcgtggtggcgggcgcctgtagtcccagctacttgggaggctgaggcaggagaatggcgtgaacccaggag

SEQ ID NO: 117570 - DNA, 839 bp, Homo sapiens
tagcaaaacttcactgtgaacaagacacaccaatggaaactcctaagtcttttagatgaattattttggggtttttttgagagagagtcttgctttgtcacccatgttgggagtgcagtatcatgatcatggctcacagcagctttgacctcccaggctcaagtgatcctctcacctcacacccctgagtagctgggaccacaggcacacaccacatgcctggctaattttttttttttaatagagatgcggtctctctgtgttgtccaggctggtctcagactcctgggctcaagttatccctcctacctcagcttcccaaagtgctggaataataggcatgagttgccatgctcagcctagctggattgttttttcattgaggtataattcacatgactatattggtttttgcaggtttgctagacagaaaagtcagggaatggtgtcttcataggggacctgaatttcagcaaatccctgtcttgcccggcatcctgtggaagcctcagagcattctgcgttggatgacagttacatgggctcattaacatgcgataattataactgcagattaactctttatattttcttttctgttgggtttccttccttacagtaattttttcttctttggtatttttatttcctttatgtctgcctctcttcttttttttggctcctccctttcttgcaaatacatttcctgagcatctgctctgtgccagccctttgctaagtgctgggtgcacagtggtcagcaggactgcccggttcctgccctcctggagctcacagcctagcagaggtggagcacagtcagtcacatcatgtctgca

SEQ ID NO: 117571 - DNA, 374 bp, Homo sapiens
aagggcaggtgggcctagagtcacttccttttcgcagaggacgattaagctgactttatgctcataggagagttgtttgggagataattaacacttcctttccaaagaggaattaagaggttagaaaatgtgtgtctagaagctgggaagaggttggaggattgctcagtgaggagcagcaagtcagtgtctctttcagatatgaaggaggtgaagtagaatttataagaggtaaaaagagctaagaacactttgttttaacctataacttaaattcctttgaactcttgactcgttgggggtattacattgtttatagtaggtattagaggggttttcagttttcaatgctctattcatttctcatagtctct

SEQ ID NO: 117572 - DNA, 351 bp, Homo sapiens
ctatttaaagtttataccataatggtgagaatgtcacctagcacttcttaaaaaatgaaatgttaatgttcactaatggccaaattgacttcatttttaaaaatcagtactatggaaggtattgttcaaaccactagttccatatgtctccacagaaggctaagaatatatttcccaaaaaagtcttacttttttaatggaggggatatattagtgtcttcaaatttttctattattattcctcactttatgcagcacacgtgttcctgaaaaggggtttggaaactgaactttaacaacaaaataaattgcatttttaataactaccaaaacttgctacttaaaggtatt

SEQ ID NO: 117573 - DNA, 336 bp, Homo sapiens
caatctttattgaatacctgttatgagccaagcacagccctgggctctgaagatccagatgtgagcaagacagaccaaaatctctgtccactcagggcttacattctagtagtggaaacagacaataaacaacactaagtaaaatctatagattaaataataagtgctaaggagcaaaataatgcagggaaagggatatgaaatgttaagaaaggctaaaacatttttgaaagggtagacagagatggcctcatagacaaggttagttttgtttttggtattattttggacttacagaaaactcagtgataatacagagagttcctagaatttctg

SEQ ID NO: 117574 - DNA, 783 bp, Homo sapiens
cctctcaccacatcctgaggccactcatcattgaggccattttctttctttctttctttctttttttcatatttttgagatggagtctcgctttgttgccaggctggagtgcagtgacgcgatctcagctcactgcaacctccgcctcacgggttcaagcgagtctcctgcctcagcctcccgagtagctggaatcacaggcgcgtgccaccacacccacctaatgtttgcatttttagtaaagacggggtttcaccatgttggccaggatggtctcgatctcttgacttcgtgatctgcccacctcggcctcccaaagtgctgagattacaggtgtgagccaccacgcccggccgaggccattttcttctacctccaatagatacatttagaatctgtctcttttacttcatttcccacagctaacagtccattccaggccaccatcacaccatcatcttttgcctgaagtgcataagcctccaacttggtccctaaacttctctacccagtgagctctacacaaaccagaccatgctccctccccattaaggcccctcacagcttcccagtgcattctgacagtgctctctgcacctcttcgccctgtcccacaatgcatgagctctcttattcttttttttatgagacagggtctcactctgttgcccagcccagattgtagtggtgcaatcatagctcacaacagccttgacatcctgggctcaagcgatacccccatctcagcctcctgagtagctgggactacaggcatgcgctacc

SEQ ID NO: 117575 - DNA, 266 bp, Homo sapiens
tgcaattttagaaaatatggctggggagggcttcactgagactgtaacatttgagttgtgccctgaactaagtgggggagtggacctagcagatatccagaaggaagagcattccgggcatctggaatctggaatgggaagcagaaaggctctgaggccagaatgtgactggcgcctgctttcaggaggccagtgtggctggagtcctataagtagaggagaagggtcagctcagtggttcatgcctgtaatcccagcactttagg

SEQ ID NO: 117576 - DNA, 234 bp, Homo sapiens
gaaatgttttcaccaagattagctcctcccacagcccaggcagaattcctgatccttttgttgtacaatttccccacttctaatgtaagctaaatgcaggctttcgtggagaggaaataatgtacgcttgaaagttaacatcacagtagaaaaggctcccggacaagaagggcagaccaccaacacaggaggttgatgataaagctactaggaactttcacccagctgtttcca

SEQ ID NO: 117577 - DNA, 228 bp, Homo sapiens
tgtatcttctatggttccttttgaaaactggaatataatccgcaccaggaggcagtgctgtgctggagataataaacatatctagtgctcgatctatttatatctgcagttcatgaatttatttgtctaccaacacaagtttctttgttttttttttttttttttttttggacggaatccccccttggcccccaaggtggaatgtgaggggccgcacctcgggcacag

SEQ ID NO: 117578 - DNA, 110 bp, Homo sapiens
tagggaggctgaggcaggataatcgcttgaacctgggatgccgaagcggcagtaagctgagatcacagcactgcaccccaacctgggcaatgtagtgggactccatctca

SEQ ID NO: 117579 - DNA, 870 bp, Homo sapiens
  misc_feature (870)..(870): n is a, c, g, or t
agcggctgggtggaaactgggatttgaacggcgggcaggaagtactcgagtagggagtctggcctagtgaaagtctctgtttcctccttttcttacttttcactcaataaaaccctgctttacacacccttcaaaccatctgtgagcctgaatttttacggccatgggacagacaaggatcctgtctttatctaaactaaggaaaagtcctgcaacatttgtggtgcacaacgtggggctcgagaagtggaaaacgcctattttggagtgaaaccagggccgccttatgagctaaacagagtgtgttacagcttcaatagactaaacaagctctaaatttatcttcctatggtcacgggatctcatatattctggctgtcattgtcataataagccactcttggtcatatggaaaagcattcagctgctccctgcctttgctcacagcgtgtggtactctcttagaagctattcctggttcattggtaatttgctaaaagaatgccagtgggaacagaacagaagcattttcaagattaaattggcaatggttgtgactgattggatgaaggaagtaagggggagagattcatcagagaaagaaggcttctttaagcagcagaattgaggaatgagtcagaaaataaaagagcaaacaggctcatgggcagaagggactagccttatctgagtctttgaactttgaacctttgagttaatgctagaatgaggaattgtgaaagatcaccagggagccttgggaagctaaggaaaaaggcaatgaaaggcttttacctagaacctgagagacaacatggcctaatactcttgattcagaatcctggtctctgaataaagattaggatagcn

SEQ ID NO: 117580 - DNA, 249 bp, Homo sapiens
ctgaaaatagtctgctatgcttagaacacaggctggggaaaggagaaagagttgaagctggagaagagtgctggggaaaattcatgaggtcttagaccctgctgaggagtttggcctttcttttgaatgatccaggtaagagagtgacacaaataggcagactgaaaagcattaagtctggagttaaggagagctctgttgggaacgtcctcacgacatggcagctggcttaccccagagtgagtgatt

SEQ ID NO: 117581 - DNA, 470 bp, Homo sapiens
cacctcccagttctctctcaccctctctctccctgttacgtctctctccgatctctcctgcactctcagctctcctcctctctcttcctcctggccttttttccctctctgattctcaggcctggccatgttccatccagctcagccctgtccacaggagagtaggaagcagtgcacatcctaccacacccagcactcactccagcccagcagcccaggcgcaggcccaggaggaggagatgagggagatgaggtactgacagataaaaatcccttcccggagatccccagcaggtaagatgtggctaactgggagctgattgaaaagggagggacctgttcaccctgcttgttttcccacacagctgcacactccagggatgcagccaagcctgcatggcccctgcaaccaacctcccagtgcctgaaaagggccaggctcagccttggggagagcagtgtttgggcct

SEQ ID NO: 117582 - DNA, 181 bp, Homo sapiens
cctcatcagctctggggtgaagattgtaggactgtaaaaaaagaagcatcaagagaaaaaaaaaagctgcctaccaaacatagcaaggacaaaacagagtaccacagtcagaaaaagagggcactggtagagccctggaggataaaagatgctcattaaggtttctgaaatgtcttttctt

SEQ ID NO: 117583 - DNA, 755 bp, Homo sapiens
aacagctctacctgcagtggggtaggagttcccctgggtaacaccctgtaatgccaagagaggttttaggattgagtttcagggtggagtccagaaatgggggtgtaaagtaatcgtttcaaagaagtgtagtctcaagtgtcgttgggttgttagggttggggaaaggagagctgcagctgtgaatgtaaatatatagatcactcgttcagaaatcagggctgcttgtcacaaatgcagtgctgccaggttcctgagatcatacccacataccctcctagtgagagagtctgctaggatggggagcatcaaaactggcttatctttgtgcctctggggtgtttgcacaccaatttatatttaccatagtaatatagtatgtaaagcttagtaggttaagaaatgttaaaataaaacttagatttatcctagattatgtttttgttaaaacttggccattctttggaaacagaactattttaagtattctattagcctgttattttttcctgaagagactttgttgctattgttaatatttatccctaccttttctttaaagcaatagagttaatgaagggaagtatatttatttatacctgtattctgtgttcttgctactagaagtgtaacttggggaccagcagcttctgtatcaccagggtgttggttagaaatgcagagtgactccaccccatagccactgggtcagaacatgcattttaacaagtgattgcaggttcaagtttaagaga

SEQ ID NO: 117584 - DNA, 356 bp, Homo sapiens
tgactattaatcttaaaaagggcgagaaaggaaagattaggtcagatcagaaagtaaaaatttgccctcccattcatcaggctaggaagtcagacacagatgaaacattaaaaagaaacaacgtttcttcaaagattaggtcagatcggaaagtaaaaaatctgccctcccattcatcaggctaggaagtcagacacagatgaaacgttaaaaagaaataacgtttccttaagtgactccttgcaattataaatgtgtcataaggatacccttcgtgggtgactacttattcttactgagaaaaattgttttctaaaaatcacagaccatcagaaactttgttgtttgccattgtg

SEQ ID NO: 117585 - DNA, 383 bp, Homo sapiens
gagatagattacttaggaaatgtaaaactaataatgcacccttatggtggagaacgctggcagtcacctccaagagacccaacttggcttcactaataatgggaaggctatgagtgaagtgggcttcacctagaactgacgtactccctgacgtgaggcaatatgaagtacccaataccaccactgaggtgttcttgccaaaaaatatttaatctgcatctaatcaaacctctcaacatatttccagtctacaggaaatataggagagaaaggaacaagttaaagcataacatgaggaaaccatcaaatccagaatacaggatactttacaaaacaatctggctaaattcttacaaaagtcaattttctttaaaaataaaaat

SEQ ID NO: 117586 - DNA, 381 bp, Homo sapiens
tactgcatgttctcgcttataagtgggagctaacattaaggatgcatggacgtaaatacaggaacactagacactgtggactaccagagggtgagggtgtcggtttaaaaactacgcatcaggtactatgctcactacctgggtgacgggatccatattccaaaccttagcatcaagcaatattctcacataacaaatctgctcgtatatcccctgtatctaaaataaaagttgaaataaaataaaaataaaagtagagctactgggaaggcttaaaggggcaacatgggtaaggggacggctttgatccatttgatttccctgagagtgcccttccttcctttgttgagagacagcagctccacatgcatgcaccccggg

SEQ ID NO: 117587 - DNA, 303 bp, Homo sapiens
tcaaaagagaatggctatacatcaggctgctttataacaccaggttcacttcaaaatactactttatctcttgacaaaatccgaaacaagatatttcaactgcaatagtagggttaaatcaattccattctgatgaacttgtggtttgctcgcatgcctgtaatgagaataaacactggtaaaatacctctctaactggcaatttgtgatttaaaacattttgtcaatttcaggttggtatgtactctccatggatgttaactgacattacccaggaagagggatttatggtagtgaggcagc

SEQ ID NO: 117588 - DNA, 289 bp, Homo sapiens
tcaaaagagaatggctatacatcaggctgctttataacaccaggttcacttcaaaatactactttatctcttgacaaaatccgaaacaagatatttcaactgcaatagtagggttaaatcaattccatctgctattctactactcctgaaggattattcaggccccctcccttccctacacatcaagctcgaggatttgcccccgcccagtactggcaaattagctttactcaacatgccccgagtcacaaaaactaaaatacctcttagtctaagtagacactttcac

SEQ ID NO: 117589 - DNA, 153 bp, Homo sapiens
atgtgccattctggagagagatgttgatagtctaggaggctatgcatgtgtggaggcagggggtatatgggaactttctgtacttcctgctcaattttgctgtgaatctgaaactactctaaaaaataaggtctattttcttaaaggtcattt

SEQ ID NO: 117590 - DNA, 361 bp, Homo sapiens
tggtctcgaactcttggcttcaagcaattctcttgcattggcctctcaaagtgcatggattacaggcatgagccaccatgcctggcctgaactctgacttctgagccaggccctgtggggtgagctttggctcctgtcttgagagctgcagattctctctcagcctggctgcagattccagattcttcctgtcaatgccatctctcagataggtcccagccacttatatcctccacagccccttctggaagtgtctttgtctccctgaacaaaaattcaatatggaagcagagttagccaggcacggtgcctcacactcgtaatcccagcactttgtgaggctgaggcaggagggttgctt

SEQ ID NO: 117591 - DNA, 302 bp, Homo sapiens
caatcatggtggaagacaaaggaagagcaaggggatgtctcacatggcagcagacaaagagagaaaaatgagagccaagtgaaagggaaacctcttttaaaaccatgaaatcttgtgagacttgttcccttaccaggagaacagtatggagaaactgcctccatgattcagttatctcccacagggttccccctaaaacacatgggaattattggagctacaattcaagacgagatttgggtggggacacagccaaaccatattaatcctaaatctcattatcaccagatattttaattttc

SEQ ID NO: 117592 - DNA, 176 bp, Homo sapiens
acatctgcaccccgaattctatgtgtaacttaatgctcttatgtccaactatctactccctgtctccatgcggttgtctattaaatatctaataattaaaagttcaaaatgaaactactgctttctcaccacacaccaactcttctctcctagattccccctactcagttacagca

SEQ ID NO: 117593 - DNA, 152 bp, Homo sapiens
ctcctggattgttctgtgttccttttttttcatattttccttctctttttgtgaatgttttgtttttctatcccttctatgctttttttcatttcagcaaatctttgatgctttcttatttttggataatccttttctttgaaaattagatt

SEQ ID NO: 117594 - DNA, 766 bp, Homo sapiens
acaagccagtaaaaacagttaacacatattttaatgacaagctcatcatcaagaaaaacaaccgtatactttgaaaaataatttaactcatttctgattaagaatgaaaagaagagaaaactatatactatcttcgtttttctggggttttttttgttgttgttgttagagacagtgtctcactacgttgccccggctggtctctaactcctggcctcaagcgattctcccatctcagcctcccagagtgctgggattacaggtgtaagtcaccacacctaacccatttgctacctattgaaaaaccacagtattgggagaaaaccctatcttgttaaagccatcttctgggaaaaccttacccaaagcagtcaactgcctatttagcatctgtcaatagttctaactctacttcatgtttcagaacactgacacacaaaatgtggtccacaaacctctagtggtccccaagactatttcagaggatctactagtttaaagctactttcataatgatattgtctttttttaaaaaaaaaaacaaaactgtgttttgagtaaatgagtatttgcaccaatggtacaaaaccatggtgttaaatgttctgatgccttatttgaatcaagagtatgatattaaattcacagtatttttatttatttatttatttgtttatttatttatttatttgagatggagttttgctcaatggtgcaatctcggcccaccgcaaactccgcctcctgggttcaagtgattctcctg

SEQ ID NO: 117595 - DNA, 396 bp, Homo sapiens
aagcaactcttgctagggaagactccagtaatggcaaaaaacaaaatcatgcaaagatgcaatgactgctcaaatcaccccaaatcagaaagtggcactggctgctaacagaagcctgaagtctcccaccagtgagaagtccaggcccaggaaacaaggcctaaaggggctggcacagtcttcatcctagccaaatgcaatcactccaaaggaagtcccacatcagagatcaaaggcctgctgagtaaggagagacaggccacaggctgatatcccattgccaaaggaagactgtcctttgcaagtgtgcctggtggagctctggacccaagtaataggagaagctccaagtctctacaagtagacctagcagagctggctgagtcagcaccccac

SEQ ID NO: 117596 - DNA, 302 bp, Homo sapiens
atggctatcgacggtgtctgactgggcttcttgttccagtctcctccccttccgtctagtctccacactgttcctattaccatcctaattcagctctgtctgacttgagctctggttaagtctgcaccctgttcaaaacccagcagctgcaaaagccctcacagtagtcaaaactccttagcttgacatttgagggctctctggccagacccttatcatgctgcagaccttcctgccctgtcccccaacattcctgcaggtacccggcagccctgttccctgcctgcacagaatgggcatac

SEQ ID NO: 117597 - DNA, 932 bp, Homo sapiens
aatgaaagtatctcctccagcctacagacaaaagcaattgaattacttttcatatatgctggcactgccctcaaagtatttctcattaggttggtgaatgaagtgtcttccagacctcttagtagagaatactggagagggaataggggaggtaagtgaatggtcacagtgataaatccactccatcagttctatttcctttaatcttttgacttcttcctctatattatgctatgagtttttaggcattcaacttcatttagtataagtcaatgctgagaccaaaggagcaaacaattagaaccactcctggctacttgaacgagaacaatgaattcagaatctctgataactgcaccataccaatacattcagccaaatgcaaaagcatgtttctttctctctcacatcatcatcatcacccatttctgtacatattcctgaaggttttgctgctttgtcagcaaaaaaaaaaaaaaaaaaaaaaaactttaaaaaaattacatataatccttttcttcccattgtgactgcaaaggtgcagcatgatatagtctgactccagttacaggtatggaaacatgagtatcgtgggaaggggtatgaggaaactagcttccccatggatggtaactgtcttaagcaaggttgttaacacagggaaggatggcttctgctagcaggagagactcagagtttggagacttgaagtactatgtgtccgcaattccccatatacagaaatgtattcaaaagattattagcagccaaaaatatcacatgtacaatttaaaaagtgggtatttataaattgcaattctgtttcctcatattttcttaaaattaagcaacataagatttcttctatttggttttgttaccatgcatttgattaatattaattatcacaacttcacactaagatcaggcag

SEQ ID NO: 117598 - DNA, 270 bp, Homo sapiens
ttatgagtacgaaatgaaaaaatggggcaaagggcttggcacatggtcagtatcaatagatcactagatggtggctgaggctcacatcaggacttccaatgctgcttttttaaaattattattgtttttgagacagagtcttgctgtgtcgcccaggctggagtgcagtggcgcgatctcggctcactgcaagctccgtctcccgggttcacaccatcctccggcctcaggcctccccagtgactgggactacaggtgcctgccaccacg

SEQ ID NO: 117599 - DNA, 741 bp, Homo sapiens
acccttgagccgtttgctcaggcctgctcccgccctgtggagtgtgctttcattttcaataaatctctgcttttgttgcttcattctttccttgctttgtttgtgcattttgtccaattctctgttcaaaacaccgagaacctggacaccctccactggtaatgataattttataagaaaaagctgagatgacagcatgagataaaaaacataatcattcaatttttacactactaactattcattggcaaatcacaaaaataatagctatgacaaactgtacatcaactaatggcataagaccataaaggaaaactctgctgattaaggctttgggtaatatgtcattctagacagccaaggtttacaaatagcttaaatcatttccattttcaagctttaatccttgtggatatgaaactttctcagatgtattatatacttctccaaccttattaaacagatcatactaaatttaatttccttttgctttatgatcgggaattgtcattgcaaatattaagtattgtgaaatgctataacatggtgatattcttagacttattgaacaggaggtagctggccccatgttgaaacaattttgagttcattgtgtgtttaaatatgggagatttcctgtaaaatttaaatttaatttattttgaaagatctgtgtagctttcatttccatttggctacaatataattctccagccttattaaacagatcatactaaatat

SEQ ID NO: 117600 - DNA, 455 bp, Homo sapiens
gaaaacatattttccttgtacctacacctgcccatcttttcccagtgaatgcttgtgtacctccaaggcagaggactcagtgccaatcaaggtgccaattacatcctcccccttccatctttagacaactctgaacgttaattaggtctgaataaaaatttgtaatgacgccaggggcggtggctcacacctgtaatcccagcactttgggaggccaaggcgggcagaacacttttgaggccaggagttcaagacgaacctggccaatatggcgaaaccccgtctctactaaaaatacaaaaattaaccaggtgcagtggcatacacctgtagtcccagctacttgggaagctgagacatgaggatcgcttgagcttgggaggtggaggttgcagtgagccgagatcacaccactgcactccagcctgagcggcagactgagactgtctaaaaaa

SEQ ID NO: 117601 - DNA, 353 bp, Homo sapiens
taatttttaaaattgtcctttcaaaatatttctttgtataccatatgactcatcaagtatattttaatgaacaatatcttttgattgacttgatgatacttcttttaaataaaacaatgtgacaatcattcaaaacttggcagaattaattgacagaattgctcctgctgtgtaaaagatctccacagtagttgcaaaaaaggagctatgtaggtcttacttagcaagaactaaatgaagatgcttatacagcagattttgaattacatattttataccaatgtctttctctattttagtattcagagttaacaatttgacatagcatttttcaacagcttcacagataacag

SEQ ID NO: 117602 - DNA, 132 bp, Homo sapiens
cctagaccctgccctgcagagcccgtggccgcccctcttacccagccacataccagctccccttgacacgccttcctcccaggccaacatgtcacacagatgcccacacccctgtctctgcctgaatctgtg

SEQ ID NO: 117603 - DNA, 730 bp, Homo sapiens
ggtccagtgaacgctttatccagcttccccaattttggggaattcttctgcaatttaatattcttcccttcacccactgaatttagggatgaagagctgagctgcaaagatgagttttgtgctacagcagcctttttaggtttacagatcatcaggccctgggtctctagctgagaatcagaaagtaaacagacaaagagttcagcctaaagaagttcaagtcccagagcagtggatctcaaccctagctgcacataatcattatctggagagctgtttaaaatacaggttccaatataatcaattagttctgggaattaggcttccatgttttctgaagctccttaggagtttctaacaggcagatagggttgagctgtgccattggtactaataggctctaaagtgagcccaccctctcatcagagcatggtgtcaagcgactctccttcctaagatcccatcgctgacaccaagatacctataagaggatcctgtgagtggagaggctcctggggtaacctggcagggaaatttgtctattgtgtttactgaaaggcattgtagtactgccactcagagctgtgcttccctttctgaaacagtcaagcagttccgggcacatcaaaggagattatcattcctctggcaccggctttgtttttcgctgcctctaaaagaaacaggtccacttatctccagaatgctttcccagaaagctcagtccctg

SEQ ID NO: 117604 - DNA, 300 bp, Homo sapiens
cccattggtggggactgtggcaggtaccccatccctgtgttgtttgatttcccacccccccctcccaagaccctcattcccatgagcaccccacccacacaggcaagggccttgaggggacccagcaagtcgtggaggacagcacagccttggagaggaaatgtgtcagccacaaggttatgatcccggggatccacataagagcatgggcgtgcacgtgggtggtcctccctcagccagcttctcaacagcttctcccaaaggtacacctggatccagtaccactgagacccaaagacg

SEQ ID NO: 117605 - DNA, 618 bp, Homo sapiens
actagatccacggtaggctgagatgggaggatatcttgagatgcagagagtttgaggagtgcaggtgagccttgagatgctgggctacagagcagaaggcccagtctcttaaagaagacaaatttaaaaaacatagcaaataaagcgaagcggctgctctattttccattctcaccagcagtgtatgagggttccaagttctccatatccttgacatgtgttattatctcactttttcattctacccatcctagtgggtttgaagtggtatttccttgccttttagtttagcatttacttaatgatgtccagcatcttttcaggtccccttgctcagttgtttatcttccttagaaaaatgtatattcagctgggtgctgtggatcacacctgtaatcccaacactttgggaggctgaggcgggtggatcacttgaggtcaggagttcgagaccagcctggccaccatggtgaaaccccgactctactaaaagtacaaaaattagctgggtgtgggggcaggcacttgtagttccagctacttgggaggctgaggcaggagaattgcttgaaaccaggaggcagagattgcagtgagctgaggttgcgccactgcact

SEQ ID NO: 117606 - DNA, 388 bp, Homo sapiens
tgttttgttcactgctatatttgaagtacctaggatagtaccagacacacagaaggtactcagtaaatgtttgttgcaagactgaatacataaatgaatttgtatagaaggatattcactgcagcattgctactattggcaaaaaatcagaacaaacctaaaggtcattcacaggtaaatagttaagtaaaactgtggtacattcatactaggaaataatatgcggaaattaaggagtgcaaatatatccataccaatttagaaaactattaacagtatattggaaatacatatactgttaataaaaaaagtttcagaaatgtgtgaatacatatgactgtctatataaagtagtccttgttaaaaaaaaaaaagtctggaaggttac

SEQ ID NO: 117607 - DNA, 193 bp, Homo sapiens
ctacaggatccgcgcctttctctgatcattggctattctgagtctctattagaaagacagagctggcttgtggagggctaatggcgatgccagggattcctgtccacagaaatgcacatcaggtgaggataccactggctcctccgagacggagtgacggtcttgcatctttcggcatttctcattgcgtatg

SEQ ID NO: 117608 - DNA, 447 bp, Homo sapiens
agccacaggcaggacagggggaatgatgtagagttgatttctgaatagggcaggaagctggtcaatggctcctatagtttctgccaagttaattcaataactatttatggagcatttactatgtgaaaagcattttacccctttctgggtatacaaaagtgagtgggatggagtctttatcctaaatatgcttatgatcttataatggagctaaggtatgtactccattaattttaaggctcaaaacttataggtatgtcctctaagaaccgagagggtcctggaaccagagaaggtgaaggctgttagaactgtaggaatattataagcatattggccaggcgcggtggctcacggctataatcctagcactctgggaggctgaggcaggtggatcagttgaggtcaggagttcgagaccagcctggccaacatggtgtaatcctg

SEQ ID NO: 117609 - DNA, 1211 bp, Homo sapiens
  misc_feature (1211)..(1211): n is a, c, g, or t
gattgatgttttcttccccaaatgctaattcatgttggaagtagaggcctttgttttttatactttaaaaaacacaagtaaatgatctagtcagagcatttaacggaaggtatcattccttttttttttttttttttgagggggagtcttgctctgtttcccaggtgtgggatgtggccaggggatatggcgtctcaagttccacgtggcgaatttccaacctcccggggttcaacgcggattctccgtggtgctcaagcctcccggagcaagttggtggatctcacaggtgtggcggtggccaacccaaggccgggggctaaattggcggtgtatatttcccacaggtaaagacacacggggggttttggacctatgtgttgcgcgccgggggataaagttctggggacactcctctgggaactcttgtgtgggatacccggcgccacctctgtggagctcttccaaaaaaagcgcgcggggaggatcaacaccaggggatttgagaagggccccaatgtgggacgcacccccgtgggcgccaccaccggggaaaggggctatcaaataaatctctctgggagagacgcccaaaaatttgcgcgctgagatttgagaagaaatctcttcgtggcgtcccataaacgctactatgggtgggcgccatttggggcggccaacacgtcctatttaaatcccacaatgggtgcctccacagagtgtcatcatctacaacccctgggggtaaccctcttggcaggcgaccccatctaacagcacaactcgggggaggcgggcgggagtcaaaaggcattcggacacgacctcatcacttcaacaccacatcacttcttcaaccggcccaaacaacagcggcggcgcgttggggacatatatcaacaaacataacggcgggggggtgctccaaaatacaaaacgtgtggtggtcaaacgggggggagatatatttctatgaacagaactttccaatattttcaccagctgtggtgctgatgggggcgagcaaggaaatcaaaacacaggcggggcgagagagtgggacataacggtataatgtaaccacactttttttaatttacaaaacggagaaaacatttttggcgcaggaggaacatttattagcaggatattagcagcaggaaatatattcttttaacacaaatatatagcgctctggttaaaggcaaggn

SEQ ID NO: 117610 - DNA, 345 bp, Homo sapiens
cttcctgtggcaatcaatcaaactaggaattaaaaactatttacacttgaaaatgaataacattggccgggcatggtggctcacgcctgtaatcccagcactttgggaggctgaggcaggaggatcacgaggtcaggagatcgagaccagcctggctaacaaggtgaaaccccatctctactaaaaatacaaaaaattagccaggtgtggtggcaggcgcctgtaatcccagctagtcaggaggctgaggcaggagaatggcgtgaacccgggaagcagagcttgcagtgagccgagatggcaccactgcactccagcctgggcgacagagcgagactccatctc

SEQ ID NO: 117611 - DNA, 209 bp, Homo sapiens
agagggaggcctgggtggtgcacctccagagctgcccaggctgggcctcaaggaagaaaaagattttcatttgtcagaggcggaagggagaggtggagggaacagcacagcagcggcccaggggcagggaagcacaggaccattagggagacacgagaaagcccatttgtctagaacagaggattcaagcagtgcaccaaggaaaatga

SEQ ID NO: 117612 - DNA, 393 bp, Homo sapiens
ggcccagttctgcttctgaaatcagttcctggtattaaaagtctctgatgcattcttcagtatgtcggttggcatttttcaactccggaatttcagcttgactctttttaattatttcaatctctgttacatttatctgatagaattctaaactttttctgtgttgtcttgaatttctttgagtttcctctttgttaagtttatctgatagagttctgaatgtcttctctgtgctatcttgaatttctttgagtttcctcaaaatggcaattttgaattttctgtctgaaaggtcatatagttctaggatttgtatttagttatttttctaatctactttgacactttataatttttagttttctgccaaactttcaagcttggatttattgt

SEQ ID NO: 117613 - DNA, 327 bp, Homo sapiens
gtatactcaggagagcagatggcttcctccttccgtgtagggtttggaggctcttgagtggtttttctttattgcacttaccagtcccacattcatccctggcaagaggaataggaagactgtgggtgattcagatcaatcagttgggttgaaacaaatgctaggaagtcaaccacaatagactttgtccaaccaagccaatcaatgccatttccttgtatttagtagtttatttcctatcttttaagttacatgttcttttgagaaaatttgggaaatataaacatgtatgaagaagaaaataaaatcactcataatctcactatt

SEQ ID NO: 117614 - DNA, 393 bp, Homo sapiens
gttgtttttaagtctctaaacaacttgggttcaaagctgcgggtagcttagaacctgtgagctctttacttgcctgctcaagttctgcctcaaaggcattactctagccagagaagtagcaagtacaaattgttcatgcatagcaattgtttccctctcttctctgctctttctccttcccctgctacctttccacccttgtattgacccctgaacatcaaattaatggcagcatatcaggattctgtgtggcacttatatcctttgatgctggttttgtgcctgtactacagttctcatggcaatggtttcatggtttcagtctcaaaatatggggtttggaaggaggcttggtggagagagagagagtagagagagagagagcaaagaaaa

SEQ ID NO: 117615 - DNA, 136 bp, Homo sapiens
gttcagctcagccctagagcttctgcaaaccccatcctttcactttaggtcactgcccttcaagcagtgcaatttgactttgaaacattttatttgtttgtgttactaagtaacactttaacaagatgtatgtggc

SEQ ID NO: 117616 - DNA, 545 bp, Homo sapiens
agggggcgctggggaacctggggggcttggataagaaggggaggagggcctgcagggggcgctgggagacctaggcggggcaggggtggggaatgggtaaggagggaagaagggccttgcagggggcgctgggagacctggggtcggggggaggataaggaggggcaatgggagaggatggggaatggggtgcttagagacttgggtgggaaatggacgcagcagggactgggcggggagagaccttacaagggttccaggagatgggttggggtgggctggacagggcagagtggagggtgaggagggccctctgtgagccacagagacctgagcaggagctaggtgggggctgggaatgtgcaggaaaggagacgtggaaggagggggagatagggcggcaggggtgatggagattgacagggaccccagacatgggggtagggaaatggggatggaaataaatggaaaaaaagaggcttcgtggtgggaaagaggaggaactccgagggctccggggcactgaggtgtgcagagttgccggg

SEQ ID NO: 117617 - DNA, 383 bp, Homo sapiens
aagggcttagccagcccttgggaacattacaggcactcagtagtggcagcactattagggtgacatttatgactatcatgcatgcttgtcctaccaaaacaggagctcttctagaagacctgctcaatagagcaccatgtcccaaggaaaagagctctgagtagggtgtcaagagacaaggatttgagccccattctgtaatcacctggctgggtgacctgatggaaatcaacctctattgaacttgttttccttatctgtaaaataaggttttaaaatatccctttcttgtcataaaaatcatgatttaaaagaaattttaaagacgtaagaacatgcttgtgaaatgttacgtggaataaaagcaggtagacacatagttt

SEQ ID NO: 117618 - DNA, 643 bp, Homo sapiens
ggccatctttgaatcttctggcagactagagaatctcagtctcagaaataagattacagtggtttaagtttttcatatgtacttattatacacaaaaataacattaaaaggtaacagtaatgatgacaatagtaatagacttagggctctagatataggaattttagataccaccttaaatatgttcagggagataagaaacaagattcaaaatgtcagagcaaacaaaaagaaggcaaatttggaaaagaaccaagtagaaattttagaactataaaaatacagtaactgaaattaaaaactcgatgtacaggtaggtaggtgcaagtagctggtagtcccagttactcggggggctgaggcttgggggtagctggagcccagaagttcgaaaccagccagggtaaaatagtgaggccctgtttgaaaagaaaaatggggtgggagggggtggggaaaacagaaaacttagtggatgagtttagcatcagattagacatacttgaaaataagtgaactggaagatggcttagaaggagagatctggaatgaagcttcaagatacagtattacagaagaaaggaaaagatatagactatacatcgaaaagttttcgcaaaaattggaataatgaaaggagagg

SEQ ID NO: 117619 - DNA, 319 bp, Homo sapiens
aatcagctcggtcctggttatcacgcatggtggcatgtgctgtaatcccagctactggggaggctggagcaggagaatcacttgaacctgagaggcggaggttgcagtgagccaagatcgtgccactgcgctcctaggcaacagagtgagactccatctcaaaaaaaatttttttgtagagacagggtctcattatatttgcccagactggtctcaaactcctggctttaagcattccgcctgccacgacctcccaaagtgctggcatgaaccaccgcacccagccaatgtgatgcttcttaaatttgggtcctgtcct

SEQ ID NO: 117620 - DNA, 575 bp, Homo sapiens
ggaggtgcatctgcaggtgcagatggtgtaaagtacagctgcttgggtgctgaccccataaaggaacctggagggtgtgttagttttcgttttgtggaagtgccaaggatcaccttgacttgtgcttccttttctcattctcatgaggtgggtggagcatgtgcagcggcatgatctcctgcgtggtctgataacatccgcaagagtaattagaacgtcagaggttaaagtcaccgtccactgatgggttttcttgctctctaaaaaacacccttttcactgtttttctttgacttagcagcaatcacgcaataaactccatttctgcttccattcgtgtttcccttttacttgcaggaaatttgcttataaagtgtggagggggaaactctttaccatttttgtaagttatgctgtgctgttttgaaagggcttctttagcatcaagagatgccagcttggctgacattaaattagataataatctttccctgacccttcttcatgcttgactctaaaaagaattcaaaaaagaagcaatatttgaaactataatttgcagtttatgtcaagat

SEQ ID NO: 117621 - DNA, 189 bp, Homo sapiens
atctcattttatccttatatctgtttctaaagaatgacaaacatacctcctcttacctaggcccaataattgtgagatcgtatgagggaggcactctcttgtaataattccctaatcaatggaataaatgtggagaaaatcgagcatgatgaattgccttttgagttgaattaatcctcagctggcaaa

SEQ ID NO: 117622 - DNA, 298 bp, Homo sapiens
ttgacttatttggctgagacacactttctttactgtcctaggatgcaagagaaataatgtctaggatttttctcttcttgccaatgagcagaaaccactttcatcttaaaacacagctcaggtcttagaataagtttgttttctgcttctttattcttctgctccattttactaagtttaccttgttttttttttttgtaaaaaactatataaaaagtattatagcagaaaaatggactatttcacaatgaatttgtcacattataattttatataatactgtatttatatttaatat

SEQ ID NO: 117623 - DNA, 307 bp, Homo sapiens
cttgtggccctggccctgccatggccctgtcccagatgctagccctgccaggtgcttgtcctggccctgctgtgggcctggctttgtccctggttcttagatgaacctggccctgccctgcccttgcccttgccctggcactggccttggaaatgtccgtggtcctaaccctggccctgccctggagctgccactgtcttggccctgccctggctctggccctgccctggacgtggccctgccacagccccagccatagacctgccctggttggtcgtgccctaccttaaccctgtgctaccctggg

SEQ ID NO: 117624 - DNA, 257 bp, Homo sapiens
aaatgagtgttgaattgagttgcggtgaatatagcccagacttgaatcataaaaacagaaaaacggccataaggacaaccactgcaggttacccgagtcagcctgtcagatggcggggcccagtcccgaaaacctctaggggctcagatggtcgagcctgagtcggtgcttgggctgggacgggctcggagggagtcggagaggggaaggaagctgaaggcgcgccctgggtccccggcgcactgaaggtacggaaa

SEQ ID NO: 117625 - DNA, 196 bp, Homo sapiens
acatgagcaagactacatctcaaaaataaaaaaatataagaagattggcctgtcctcctgctgtgttatcatagcccttcttagtatatctcccacagccctcatcactgccctgcaggtgacttaatagattactcatttgcctcttctctttgaggacaggaaccacaccattcatatttatccccagtgcttc

SEQ ID NO: 117626 - DNA, 688 bp, Homo sapiens
gcaccatcatagctcactgtagccttgagcacatgccaccacacccagcactgaatgttgtctttttcttttctttcctttttttttttagaggcatggtcttaactatgttgttgcctagggtggtcttgaactgctagcctcaggcaatcctcccacctcggcctcctaaagtgctgggattactggcgtgagccaccatatccagctcctatcattctttgaccacttctttattttctgtcatgagaatatgttccagacccctcttatacttcccatgcccagccctggaatctccatttctccaaagagcattggcttattttagaggagactggtatttagcaaccaaggcctgagtcctaggtatactcactgctactgaggtgtcctttctcctaggccctcacagcaaagttcataaatagatgtacatacatacatgtatgtatgtatatgtgtgaaccatatgcatatacatgtttatacacatccacacacatctgcgtttgtttctctaatcatattaaaaaactatgagttcctactagtagccaattccatgctaccatcacagcagtcattataccctttccatatctgtaactctaatctaaaataatgagaaatctgctgccagtagccatagtatatttacttattagctcaatactagaatatatga

SEQ ID NO: 117627 - DNA, 687 bp, Homo sapiens
ctagtcacctctctcacgattgccactgtgcccgttggtggccccaacagatggtgcccacctggaaggcgggattttttggatctcattcagttctcggtccctaacaacctgctcagtgcccagcatagagcaggcaaggaatatgtctatttatgttgatcagaagaaagggagaggaggagattttaaatcaaacagttatcctaggcacatttttcaaaactgtaggaaaactatagcaaatacttgtattagcatgtcctgtgtgccagagagagaagcctgagacacagggggtaaataagtccacagggtatctctgcttcaaagagaaaaagagttaaaccttggggggtcgggaggagctacctctgaagtccttgctccctgtgccttagaggtcacagtgactccataacttcaccctttggataaagcacaggttcaggttgctgtgcacagggaggagcaatatatctcggcaggaggtctctctcaatgaggtaccagggatcctgttgcatccatttgggagggtctgggagtcagcagtcccaactgggagctcctggagctcgatttagaaaagggacagggataatgctatctggggccttggcatgaaagggcttttctttcccatgtccagactcccgtgagagagagagaagggttccaagtctc

SEQ ID NO: 117628 - DNA, 677 bp, Homo sapiens
tgccaggggcgccagcgtctcggggctgccctaatggctcctgctcagtgcgcggcgccagcgcttgtcttgtcccggctgcgtctctgggccccacgggcccctcctcacatggcaactattgtggctactagtccaggcggcttagcctctggagtgggtccaggacccgctccagctgacctctgactccctggggccaacttagccctggtcttcccgctcctccgatctcccacgcgaatcgccgccatgagctaactccccacccccgggcagacccgggagagctttgattacctggggtcttctgcttcctcccagacgtcagctccgcttcaggaatcgactgagactttggctcagagtttggttccattcttggacacggattcagctggagagctgccccggggccagagcagttcgctgctgcacactgggatctgaatgacaagctgactcggcacagaagtctcccagaggtggttgcaatgctagactgggatcagaaccaggccctagctcggcctctttgcctcaaaagtaagtttctaactgtagatctagatcaggctgcagatcatcaggcatatgaaatacttgttccacctctagatagaaatcaaaagcaaggaactttactgtttcgcccaagaaccggaagaaagatctag

SEQ ID NO: 117629 - DNA, 224 bp, Homo sapiens
gaggctctcagggagaacgtatttcctgctccttctggctgttggcagaagtcaagtcttgtggctgtagggtcgcagtttccttcccttgctggctgtaacctaagggctctttcatgcttctggaagctgctgcattccttggcttgtggcctcttctctccatcttcaaagccagtaatagcgggtggggtctttctcatgctctgtcttttgaactcact

SEQ ID NO: 117630 - DNA, 841 bp, Homo sapiens
gggggaaacaggagctttcctggaagttccttcagtagatttctatttatatctcattggcgagaacaggatcatgcagctactctggttttaatttttttgctagttttggtttgtttcgtttttatataatgatgttgacaccataaatgcagcttccctaactatagtgaggacagaggaagaaaatattttacgactgaggatgttgcaacactaaacaaagccggatcctattagtgaggaagaaaagattaattgatatgcttggcaattaggaatcggccatcgttgttataatgtgccttttttgaaatttggcaattacttactgtttaaaaacctattattattgctttagtgcgttaagggtgttagtctacacaaatgccactggtacctgcagtacattaaagaatattaggaatccttttaatctcagaggtaaaatactttgtttctagaaattgagataaaattcacatattataaaattcacccttttaaagcatacaattgagtggctgtggtgcaggttgagcaccctagtctgaaaatctgaaatgttccaaaatctgaaactttttgagctctgagatgatgctcagaggttctgctcaaaggaaatgttcactggagcattttagattttcagattagggatgcccaaccagtaagtatgttgcaaacattccaaaatccaaaacacttctggtcccaagcatttcaaataagagaaattcaacctgggattcaaaatataaacatcatatttttataacgcctggaattcagtaaaagcctgggattcaaaatataaacataatattctatttcatta

SEQ ID NO: 117631 - DNA, 891 bp, Homo sapiens
tgcagtggcaacgtgttccggtcctcttccacatcacggaagatttgctctttcctctttgcgatgaatcttgctgctggtcaccctttgggtccacacagcatttatgagctgtaactttcagtgcgaaggtctgcagcttcattcctgaagccagcgagaccacaaacccaccgggaggaaagaacagctccaggcgcgccgccttaagcgctgtagcactcaccgcgaaggtctgcagcttcactcctgagccagcgagacgacgaacccaccgggaggaacgaacaactccaggcgcgccgccttaagagctgtaacactcactgcgaaggtccgcagcttcactcctgagccagcgagaccacgaacccaccagacggaagaaactctgaacacatccaaacatcagaaggaacaaactccggacacgcctcctttaagaactggaaagactcaccgcgagggtccgtggcttcattcttgaagtcagtgagaccaggaacccaccaattccggacgcacttcctccggactgttggtgcactgagtgatctgaagtgctccctggccaccatgaatgtaagcaggtgaggcaaagtacccaggcttggcagcagaggctgggctatgcacacactcttagcagccagacagtggacctgggcgtagctacaggtcaggagggcctgcagaacagatgtgcccagtgctgcagagaactcggccccactttctcctggcctggtagtcagattaggctagagctccgtcagagaaagatggggagcccagggagataggtccctatggccgtattctgctggaggtgtgtggtgcacaaagtcccccagctctgtgctggcttaagcctcttctttgtctactgtc

SEQ ID NO: 117632 - DNA, 700 bp, Homo sapiens
gcctggcgctgtggaggttccaatggccgccatgttgtctcagagggacacaccacaggcttctggaactctggctccattttgtgggtgcaagtttctggcttccgttttaaagagcaagagaacctatcagcgttgtcaattctaagaaagtgagtgccaagagcaggctgtacaagaagcatggcacaagaatctgcttctgaagagggcttcaggaagcttccactcatggtggaaaaggaaggagagcaggtatcacagcgcaagaaagaagaaattgttccactccataagttccctcctggaggatgtgtgagacaccaggctgcatgttagaaacggctgtgctccggaaggctaccagggtcatcgtgagggccttgcagatttcagaaatgaagtgacctgccttgagtcttccctcagcctcctcactccactgtagtctcaggagagtgaggacaacaaaactctcttctccccacattaccacttcagcgctgacctgtggcttgagaatctaatctgtgtgcaccgtggcaaagtcttggttttacaggtctcacctgacagctagtcctgatttttccatgatgtgtgggtaaaaagtgggttcttgaagggaaacctcaatgtagcttagctcttgagaaaacagtatgtgcatatgcttcttggatagaaaaagaaaaaggaa

SEQ ID NO: 117633 - DNA, 352 bp, Homo sapiens
  misc_feature (340)..(340): n is a, c, g, or t
cttgatttccttcctgccttcactctaagttgagcaattccatgtcaaagataggatagcactgggagggatgatactagagtagcctggagctctatatgacacatcacatatgcaggtcagcttcaccttctgccccaagctcatctgcgctatgtactcttcaaaaccactgatgacttcctgttcaccagttttgaacttgaaaggtttgtttctgtcttcggataaatcaaatttattcccattttggaacacccctatgtagtgcgctacacacacctgggcagaaagaatggatcatgccatgagacagtgaggttagcacactgtctcgtgncatcgataaaca

SEQ ID NO: 117634 - DNA, 781 bp, Homo sapiens
cactattaatgaagttttttgaaaaaaatgacattctgaacatattaaatgacgttaaattaaaaaaatcaaaagatagtaagactgagaaggcttttccaatcctagagggattcagaagtaatttcaaaacaaagatggggaggaaagcttctccttcctccagcaaccttttctctccttacatgaagctatgactttaacctcttcttggctgcaaagtgaaatctatttttttaagggtgaaagaggtatgagtacttaggagaggaataaaacaacacgtattggattctatggtgccaagcttgatttgcctctggcttggccattccaagaagagcttaagctttttcatcttaactctgatgcacaatcttaatttaaactgtatgagatttgccctgatgcacaccagtttcatccgtttctggtatcaacaaaatcaaagcgtctaactttttcaaacacaaagggatgaattgtgaatacctgctgaatttccacaagtcaacaacctaacaaaaccacaaaaaaagacgaggtaacttttttcttaagtgaaaagtagcctaacactagaaaagagaacatttatttctgttaatctgggcattaataaaaggtgctgggccataattatagttccctttgtcatttaatagagaggtagaaaaatgcagatttttattccctttgcctagggcggaacctgagattctgcatttctaacaggctccgggtgattagatgtcactgaacgttgtcacattgtgtacca

SEQ ID NO: 117635 - DNA, 308 bp, Homo sapiens
tttcaccatgctggccaggctggtcttgaactcctgaccgcacatcttaaatcttcatcacaatcctatgtactgttatctctattttattattatagaaattggggcttaggccatacccagtggctcaaacctgtaatctaagcactttgggaagctgaggtgggtggattgctcgagtccaggagtgtgagaccagcctgggcagcatggcaaaactctctctctacaaaaaatacaaaaattagccttgcatggtgatcgcaccactgcactccagcctgagtgacacagtgagaccctgtctc

SEQ ID NO: 117636 - DNA, 873 bp, Homo sapiens
gtccagagtaaagcacattcttatttcagtaaagggttgtgtgaagctatggcatttttcttaccctttagttgccaaatggtctaaagaactactagcgttttaaagagaggaaagaaatgtatctgttttcagttggaaagtagcattttggtacatcatgctttgctttgtttcttgctttttcatctttttggcatcttttttaaagatcttatctgccaggaagttccttttttcttttttttccctttttcgtggatcagctgctttttggaatcaatgccacaattttaggaccaaatcagtgatgctgcagtagtttcagggttaaaagcactttggttaatgtgaaattcattgtcaaatatacttcaggacaaattatgaaaatgatagcattgagattcagctgtatccatttctattcatggcttaatgaatattttcaggcttagtgttatatattctcattagcaacatattcatgttattttacttattttaaaaaataaacaactaaaggttagccaccatcttctcggaaatattaacagcatccattgtactgcagtcatccagtcttctgtggaagtcagttgcatgttatttactttaacaaagaatttcatgtccaagggaattctctatatgggatctcttttctctgggtgatttattttcactggcaaaatggtacgtttctagaggtttgtgtgcttatgagtttggtttaaacttttccttgaaaagtaaatgcttgatcccctcagagtccaaccacctagtgataatgaagaactgaaggatagttatttcaatttcgacgtcttaaaagtgcttaatgagcaccttttcatacctttaagggga

SEQ ID NO: 117637 - DNA, 620 bp, Homo sapiens
gagtttcaataaccaggtaaacataaataatattcatttatttataataacatttattgagcacctaataattgtcaatcaaggtgataggcactgaccatcagccaaacagcaaaatagcaatggaccatactccataggactggaaagtctagcaggaggttgcagacaaatccgtatgtcattacaactaagcatgaagaaagcttgcattaataagtcatgtgctttggaaacacacagcaagacacaaagcccagactgggaaagtccagaaagattcctgatagaagtgaaaggtgacaccagaaagtctctcttcaccttagcaagcagaagctgtccagagagaagagacttccaggcagagagagaaaaaatactgaggcctaaggtagcagctggcagaaactgcagagaggaaagcctgactagagcatggaatacaagagagaaggagacagagaagtgggaggggcatctgatcagaagcatccattacagtagactcatctaccgtcctcctggaaggaaacataaatgaacttttaaagtcagtccatcttggtgattcagtgatgcaactccatgtaaaagatctctcctcttaataccagaac

SEQ ID NO: 117638 - DNA, 798 bp, Homo sapiens
cgcccacagagtctgacggattctccctgtgccaggtgcccaggtcctcagcagcagcctcatctgaaggttcctacccagagggcacagcagccctctatgataacctcttcagaagagcccaaagtccagagaagaccaacaatttggggccccagccagtctgggggaccactgggaccagttacccccaaatcttgacagggtagcccaagaggcagagctaccaagtcagagcacgggcagagtaagacggcccaagctgcccaggcaggccaatgcagatgtgcttgtcagggttgaagcccctttggcagggcagaaagggctgcccagtgcctctgtacagggggctctctgggcctctcagtcttgggacaatgtgtaggtagtggtgggtgatgcttctcaactgccggaaggccaagcaacacagaaagtaaggtgaaggcctgggccccagcctgtttgctcacctgtaagatggcataggcagcagtgaggggcagatgtgggcagccttgaagtgtgtggctgggtgggggccagcacttgggaagtggaggcaaagatctcctagggcccagtccacattcctcacgttctgcgagggggacactgccctcaggccctgggagctgagaagggctgggaccttaggacatcagttagacaccaagcagaactctcccggggaggcctgagcagatgaccatgaggtcacagcctgcccgggcaccaaggacttctacctgccctgccagagtgtgggtgccaggggcccagttgccaggtgac

SEQ ID NO: 117639 - DNA, 492 bp, Homo sapiens
aaccctccatgtccaggctgcattgtgtatggttgagtggactcccatcacatccaacagggcctaagaccaaaagaggaaagacacacagctcatgctggaggctgtgtgctgtcaccatggtgaatctcagtttgcttgcacagaatggcccactgcagctgcaacttaattagagttgggccaaaggaacaccatgacatgggtaaccagaggcagctgccacaagcagttcctttgtgccaagcactgtgcaactgagtaactccatccctgcccatggcagacatcactaatcaattacagcattcttgctccataagtccagacatggctgcaacatcattcctcacatagtgctccaggcaggcattaccggtgtgattggagttggaagggtcaagaggttccatggccattatcggttgaagatgaaggaaggggccatgagccaaggattaagggcagcttctagaagctggaaaaggcaag

SEQ ID NO: 117640 - DNA, 502 bp, Homo sapiens
atatggtggaaattctgtattatgatttctactgaatacttcatctcaactctgtgtttagtgatgtcatgttaatggcaggaaattggccacagggggagtatttttggaaaaatgggcaaaaacactacaaatcaaggcttgtttgtttctttttcgggatgattgtcagacttaagaaaatgatggagaaaatgttagtaatggcgattaaacttaaaaatgcattatgtcggccgggagcagtggcttatgcctgtaatcccagcactttgggaggctgaggcgggcagatcacctgaggtcaggagtttgagaccagcctggccaacatagtgaaatcccatctctactaaaagtacaaaaaattagctggatatggtggcaggtggtcgtaatcccagctacttgggaggctgaggcaggagaatcacttgaacccggcaggcagagatcgcgccattgcactccagccctggcaacagtgcaagactccatctca

SEQ ID NO: 117641 - DNA, 233 bp, Homo sapiens
agtcacagtagtagcgcccagttttcagagaagtacccctgttatcattctgtgatttcctctagtgctaatagaaacaaaatatggaatctaccaagtacccgtaaatatcctatgattcttatctttctttgatactagcactgggagtgcagtggtaaagagtcatacttcttttttttttttttttttggagacagagtctcgctctgtcgcctgggctggatggagtg

SEQ ID NO: 117642 - DNA, 501 bp, Homo sapiens
tctgcaaatggtggcacctttaaagtgttatcttgaaggggaagtgagtgatttgctcatgtctctactgaactaacactgttaacacccagtccagttctaccttaaacaagtcggagaaatacagacataatccatacttgttatttgtcaagactaaggtaaaataaggaaagttggaactcactcatatcctcttatgactgatgtactgaaaacaatccatctctcaccatttcctaaatagcatagtcacaaagagctctaccctaccaagtactctgcaagtcccactctcaaaggaagactcacaggtgactgagaagataaatttgctattgtttccattatccttcagttcatctgacacctttgaagaaatgcatttggataagactcacaagtctcagggccccttctttatgaaagaaatagctaagcctccatactcagaagcatcagacttttcagaatgcttaagtcatgtaaaaacgtatcaaa

SEQ ID NO: 117643 - DNA, 296 bp, Homo sapiens
  misc_feature (12)..(12): n is a, c, g, or t
ttattcctaaancagcgagtttgaagtctggcccaggatcgtctagattttgacgttctccttgtctttgctgtgtacccctgggagaaacaaagggtgagaagaaacaagggaaaggagaaacatttgtgttttccaacttttcagtgttgatcaggtatgaccattgctatgaggaaatagacattggggattactatagcatgagggagcggggaaagggttgaaaaactaactgttgggtactatgatcactacctgcataggcgatcatttgtaccccaaaccttagcatc

SEQ ID NO: 117644 - DNA, 443 bp, Homo sapiens
caccctacaatgcacaagacagcctccccgacaacatcttgggggctcctcatccaaaatatcagtagtgctgaggttgagaaaccctgacctaggtggacaacgtatagtctctttgccacaaccaggacggggtgtagagtgagtggactagtcaccgtagatgtgcaaagacacctgtccctggcagaccataatgtcaggagagttcagcagcagcccagacctaggctctggggttttatcagatttgtcccagcttagtggggctcttgtcctcaaagaggctttgttttgtttgtgtctttttgttttattcatttctgttttaaaaactatttttattttttgtaggaatagggtctcactattttgctcaggctgggcccttgttttattcatttcttgatgttgaattctgaagcagagacccaggttggagc

SEQ ID NO: 117645 - DNA, 829 bp, Homo sapiens
atagctcatggagcctgacatatgttagttctcctttgcctaaaaacaccaagatctggaaaaatcaaaaatagagctttttttaagttatagaattctataaatttcataagtaaagtttaatataactattagtatgaagtgaacaaccactaattttctatcatagagaagtagtaagaattactggaatctaagaaagtcccagagtaaaataaatgactttattttcacccctaggaaacagagatatcagataataaactgtttttttttctggaaaataattgacaataaatttaaagataattttattaaagaaaaggtaaataaactatttgcaaaacaagattctaggcagaatagcaatagcaaaatcagagaaataaaaaaaggcaatagcaaaatcagagaaataggaaaacttaggctaaaaaaacacttgatattgatcttagcgtaccagtatgaaaatagggaggagaattgaaagacttttttattctggggtaatgtgtttttattgcctgtttaataatgaatatccataaagtttgtgatcaaggataatttttgaaataataatattttgaagaagtatgagaaaaactggagtgagaaaaagatagtggggaaatattagaaatatagacaagccggttttttttgttgttgttgttgttgttaaaacttttcactattttcctgttggtttaaagtccaaaatttattcatccgtccacctatccatacatcaacccattcattcatccattcagttattcaacaaatatttatgtaaggacaagtgatatggagaaacagacaa

SEQ ID NO: 117646 - DNA, 539 bp, Homo sapiens
tgcgtcgacttctgctctgaccttctgctctttttccagtgtagctacaatctcagccacctggctggtggagatgtgaacatcttctttgtccaccagctcaatcaccttgacgaggtcgtcgatgttgaccttgccatcctatgtttcattcagtgctgcccgtaattatggtgtttctaagaaagtaaccaagaagccagtatttttcactgtaatagttgcagtggtgggattacttgccagtattagaaaatggagaatgggaaatggaaaatctcattggattactcctccttacattactgcgtttggatttgtagtcttaacaaggcaataaatggaaggggaaagaaggaatcaattcatggtaactagaatgtaatgagcactttcattaagtcacaatttaatttgtattctttcggaaattcttttctggttttaagcctaaaggggcctgccttgaggaggtgaggaagataagcaggtgtgggagggggtgtgggtagtgggcagggggttgaagagagcaagaa

SEQ ID NO: 117647 - DNA, 728 bp, Homo sapiens
actaagagatttagagtctgggctttaggtcacccctggaaggactggaaactgaaaactgagaggatccacatggacaatcaagcatgcctctgtgatgaagttccagtaaaaaccctgaacactgaggcttgagggagtctctctggctgggaatactccatgtgtattggcacatatcaaagccggaagggtaatgcactgccagactgagaagactacaataaatacctaactcttcaatgctcaggcattgaatatccacaagcatcaagaccatccaggaaaacatgacctcaccaaacaacctaattaaagcaccagggaccaatcatagaaaaacagagatatgtgaccttccagacagagaattcaaaatagtggtttcagggaaactcaaagaaattaaagatagcacagagaaagaatttggaattctatcagataaatttaacaatgagattgaagtaattaaaaagaatcaagcagaaattctggggataaaaatgcagttgacataataatgcatcagagtctcttaatagtggaatcaattaagcagaagaaaaaattagtgagcttgaagacaaacaatttgaaagtacacaattagaggagacaaaaaaaattttaaacaaatgaagcacgccccacaagatctagaaatagcctcaaaaaggcaaaagcccaagagttattggcccttacagaggaagtagagcaaatag

SEQ ID NO: 117648 - DNA, 581 bp, Homo sapiens
tgcatggtggtcggtaaggaggctcttgcatgttggtgcaaggcagatacctcgtggaggtaggactcccaggacaaggtgagatgtggatgccttgccagatctgggtatgaagttatgacttttctccctctaacttccccaaagtcacctgaaacagagacccgtaagcacagaaacagaaaggacaagttattagaatgggaagtttctgattgtgagggaagccccgtggcaaaccgagacacgtccaccaagtgctctccgggaagaatggcctgccaaggccgtaccatcccaagcacagcagcagcatggggtagcgcacgcctagcatagtcactggagaaaaggaggcgggattaatgctttctttcctgaagctgtgaagatgagagtcaaaaatgagacgggaggaagaaagtttaggaagtgtacccaagtgtttattttgatattttactctcaaaaagttttatgttaaaaactttggaaaccctgccagcttattagttcactatttctttaaagagttctatttaaaaagaaagtaactcagaactgagtaggaagacatgttc

SEQ ID NO: 117649 - DNA, 371 bp, Homo sapiens
gggtaaaatagaggcaccattcaatccactacaggggttgagaagaaataaaatattacaaaatgctccctgataagaaataaaatattacaaaatgcttcctgataagaaataaaatattacaaaatgcttcctgaatgtgatttagaagtttttttgtttgttttgttttgtttttaaatggagtttcactcttactgcccaggctggagcgcaatggcgtgatgtcagctcaccgcaacctctacctcctgggttcaagtaactctcctgccttagcctcccaagtatctgggactacagatgcccgctaccactcccggctaattttttgtatttttagtagacatggggtttcaccatgttggcca

SEQ ID NO: 117650 - DNA, 472 bp, Homo sapiens
ggttcttgctctcaaggatctgacagtctaggagacgaggcagacacagacacagaatgtctcaatggactgtaccaagtgccactagagagggagacacaaggccatctcggaaacagagaaagaggatctaagtcactattggtggtgaagggggggggtccccactgaaggcgagcctctgagaggtgacagctgagtctctcagcataaatgttagccaggcagggaagaggtgtaggacatgggaaagtgacaaagacaggcctgagtgactcgtacagatcaaagaggcaaggataactcccaggtttccagcttaggccccggattaaacggagacatcaggccaatggattaaaaacagaagcactccttggtgccagtggagcagtgagccccttcctcacctgcacacgtgagctccaagtggaggtgcttaccgggaagtcggtacaaatgtgaagttcag

SEQ ID NO: 117651 - DNA, 163 bp, Homo sapiens
aaattttcctcacccaaaatggaaaccccatacccattagccatcatccccatttcccctggccactctcagctctaggcacctacttatctactttcggtccctacacacctgcctgttctggatatctcatatagatggaaccatatgacatgtgaccttt

SEQ ID NO: 117652 - DNA, 334 bp, Homo sapiens
aaaataaaattttaatgtaagaaaattgaaggaaaaaatggacttttgtgttatgtcttcccttactttgttctgtctgtatattcctatattgattcggtagtagcaatgcataattttcccacaaacttcatccttacatgtagagaaagtgttgataaaatattcttgcaataaagtgctctttgcaaatatgtacttcattttcactgtttattcaattttcttaataccatataagttcttacaggagagcttcagattctccatacaaaatggttaatctaaaactatgctggatagagtaaaacccttgctgagcttcttagaaaaa

SEQ ID NO: 117653 - DNA, 149 bp, Homo sapiens
ctataaattatcaagaagcagccaccctaaaatgtaactaaaaggtgcctataatcttttcataaacgttgattggaaggatactgtaaggaatcaaccaagaggagtgttggagaataagacttgaacaatatttctccagcattgtc

SEQ ID NO: 117654 - DNA, 829 bp, Homo sapiens
gcaggagagacacatgacacaaaatgaaagtttccatgctagaaatggacatggatatatagaagatgtgtgacatccacaagtcagaatggaaaagaaagcaagacatagaatttataagaataaaaactcacatagagataagagaaatgagctttcatggtatctgatgtaggcttttgggaaattgccaccaaatatttttaaaattaggacacattttcccaaccataagcataaatgagttagccttgatatttgcttcatgaattgggtaaaattaagctgagggccagatgttttccatctgtgttttagattatgctaaacataaaatgattagaaagcacccatatatgactggtttaactctacatgaaaaaatcagatgacatttagacactgccttagactttagaaaattttagtgtattttgatgtcagaattttgacaagtaatgaaaatattagatgaatagttttactgtaaaacaaacttccatttcataataggcataatgaatcttcataatgctgaaacaactttttgaaaagtgaaagctgcagattttccaagtggtatcaaactaagagttgggtttatttaccctgaattacatttggtatgaggtagacaaccaaaatgtattagttaatgtggtttattatgtgttgtgcagatactactatagttcatatgcataggctgatttatgaattaagtctcaaatatccaatagaggattatacttttagataattgctaaagacacggaaagaaaagtgcataaagtctagaaagggaagtcatcaaaatgtcagcatgaaa

SEQ ID NO: 117655 - DNA, 867 bp, Homo sapiens
agacctgactagaaacatgagacagagatgcagcgggttctccatggctgataaagatgagacatggtactatatatgatatgactcgtaggtgacatcctggtcttgaattgtgcttgaatgctacaacatataataaaatgaccaggagtggagaaactcgaatgtacagaagagatccgaacggacattcggatcgtgatgtcggcttctgtcaactggacatccaaatattgtctcgatatcaggatcacagtcccccacatgcataagcataaatgagttagccttgatatttgcttcatgaattgggtaaaattaagctgagggccagatgttttccatctgtgttttagattatgctaaacataaaatgattagaaagcacccatatatgactggtttaactctacatgaaaaaatcagatgacatttagacactgccttagactttagaaaattttagtgtattttgatgtcagaattttgacaagtaatgaaaatattagatgaatagttttactgtaaaacaaacttccatttcataataggcataatgaatcttcataatgctgaaacaactttttgaaaagtgaaagctgcagattttccaagtggtatcaaactaagagttgggtttatttaccctgaattacatttggtatgaggtagacaaccaaaatgtattagttaatgtggtttattatgtgttgtgcagatactactatagttcatatgcataggctgatttatgaattaagtctcaaatatccaatagaggattatacttttagataattgctaaagacacggaaagaaaagtgcataaagtctagaaagggaagtcatcaaaatgtcagcatgaaa

SEQ ID NO: 117656 - DNA, 1708 bp, Homo sapiens
tatttgccttactataactcttagaaaaaaggcttacaacttttgaaggtttagcatgatgtcagatgtccatttgtcatatatggcctttattggcttgaggtatgtatgttctatatgtaatttgttttgagattttgtcataaagtaatgttgaattttctaaaattctttttctgcattcacttaaaagttataattggttctgagatccttcatctttctcagaatctaggaggatgcatctgtacctagaggaggacacaaaggcatcatatgttacattctcgtgacatataatgtctactgcttataatgtctactgtgagtttctgactccccaaatgaaattgaggcccagaaactttcaactgctttgttcgttgaataatgccaagtgtctggaaatgtgactattcagattaaatgcttaatgtgtgtgtgttgactaaataaatctcaaccagaaccttctcagatattttgttgaacgtgggacctttgtttttttttgttgttttgttttgttttgtttttgttgttgttgttgttgttgtttaccagcaggggacccctgttttgtctatgtcaagaacaaagaccaggcaaaagaaatgtcaagccgcatttacaaatgcaaaaatggacttgtttttgatatgcttttcccaacaataagggacatgagtcattggggcatgttacagagagtttcagtaaaattcagaaaaaaataataaatatgaacagccacagcatgcccagaagcctttttatggagccaggcatggttgacctgctttccatgtctcaaaacattagtccctacaagaaccctatgaggtttatcttcttttcacccattttgagagaagaaaagttcagctcagagagctgcaggaacattggggacatctccaagtcacagccaataggtggcagtcatcagtgtgtcttggaagggacaaacattgagcttctgaacagctactccagaaactatggtgctgtggtgaagtcctggttaggagcctatgaaaatggtgaaggaaaagatggtcccagcctgcaaagctgaagtcaggaacccaccaggatctcccttctccctagcctggtggtccacatcatgcagatttactctagattcagcttagactcatttttatactactcgggggacaaggagggaactacagtcagtaacagcagcatgagcctcaggtgctttggggattgaaattcagaccaggaaattccaatacatcagtgcatgtggaggacatgagtatttaaggagaaggttctaggcttccgaagtaaaattggatgtggaggttggggattgattcaaacattaatactttcaagcgtttctatggtatttgtcagctgtggagcaacagcacacatctgtattaatagcctgtgttaagagattactgtgaatcctgaaaaacatcctcattgtagagatgagaaaacacaggcttttgcacatccaatgtctccttaaagcatgtggttcagaattgagaacgtgcagagtgagagtggtatgaattttcctgtaagctacctgaagttctgtttgctgtcatgtggaagaaaagagccttggagaagttttatttttttctgtttggaaagaatacacagagcaagatgatttacaataaaccttttgacctaacgaaaaaaaaaattt

SEQ ID NO: 117657 - DNA, 1180 bp, Homo sapiens
ggctgaccctgaggattcgcgcgtgttgtttaccagcaggggacccctgttttgtctatgtcaagaacaaagaccaggcaaaagaaatgtcaagccgcatttacaaatgcaaaaatggacttgtttttgatatgcttttcccaacaataagggacatgagtcattggggcatgttacagagagtttcagtaaaattcagaaaaaaataataaatatgaacagccacagcatgcccagaagcctttttatggagccaggcatggttgacctgctttccatgtctcaaaacattagtccctacaagaaccctatgaggtttatcttcttttcacccattttgagagaagaaaagttcagctcagagagctgcaggaacattggggacatctccaagtcacagccaataggtggcagtcatcagtgtgtcttggaagggacaaacattgagcttctgaacagctactccagaaactatggtgctgtggtgaagtcctggttaggagcctatgaaaatggtgaaggaaaagatggtcccagcctgcaaagctgaagtcaggaacccaccaggatctcccttctccctagcctggtggtccacatcatgcagatttactctagattcagcttagactcatttttatactactcgggggacaaggagggaactacagtcagtaacagcagcatgagcctcaggtgctttggggattgaaattcagaccaggaaattccaatacatcagtgcatgtggaggacatgagtatttaaggagaaggttctaggcttccgaagtaaaattggatgtggaggttggggattgattcaaacattaatactttcaagcgtttctatggtatttgtcagctgtggagcaacagcacacatctgtattaatagcctgtgttaagagattactgtgaatcctgaaaaacatcctcattgtagagatgagaaaacacaggcttttgcacatccaatgtctccttaaagcatgtggttcagaattgagaacgtgcagagtgagagtggtatgaattttcctgtaagctacctgaagttctgtttgctgtcatgtggaagaaaagagccttggagaagttttatttttttctgtttggaaagaatacacagagcaagatgatttacaataaaccttttgacctaacgaaaaaaaaaattt

SEQ ID NO: 117658 - DNA, 173 bp, Homo sapiens
attctgggactagaaaggaatgtgcttggatattacaaatatgagagcagaaataaaaaataatttggaagtttgggggaaaaaaggaaaagaaaacttccagaaagtatgacaaaaagaaaacagaagagaaagagttagaaaatttaagaattaattcaggagtttaagca

SEQ ID NO: 117659 - DNA, 409 bp, Homo sapiens
agtatatatttgcatcttgattgaaaaatatgtaactggaaacattactgtttaataaaaggtaatgttttatgaaaagaaagttagcctggctctgctaatactgcagcattaaattaaatgcttctttaaaatttccccttttctcgatggtaattaagttaaaacatgaaaaatatttgtattacatgtaatctgacatttaattgatgttcttgccacagacttttcccttgttttattgataaaaggaggggccctctctggaacagatacctaccagtctttggtcaataaaactttcggctttccagggtatctgctcctctctgttcttcagtttttgtatccttttatagcaatgataagttacaatataatagctggagatactttgagcaaagttttt

SEQ ID NO: 117660 - DNA, 385 bp, Homo sapiens
gcctttgtctagccacatgcctttcagggctgagaaaaagccatagagagctttagcagcaacagtcccatctggccccaggactgcctcttcacctatgctactttgttctgctggagattatacacaaggtaaagagggaccctcctatactcctgcactaaagaagagaagcaagtcccttctatcttaaaccaacatcgttcctatgcgaaagaaaagattagtcatgatatgactcaggaaataaaattgagactggtggccaggcatggtagctcacgcctgtaatcccagcactttgggaggccaaggcgggcggatcacgaggttaggagttcgagatcatcctggccaacatggtgaaatcctgtctctactaaaa

SEQ ID NO: 117661 - DNA, 540 bp, Homo sapiens
gttggccaactactcacgcccatgtccacaaccatgagccagtcccacagctgagaagccaactaagagtatgtgagtgagctgtgaagcagacaggttcaaccacataaccaacatcttctgagcaacttactccacagcaggaatacagatgtgagcaaagcagacctggtacctggcctcatgaagcacggatgctatgagaggatatggacaagtaaacaagggaacacaattcagtgtgatcactgctttcaaggggaagtccaggggaattgtggggacacaaacaaggggcacctaacccagtctggaagatcaaagtgggttcccagaggagtaatatttaagctgagacctcaaggatgaataggaagtagtcagagaaaagaggagagagggagcaagcatgttgggcagaggaagagcatgtccgcaggccccagagctcagaagaacgtggtgcaatttggagtcttgctcaggaactaagtccacaatgctagggcactcctgctgtatggagtccactacatcttg

SEQ ID NO: 117662 - DNA, 729 bp, Homo sapiens
gtagcggcgggaggctggcactagcccgggccacgataggtcggactacagctggtagcaactgggggtcggaagtggagcccagacaacagcggaggagaaatttccggggcagaaaatgaaggtgtccgagagactgacaattctcttctgacttcctcagtgctaactggctttgggtatctcctgcagcaaagtggccgccccgccctctcatcccctgcgacccagcacccttcttccttgccttgaggctgcgccttagacagcccggtgggtatctgtttaccccttagcactaagggataagtgcacagtaagtgcagaatcatacagtgtttccaaatcctcagggtagacgtgtgagcttagtaaatgagaggaatagcggacgaacctctccgtgtgtttgtgtctcgagtgccctcatctcaggagcaattttaataacttaacagttgcggtcacattactttgaaaatacaaaaaacgtagaaatcagagtagcaaagaaaattatggatctgatgctgtgccagaattgatcacagttgctctaaagccctggggtaatagttaatatttcatgtgagcctccacttaaacgatttatcaatactcagtacaccactcttggaacagctagtaaaacttcaggtgcattataaaaagtacagtaatgcattggcttcaacttgcatatttcccaaacatgggcgtttgcaagaa

SEQ ID NO: 117663 - DNA, 778 bp, Homo sapiens
attctactgtgacctgttgctgaggtgatctgatgatataggtcttgcctttcattttaactgccattctggcaactgaacgttggcagtaaatgcacctcacttgtctcagaggaaccacaatgggatgtgtttatagttgttgccttgaagtgtgttgtggcgaggatgaaatagtgtatcctaggatgccaggggaatccaccgtctgccaccgcgagcgtgagaagccaatcacctatcactggtatcactggcatcccggccatatataccctagagttgcatcaatggaagattacgatgaggacctggtgcaggaagcttcatctgaagatgtcctgggcgttcatatggtggacaaagacacagagagagacattgagatgaaacggcaaatacggcgactacgggagctccacctatacagcacatggaagaagtaccaagaggcgatgaagacatccttgggagttccacaatgtgagcgtgacgaaggctccttgggcaagccattgtgtccaccccgagatactctcggagacgttgccaggctctgtgaatgaaaaagggtatgctttccatcaggaagatcctctagaggagtttatagcagaaccatctccctgaagcatccaaatcagaagtctcctcactgttgcccatgcagaccacaggcatccaaaccaacggcgacctggaagacctggagggagcatggcccaggcagacacagactcctgaggaagccacagaagttcacctgatggagggggac

SEQ ID NO: 117664 - DNA, 178 bp, Homo sapiens
tcaagctctgtgctagggaaggacaagaagtacatgttaataggatgggacagaaaccacctcctggcatgggagtggggcacacatatgtgcatgttcatatatgtgtcagaatgcgtatttgtcagtgtatgtgtgtcagtgcacataggtataggggctgtctctcagaattcct

SEQ ID NO: 117665 - DNA, 430 bp, Homo sapiens
acaatgtgcatatgtaccctaaaacttaaagtgtaataaaaacaataataaaataaaataaaaaataaaagaaaccttgaggttattcctaaataattttattcccaatcatttgccttagagattattgattgattgggaaagaggcaggattgctgctctctggctgggaactgagcagaacgtgccacatggtctccattgcaaccattgctcttacagggccatggtgccacatttatgccccagcaggctcatcttttcctcaggtctctaagatgttttcaccagaactgctgaacagaaatgcccttcagaggtcagctgagatgttccttcttaattttctttctctgcaggtctgactaaagtgctggattattttatctttcctgttcccctgacttccacttgacttgtttgtgaacag

SEQ ID NO: 117666 - DNA, 756 bp, Homo sapiens
gactctctgtagactatttctgtctggagaaaaggatgggtaggtggatggaagctgtcactacaatactagtacaaaagttagatttaaattcatgtttctttgcacacggtaatctacataaaaaagtttttacttcatatgtagatgaataaaagtgccaagttatattaattctctgataaaatagttttgtaattccaaagctactgggaaaagtccaacagacacatattttttaaatttctaaaagcaaaactagcactggaaaaaataacttggtccagaaatattggtttgtattgcttggaattgtaagcattgtgttgttttaaggtcctttttacccttcaggatagagccatggctttcactggattcccagaggcaccaatgtcacagaaatgagtcactagttttctcagctcttgaaatacgtatctgaagaccagtgaaaatctgacttgtcaagactatgattctaattactagggtttcttgagctcactgtttttgctattaaatattttcttccttcctccagaaattctgtgtttgaggattttatgtatcccttgtgaaataatccccaaataatgaaaattcaacaatacaaagtgatgcagagacaatgatccttgacaacagtagtatagatatctgctcattaaaaaaaaaaatcaaaggccttattttagtctatatctagttatttttttctacttttcaatgtttctccctatctttctagaatta

SEQ ID NO: 117667 - DNA, 436 bp, Homo sapiens
ggtgcatgcatgtggggaagctggcatggccaggaaactggtttgagttatggagaatgggcatgggcacaggggccaaggtgaagttagatgagtgggcagcgcccaggacagcaagggctttgtggactttatcggagaagcagttgggaaccactgatgtcatgtgatgaaagttcatctttggaaggataagtagtgggcagaatgcgtttgatggagagagaccagaagcaggaaccaagtcagaggcttctcttttatatattttacctttggcaacccaggggctcatttacccatttgtactgtaagaacagattaatgggaagctctagatactcatttagccagtcatccgtggggcctgtgcccggctcccctgccacttcacccagaaagcaacttgtgaaatatccagctcattaaacacatc

SEQ ID NO: 117668 - DNA, 736 bp, Homo sapiens
ttcatccttcgaggagggggccggcaggtgtggttgcaagctggactagcagcccagcggggcgagacgggggagtaggaattgcgggggcctggtatttccccagagcctcctcccaggccagggagatgccacagtgcccgactttggaaagccaggaaggggaaaactccgaagagaagggggacagttccaaagaagatccaaaagaaaccgtcgcgctggcttttgtgagagagaacccaggggcacaaaacggacttcagaatgcccagcagcaaggcaagaagaagaggaagaaaaagaggttaggattgaaagctggggaatggggagccatgttggtaataacaggaaggacttggagggaagggggtcttggctgatgatgagagagtaaaggagaaactgtgtgctgagactgtcaacatctcaccacttttggttcatataaaaagaatctacttcgatgatctgttttatagaatcaaatgattgtgtgtgtaatctaaaaaaccatgccttgtcctaattttcattctatttgtgtttaggatgcctttaaaaaatagcaggaaaagaagatttccttgttttaagaaggcgctgatttgtcctggaaatttagtacgccttcagtatgatagcaccatactgacttatcaggatccaactgcagcttgtgcattccggttcttgtttaatatttcaccatgccttgctccattcagactga

SEQ ID NO: 117669 - DNA, 253 bp, Homo sapiens
ttgatgagcatgggaagaaaggagtctctaaacatttttgtcaccttccttaattctgccttttttatgttagagataaataatttacttgtgtgagagacagagcaatgatgccatttacctgctctgtcccctgacgcttctagcagtgaaatggaagctttataagctctatggcttctcaggtcattaaagccacctccctgcttcacagaagtcagatatggccatgtggatatgcctaccacttatg

SEQ ID NO: 117670 - DNA, 254 bp, Homo sapiens
agtactaaaatgtgactgggaaaaaagcaagacaaatatcatcttttgaagataggaaatgttaatttgccaaccaattgttcaccaatcttggtttctggtgtttgttggtacctctatttggtggggaggattttataaagttaagagagtcaggtgaaaaattacagttcataaaatgtaatccttgctaatagaagatatttttaaatgtccactaaaagaaaatatggtttttgtacaactagcaatca

SEQ ID NO: 117671 - DNA, 283 bp, Homo sapiens
ttcgccagtgtcaaagctgactcacacctgaagatgtctttattattattattattttttaagagatgagatctcactcaggctgttcttatactcctgggctcaagcaattctctcaagtggttgggactagaggtacatggcaccacacctagctgaaaaagggaatcttaatgagacagttgagtatttatgtagatgttgaagtgcttttcgtatttatgaactgagttcgcatcctctactcacttcttaaggaatctgttatcagaattatatataa

SEQ ID NO: 117672 - DNA, 640 bp, Homo sapiens
ccccgggctggggctccgctggggaaccggccgagcggcgcgcgcggaggtgtccggcggccaggaggatggccaaggtcccggagctggaagacaccttcctgcaggcgcagcctgcgccccaactgtccccggggatccaggaagactgctgtgtgcagctcctgggcaagggcttgctagtctatccggaagaaacagtgtacctggcggccgaagggcagcccgggggcgagcagggcggcggggagaaaggcgaagacccggagctgccgggggcagtgaaatcagaaatgcacttaaacaatggtaacttttcctctgaagaagaggacgccgacaaccacgacagcaaaaccaaagcagcggatcaatacctgtctcagaagaaaaccatcacgcagattgtgaaggataaaaagaagcagacacagctcacgctgcagtggcttgaagagaattacattgtatgtgaaggagtttgcttaccacggtgcattctttatgcacactacttagatttctgtaggaaagagaaattagagccagcctgtgcggccacctttggaaagacaattcgccagaagtttcccctcctaacaacaaggcggcttggaacaagaggccattcaaagtaaga

SEQ ID NO: 117673 - DNA, 407 bp, Homo sapiens
atctttgtcactgtctgtgaagctgctcagagttggattcagactcctttgatagcctttttttttccatttttaaaaatttatcttattattttttttgagacagagtctcgctctgtcacccaggctggttttacagtggctcgatcacagctcactgcagcctcgacttcctgggctcaagcaatcctcccacctcagcctcctgagtagctgggactacaggcacacaccactacgcctggctaatttttaaaaaaattacttgtagagactgggtctcactatgttgcctaggctggtctcaaactcctgggctcaagtgatccatctctgccttccaaagtgctgagattgcaggtgtgagccactctgcctggccttgcctccatttattttaaatttaa

SEQ ID NO: 117674 - DNA, 360 bp, Homo sapiens
tagatttgacaacttttaagaactgtacagtgttcacttggactgcgaagccccatttgaaatttctgttagacaattcaacgtgcccaaccttctcctttggttttgaagttcaatgtagaacagattcttaattgggaattaagaatgcaccactagatgtagcatcgcggcctcgtgtccttaagctctgtgaccttggactaagtcactgtaaaatgggagatgacagtgcctgacttcctaggatcgttgacaggattgaatggcaatataaagcccttagtacagtgcctagtggataagtgctcagtaaatgttaactacaacgagtaaataattctgtttgatggacattga

SEQ ID NO: 117675 - DNA, 241 bp, Homo sapiens
attgcaatatttattggaattgaacctatagatgaatttgggataaattgacatcatcggcatatgtatccagcctttcaatctttgaacataatgtaaccctctatttaggtcttatctgaatatttcttgaatttgtctgctttgtatctgtacttttgttgctgggtcaaattctcattgtttcttacctggactgttgaatagctttcaactccccatctttggtctatcttttcca

SEQ ID NO: 117676 - DNA, 331 bp, Homo sapiens
ggaacctggcgccttctacagagaaaaaggtcaaggctgtgaccttgtgaccttgtgggactgtgatcgccactgtactccatcataggtgacaaagcaagaccttgtttcaaaacaacaacaacaacaaaacattgaattctatactttaaatgggtgaattgtatggtatatgagttatatttcaataaagctgtttttaaaagacaataagaatactaaattttttttttcagttcaccccaaaagaggaacagagaaacagcaaacagatgagacaaatgcaaaacactaaaatggccagtccagccaaatccagccaaatcaaatg

SEQ ID NO: 117677 - DNA, 465 bp, Homo sapiens
tctatagcgtatttagtcctggaaacaacatggtgatttaatttacaaatgaccaaaaatgcctttggatttttgagaaagttcaaagctactttgaacatctacatcttgcctagagacctgggcaggaacttctgccttccacattgatcagagctaaaaagtctacactagctgcccttatggagaacctactacatactcaatattttagctacacgtccaatgtttatttcattctaacccaataatcctgcaaactgagtaccttcaattttaggtgaggaactaatagagattacacacagtaaatagcagacttaggattcaaacctaagtttgattgattgcaaagtctacgtctttccaccagtcctaagaggataaaacttcctcctacgtccacactccagtgcccaccagccttgtccctaataaaattaagttgtatcatttaaaaaaaaa

SEQ ID NO: 117678 - DNA, 346 bp, Homo sapiens
aagtcctgtgaaatataatagccaacacattttaagcagagggaaaaaagcatgttcaaaatctgctgcattctctgtagagacaaagtaataacaaaacatccatggaatttaattaacatagaaaattatttaaaaacaaaaacttttctccttaaaattgtcatttttctttctgtattatctatttttttccatgttgccttatgaacacagtgaatctaataatagagcagactggcttttatatccctttacttaaaaattcaacaaagttaaaattccacgtaaaggtaaagcttagataattcaaagttatgtcatgttctaactagtcagctctcct

SEQ ID NO: 117679 - DNA, 856 bp, Homo sapiens
gctggcaagtgctgcagtttttgtttatgactcggttgtgtcagtgggagacagaaattctaaaagatactgcaagcagatcctggtcgatttctgtgagtgctataagttctgggagaaatgatcttgggctttagatgttatcgctgtggcaattatatttcttctggtctcacagaagcaagtgtcattaagagctttaaatatttgaaattagaaccatatgagttattttgagacctctagttactgtaattaaacatacacaggtatatatgaatgaggacgttatttatgcatgagcaagggaagcttttccatggctctgattattggcaggcaggggtggtgaggaaggaaagcaagatggacacatctgacacatttaaagcccagtttagccagagtaaggattttgaggtcctttctctttgttcagattgcgagtcgatggtaggactttgggagggatgtagcaaaggggatgtaataatggcaatagctcatgctcatgaaacacataggttccaggtaaaatgctaagctctgtgcatatgatcactcactgttacactcttggcaatgttattatctctggcttaggaaagtagatgacatgcccaagattacatttgtagaactgtggtgtgaacccaagccaccctgagtccagatcccaaaagcttgaccactgttttattttctatggggggttacatgctccctcagtaagttttagatttttaaggtgccattgttgagcagaagaacctttagagctccttatttcttttgtggcttttcctgtctcagggaaggtgcaggcagaggaagttaaattccgatcactctgaag

SEQ ID NO: 117680 - DNA, 277 bp, Homo sapiens
gtgaacaaggtgccatcttggaaacaaacagcagccttcaccagacaccagaccttctggcaccttgaccttgcgctttccagcctccagaaccgtgagaaatcaatgtttattgtttataaattacccaatctgtggtatttttttaaaacagcataatgggactaagacaccatcagaacttgggaccaaaagaatacttttgccctctgagagctgattcttaacacagaataaaaatgaagaattactttaaagagatggactacctcaaggg

SEQ ID NO: 117681 - DNA, 165 bp, Homo sapiens
gtaattctgatttatgcgttattttagtttgacttatttttaacaaaatattagaaattatgctttaaaatgtttaatgtggactgaaattttcatcttttgtttgagaatctatgaagtgtatcatatacgtggcctaaagcaaggtgtgtattttgttattct

SEQ ID NO: 117682 - DNA, 342 bp, Homo sapiens
tcccaatcaacataggaaatctggtgtcactgagatgggcttccactaaggtggtgtctgaactccttaaccagactttcctaggagtcaaagctattttgaagtgtttcaggaaatagatgtggttttgatgagaaattatataattcaaagtcctgtggctaacaagtcagcaaaagttctatggaagaggagagagacagatttgcccatattttagctcagggcttaatgtataatttataaagcaggtggattattcctgaggacaaaaactattcctaaaattggtcccaagtaggcctcttttgaaattggattccctacaatcccattcacaat

SEQ ID NO: 117683 - DNA, 368 bp, Homo sapiens
atcaaaattcctatgttgaaacctaaccccaaatgtaagggtattcggaggtggggtgtttggaaggtgattgggttatgaaggcagagagctcatgaataggatcagtatccttataaattcaatcccaaagaatccctcacccttttgccttgtgaggacacagcaaaaaggcactctctatgtaccaggaagcaggccctcgccataatgaatctgggttccttgatcttgaatttcccagcctctatctatctatctatctatctatctatctatctatctatctatctacctacctatctattaatttatttgagatgagtttcactcttgttgcccacactggagggtagtggtgcgatctt

SEQ ID NO: 117684 - DNA, 815 bp, Homo sapiens
atgaagcttaaatttatcagagattaatagaggaaagtgtaaattgtttaaaaggcaaatgtaagaagttgagaactgtctttctctggagtgaacatctgcttagtagattgacatgcttgtgagaccaactaagtattagctacttcctttttagagataggatcttgttctatgtgtgccaccatgactggctaatttatattttagagatgagagtctcactatattgactgggctagtctcaaactcctgacctcaagccatccttctgcctcagccacccaagtagctgggattacaggtgcaagccactgcacccagcctagtactagtcctaggtttactgggaatttttctagtgattctgagaaacctacatctttgtgcttttattttttcagtgtgacagggacagttacttcccccaatatttatttattttttatttttttaagacaatgcttatttttcaactggatctacagctactcagaataaagactacatttcccagcctcccttgcagctagatgtggtcatgtgactaagttctggcccaagaaatacagcctttttgaaagggaagatatgctctccttcctttccttattctatcagctgggatgcagatgctgcggtgagctacatggaccatgcagatggagataacactctaagaagggtggaaggaacttggggttgtgataccacagagcagccatgttatatgagagaaaaacaaacttctattttgtttaagttatggtcactcagtctcctttactgcaatggtatttatatcctaaataata

SEQ ID NO: 117685 - DNA, 406 bp, Homo sapiens
gcctcccacgtagctgggattacaggcatgcgccaccacacccggctaatttttgtatttttactagagacagggtttcaccatgttggccaggctgtctcaaactcctgacctcaggtgatccacccacctcggcctcccaaagtgctgtgattacagtcgtgagccaccactcccagccaaatatatttgtttttcttcctttctttctttttctttctttcttttctttctttcttcctttctttctttttctttctttctttctcttttctttctttcttttctctctctctctctctttctttctttctttctttctttctttccttcttcctttcttcctttctttctttttttggatggagtctcactctgcactctgtcacccaggctggagcgcagc

SEQ ID NO: 117686 - DNA, 404 bp, Homo sapiens
acctctgcctcctgggttcaagtgattctcctgcctcagcctcccaagtagctgggattacaagcttgcaccaccacgctaggctaattttgtatttttagaagagacacagtttcactatgttggtcaggctggtctggaacccctgacctcaggtgatctgcctgccttggcctcccaaagtgctggattactggtgtgagccacatgcctggccttgtaaataataagtttagttgaataaataacaatgcctccgggaggtagctattatatccattttacagatgaagaaactgtaagtcaatgttaatcaaatagtatcctagaaaatagtagaaagcagaatgctggagctgagatttgaacccaagacttttgatacttcgtccagtgtgctttcc

SEQ ID NO: 117687 - DNA, 620 bp, Homo sapiens
tgccactgtaggaaacaaaactagacagagatttataaggacatacttgagaaacaaatgaatcagaatgttatgcaaagattaatagaatataatggaaatggttagtaaattagcaagtaaattcttggaactatcaggtattagcagaatctcaaaaaggatctcagataataattacaaataatgaacagctgaagatgaacaaaagttttttttgtttcctagaaaagaatccaagtttacttagttaattgaaataaatagaagcagttaaaatggtttttctggaatatattattgttaaaatgttaacatcagcctacttaaggttatcctttggccaagttcagaaagagatagagtttaaaatctgccataaaaaccacagaaattaaaagaaaaagcaagaacgactacaataaacatacatttacttgggcttcaggacaaataacatatcaaaaagcacatgtgaacagcctaaacttgcttattaaaaagaattagaaagtaattgactggattaaaaaataaaattcaacaatcttgtttaaaaaacatacatatttatgctgggtgcagtggctcacacctgtaatcccagcactttgagaagc

SEQ ID NO: 117688 - DNA, 184 bp, Homo sapiens
gaaaatccattccttgaattgaaggtttctgtgatatttcaagaaatgggatagaatcaatgttctgatgaacaacatttaacaattttgtaagtaaaggtaaagtcgcattaaatttattcatgcatgtggttatttttgaatcagccacacacttgcaagcaaattactgatcaagccttat

SEQ ID NO: 117689 - DNA, 254 bp, Homo sapiens
gcacgagcccagttacattggaatttcagataaacaaggaaaaaaaagtttttttgacacagggtttcactcttgttgctcaggctggagtgcagtggcatgaacacagctcactgcagcctcgacctcctgggcctaaggaatcctcctgcctcagcctcccgagtagccaggaccacaggctcatgcctggctaattaggaaaaaattttagtacaagcgtatcccatgcaatgtttgggacgtacttatgc

SEQ ID NO: 117690 - DNA, 638 bp, Homo sapiens
cccttcttgggagaagaaccatgatccatagggctgctttggtagtctgggaacattaacaccctaccggtcaaaatgttccatcagtatcccgaactgagagtatttcccaagcattcaacatacaagggatggatgaaggacccatgaattcctaaataggcttaaagaacagatgagaaaatatgcaggtttagaaatggaagacccactggggcaagggatgctaaagcttcattttgttactaagacttggccaaacacctctaaaaacaactacaaaagatagagaattggaaagattgtcccagagactaacttcttagagaagcatataagtagggacaaagagcagcagaaacaaaaggcaaaaatcatgctgtctaccttacaacagagaactctgcagtaggagacacaaggaagtaaaacttacaaaccctctaggccaccagcgaccaaactgtatacaagggcttgagtttttcttattttttagattttgtacttctgagctggtaaagggggcatttacgaagctgatgcctcctcccccaaggggcacttcttcaaggggaagagagttgggggcactctttggaggtgcaaggggacaggaagtctgagtatcctttaca

SEQ ID NO: 117691 - DNA, 404 bp, Homo sapiens
gaatgtttgcctcgggagtttattgcaggcaaattatccctggaaaatactgctgggaaaggtgctgaacaaacaacatctacatttacacagttagatattcattaaaacagaaaatgcccattaaatttagagagatgctaagtgccagattcaagaacagaccagtgcagaaaagttggtgcaaatttctccccattgtgtaccagggataagtcaggttgcatagcagtaacttttcccaggtaaccctcactacaagactgtcaagtgtaccttgcaagaagtgagttttcttttttcctaaggaacataatgagaaggtcagacagtaggatttcaagcaagaacagtagcaattacatctgaacaaggagttcactcttgatattccaatgggcccg

SEQ ID NO: 117692 - DNA, 181 bp, Homo sapiens
tctggtaaccccctcctgtccacggtttctctggtggcccgttctgtccacggtttctctggtaaccccccccgtccacggtttctctggtagccaaccgtggactagtactagtccacggttggctagtagtctacgctggaatggaattgactagtccacggttggctactggactagt

SEQ ID NO: 117693 - DNA, 673 bp, Homo sapiens
gaccctgtctcccattctgagaatctgggttagaactgcaacatacaaatttcttttgggggatgggtacaattcagcccgtaatacccttgccctaggaaagcccttatttctacctttgcctgtcaaactcctacatgttccaggctcactctgaatcaaacacctacatgttcaaggctcactctgaatgtcacgtttccatgaacttctccttaactctgtgcatggttgcttagctgccttttatgttctgggaggcccccatgacagccaagtccccaggcgcaactgctgtgatgaaggctggatttttgcttccacctcttggggacacaaggcttgtatagcccctggggcccacgaggcttgtatggcttctggggccctgctgttcccaccacaagcagtccccttgggctaagcatcactcagggtataccatgtgtggccatctgtataattcatgagggaggactgtgtcacccaggcactgctgctcatttgcaagaattatgggctttgacagaactccctgtcatgcaggcctccttgtcatatctgtggtaattactattcctcttctaattacttatcttatccacatggcccctttcagctgcagcacaggagactcctgtcctcttctgcagaggcagctgtgtcactgcca

SEQ ID NO: 117694 - DNA, 319 bp, Homo sapiens
ggctaatagggatctttgacacatacgctttttctccctttccagctggccctgttgcttaaagtggcagaagtagatgtcatgttggcagacagttttgttcactgtcaaaactgggtttatctaatgtgtatttgaaacaaacaaaaaaaaatcaataaaatgagcagctttgggagccagggtgaaggcggttgagataggacagaactccagaggactcttaaacattattcaggaagctctgaagctccctcagtctgggattccagaaaaagattgattaggcaatagtttaccttagaccatgaggagatgg

SEQ ID NO: 117695 - DNA, 393 bp, Homo sapiens
cagttttgttccatattcctatatttcctatactgatgagtgtcaattgcattataatgtacattcatcagaccttcaacaatggccatgtaaaatcttttgccatctgcagacaatcatttttctctgattctttcctgaaatattttgtgagcaactataatacaaatgtgctttgtctttaaggaaattcttggaaaagactaacaattacatgtttctgataactttaaaaccatcccgttgaactaggtaagaatttcctgaactctcatggaaaagcaggattcataaaattgctaacccaagattaagcacaacagaaattaattatatgagactgaaataaccgatgaggatgattgtaatttttgtcgcttttttgtttcaaac

SEQ ID NO: 117696 - DNA, 403 bp, Homo sapiens
caatatctgtacaagagaaaagtttttactgatgtcagcacttcttccctcacaaatctctctcatttttcttctcctttcttttccctctggtttaccttcctcttacggtattctacctttcctttaaaaaaactttttatttatttatttacttaattgataaacaaaaatcatatgtactagacttttgaaaatggctgagagtagattttaagtgttctcaacacaaaaaacgactagtatgtgaggtaatgcatatgttaagtagcttaactgagccatcccacaatgtgaacatatttctactttccctttctatcatgctttctggtacataactacttcaggactacctctgagacacatggtggctttgtccttaagacatgtcttattgctc

SEQ ID NO: 117697 - DNA, 327 bp, Homo sapiens
ccccctggggagtgggcaggggctgtgtgaaccctgcggatccctgtcatggctgccagcgcccgtgggcccaggccaggctctgcccctgagattccatggcctcagaggggccctcctggcgcacactggcagctgagctcgtcggtcctgaggagttagcagccctgggaggtgaggatggcatttgggtgccttatagatagggccaggtggccatgcctttggcattcttgaagactcactgcgggtggcaatgacggtggtatcatttgtgcttttgtcttccagtaaggaaagcgtgcagagtttccaggtttgcaaatt

SEQ ID NO: 117698 - DNA, 547 bp, Homo sapiens
atttccatcttaccaggtcaaaccaaaccagtcagtggggctactttttatagtgctttaatctgaatttagagctgatttttaaaggagtctttaaatgttaatggtatactaactaacgaatagtgcctcattatcattcttgagtcagatacttctgttgatgggagaaacagaagaatccttccctttgggtgtgttgagctcccccaaagccatcagcatctcttttgacaaatgctagtcctttctctgtgctttggaatcaggttcctgcatcatcacccggactgtaaaaagtatcataagcctcccttgccagatgccaactcgtggggcatttcaacagagtttctttgaaatgtttacaacgtattcttcttgataagcaatgaacttaacatttagatgcaatccgtgaaaagaaaaaaaaatctgaaaaatatctcctgcatcaggtctgtgttatttatgtattgtgaatgttttcttaattttattggctgtatgctttcttacacataataaaaatattttgtgaactcaa

SEQ ID NO: 117699 - DNA, 344 bp, Homo sapiens
ctcggcctcccaaagtgctgggattacaggcgtgagccactgcgcctggcctgtttatttctttattatctctctttccctccactaggagagatgtctcccgatagcagggatctcgtctgtattggtcattgctataccaccagaggtaggcataattaggtttggtttttctataatataaaagatcaaagtacacagtgtctacagtggttgtagacaaatagacatttattcctctcatataaaagaaatgtgggggataggtggtcaaagctcatatgatagcccccatgatctaaaaacataggcttcaatctttctgctccactatcctcaacaca

SEQ ID NO: 117700 - DNA, 218 bp, Homo sapiens
atctctatgagaactacaacccccttgggcctctagcatctagtctagtgcctggtacagattaggtacagattagtgcctggtacagatattttttgaataaattaataaataggtggtcttatcctttgctatattgataatccactaattcatatctctagctcagatcagtcttctctactccaaatttctattcagttgctccagaatgaaat

SEQ ID NO: 117701 - DNA, 278 bp, Homo sapiens
atgattaatctaagtaggatataaattgctcaaaggaaatacctctattgcatgtatataattcattttaaaatattgattattttttaattttaccataatggttgcaatagaggtgtttatggaaaagagttcttagtgtttttatcctagaaatataaattgtaaaatatctaaaacaacagttgttactttttaacactcctttaaatacactttgcagctaaatccacaaagtctaccagtctaaggatccacctagccaattaaaattttta

SEQ ID NO: 117702 - DNA, 396 bp, Homo sapiens
tttataaattacacagccttgggtatttctttacagcagtgtgaaaatggactaatacagctgctgactcttcctcctatgacagatgagttcttagttcacttacattactccctttctttctcacaacacagttacattgctcttgtaaagtcctctctatgttacttttttcactacaaataatatgactaaacttcttatttttaatcctattagtgataggtaaattatcttgtctcctcgctttataatatgaagatagagtgcagttgcaatatgtgtgcacttagctcatacgtattagctaacttcatctggccagaaaagaagaaagtgggtatgaggaagaagtgagagagaaaacgggggcaggaggaagacaggccgaggggg

SEQ ID NO: 117703 - DNA, 627 bp, Homo sapiens
ttattcccattgttacgtattttgcagttttgtgtcatttttggaggaaatttcaggcatataacaaaatcctatgtggacagaagttagaatatgtaagatacaaatgatcagacaattcaatccttactttgacttctggatgttgttatgatagaatactggaacattttgaaggacagattcaaaataagaaaattaagtcctttttttttctattcttaacataattaggaatggattagaggaattagaggcaagttatcctccagataagcttaaatcccattttaacaattctcaaggaataaaaaaaattttctttattagtggaatcacttgataatttttttttaaaaaagctcagaagttttccttgccctataaaaagtaagaggagggatatctttttttcaattacccagccaaaaggggaagaagccagagctagacaggaactacaaaatcaataaggtcttttttcatgtatcttatttcttcttcctgaggaatattcttacctgtgtgtttgtgtgttgtttatttatttatttataaaaatatggagatattatcctcttcttccctcttccattcttttttcttcggtaaatctcctttctttct

SEQ ID NO: 117704 - DNA, 189 bp, Homo sapiens
caaccccaacatctacagattgaaaaaaactgaggtccaaaatgattgagtcaaggtaccccaggaagtcaaaggtggttcccacatgtgtcagacctgcccggcaaactggcttaatactcgacatgcggccgggcgcagcagctcacacctgtaatcccagcttttggaggccaaggcaggtggatc

SEQ ID NO: 117705 - DNA, 128 bp, Homo sapiens
gtgccactacactccagcctgggtaacagagtgagaccctgtctcaatcaaacagttcagagggggctcccaatcagatacaaacaagatccaaaaggtaaagttaataattttgtagacctcatgtg

SEQ ID NO: 117706 - DNA, 141 bp, Homo sapiens
cactctagagtttataatagattaagagaaagctataaatcataaaccctaagaattatcacatctagttcgatgccttacatagttttaattcaataaatatttgttctaatttgtttgtgctacatgattgctatgtta

SEQ ID NO: 117707 - DNA, 517 bp, Homo sapiens
ccatttgctgaagaccacttcctgggcttactgacttcaatgtgcagtttcattcatcctcacaacctcctaatgaggtgcagattatggtcctcctggtgtagatgagaaaacaggcctagggaggtggcacagaagggtacagccgagcttgaattcaaactgaacctgtgctctctgcatcacagtgagatgacccaggaggatatcatgttcagcctgcgggcagggtggggcagggcatgagcatggacccctctgccagctttgcctctgtggtcctcacctcccacatctgcatccagaggaagaattatgcttgcatttgctgagtgcgttatacatcatctcctttaattcccaggtcctagccaggtactgttatttgtcccgtgttacagatgtggtgacgagctcacttgctgacttttagtagtggaaccaggatttgagtctgtgtgactctctatcctgagttcttaacaaccatgcatttaaaaaaaaaatttatatatta

SEQ ID NO: 117708 - DNA, 244 bp, Homo sapiens
agttttgtactttatatgagtgggattatatagtatctagtgggattatatagtatctactcttttatgtctagcttctttcattaaacattacattgatgagagtcatccaaactgttgtatgaagcagtttattctttctcattgctgtaaagtattatattatatgactatgacatactttgttatattgatctctatttgattgttgatggacatttgggttgtttacagattgagtttt

SEQ ID NO: 117709 - DNA, 465 bp, Homo sapiens
acctaccagctggtcccttttgccttctccatcctctttcctgccactctttgcactttgtgctccggcagcaccaaagtgcttgttgcatttgcctgctccatcatgttcttgcatgcctctgtgtcctactcatgctcatctgtccattttcctcatcttgcttcctcatttggataactctgacttactctgtagaatcagatcacatggcatcttctccagactttccttgggtgccatctgcaggaaacctcctctctcgctcccagcctcctcattcctggcacaaagggcagcccctcactgtgctccttccgcactgtaaatccattactgacttacatcagtgtaatgaaatcatccatgcacacacccatgtccttcttgacactgtaagctttgtaagggccaggactcactcctctttataccctgtacttttcagagtaaatggaacattat

SEQ ID NO: 117710 - DNA, 330 bp, Homo sapiens
tggtgtttggtccccaagtgacaatctctgtcttttttgtaaggtttccctctcagcgcatttaaccgcttaaaccctttatctccttgagaatctgaaataattgaggagtggacagttactagtcagatgaaaataccagctttgtggtgagtaatagcagactagaaaaatgcagcttgccttgtaatcagagtaggccctctctcacctccccagcccgccctggggacgcatatgggcaagtcgggtctgcacagaagccatgtgagtgttgcttagagtctagcctccccatccctaccccccttcgagcacagcaacccacac

SEQ ID NO: 117711 - DNA, 644 bp, Homo sapiens
actggctgtgagaccctgggcaaattacttgacttctccttgcctcagtttccacatctatgaaatagggacgatattcgtacctaatatacttcataggatggttatgaggacttgatacatgaacaatgcttagaacagtatctggcaaatattaagttgctaagaaaaattattggctgctgctattatcataattattattattccactaatggaatgtaatagtctttctgcctctagtctctctctaattttagctctcttacatactactgacatattaacattcctagaacttcaatcaatgctaaccccttgctcggaaatcatccatagtaaaaaataaaagtctgtatgtcttatgctatcattcaaagctatgatctagtcttgaactgtcttccaatatatcttctcaaaaaacccactggatgtgagtcttggtcccttgaacctgagctgtcatctggagggctagaagagaactaggtccttattggcggtgtggcctgctgagatgttcactggaggagagatgccctatggtcccctgctggtatgctttgtttccaggctggtatccttctaagtgaatatgatactgactgtggcctgttcaggtctagttaagaagaccctcc

SEQ ID NO: 117712 - DNA, 124 bp, Homo sapiens
gaggcaatagtaattttggggtagtttggcctatgactggctataggaattttagaaactaagtattgtgtcttacagcttaaggtgtttccccaaaattgttttggctattctagtttttttg

SEQ ID NO: 117713 - DNA, 548 bp, Homo sapiens
tctgttagaattaacatgtaaatgtatgggtggattacttataaaggaagttgctaggaagaatcagaaaacataccgtatttacgtggacaaatgtctgtcacaggagcgtcagatcaggattgctgaaggagagctgagaatgaaaccaccatttattcagcactcagaatgctccaggcagtgtaatctcattccatcttcattcatgactccagacaggtattgttattcattgtttatacttgagaaagcagattcagagaagttaaagtatctaccacaaggtacgaaagtagtaagtagtaatgccagagtacaagcctaggtctgcttccaaatttcgtggtttcggatttagtgccttcattgtgtttcacctacaggttaagaagttgttggtaagcaagaaaatatttaagacgctgggagaatccaaaaaattgtctagttgtgtgtaacatagtctcaggattcttacagtgtgcaattttattcaccccctcatattcaaaataacagtatcagtttgaccttgaaaaaagacc

SEQ ID NO: 117714 - DNA, 919 bp, Homo sapiens
tcagtggaactggaaggcgggacggcgagtgcgggagaaggtctccattggccgaccgctctagctgtagcggagacccccaagtagggaaattggggcaaaacgcggagcgctccaggctcctacgggctgtgcggtgccagggctcgactgctgagcgtcgtgggctccgagagggacgcgggcggagggcaaagagcgtcagatcaggattgctgaaggagagctgagaatgaaaccaccatttattcagcactcagaatgctccaggcagtgtaatctcattccatcttcattcatgactccagacaggtatggccaccagtgctccagatttacattctatttacctcacaaccccagtggaaaaagaatatctctttcctgattggtccagcagaaatcttggtattaactctgactgcccacacttgaatatgaactattagtaagtactgtggccaagagtttgcttcgggaaagaatatgataaagtcaccttatctttcatgtttgctcagaatagtgaggtgattctccacaggaaaactggaatgctgttactagaagaagaaatactggacaaagctaatagatgtccccaaaagtgatgataataattttattcaaataggttcatagatcagtctggtgggcttgttttcacattttatttaagaaaaactcttgtaattacaagttccccagtctgtaaatacagatgagattaacaaattttgttattttttgactgcctctgctttatagcacccctcccctccaaagacttccccaccaataatttctgggacttcctagagagtgtctcatacttacaaacatacctgcctctactggtcatcccactaggcaagataccaggaccactgctctgccaggcaacagtctatccctcttc

SEQ ID NO: 117715 - DNA, 638 bp, Homo sapiens
tcagtggaactggaaggcgggacggcgagtgcgggagaaggtctccattggccgaccgctctagctgtagcggagacccccaagtagggaaattggggcaaaacgcggagcgctccaggctcctacgggctgtgcggtgccagggctcgactgctgagcgtcgtgggctccgagagggacgcgggcggagggcaaagagcgtcagatcaggattgctgaaggagagctgagaatgaaaccaccatttattcagcactcagaatgctccaggcagtgtaatctcattccatcttcattcatgactccagacaggtattgttattcattgtttatacttgagaaagcagattcagagaagttaaagtatctaccacaaggtacgaaagtagtaagtagtaatgccagagtacaagcctaggtctgcttccaaatttcgtggtttcggatttagtgccttcattgtgtttcacctacaggttaagaagttgttggtaagcaagaaaatatttaagacgctgggagaatccaaaaaattgtctagttgtgtgtaacatagtctcaggattcttacagtgtgcaattttattcaccccctcatattcaaaataacagtatcagtttgaccttgaaaaaagacc

SEQ ID NO: 117716 - DNA, 574 bp, Homo sapiens
tcagtggaactggaaggcgggacggcgagtgcgggagaaggtctccattggccgaccgctctagctgtagcggagacccccaagtagggaaattggggcaaaacgcggagcgctccaggctcctacgggctgtgcggtgccagggctcgactgctgagcgtcgtgggctccgagagggacgcgggcggagggcaaagagcgtcagatcaggattgctgaaggagagctgagaatgaaaccaccatttattcagcactcagaatgctccaggcagtgtaatctcattccatcttcattcatgactccagacagtgactctgaaaatgaagtaacatcatgagaagaggaaaccatatggaattattacacttctctttccacatgaacagcctggctattctctgcccttctgtactaaggcctatcctctggaatcatagggtggcctggaagcctcaaaaggaaattctcccttgtggtcagagggaggaactgctgtcttccatcacccttcttcacactgcaaatatgacttggaatagagtccatgcaaaaatagttttatgcttctgaa

SEQ ID NO: 117717 - DNA, 601 bp, Homo sapiens
tttgctcattagctattgttaatgttagtgtattttacatgtggcccaagacaattcttcttccaatatggaccagggaagccaaaagcagaaacacctctgctctaaagacattagtatcagaatcaccatttattttgaaaattattatctttaccttttacatatgaatatgtttactaaataaaacatataattcataaatcatttatacttttaacaagttctagcatgtattaatatatttttgcattaaaataaataaaatggctttctgagattgtaaaacagactaacatttaaggcaacataaatttgtaatgatttctacatctacagtgactctgaaaatgaagtaacatcatgagaagaggaaaccatatggaattattacacttctctttccacatgaacagcctggctattctctgcccttctgtactaaggcctatcctctggaatcatagggtggcctggaagcctcaaaaggaaattctcccttgtggtcagagggaggaactgctgtcttccatcacccttcttcacactgcaaatatgacttggaatagagtccatgcaaaaatagttttatgcttctgaa

SEQ ID NO: 117718 - DNA, 169 bp, Homo sapiens
ataaaacttacccaagtacattataaaagaatacattttaaactacttcaattgtcattcaggcaattaaaatacagaaaaaaaagaataggtcaggcacagtagtggttcacatctgtaatcccagcactttgggaggccaaggcagtggatcactggagcccaggag

SEQ ID NO: 117719 - DNA, 356 bp, Homo sapiens
gagacagtaactcaagaatttgtattctgaaaataaccaccttataaatttaaatattttaaaggcaatcatgtgtatacacacatttaaactcaattttaatgctaacttttcaaaatcaagtatttaactggaatatattttatagtcagtaaatggtagaggtattaaaaaaaccaattataaatggatttcctgttgattaatcctccccttacgtttttgattaggtgaagaattacatgggcattacattgtcctctggttcataaatgtagtgtaactagaagagactaaaagttaagaaattgcaaacagacacccaaggacaggtcagtttcagtgcccaaactgac

SEQ ID NO: 117720 - DNA, 482 bp, Homo sapiens
gataataacatagattcttgtgaaagacagcagttctacaaagattaacggtcctctgtccgttaatcttgccttgtagcaggcacatctccctgtgactttgttttgctttgttgtcttatgtctaaacaagcattgcacctaaggtagacatggtcctcctcttgcttttgggaacaccctgttctgtctgtagagtaatgtgttctttcactgtttcacttgctgaataagcttgcttgcacattattctgtggacttgccccaaattctttcttgcatgaggtccaagaaccctctgttgaggtctggatcaggacccctttctggaaacacagccccacagcgagcccttgtcaggtcgagtggacttgtggggagcctcctcaggtgcacatgaacagacccgtggttctagcactgggggtccccagcactccactgacctatctgttatgtgccatactagccgctactccaag

SEQ ID NO: 117721 - DNA, 218 bp, Homo sapiens
aggccttcccattgatgacaatagtgactccatgtgattgtcaggtggggccctagcacaggccagtgtggagatgctcagcagagatacaaccctgagggtggggatgtgccctcgacacttcaggagggacacagagacagccaagggaaaagtcaccaaaccacagcaactgctgactccagattagaggaatatgacgcctctgtgctttcatg

SEQ ID NO: 117722 - DNA, 545 bp, Homo sapiens
  misc_feature (116)..(116): n is a, c, g, or t
  misc_feature (121)..(121): n is a, c, g, or t
gaagcggcacagatacagcggtcccagctcctggccctttctctctggcagctgttcctgagggtctattccacctccacttttctttttttctgagtcggagtttcactcttgtngcccnggctggagtgcaatttgaatgtgtgaaattgccaatagtctggtacatacgtcggcccaccagcagccttcaaagggaattgagaccattttaaaaatcagtgaggtaggcagtgcgtgggcgtgtgtgttttccacggaaccaatagagagatttatgctagatgcaaaatactctttaagtcattgagtacaagaatgggtcattaggaaggtggtggactcgttttaaccatccgaggcctgctgggagttttctaatctgtttagaatcctctggtggctccatactgcctgtggaaagaaatgcattttctttggtctggcactttccattctggctccaaccgtatcttccacaccttccttttttgcacctcattctccagaaagattccagtgactcctacttccctggacatggg

SEQ ID NO: 117723 - DNA, 543 bp, Homo sapiens
tctgggaggggtgcactgggtcttctacctgccacgcacagcagctacaaaacttcacccaaaccaaaaagacttttgaaacatgcgatctgagcccccagacctacttccagcaaagggcttttagtaaaatgatgtcataagtaaaggctaaccaggtatccattaccaccaaagagaaaactggcccaaaatgtaaaagggtaagtggaggcaaagataatattatggacatacagaagaaattcctgttcctaaacgtttcatgtcatggcatttcaagaagagcctagataggtgtccatctcagatggtttgggtatagtcttgactgcagggaggaggtatactagctatcccaccctgttttagcaactgttttattacttcaaacatctttgcctcctagttcctctatcctgcccttgttggcccatgaatcaccaatttgcatagatgagtacactgaagcattgcaagtattttctcatggcctcaaaggacgtgtgctgttgacagactgcagctgaaaaggaccaatta

SEQ ID NO: 117724 - DNA, 442 bp, Homo sapiens
aatttattacttgggtcactttggccgagttatttaacctttctaagcctcagttttctcatctataaagcaggtactttaaaatagctcccttgtggaagtactgtgaggattaagtgagataataaatgtaaaaacacttcatgtagttcctggtatatagtaagtgctccataaattgatagctacctgtattggtcaggatatgctaactggtgtaacaaatagacccaagaatgtgtgatggcttagagacaatggaatcttgtttcttgcccctctaatggtctaagaaaataccaggttagcagtgaggctcaactagagaccaggtttctgacagctctgccgtttttttttttattttgagacggagttttgctctgttgcccaggctggagtgccgtggtgcaatctcggctcattgcaacctccacctccc

SEQ ID NO: 117725 - DNA, 385 bp, Homo sapiens
tcaggtaagcatgagtattcattgttttaaattgcataatcaaaatgacatttaacaaaattacttaaaaacatacatatcttgacaataaaagtaacactaactttttctctttctgctatttaacaaattttatgcacaattaagttcttcatgtgacttgtataagacaaaatttgaggcacttccatactacaaatagtacaactccattacttttcaagagcgtgttttcctgccaaaggaccacacaatgagctccatatgtgcaagtgaaaactacattttgtactgccacagtaaacagatgggatgcaaaacatctgccccttgaaaaaggcaaaattagactcaaaacaagaaacctggttcctttcattggctc

SEQ ID NO: 117726 - DNA, 466 bp, Homo sapiens
aagcacaagatgccacagagacagggatgtgggatgatggcagtgatagacagggacacaggatgaaaagggctttgggcctagtgagaccctgagcagaggagccagctggtaccatgagataataaatttgtgtgtgtgttttcgtttgtttgttttgagacagagtctcactctgtcgcccaggatggagtgcaatggtgcaatcttggcttactgcaacctctgcctcctgggttcaagcaattctcctgcctcagcctcctgagtagctggaactacaggcatgcatcaccacactgggctaatttttgtatttttagtagaaacggggtttcactatgttggccaggctggtctcgaactcctgacctcaggtgatccgccctccttggtctcccaaagtgttggggttacaagcatgagccactgcgcgccaccttgtattgctttaaattaataagct

SEQ ID NO: 117727 - DNA, 397 bp, Homo sapiens
ttcctcagattaaaagtttctcttttccccccacagttgttttcaagccatgaatacaaatcataaatatagtattattaataatctaatctgtcctgtaatttttacagtgaactatttacaaactgaattgggcaactggttcatcagacgttaagaactctatgttcttagtaccaacttcagcaagtaactgattatcagagtctactgagtattcaagaaatttgaggccatgtgcggtggctcacgcctataatcccagcattttgggaggctggagtgggtggatcacttgaggtcaggagttcaagaacagcctggccaacacggtgaaaccccatctctactaaaaatacaattagctgggtgtggtggcaggaacctgtaacaccag

SEQ ID NO: 117728 - DNA, 380 bp, Homo sapiens
aggaacactttgagcctgccaggagaggcgctgcaatgaagccgtgatcatgcacatcgcactctagcctggataacagagcatttccatacatcctctgaaatctagacagaggttcacaaagctctattcttgacttctgtgtacctgcaggcccaataccatgtgtaagctgccaaggcttggggcttgtacccattgaagaacagcctgagctgtacactgacccgttttagccatggctggagctgaagcagctgggatgcagagcaccatgtcctgaggctgcatgggttgtcggaagaggggcacaaaaccatttttccctcttagggcttcaggcctgtgatgggaggggctattgtgaagttctctgacat

SEQ ID NO: 117729 - DNA, 552 bp, Homo sapiens
  misc_feature (5)..(5): n is a, c, g, or t
gtagncactccacctcctgggtcaagcgatctcctgtctctaaatacaaatttaatcctcctgcttttaaataaatatttaccaatgattttcaaaatgtttcttgttctcacagctgatatgtggacatgctttttaattttataaataccaaatattccaaggttaactttttggttttgagtaatgcagtatattttcttacattttcaacagtattaattacttaataaattaaaactcatgaggtctgacgtttctgaacatgttttctgtatagcctatttcctctcctgggagtctcttatcccttcttggactgcctatttcaaatcccctgggtttttttttttccttggacaaaagccacattcgaacaaatccccctgggaaggttacaattaccaaaaattccaatttaacctagtttaaatgataagagaatttatgggctcacataattgagaagtctgaagatagggtgaccctcaggtggattggagtgacttaccagtatcagcaggaactggatttccttctacctctcaattt

SEQ ID NO: 117730 - DNA, 149 bp, Homo sapiens
gccagacccccaacagggagacacggcacagggaactcagaggatgatggtgttcagcggattctggcatgaggaaagtgaccaattgctacttcctcccagtgccctggaattacccagactttcccattggctgtcttcttgcaggc

SEQ ID NO: 117731 - DNA, 582 bp, Homo sapiens
cactgactctcttttcagactcagcccacctgcacccaggtgaaataaacagctttattgctcacacaaagcctgtttcgtggtctcttcacactgacgtgcatgaaatttgttgccatgacttggatcgggggacctccctttggagatcaatcccccatcctcctgctctttgctccgtgagaaagatccacctatgacctcaggtcctcagactgaccagcccaagaaacatctcaccaatttcaaatccgtacaagaaggcaggaatgtcaggcctctgagcccaagccaagccatcgcatcccctgtgacttgcacgtatacgcccagatggcctgaagtaactgaagaatcacaaaagaagtgaaaaggccctgcccggccttaactgatgacattccaccattgtgatttgttcctgccccaccttaactgagtgattaaccctgtgaatttccttcccctggctcagaagctctcccactgagcaccttgtgacccccgcccctgcccaccagagaacaaccccctttgactgtaattttcctttaccttcccaaatcctataaaagggcccca

SEQ ID NO: 117732 - DNA, 251 bp, Homo sapiens
caccacgccctgctaatttttgtatttttagtagagacagggtttcaccacattggccaggatggtctcgatctcttgacctcgtgatccacctgcctcagcctcctaaagtgctgggattacaggaatgaaccaccgcacccagctagaatttatttaaactctagggaaaccaccaaatattttttgaaagaattataatcgataggagagaaaacagaatgatataaaatgatcatttaaaatcaaag

SEQ ID NO: 117733 - DNA, 492 bp, Homo sapiens
tgctctattgcttcagtgtgctggcccaggatgcggccctccccacttgtgttcctattactgggaacacaggcagcatccccagccaaggggagctgagattcaaggtggtccagtgtttgcagggtccagctacaggatacacttggtgcatattagttcccatacttcctggctcagcctcttgtgagtcaggctaacaggagtcagtctcctgcacttgaggaattctggaggtacttgcacaacagtgctgtgggatgggacttctggtaaaaaaaaaaaaaaagcatcagggtaggtgcaggcttacaggagtcaatgaaactaggactcacaatcagtacactgtgtgtgggcatggctgtgcttgggagtttgtaatggcaacacagacacataggcaatgacggacactgccccgtgaaatacgtaagtgtgtgtgcagaaacaaccagttgctcacggatacaaggaatggggactgcccct

SEQ ID NO: 117734 - DNA, 496 bp, Homo sapiens
gccccctcccctgtgccatgtctcctcttcaagtgaaacatagttcctgtcccacctggtaccatgctgttcagtcatttcagtcagggaaccacctgggcagggtaaaaatttcctccagccacctgctgctacctcccatccccttcaggaaactctcctccagtttgagtccttgatcctgtatgatttctgctgtggagttataggaaatcacaagttgggaatgctgcccaagggtagagctcctgtatttcctatcactcacagcaaacgaacttgtttttgctctattttctttgctccccaagcaggatgagttcctcgtcataacttctttacccttcgggccatctgctgaccacacaggaatctgctagttccatctgaaaactaaccacagtcttatggggagaaaaaaagtccctaaagaccccccacatacacaccctttccccaacacgtcttcatctgcttcatttaaaatgttatggcc

SEQ ID NO: 117735 - DNA, 394 bp, Homo sapiens
cctgagaagctctttattctgacatatattcatgcattcatttattcactcaaccaacaataattaaaatagactaaaagcctaagagaagtacagtgtggtgtataatacgtaagctccagggccaagcaggcaggacttctctcaccagccacgcaacctctctaagatcccattttctccactgtaaaatgaggcttatcaaagacctacctcacaggttcatcaggaggatttcataccataatagtacaccgagttgggggaggaaccaagttggccgaataggaacagctctggtctacagctcccagcctgagcgacgcagaagacgggtgatttctgcatttccatctgaggtaccgggttcatctcactagggagtgccagacag

SEQ ID NO: 117736 - DNA, 584 bp, Homo sapiens
atcttttgtggggtacatagtgggttatttggatcccagtggggacttctgattcaagtaatatattctccagctgatctttggaagcatcccttcttggggtttctattcctctggggtcccctcaccttggcaggctctcttgcttaatattctttcagcatggtggggcttaccttgcgctcaagaatttactctcttgtgcccctccaaaccatgggaatatccttactgaacactcttttttcttccgatacgatggaaagctccagtcagtgagtatgatgcccttgtcacaagtgcttcaaatactttaggaaggaaatggtaggaaatatctccctcccctctttgtcttcctcacatgaatttatttcaaataatcccttctattaatctctggcctttttttattccccagcttgaaaggggttgtagtcactagactggttttgctgtcttttgttaatatctcataaggaagtatcagacatctctctttagaatgtgtgtttatcatccattgatctcagttttgaagccttagccaaaatgttgaagtactaggaaaagacctagttaac

SEQ ID NO: 117737 - DNA, 457 bp, Homo sapiens
cttccccttctcctctactccttttaccccaccacttccctcatcattctcagaacatgatttggctttgtattttatttgaaaatttgagaactccattccatttgcatgtgctccttccagcttttcccgaggaagagggctctcctcttttggtcagagccactttctttccttaccttgctctagattccacattcccccctgcttagcgtggctttctaagctgtctgttttctctggcttgtatcttttacctctccttctttactgcatctactctctctgcccctcccctttttgtgggcataaaattcacatcccttgtattttgtaaataaaaaaaagaaccatattctccttggcttctttctttgctttttatttctatcacagttcagctcagaaatagccactctgctttttgtttacttctcatttccccagagcctggcga

SEQ ID NO: 117738 - DNA, 394 bp, Homo sapiens
cgcaatgagcttggcaccacaagtgccaccacagaaatagctggcattattattgcctcctcagcttaccacagcctgtctcaggaactgactcacaaaatagaaaccactgctccaactctaagttacagcagcaatttgattctctcatggttgtagttctccaaaattgtagaagtcttgacacactggctgcagctcacaaaggaatttgccttattttaggagaaaaatgctgtttctgggttaacagcttagggaaagtccagaattaagttagagatcttataaactaagccatcctaaacacgccactgagagctagttctcccagggtgccacctggttccaattctcatggcatctcattttcttgggatctctggcctttttc

SEQ ID NO: 117739 - DNA, 268 bp, Homo sapiens
tggatgctgagaatcagttacgatgtacggtgcttgggaggctgactttgatttcagttacagccctgctgatccttagcacggtgactgcaaataggttactccaccttcctgagtctcagtcttcttagccgaaaagcacagatcatcatcataatagctaacattaactgtgtgcctggcatagggtctgaccgctttattcaagccagctcccagacataccttgctggactgtttaatgcccattcgacaaagaggagatcga

SEQ ID NO: 117740 - DNA, 394 bp, Homo sapiens
cccaaagtgctgggattacaggtgtgagccaccacgcccagcctatgccaataacttttacagcttagatataatggacaaattccatgaaaaacacaaaccatcaaaattccctcgagaacaaatagagaacctaaataactttacattaagaacttggtcttttcctcttggaagccccctctctctcactagagagagagctgatttcctttctttatctttctctcttttgcctgttaaacctccactcctaaattcctcatgtgtgtccgtgtccaaaattttcctggcacgagatgatgaacctcaggtatttaccccagacaacgtagctgcttcatactggggacctcgtcccagatatcaaggtacagcattcatcaaaacgcaa

SEQ ID NO: 117741 - DNA, 576 bp, Homo sapiens
tcggctctaccttgtcgagctaggatacagtaggggaagggtgctgagctgctgaaggagaagcagaactcctggcttcatggccatggttgcaacgttcattctttctgaacggaattccagagggagctgcgtacgggagtgcgaaggccggctctcctaattcgttgtggcattcacgtagggcctacttctgactcgaaggtttacaaatatatctgaaaggtttcttaaattaaaaatcaatccaacaggcaccagtccgcgtgctgcatcataatcggatgtgttgacagagtggaagtggctgcaggaatttctaccattcttcataagcctgcagtgccgctttataattttgaattgtggcccgttaagtgcctctcattagggcttggcatcccttgggttctcttgagatactgtcctgatggtgatacatgtcacaatacaggagtgggtatcgtgtgtctgctacgcttgggctgtccatgctttgaagggaagaccgctatggttggtgtgtgctgtatatgtgagtggggcacttttggtaagagaagtggtgtgtgggat

SEQ ID NO: 117742 - DNA, 1239 bp, Homo sapiens
gcattaagctgggcacagtggctcacgcctgtaatcccagcactttgggaggccaaggccggcggatcacgaggtcaggagatcgagaccatcctggctaacacggtgaaaccccatctctactaaaaatagaaaaaaatcagccgggtgtggtggcgggcgcctgtagtcctagctactcaggaggctgaggcaggagaatggtgtaaacccgtgaggctgagcttgcagtcagccaagattgtgccactacactccagcctgggtgacaaagcgagactccatctcaaaaaaaaaaaaaagaaagaaaaaagaaaatgagcacattactgtgattttacagcaattaaagtgattataagataataccacaaacataggtacaccagcaaattgaataaccaaatgaaatggcaaatctctagaaacacaaagcctaccaagactgaatcacaaacaaagaaaaaatatgggtaaaccagctgggcatggtggctcccgcctgtaatcccagcactttcggagtgcactccattgcactccagcctgggggacaagagcgagacttctcaaaaaaatagaaagtaggggtaaacctataactagtaagaacattaaattactaattaaaatcctttcaacaaagaaatacccctgactggatggttttaccagtcagttctaccagacatttaacgaaaattaatgccaatcctttgcaaactctttcaaaaacttgaagaggaggaaatactttctaactcgttctatgaggccagcattgccttgatgctagggtcagacaaagacactacaagaaaacaactgaccaatattgcttatgaacattggttaaaaaattcttaggaaaacagtgccaaactggttgggcacagtggctcatgctggtaatcccagcactttgggagattaaggcaggtggatcacttgagctcaagttcaagaccagctgggcgtggtggcccatgcctgtaaccccagcactttgggaggccaaggcgggtggatcatgaggtcaggagatcgagaccacagtgaaaccccgtctctactaaaaaatacaaaaaaattagccaggcgcagtggcgggcacctgtagtcccagctactcaggaggctgaggcaggagaatggcgtaaacccaggaggctgagcttgcagtcagccgagatcgtgccactgcactccagcctgggtgacaaagtgagactccatctc

SEQ ID NO: 117743 - DNA, 455 bp, Homo sapiens
accagagatcctcatatgtgtgccataaagccagatcaccgcatggggacttctgcttggtagggaaccacccctgcatcccctctccactgaaagctgttttcatcactcaataaaactccccacccaggccgagtgggcaggccatctcctgcagcaggtagtgtggcccactgaggcctgggcagggtgtcaccagccagaggttcctggcttacaaagtgatggagaaaaaatcctgtgtcactgggccttgatttccacacccttgttaaatgggagtgtcagatgagaggataattctttccagtcttgaatgaattccttgctcacttttttgtaatcccataggctgtattaatatgttagtgtttatcttgagctgaaattatcattaacaaatttttgagacaggataatctttggagatccatctgatctgggcctgaaataac

SEQ ID NO: 117744 - DNA, 523 bp, Homo sapiens
gatgcggttggatagcttctcctagacccctcactgggagcctcggaggccgtctgcgggggcaggagtttgagaacagactggccaacatggcgaaaacccatctctactaaaaatacaaaaattacccgggaatggtggcacaggcctgtgatcctggctactcaggaggctgaggcaggagaattgcttgaacacgggaggcagaggttgcagtgagccgagattgcaccactgcactcggacaagccaggaatctttgtgattacacacattttcttctaacctgaggatgctgaatataagttcatgtttccttggtgactcagtcatccatgactgtagatcaggtgcaaatgtggattttgcagtagatggtgtgggacagaggcctgccaacttggtcacgggtcttctacacacacctcttctgttccctcttttatgtaaccacctactgcagggaatgcaaggctgtgtgctcctctttctgctgacagcagaactcacctatcttctgcct

SEQ ID NO: 117745 - DNA, 823 bp, Homo sapiens
cgtggtggctcacaactgtaatcccagcactttgggaggctgaggcaggcagatcacgaggtcaggagatcaagaccatcctggctaacacggcgaaaccccgtctctactaaaaatacaaaaaaattagccaggcgtggtggcgggcacctgtaatcccagctattcaggaagctgaggcaggagaatggcatgaacctggcaggcagagcttgcagtgagccgagatcgcaccactgcactccagcctgggcgacagagcaagactcccgtctcaaaaaacaaacaaacaaacaaaaaacaaacttaattctagatggattaaaaacttctatgtgaaaggcaaagcttgaactctaacctattcctatttagaggaacatataggagactatcttcaagacttcaggctagagaagaatttcttaggacacaaaaagcactcaccataaaagataatggtagattctactcccaggtatataaaccctaagaaaactctgaaacataaataccaggaaaatatacaagaatgttcacaagactcctctgaaatagcctcaaactggaaactaaatatttatcagaacagataaataatgtgattatatattcacaggatggaacattatacagcactggaaaggaatgcaacaactgggacaaatcttagaaaaaatattgactgaaaaaaacaaattataaaagacaatatatgtcatctttataaacttatttaaaaaagcaaaacaaaacatgttgtacagtaaaacattaaaatgtagacgtaagccgggcgtggtggctcatgcctgtaatacca

SEQ ID NO: 117746 - DNA, 687 bp, Homo sapiens
cacatggaatatgaagtcaagaaagggagaaggctttgtatcccccatccgaaggctggtgttccccaaggccgggcgccgggcagcctgtaggagcagcgtgagccggcggcccctgcactcgatgcccctttatccccccgactacctcatcgacccccagattctgctgtgtgactacctggagaaagaggtcaagttcctgggccaccttacctgggtgacttcctcactgaacccctccagtcgggacgagctcctgcagctgctagacaccgccaggcagctgaaggagctgccgctgaagaccacggcggagcaggacagcatcctgagcctgtctgcccgctgcctgctgctcacctggcgcgacaatgaagagctcattctgcgaatccctacgcacgagatcgccgccgcctcctacctgcaggacgacgcgctgcacctgctagtgctcaagaccggtctgggtgtggacccggtgccggccggcgtggatgccagcccaggcggcgcaggacgcgaccccggcccgccaggcggggcgcccgagaagcggcgggtgggcaccgcggagcggcgccacaccatctgcagcctggactggcggatggggtggggtgggggcgccgcggaggcccgggccgggggaggcggcggcggcagcttggagcgccagcgcgc

SEQ ID NO: 117747 - DNA, 299 bp, Homo sapiens
ggttttgtttatttccatatatgagcacttaacacagtacctgtcacataataacaaatgtgaaatatttgtggcatgaatgaaagtttctgtatagttataaacatgaaataacgttttattttcttgtgctctgtcgcagaggctggagtgcactggcaaaatgttggctcactgcaacctctgcctctggggtttaagcaattctcctgcctcagcctcccaagtagctgggactacaggtgcatgccaccatgcccggcttattttttgtatttttagtagagatgggatttcac

SEQ ID NO: 117748 - DNA, 3902 bp, Homo sapiens
tcccttctattctttcccatgtatttcttttgcctaaaagaatattggtatgattctcatttgctactttgagtatataactccatcagactttccagagttcttcagggatggagctcaaagtttacatttttccatatatgtctttttttttcttgacctttttccaccctgtaatttccccttgacttacccactgccctccccaatctgcaacagtgacagtttgctgcctcaaaacagagcattcaaatgaattcgcttagccaataacttctgtgaagttgccttttctaatggtgttattactcagtgatgcacaaatgtggtatttgccctactggtaggcaaacaaaggtctggttaagaatggtaacctgctgttttctttaaaggagagccaaagacttgtgctttactctgttttggttttgggggaagtagtagccattttgatcatgaaaccttttagtatttgtgagttgattgtactgtgtaagtagatttatctaaagttaactgttaaagttagctagccttataaaatgtaaaagtaatgaaaattcatcagtttctctaagccagtgaatgtcgtcttttgtaatattgtgtataagcatttgtgcccaccccagcttctgctatcactgtggtcaagtcatgggtctgagtaaaagaattcttgagtatgtgactggtgagaaataactaactatagtcagtacatgtacagattgttaaaattcaagacaaaatactttcactaaaaaaaaggattcgtctcagtaaagaagtattcagttgctgtcacttacatacaaatggtggtgggtagcagtctcaccatttttctactctctttttgctcgttttaaataattgagtaaaggttttatttgtaaaatctatctgtaaaaagcacctgtaacgatttatatgtcattgaaaggaatggcccagttactttttaggagagattaataacctacctggaaattaactgcagtgtttacttagattttttccccctaataagagtctaagtgtgttaaatttttaactgatgatatggttacagtgttgcaaggtgatctcttcccctgaaaaatctgcctatccttttaagaaaaattagacctactaaactaaagcaaattttactttcatcattagcacctaaacaagcaagcagtctactactgtcatcattttacctgagtgcccattttgctgatccacattcatacctttctaccttggacagctatgatttttatatttatttgttgcttcagctcaggtttatgaaattttcctgctgaaatgacttattgggagttgtaggttgattatagttactattaaacattttctcaatttagcttttctgagccacttcaagaagaaagctgtttttgtcaaaaggtactattaattgtagcaagtaaatcttaagatttgaatttttaagattttatttctgtgttcactaaagatctttccacaagtaatagattataattgataagtaatactagctatagtgttaataaagagtaagactatcaccaccaggaataagtaacaccttttaataataaatctattcctaataggtatgttttcaatactgcactgaacaaagtgggtaaagagccctttgaaatcttattgtaataaagggacttacctcaccactggaatccttgttttcagagcctctggattttcagccaaacactgaatttctcctaaactttatccctgaaacatccctagagaacgaactttattttcacaagaaaataaggcacaataagggggaagaacttaaacctcaacataatatcgtgtccaaaaatgtgtatttagaaaaataaaatcctgtggagtttgttatcctaatgtttattttatactagataaggtgacttgttttcttgtattgaggtcttactgtttcagatttgtttttgtttctgttctaactctaagcagacagagctcacaagtctttggcatccattttaggttgtacactcagagtcatcttataactggaaactgtcaggtggtcccccaccccagtgagtgtatgaaagagtcaagaaaaagattggaaacaaactattgggtgaataattggttgctctattattattattattattatttgcctttttttaatcaccatttatttgtgtaatctttctccattgattggctgtcattcttataatatctgaactaccccataaaataattctctgacttaaaggcatttagcttttgcttatcgtttttacatcctctattcaactaagacactgtcttgagagttattttttccagatggatcgttggcctaaattttcacacttctcccctgttcatcctttttcctcttccctgcttcctgggaataaaaggaacttttttaaaaaaattaattagtccacaggtctcattatctttctttatgattaatctatgactttttggtacaagaacaatggaaaaagtgaattaaggtaatgaacaaaacctttcacccacttaaacattttccagttttgagattcctcttcgtgtttgtggtgtcttccccttgttaccccttctgccctttttctctgactatggtaatttggtctttaggctcatatcagtctccccgagacattctgcagtcattatcacctttttgggtggattttattttgttttattttgttttttttaaaaaaaataactttttaacattggtgcatatttgcttgggatagagcttgtgtaatttaccaatcgtattgattgtaagtgattgtgccctgcagaggtatatttaacaagacaaaaataatcttggttaataaaggagcccatgagatttgagtcaggttgtaagtgaaatcacttacacttttggatagaatttatactcctgctcttataaatcagtggtagacttaccattttttaaagttttcttgcatttttttgtttttttattgccacagctccctattctttcttgcctgcctccacccccctgttcaggaaaaaaaaaaattgagccttaaagtgacagctgattttttaattgctgaattttgtgaaattttactttttccaagtgtttccaactttaaaaagagaagtgaagacaaataggttggaatggtgaagacaaatggattggaatttcacaggctgtgaataattccttaggatctggcaaaccgtgaagtcttatttgaagaccttatctcctgagagttcttttggagtaggaaaaagaaccctatttgaaatagaccgtttttctcttgtttttaatctgtttaatatttctgatttttaagcagctttcaaaacaagtgtggtggaaaaaaagaaatagtagtaggaagatgtttagggcagcagaactctgggtctaaataagtacatgttcccacttgttgccgatttttgagagtactagggccatctttctcaattttgtattatttgtgtgcatgtttatatcaaagatgcccattttgttaaaatgctatttcctttattaccttggaaactgactcagcctcatgttgctcctaattagtgtttaaggctcccatgagttgcagataaaatgatttattttaacaagtagaaggaggtgattcaccttttggattgtaaatatatgaaaatgtctacaaggtctttatctgctttctgtcagcatttatattaaatgataaattaatgaggaacgtgtgtattttgtaaatgagtgtgtgccatcttattctaatcttgagattactttcttacacgtttttaatggagggggcttttttaggtgaaaaataaagaaatggctaatctgcatgagcaaacacatacttgga

SEQ ID NO: 117749 - DNA, 3848 bp, Homo sapiens
tcccttctattctttcccatgtatttcttttgcctaaaagaatattggtatgattctcatttgctactttgagtatataactccatcagactttccagagttcttcagggatggagctcaaagtttacatttttccatatatgtctttttttttcttgacctttttccaccctgtaatttccccttgacttacccactgccctccccaatctgcaacagtgacagtttgctgcctcaaaacagagcattcaaatgaattcgcttagccaataacttctgtgaagttgccttttctaatggtgttattactcagtgatgcacaaatgtggtatttgccctactggtaggcaaacaaaggtctggttaagaatggtaacctgctgttttctttaaaggagagccaaagacttgtgctttactctgttttggttttgggggaagtagtagccattttgatcatgaaaccttttagtatttgtgagttgattgtactgtgtaagtagatttatctaaagttaactgttaaagttagctagccttataaaatgtaaaagtaatgaaaattcatcagtttctctaagccagtgaatgtcgtcttttgtaatattgtgtataagcatttgtgcccaccccagcttctgctatcactgtggtcaagtcatgggtctgagtaaaagaattcttgagtatgtgactggtgagaaataactaactatagtcagtacatgtacagattgttaaaattcaagacaaaatactttcactaaaaaaaaggattcgtctcagtaaagaagtattcagttgctgtcacttacatacaaatggtggtgggtagcagtctcaccatttttctactctctttttgctcgttttaaataattgagtaaaggttttatttgtaaaatctatctgtaaaaagcacctgtaacgatttatatgtcattgaaaggaatggcccagttactttttaggagagattaataacctacctggaaattaactgcagtgtttacttagattttttccccctaataagagtctaagtgtgttaaatttttaactgatgatatggttacagtgttgcaaggtgatctcttcccctgaaaaatctgcctatccttttaagaaaagcaagcagtctactactgtcatcattttacctgagtgcccattttgctgatccacattcatacctttctaccttggacagctatgatttttatatttatttgttgcttcagctcaggtttatgaaattttcctgctgaaatgacttattgggagttgtaggttgattatagttactattaaacattttctcaatttagcttttctgagccacttcaagaagaaagctgtttttgtcaaaaggtactattaattgtagcaagtaaatcttaagatttgaatttttaagattttatttctgtgttcactaaagatctttccacaagtaatagattataattgataagtaatactagctatagtgttaataaagagtaagactatcaccaccaggaataagtaacaccttttaataataaatctattcctaataggtatgttttcaatactgcactgaacaaagtgggtaaagagccctttgaaatcttattgtaataaagggacttacctcaccactggaatccttgttttcagagcctctggattttcagccaaacactgaatttctcctaaactttatccctgaaacatccctagagaacgaactttattttcacaagaaaataaggcacaataagggggaagaacttaaacctcaacataatatcgtgtccaaaaatgtgtatttagaaaaataaaatcctgtggagtttgttatcctaatgtttattttatactagataaggtgacttgttttcttgtattgaggtcttactgtttcagatttgtttttgtttctgttctaactctaagcagacagagctcacaagtctttggcatccattttaggttgtacactcagagtcatcttataactggaaactgtcaggtggtcccccaccccagtgagtgtatgaaagagtcaagaaaaagattggaaacaaactattgggtgaataattggttgctctattattattattattattatttgcctttttttaatcaccatttatttgtgtaatctttctccattgattggctgtcattcttataatatctgaactaccccataaaataattctctgacttaaaggcatttagcttttgcttatcgtttttacatcctctattcaactaagacactgtcttgagagttattttttccagatggatcgttggcctaaattttcacacttctcccctgttcatcctttttcctcttccctgcttcctgggaataaaaggaacttttttaaaaaaattaattagtccacaggtctcattatctttctttatgattaatctatgactttttggtacaagaacaatggaaaaagtgaattaaggtaatgaacaaaacctttcacccacttaaacattttccagttttgagattcctcttcgtgtttgtggtgtcttccccttgttaccccttctgccctttttctctgactatggtaatttggtctttaggctcatatcagtctccccgagacattctgcagtcattatcacctttttgggtggattttattttgttttattttgttttttttaaaaaaaataactttttaacattggtgcatatttgcttgggatagagcttgtgtaatttaccaatcgtattgattgtaagtgattgtgccctgcagaggtatatttaacaagacaaaaataatcttggttaataaaggagcccatgagatttgagtcaggttgtaagtgaaatcacttacacttttggatagaatttatactcctgctcttataaatcagtggtagacttaccattttttaaagttttcttgcatttttttgtttttttattgccacagctccctattctttcttgcctgcctccacccccctgttcaggaaaaaaaaaaattgagccttaaagtgacagctgattttttaattgctgaattttgtgaaattttactttttccaagtgtttccaactttaaaaagagaagtgaagacaaataggttggaatggtgaagacaaatggattggaatttcacaggctgtgaataattccttaggatctggcaaaccgtgaagtcttatttgaagaccttatctcctgagagttcttttggagtaggaaaaagaaccctatttgaaatagaccgtttttctcttgtttttaatctgtttaatatttctgatttttaagcagctttcaaaacaagtgtggtggaaaaaaagaaatagtagtaggaagatgtttagggcagcagaactctgggtctaaataagtacatgttcccacttgttgccgatttttgagagtactagggccatctttctcaattttgtattatttgtgtgcatgtttatatcaaagatgcccattttgttaaaatgctatttcctttattaccttggaaactgactcagcctcatgttgctcctaattagtgtttaaggctcccatgagttgcagataaaatgatttattttaacaagtagaaggaggtgattcaccttttggattgtaaatatatgaaaatgtctacaaggtctttatctgctttctgtcagcatttatattaaatgataaattaatgaggaacgtgtgtattttgtaaatgagtgtgtgccatcttattctaatcttgagattactttcttacacgtttttaatggagggggcttttttaggtgaaaaataaagaaatggctaatctgcatgagcaaacacatacttgga

SEQ ID NO: 117750 - DNA, 413 bp, Homo sapiens
gagggatagcatagggagatatacctaatgctagatgacgagttagtgggtgcagcgcaccagcatggcacatgtatacatatgtaactaacctgcacaatgtgcacatgtaccctagaacttaaagtataataaaaaaaaaaaaagagagagattcagtaactcatccagagccacacagcctaagtccaataatccttgccatacactctgaacttatctattgttctaccatagagcgtcaattgattttgggtggggccaatcattccatgcttttttaagctcctagatgattccctagtacaaccagaatagagaaccattccactacaggccgaaaccaaaaagaaagcttgctaatgtcgcttggaaagaataatttccctccacatcccaccccaacacacata

SEQ ID NO: 117751 - DNA, 233 bp, Homo sapiens
tgagacccattcatggatctcaaatccaaaaatgtgaaatgctcaaaatctaaaactttttgagagctgaaatgactatcaaaggaaatactcatttaagcattctggattttagagttgggatgctcaagtaatatttgcttcaggtaaagcaaatattaacctgaaaataatccaaaatatttctggtcccaagcatttctttttttcttttctttttctttttttttttt

SEQ ID NO: 117752 - DNA, 344 bp, Homo sapiens
aatccaagcacatcttgctcaaaaacaaattcaccgccgggcacggtggctcatgcctgtaatcccagcactttggaggctgaggcgggcggatcatgaggtcaggagttcgagaccagcctggccaacatagtgaaaccctgtctctgctaaaaatacaaaaattagctgggcacggtggtgtgcacctgtagtcccagctactcgggaggctgaggcaggagaatcgcttgaacctgggaggcagacattgcagtgagccgagattgcaccactgcactccagcctgggtgacagagcaagactccatctaaaaaaaaaaaaattcactatcctcccagccc

SEQ ID NO: 117753 - DNA, 372 bp, Homo sapiens
gctagggttctggagtctgtggacacaggaggcagaggacatgtgttaagatgttttaagaaatgaatgttgatctggatatgaaaatatttttcagccgggcgcagtggctcacgtctgtaatcccagcactttgggaggcttaggcgggcggatcacaaggtcaggagatcaagaccatcatggctaacacagtgaaacctcatctctactaaaaatacaaaaagttagctgggcgtggtggcggaggcctgtaatcccagttgctcaggaggctgaggcaggagaatggcgtgaacccgggacggagcttgcatgagccaagattgcgcctctgcactctagcctgggcgacagagggagactccatct

SEQ ID NO: 117754 - DNA, 180 bp, Homo sapiens
gtcctaataactcactttctcatcctcagatctcttactaagcattcacctcacagaagggccttccctggctgcctggctcaagcagcccccagccccgcctttgtccaccactgtctccctgtctccctgagctgtgcgttctgacctgccgcctggaaggatctctgtgacacagca

SEQ ID NO: 117755 - DNA, 321 bp, Homo sapiens
attatattaagagaacccagtgacacattttccttctaaattaactttaaaattaacttttaaattaagttcaatctcatatcagtttgctttgtaagaaatagaatatatgtacatgtttgccttatttttagcatgttatattcattaaaatgttttagtttattcagcagatacatttagcatttctttcacaagaaagacagtgaaggaacaattaataacaggaccccagtaatacctggggggtttctacatctgcattttttgcaaaaatagaatagccttctaagaagctgtcagtggcatttgtgcagctgg

SEQ ID NO: 117756 - DNA, 300 bp, Homo sapiens
acgcctggccaagtatttttaaactcttggtttctagtgttattctcatcttcctattgctctgtatgcatcttttggtaactcctccctttacttgagctggcctggttctctactctttgaaccactgaagcttaactaaaaccatgccctttctaaccacagtccatgtgagttcccataattttcttgggttgttgtaaattaattcaatcatctgccatccattcatccatgtaatgcaggaaccacggtgtcacttcattcttccctccacttcactgacttccccgttttccc

SEQ ID NO: 117757 - DNA, 486 bp, Homo sapiens
atggaaccaatgaaaaaaccacaattagagcaaatccacatgtattaataaaggaggtgccctccatacatgctgcacctaacagaatgttgccaaataagaatgaaaaatgatgatatttgggctgtaaaaactagaagtcagctaaataagaatgcatcgaaagtatttgtgaatgcttacaattttacaatgccttggcatccgttttggatggaagttggactttctcataccagaagcagggctcagtcacctttgaaatagtttccagttctccacctccttccagttcctcagtgtgattgatcagatatctgatttatacaactgcctcctggtgacctcctccctatgggacttccggatacagcccgtatgactgccccactgaccccacaccctgcctgctgcagtgaccacctctaattacctggatctcatgtctgcttgcattaaatccaccaattaaaactccctgaggac

SEQ ID NO: 117758 - DNA, 319 bp, Homo sapiens
ataacacttgtggtaacatactcttattaattttccttttaggaaagaactagcttgtgagaactagtaatattatcgttgaagaatgcattatcaagcaaaatagagaagaaagctgcaaaatagatgggagacacaagtggatcctgccttgcggggaggatagaagaaaggaccctgtagtgacactgaattaataagctagccaaagatgtgggtattcagacacacaacagatgggcataggatctgcgtataaaaataacagagtgtgagagtaactgataaacctgctgtttctagggggatttagatatgc

SEQ ID NO: 117759 - DNA, 180 bp, Homo sapiens
gactgtgtgtgccaggtgcaatcagaggacacatatggtacatgtgtagttgtagtaaagcttgagagtcatcgtagtaactactttgcagacattctctatgaaattttaaaatgtttttgaagtagccaagctctaagttttcctaagcaagttgatttgctttgttcttagggaaga

SEQ ID NO: 117760 - DNA, 985 bp, Homo sapiens
tcaagtacaatagacagtaactaaattttccagaaaactttaaagatgcttttatctctgaaaggtttttcttttttaacccacttcagtcccactgatgttttcactagcttgcctccaggataatgcatttgatatcagtgaatgtgaatacacacttccaaatgctttgtgcaggctgatccactagctctctttagacttttgctaatcagaaattgctcaagaaggaaatttgtgagctgtttccaaattgcctactgccttagacttatgtaactatgacaggtttattgatgcagctgggagcaagtttttaatcttagaagaaaatgtttatttctaaatagaggtgcatatacttttcataaaagtatttctagaggctttttaaaatgctttgatggtttaaactaatagaaataataatctttaaatatgcttatcagtagcatccccagaattcacgtctttagtctttgtacgaattagatttcctggctaaacctgtgaaaaatctcatggtattaggaaatctgaatgttgtttctttgtattattcaggaattatatatttttaatttttaaaaagttaaatagatggagataatgttgcagtctgaaagggcagccctgagaacttataatcagtgctatggtggctgtcctgcattctttggggcagagcttcctgagttagtccccacagttactacctctccttcctcgcctttcctctcttgctgctctctccttcctatctttactaatttatcttcccatgtcaaccccttaaattctgctgctctttcatagaaatcacctcgttgtcccgcttctccaccactcatattctagattggtagatatggaccatacagatagtctaccatggctaccatcaaatatttttgttcacttcattgtgcatagttacctactagttattcattgggagtagtaatttgcaaattatttaaaagga

SEQ ID NO: 117761 - DNA, 319 bp, Homo sapiens
ctgcgtttccattaagaggagctttcggctcatctttcccacggctttgatgacgtgttacagcgaaatgtgatcttaagaattcaagagcctggaaggtggaggctgcagtgagccatgatcatgccactgctctccagcctggccaacagagtgaggcccttcttgaaaaaaagagaattaaaggactttgtctcatcccttggttcagtgttagctgtaggaaagagacggtgctgcctatatgctgtggacaagtaagtgctggaggtggcaatgcaccttttggtctcagtaagattttcatttactactggtg

SEQ ID NO: 117762 - DNA, 105 bp, Homo sapiens
tacatataaataacaacaaaacctggagagagttaaaaatattcattttataactagtagaattctagaatatggtaagcaacttcatcttgagggaaataggac

SEQ ID NO: 117763 - DNA, 164 bp, Homo sapiens
tacttagaggatcccatcacgtgcattgtgatccacgtgcattgtggatcacgtgcattgtgtcatgcaatcaatgaccaatgacagtgattgctactattgtactgtatgcctacacgtggtcatttaatgcttgaaccatccctacaaagaaggtatcaacc

SEQ ID NO: 117764 - DNA, 992 bp, Homo sapiens
ctatccagaagttgtgagggcgactcagctattctgaatccaatcctgggcaaagttctggacaagtctcaggtttctgccaatggggaagggatatgaagaagcggattgtttcccaggtgaggagaagaagagagccttaggcgatccactccaagagcttgaggtgcagccagttccgtctgtcctccagtcttccccaccccatccaactagctctacgaggcagagctttctcgtcctcatatcatatatgaaaagaatggccgggcgcggtggctcacgcctgtaatcccaacactttgggaggccgaggcgggaggatcacgaggtcaggggtttgagaccagcatggccaacatggtgaaacccgtctccactaaaaatacaaaaattagccggccgtggtgccacgcgccggtagtcccagctactcgggaggctgaggcaggagaatctcttgaacccgggaggcggaggttgcagtgagcttagactgcgccattgcataccagcctgggcgacagagcaagactccgtctcaaaagaagaaaaaagaaaaaaaaaggaaagaaaataatgaggctcagaatcgatggatcgcacagtcccacaacttcgcagccaagaccagactcgggttcacccccttcccaagtgtggttctgtaaccccgttttgctgccgccgatgcggatgcagagggcagagatggcccatccttagcagagaccaacctccaccctaggcagcagagcacgcagctgggggcttttctttctagatctcaaaagcctgctgtgatgggggatctggttctgccctttccctctctgcctctcctggcccgcctacccgggaactccccgcctggagcctctgggaggggagcggtgcaggccgcccgcgtcatctgatgctgtttcctgcaggagggagaagagcggaaaaaagtgaaactccgagactcatgcggtaccgagctgattgta

SEQ ID NO: 117765 - DNA, 538 bp, Homo sapiens
ggggaacaacaaaaatagtataaagacagtgatattattgtaaaacagtaactatataaaacccccagaaaatgagatctcttgcttggttctgttttttattcctttaaaaggcacctccaattttaaaagtagtcacttaggagaaatacttataaaatgagtagtatttccctctttactaaacttacttgaaatgtgcaaaaattcactgagatctatgagatcttttaagatactgacctgtctctctccactaagtaattgtaaactgtagaccctacactaaagaattctaggcttttacttagtttcatctttgttccctgagacctctttctgtctgcgtgtgtgtgtgtgcgtgtgtgctttttaaaaagaacagttcatttcctcttttctaatattctgtgttttatctgctgtggatttggaaatcagataaccaggtttgtttgtttattcagcaaaaatttaatgagtgactcgtatattgcagacactagtatacaaagattaaaaaagaaatgttcctatc

SEQ ID NO: 117766 - DNA, 394 bp, Homo sapiens
cagctgggaacttaggagggtagaagggaaaggatgtttttcttcccttacagtatccctcactacttcctcttccttcacttccttcttaaccagaacactcccccaaatcctacccttagttctcttctctcactacacgttccctaggctggcgcttctcagaacgtagtagttagaccaatggcatcagcaccacccgggaacttgttagagctgcaaattattgagccctaaccagactgaatcagaaactccaagggtggctgggctgcaacatgttttaacaagccctccaggagattcttacacatgcgaaagtgtggaaaaccacagccttcatgcagtcccatccgcctccaagacgtcagtccttatagacctacaactactc

SEQ ID NO: 117767 - DNA, 601 bp, Homo sapiens
gcggccgcctactactactactactgctcgaattcaagcttctaacgatgtacggggacatggccctgctactggccctcagcctgctggttctctggacttccccagccccaactctgagtggcaccaatgatgctgaagactgctgcctgtctgtgacccagaaacccatccctgggtacatcgtgaggaacttccactaccttctcatcaaggatggctgcagggtgcctgctgtagtgttcaccacactgaggggccgccagctctgtgcacccccagaccagccctgggtagaacgcatcatccagagactgcagaggacctcagccaagatgaagcgccgcagcagttaacctatgaccgtgcagagggagcccggagtccgagtcaagcattgtgaattattacctaacctggggaaccgaggaccagaaggaaggaccaggcttccagctcctctgcaccagacctgaccagccaggacagggcctggggtgtgtgtgagtgtgagtgtgagcgagagggtgagtgtggtcagagtaaagctgctccacccccagattgcaatgctaccaataaagccgcctggtgtttacaa

SEQ ID NO: 117768 - DNA, 471 bp, Homo sapiens
cctgccatttactccatggctaggtggggcttctttcgagcttggcatgactatgattcaattcttccactaccttctcatcaaggatggctgcagggtgcctgctgtagtgttcaccacactgaggggccgccagctctgtgcacccccagaccagccctgggtagaacgcatcatccagagactgcagaggacctcagccaagatgaagcgccgcagcagttaacctatgaccgtgcagagggagcccggagtccgagtcaagcattgtgaattattacctaacctggggaaccgaggaccagaaggaaggaccaggcttccagctcctctgcaccagacctgaccagccaggacagggcctggggtgtgtgtgagtgtgagtgtgagcgagagggtgagtgtggtcagagtaaagctgctccacccccagattgcaatgctaccaataaagccgcctggtgtttacaa

SEQ ID NO: 117769 - DNA, 680 bp, Homo sapiens
cattcccagcctcacatcactcacaccttgcatttcacccctgcatcccagtcgccctgcagcctcacacagatcctgcacacacccagacagctggcgctcacacattcaccgttggcctgcctctgttcaccctccatggccctgctactggccctcagcctgctggttctctggacttccccagccccaactctgagtggcaccaatgatgctgaagactgctgcctgtctgtgacccagaaacccatccctgggtacatcgtgaggaacttccactaccttctcatcaaggatggctgcagggtgcctgctgtagtgttcaccacactgaggggccgccagctctgtgcacccccagaccagccctgggtagaacgcatcatccagagactgcagaggacctcagccaagatgaagcgccgcagcagttaacctatgaccgtgcagagggagcccggagtccgagtcaagcattgtgaattattacctaacctggggaaccgaggaccagaaggaaggaccaggcttccagctcctctgcaccagacctgaccagccaggacagggcctggggtgtgtgtgagtgtgagtgtgagcgagagggtgagtgtggtcagagtaaagctgctccacccccagattgcaatgctaccaataaagccgcctggtgtttacaa

SEQ ID NO: 117770 - DNA, 770 bp, Homo sapiens
cattcccagcctcacatcactcacaccttgcatttcacccctgcatcccagtcgccctgcagcctcacacagatcctgcacacacccagacagctggcgctcacacattcaccgttggcctgcctctgttcaccctccatggccctgctactggccctcagcctgctggttctctggacttccccagccccaactctgagtggcaccaatgatgctgaagactgctgcctgtctgtgacccagaaacccatccctgggtacatcgtgaggaacttccactaccttctcatcaaggatggctgcagggtgcctgctgtagtgttcaccacactgaggggccgccagctctgtgcacccccagaccagccctgggtagaacgcatcatccagagactgcagaggacctcagccaaggcaagcctggccctccctggccctgtctcctccctctgagctcctgtctaagattccagcccatgatccttcctctccttcctcctctagatgaagcgccgcagcagttaacctatgaccgtgcagagggagcccggagtccgagtcaagcattgtgaattattacctaacctggggaaccgaggaccagaaggaaggaccaggcttccagctcctctgcaccagacctgaccagccaggacagggcctggggtgtgtgtgagtgtgagtgtgagcgagagggtgagtgtggtcagagtaaagctgctccacccccagattgcaatgctaccaataaagccgcctggtgtttacaa

SEQ ID NO: 117771 - DNA, 713 bp, Homo sapiens
gctgaattctaccaaacatttaaaaaagaactaatgccaatccttcccaaactctttgaaaaaattgtagagaagggaataattccaaactcgtatcttggtaccaaagccagagaaggaaattaccaggaaagagaataataggttgatatctctgttgaacacagacacaatcattcttaacaaaatgcagtagtagcaaactgaattcaacaatataccaaaaggataattcacaatgaacaagttggatttatccctgggatgcaagcatggttcaatatatgcaaatcgaaaaatgtgaaatagcacattaacagaatgaaggttaaaaaccctatgatcatcttattagatgcagaaaaaacatttgacaaagccaacatccttttacaataagaactctcaacaaattaggtctagtagaagggtacctcaacacaagaaaggcaagctcacagctaacattttactcagtggtgaaaagttgaaagcttctcttctaaggtcaggaacaagacaaggatatacacagtcaccacttctatttagcatagtactggaagtccttatcagatcaattagagaagagaaagaaacagaaggcatcaaaatagggaataaagtgaaattgtcactgattgttgatgacatgatctcatgtatagaaaaccctaaagatttcactaaaagctgttagaactaatacatga

SEQ ID NO: 117772 - DNA, 294 bp, Homo sapiens
aataaacttactttctctttatggattcacctcgaattcttttttgtgtgaggtccaagaaccctttcttgggtctggatcaggacccctttccgggaacagtatctcctatgatagaaggctgttcctcaataaaaagggagaaactactgattctcacagcatcatggatgaatctcaaaggcattatgttgagcagaagccgaagaatacatgctcagttatgtgaaactctagaaggaacaaacctaatctggaaagaagcagatcactggtggcctgaggcttcagttg

SEQ ID NO: 117773 - DNA, 874 bp, Homo sapiens
atcacaggcctttcttcctccacccttcctgcctatgcgtatggctggatgaacacagatgtgaggggatttgaaccatctacaatcaatccatatgtgaccaatggaggagaagcagccccaaaagacgaaggaaccctcaaaagaagatgagcctcagcagaaggagatgccaacccatttgtccttaggagcagagtcaaaggcagaggctaaaactccagttctggttgagacacagacagtggacaatgccaatgagaaatcagaaaaaagtgtgtcagtggaatatggtcatcgtcagcatggattggaagtccttggagtctgaagacttgaggaatttgtgagacacaaaaacacaggccagatctttaccaaaaaagggagccagttttcctcacagggactcttcacaccaagatttcaatgtggaacccagctggttggaagtgatttcatattgttcctggaaaaggctgtgggtctggaagatgtactatcaacagtgggcctggatcattcaccacagcacttggcagaggtgtgggtggatataccacatgcaaagcaaaactgcagcctgaccacccagtttatatagaatccctgcctccacctctaagctgccagccatttctgttccagcagccttgccagtcttggcctcaaccagcactaaatgatcaaagttatgagcacagcatacaaccgtgtatcatacccaagcaaaatcttcatggttgctttgttctgctgtgtgttctttagttttaggaagcataggtacttagagaaataaaactacccacacttcacccccagtgtctgccaagaaggggtactggctcactcttaacaatcaacccttcct

SEQ ID NO: 117774 - DNA, 766 bp, Homo sapiens
  misc_feature (507)..(507): n is a, c, g, or t
  misc_feature (586)..(586): n is a, c, g, or t
  misc_feature (626)..(626): n is a, c, g, or t
  misc_feature (633)..(633): n is a, c, g, or t
  misc_feature (638)..(638): n is a, c, g, or t
atcacaggcctttcttcctccacccttcctgcctatgcgtatggctggatgaacacagatgtgaggggatttgaaccatctacaatcaatccatatgtgaccaatggaggagaagcagccccaaaagacgaaggaaccctcaaaagaagatgagcctcagcagaaggagatgccaacccatttgtccttaggagcagagtcaaaggcagaggctaaaactccagttctggttgagacacagacagtggacaatgccaatgagaaatcagaaaaacccccagaaaaccaaaagaagctctctgacaaagatacggtagccaccaagatcaaggcctggtggcggggcaccctggtgcgtcgggcactgttgcacgcagccctcagtgcctgcatcattcagtgctggtggcggctgatactgtccaagattctgaagaagaggcggcaggcagcgctagaggccttctcccggaaggagtgggcagcagtcacactgcagtcccaggnccgcatgtggcgcatccgcagacgctattgccaggtgctcaatgctgttcgcatcatccaggcttactggaggtgccgntcctgtgcttcccgggggttcatcaagggccagtacagantcacagncaacnagctgcatctccagctggagatcttgctggactcagggccttgcattgtgacagagtgtattcccttctcaataaaggaatgaagttggtccttttccaaaaaataaaaataaaactcttccagggct

SEQ ID NO: 117775 - DNA, 254 bp, Homo sapiens
ggtgtggaggccccaggttcttttgctttgtatgattaggacagggtgatattttctgggttatctcttgtgggaactgagccctccaaagccctcatttgtgcattgttgtcatagctgcccaagtgtgtggccttgctgagtttgacggctgtggaccaggtgatctctcgggtggtgaaagggaggtgctctgtgagtgcacctcagctttagcctcttggcttctccctggattgggatttccagggagg

SEQ ID NO: 117776 - DNA, 339 bp, Homo sapiens
gggaatgcttctaaaacttcaccagtcttacatgtctcctcctgtaatttttaacagtggaatttaaaaattcaactcaacttcaataaatactccaaaagaagatgatcccccaaacaggagtctttcctggccagaagtaagacccaccagcccttctgcagccatcatgctccagaatcaaagatacacatgaagtggagatcgatgcctcaagtgaagatgctccaaggaatcagagccttttattgttgctcctacctggactgaaatgaatctgagcataaaatgagaggaagctggcaggtatttacagtcatagcagcatttctcatgatg

SEQ ID NO: 117777 - DNA, 239 bp, Homo sapiens
ccaaagcccccagaccctgtggctgctgagcacttgaaccatggacagtccaggtgaggatgtgcggggagagatgcctcctgcctgtggctgagccctgcctgaaggagctgatgaggaaaagctcctaagcacaacagtgctgctcacctgggcatctagttggcagagtcctatcccagtgttcgcacccccagtttcctgggtcttaagttcagattatcaagtgctcctcctgc

SEQ ID NO: 117778 - DNA, 333 bp, Homo sapiens
gagtaatgctaaccttctcaatttttgtcaaccataagacaaacaatcctcctcttcctctacaatttcttgacaattatagcaccaattttgagccattcaaaaaccaggtctgtaagacactggataaaatgtatgaagtcaacaagaacaaccatactagatttcaggggtaatcacaaatcctcatcctaactgctaagtttgttagcttgaaacttgagggcaccaatacctcccagaattgttgggagactttaaaagcagagtttctcagccaggcgtggtggctcacacctgtaatcccagcactttgggaggctgaggcgggcg

SEQ ID NO: 117779 - DNA, 109 bp, Homo sapiens
tagccaccagggggatgggcagggcaagtatcgttatccccattggatggatggagaaactgaggctcagagaaaggatgtgacttgcccaaggtcatggcatgagaga

SEQ ID NO: 117780 - DNA, 353 bp, Homo sapiens
aggcctctctaggccgggcgccggttcagcgaggaccggaagcgcccgccgtccgcccttccgcctccaggccgcgggcgccaggccgggggcgggctggggacgccctgggagtgccccgggggccgccttcttccccgcaagcccggagcgggcgtcgctcccgcccccgcctcgtcttcagttcccccgtcgcttccgccgccgtgggtagaacagacccgagctgggagccaggcctgcggcccctcgaacactagccacatctggcccgccgggcctagcacggagagaggccctggggcttggcggccggggccgggagaggtcgcgcggccaaggacacccgaggg

SEQ ID NO: 117781 - DNA, 314 bp, Homo sapiens
cctagctgtgcctccacctgatggtcctttcctgccccacctggtaactaaagacaaagggcatataatcttgggagttctggggccctgcccactgctgtttcctctctatactaccacagctgatgctctctggacagcactacctaccggcaggaggccaaccagcacaaaaatagagcattaaactaccaaagctaagaactctcatggagtccattacaccccgctatcacctccactggaacaggtgatggtgtccatggctgagacccatagatggctcatgtcacaggagtctgtacagacaaccc

SEQ ID NO: 117782 - DNA, 637 bp, Homo sapiens
agaactcaaaactataagaatccttgaagaaaacctaggaaacaatattctggacaccagccttgggaaataatttatgactaaattctcaaaaattagttgcaacaaaaaaattgacaagtggaaataactaaactaacaaatcttctgcacagcaaaagtaactatcaacagattaaacagacaacctgcagaatgggagaaaatattcacaaactaagcgtttgaaaaacgtctgatattcagaatctataacaaacttaaacaaatcagcaagcaaagaacaaccccactaaaaaatgggcaaaagacatgaaaagacaattctcaaaagaagaaatagaagtggccagtggacattgaaaaatgctcaacattactaatcatcagagaaatgcaaatcaaaaccacaatgagataccatctcagaccatcagaatggctattattaaaaagtcaaaatacagccgatgctggggaggctgtagagataagggaatgcttatacattgttggtgagaatgtaaattagttcagccactgtggaaagcagtttggcaatttctcaaagaacttaaaacagaactaccatttggtccagcaatctaattactgaatatacatccaaaagaaatta

SEQ ID NO: 117783 - DNA, 261 bp, Homo sapiens
tcttttgagaaacatttttcatgtcctttgtcgagttcaataaaatgtatttaatgccaccatacataagtgtttttcaaatgcccttattgatggtcatttaatcatacatcttctgtccatagttagtaccttaaaaatagcttttctaatttttaaaataatcttattttagtaactaatgactcatgtctttcctttccttaaaagaaattcgccaatcgtgtaagtcttttcatgtgagatactgttcagtctgag

SEQ ID NO: 117784 - DNA, 806 bp, Homo sapiens
ctcccagggaccaaagggagaagggagagccgagaaagtggccctgccatcccctactggaataaccgccgccgccgccccatcactggtggccacatcccttctaatttgtagtggtgggtttctttccttgaagagcagggtacttttaaacagatagaggtaatgggaggattaatattcataggtaagtccaaacggaaaatgtttagcttccttacaccaaaggtctgctgtgtctgagattacactaagttcaagcaacatcatgtcagtgaagaagccattagctgcaggaacacactgagaagtgagggagcctgtctaccagaaggaaatggagctaggatctttgcaaactgctgagtagagaggagaggacgagtaaatgagacagacggaaaagagctggaagagagagactcctttatggcacatttttatcctgagatttccaagcattttatatatattgcatggtaaagaggaattgaaatagccaaaagaaatgaactaaaatgaaaagggaggggccaggtgcagtggcgcatgcctgtaatcccagcactttgggaggctgactgggtgtatcacttgaggtcaggagttcaagactagcctggccaacatggtgaaaccccgtctctactgaaaatacaaaaattagccgggcgtggtacctgtaatcccagctactcaggaggctgaagcaggagaatcgcttgaatccctaaggtggaggtttcagtgagctgagatcacgccacttcattccagcctggtgacagagtaagcctctgtctcaa

SEQ ID NO: 117785 - DNA, 281 bp, Homo sapiens
aacgccatttacaactatctcaacaacaaaacaaccacaaaccttcaaaaaaccgaaacccaatcaagcactgaatcaggataggaccaaatgatttgagatgtagtggaggatagtgctggaagagagataataggacagtaggagaccaaagaataaaaataaattccaaccaggaataggatgactttattaggagtggacaaaataattctgcttagagagagagaaaatctagtggatcaaacaagatttaaacttcaagatagttgtaaatggcg

SEQ ID NO: 117786 - DNA, 352 bp, Homo sapiens
gcacgaggaaggttaaaaaacactatctattcaaatccttagtcatgaggttgaattcattgaatcagagtgtgaatatatatctatatttgagacagaatgtgtatgtatgtgtgtgagtgtgagtgtgtgtgtacagtcattagacatttgcctcatggacagtggaggaaaacatttgctgagctgctttcctaccttaaagatttacaactgcactgttttcaagatatactttttatatctcaaataatgtaatatattatgtttagttgttgatataacaagatatctgaataccccataattgaaattatacctggaaataaatacttgaaatacttgcttcagt

SEQ ID NO: 117787 - DNA, 914 bp, Homo sapiens
agcggggttggcgcgggcccggggctggccagcagcctgctccgcgcggatccggggaatgcgtgagaggagagcagctctgagccctgcttccaaggggcgcgcccggttattcccctcgctccctcagtccgaccccgggcgctcccccgcggagattggtgtgtgagcagaacagcttgagaatgtgttctaggacctggttacctttccttcatcatctctcaacccatgtgtatattgggaaaatcagagaccggtcaagtcatgcctccaagaagggcttgaccagggtgggctttgtggtcccaccaagaagcttggacttcatcctgttgggggatggaccaaaggaggggtgtgagcagagaggcatccacaaggatggctcatcctccacccacttcaatcaccagtgttgtacagccattggggattacacgtgcagctttgtagcttgtgagaggtttgacgcatgcacctctgagatatgcttcagtgatagcagtcttagctcctccattgcacacatgaggagggtaagtggccagcctataaggcagagaggacacttgccctaagagaggcacaggtagaaagacagaaacaaacgtgtatcaagctccctgctctgtgctaggccctggcttgtgtgagcttgcccagtcctcacagcacaccacacaaggggtgatcacccccaccgctttgcacatggggtgcaggaacgtaaagtgacttgtcctggatcacacaaggagtaagtagtaaagctgagattcacaccaagtcttccagagcctcaaacctgtacgcttttcctgcctcccaaggctgggagagggagcacctgtaacagcagaactactggacgaaagcaaattcccatccatcgcctccacagccctgggagg

SEQ ID NO: 117788 - DNA, 298 bp, Homo sapiens
caggcttccacactactcacacaggggacaaaggccttcacagtaggtttagcttcaaaggcccagaggatctgcctctgaccagctacatgacctcaagctaagccttttaacctgcctcagcctcagtttcctgatctgataaatagggctaatgcccaccctcgtctctctcaagggagtgttgcaggcttgaaggagaaagtgtttgttcctgggaaacaattccccagtttactgaaagttttaagaaagaaaatagccgggcgcggtggctcatgcctgtaatcccagcact

SEQ ID NO: 117789 - DNA, 242 bp, Homo sapiens
acctttgtatagtactatttttaatggctatttaactatagtaagttggctcaagccttaggacaagtgttatacattaagctcactgttattatcggaagcttctacctctggggaagaaaatctattcccatgttccattagaaaataaaaaccattcatgaccctattcacctactcttgctaaatttaagtatgcaaaatttttagattcttattaactaaagccacattatgtaaaa

SEQ ID NO: 117790 - DNA, 839 bp, Homo sapiens
ggacttgcttgggaggagaactctacataggagctgggggcaggtggacctagatccaaccttcaacccctagtgaggggccaggcagaggacaaggcaacaactaagctaggtaaagttctggaaagtttccaagcccaggaggaacaaggaccactctggaaaaacattccaaagcccattgcatacctgtggtagagactaggggagtgattccagggataagacggacaaatgtgttccaggccccagctgatggtgggtgtggtcttcataatgagaggtggagctgagatttgggcctgggctgggaagaggagtacacagtccatctgatccacctctcttatggttccattggcaaaatcattcatcagtcgtcctatcttttcctggcgagcgctcacaatggcttcataagtgtttcaatacagtgtcccaggcagtcactacctatagattagagctgatgtgctggcctggggctctagagctgggcttcaggaagaatgtggtcagggccatcaggatggaacaaggtagctcaagaccttggaaagacaccctgagggcacaatcgtccttgcagtttaagatgacactttaaaaataaattctttcctaatgatggcttgagtcctgccactcaatgggagcatcagcggaacctgtagcatcttatttggaattgacattctctattgtaattttgttcctgtttatttttaagttttctttttgtttcactggaaaggaaagatgatgctctgttttaaacattaaaagtatacaagttgctttgttacaataaaactaaatatgtacacacaccaaaaaaa

SEQ ID NO: 117791 - DNA, 884 bp, Homo sapiens
ctgcactgcaggtttcctgcccttttgctctgtaagcagtaactccaaatgtcacttcataacagttcttgtcaaccttaggcaggatgtatcaatgcatgtcagatgggggtagataactttggggcaggttatcacaacctaagagttggtggagaaaacatgggaatgaattctagagaccacaaaatgaaaacttgaaagtgttactctttctcagcttaacgtttttaaatccaaaaaacaatttttacatttcttgggattcgaagagttgaacttcaggttgccgtggttacagtgtacagtatatattatcagtctgtaccagtagaccagtaccctaactactgaaaagaatatggcagttttccatttgtctagtttctgtatgtacaatttactatccaattaattacttaagtggatttcttgttcttttttaaaaacttattgctacattgataggcagaatagcttctgaaagtgaccagttttcaatttcataggaagaggtgactcattgaaaaatagctcaagcaaagtcagctaaaaaaaaaaaaaaactagggaagctgagtaggtgtggtcaattgataatgagctaacagctgattatcactatattctagaaactggaactttcatttataaaaaaagaggtggccggaaaattcatcctgtcaataacttttaaatttacattggcatggaatttgtaggaattgtttcagggcttaaaagggaccgttttccctctcttcggggactagtctttttatttaaggatgtgttatttcatttagagcctttaatggtacaggtatacataattcaatcctttatagatcctgaaattaattgtagattttgaaattttctag

SEQ ID NO: 117792 - DNA, 403 bp, Homo sapiens
atctagtcaaagcacattttttttccttcctctttgctgtttttttcctttctctttactgtttcttttcttggtgagacagccacttcttgagataccgacatctgtgaccagtggccttcccaaaacgttcctttgtgttaagatttgtcttaatttaacatgacaggggcactcttagccattatgaaactgaggaaacagcaagctaatttttgtatctttgcttcttatacgtttttatagtgaagtaacagaggctggaactcagaaagctctcaggaatcactggtaaggaactgaagcataaggaagttttttaaaaattcaaggatatatgtcattaaaatccagctagatttgatgcaaatgttttgtcatagttacacatatcatcattaac

SEQ ID NO: 117793 - DNA, 358 bp, Homo sapiens
catcacctctgccccacccctaccggcagcattcctttcctacctgtccagcctcttctctgtccccagccacattccccactcctgcccccaaactcttggcctagaaggccctggcctgctccccaggcctcctctgctaagccttgcctacctgtccccactgtgccccccactgcctgcgcatctctggccagcacaggcgtgggaggaactatggctcttcttccttaggaagagtctctgacaagtaggactttgttttcttcccagcatgcactgcagtgcaggtgtcttaacccttggcgcacacacaggatgaaggcagagagccaactattgagggtgggaattggga

SEQ ID NO: 117794 - DNA, 1157 bp, Homo sapiens
  misc_feature (1147)..(1147): n is a, c, g, or t
gctgaaataatcctgcctctgtctcccaagtagctgggaatacaggcacgtgccaccatgcctggctaacttttaaactttttttcgagacagggtctcactatgtcacccaggctggtctggaacttctgtcctcaaacgattctcccatctcagcttcccaacatgctgaaattacaggcgtgagccactgcaccgagccccatttaaaaaaaaataagttgctgacctctgtaataatacactttaacttgattgttcttttaagtgtaaagaaagaaaaaaatacccttttgattacatttgctttagtgagagccttggttttagagaaacctatgtattggacttgtgatgttttgggactactgttgtaatggggtgaagtggaatggtagatgttccagaaacttttcagtgattatgtacacctgtagtggttttcatcttgctgcaagctcccatatacaatgtgctaatactacttgggttatcttccagttaaagctagatctttgtagttttgaaacatctgtattcaaatatataagctgcttactttcttttaaaaaaaaacaaaacaaacgcgaaaaagacaaacacaaatagcacacacaaaaaacaaaaggggggggggggcgaaaaagatttctcccggagggggccccaaatatatgccggacccccccgcttcttggaaccacaaggcgcgccccaaaaaagggagagcccgctacattatacaaccacaagccagcggcgcgccccgcgttgtttctaacaaacacacgcgtggtgcactggcgcgacaaaccattccgtctacaagacggcggcacaactctgtgggcgggagagacggaagcaccacccactataattcgcacagcgagggagggggggcagcgacaccacatttgtggtgtgggaaaacaaacactcactctccccgctagacagagagatactatgcataggacggcctctccaggggggaacaaacatacatcagcaactttcatcagacgcggcgtatcattcatggtggcgttgcatacacacaaccacaagccgaatattcttgctgctcggcgtagagagaacaactgtttgtctccaagcagagaatctatttcttcaaacaccnttttaccacg

SEQ ID NO: 117795 - DNA, 439 bp, Homo sapiens
gaacagattattctgacagaaaatcagcaacaaccacaaaattggagttaagctacacacttgaccaaatgagtctgacatttacggaacatgtcactcaattgcttcagagtacatataattctcatcagcatgtgaaacattctccaggcctatataataggatacaaaataatccttaacaaatgcaaaaaaaagtcaaaattatatcaagttttttttaaccacaagagaaaagaacttgacaacaataacaagaggaaccttggaaactacacaaacacatggaaattaaaaacatgcttctgaatattcagtggttcattaaattaaaaaatttttggaaacaaaaatagaaacacaatatacaaaaaaactgaagaatacaacacaagcaagtgataagagggaagtttatagcaataagtgcctacattta

SEQ ID NO: 117796 - DNA, 397 bp, Homo sapiens
ggggaggcctcacaatcatgttggaaaacaaggaggagcaagtcacatcctacgtggatggtggcaggcaaagagagagaatgagagccaagcaaaacgggcttccccttatcaaaccatcagatctcatgagactcattcactatcacaagaacagtgcaggaaagactcgcccccataattcaatcacctcccactgggttcctcccatgacatgtgggaattgtgggagttacaattcaagatgagatttgggtggagacacagccaaaccgtctcagtcagagagtccttcctaggttttataatccacttcaggggagaagtatggggaaaggtaagaccaatggtccagtttctgctattttcttcaatatgacaagatgccatcttttgg

SEQ ID NO: 117797 - DNA, 268 bp, Homo sapiens
ggaggtagtgcttgttccccacagagggggactttacttgcagaggctccaggccctgaggaaaggagtaccacaatacactggtacttctttctcctcggtagtcagagcgtattattcaggtacatcacttgggtgcaggggcttgggtgagagaccagcaggagaggtctcctttgtgagtccctctttccaaaagtgccgctgtacccggaggtctggaagactttacaagtgtgtgactttcagagtgcaggaacccagcaca

SEQ ID NO: 117798 - DNA, 334 bp, Homo sapiens
ggacaatataacgaggcctcatctctataaaaaaaattaaaaattagctgtgccccaggtgtgttggctcacacctgtaatcctggcactttgggaggccaaggcaggtggatcacctgaggtcaggagttcaagaccagcctgaccaacatggagaaactgcatctctactaaaaatacaaaattagacgggcgtggtggtgcatgcctgtaatcccagctactagggaatctgaggcaggagaatcacttgaacccaggaggcggaggttgcagtgagccgagatcgtgccattgcactccagcctaggcaataagggggaaactctgtttc

SEQ ID NO: 117799 - DNA, 182 bp, Homo sapiens
gccctgccagacagcctctctggtagaacgtttcctccttagagtgagcaagcattcctctccctgaccttcccaccctcctgccctgcacctgacccttccatgagacagtcccttcaagacaaccattggctttttcacatgggcaccaggatgccaaggcatagcactcagcaggtgtc

SEQ ID NO: 117800 - DNA, 554 bp, Homo sapiens
gggtaaatctgaaggacactacgctaagtgaaataagtcagacccagaaggacaaataccatttatagggggaatctataatagccaaactcacaaaagaacagtagaatggtggttaccatgagttgagggtggagaactggggaggtattagtcaaagggtataaagttacagttatacacgtgaataaatcctagagatctattgtccgacatactgcctatagttaacattatggtatacttaaaattatacaaagacactagatcttacgttgtgttcttatcacacacaaaaaaagaaagagtggggggaagcttttgaaggtcctggatatgtttatggcatacactgtagtgacgctttaaaaggtgtatacttattgccaaactcctcaatttgtatacattaaatatgcacaggtttcttttctttctttcttttttgtgtttttgagactgagtttcactcttgtcaccgaggtggagtgcaatggcgcaatttcggctcactgcaacctccgcctcccgggttcaagcaattctcctgcctc

SEQ ID NO: 117801 - DNA, 407 bp, Homo sapiens
tgtttttattggggtggttgacattacatcatcacgtagtctagaatgaatgtacaagtgattttaaaatgttttaattacgaaaattttgacagttaatttagttttgtggctagaactagagatgacttcatttccactttgcatttcaggaactgattaaaatttgtaattttcacattatctattcttaccttagaatgtgttttatttaccaggaaagggagatggaaaaacaaagaaatagaatgtcttttatttctattcactgtagaaataactatacgttggattctgaatacccactgatgtgtggggactagaagccctttctagatgatttataaatgactgaagtggaagccattttctcttacttttatcttattccctaaagactgatagac

SEQ ID NO: 117802 - DNA, 285 bp, Homo sapiens
ttcatcctgacctcccaccctagcttggttcatctttaaactggttgttttactttagggaattccatctgtctgctgaaaaatgaagacaaccagagtagatagcataactctgccagtgattcaaatactgaagctcttccatgttggtgggtgaaaagctgctcccccaagtccctcgagtgtccctgccccatctctgggccagggtctgagacctcctcacatctccatgacccagagacaaaagagttaatgcctggcaccacagggccctccaagact

SEQ ID NO: 117803 - DNA, 693 bp, Homo sapiens
ttcagttgctcccggcggagcaggggcatgcagctcagcggccaccgagcctctggggctcgcccggccgctcctcgcgctcccagacgcctgtgacgcctgttggggccaagctgctgccgttccctccgcagacagacgcgccgcgccagcctcacgagccctgcaccaacttctgcccgacaagcccaacttctgcgccgggttcggacttgcggagccggaacggcgcaccgcgcgcagcccgggcggcggccagggcggatcagcctcgccgagatgtcctcgcgactgtggctctggtgcttctgcctgggcggttgccggctggccgccaggaagcgccctacagctccggctgggcatgccaagtgtttgtgaagaacagcaagtgactgtggttggacttgcacacccatgtgtttgggcattcacacacattgtcaagctctgcaaacaaggctgtactggctcaagttggtatgtgagctatgaaagaagctatcgctgcagtgggaacttgtttcaatggaagaaaatgctcagatggtgaaggccagtagtgccagtgttcagagggatttcatggaccccactgtcaataacagtcctcttttccgtcttctcattcctgtggatctgtcctgtagcctttccacgctatcctcaggctcatctgttttctgaagatgg

SEQ ID NO: 117804 - DNA, 361 bp, Homo sapiens
gtactgtagaatagcaaatgccatctgcgtgaatttgcattgtgggatggaggaacgtgacctaagagtcaccagtggagtggaactaaaggaagaaataatttatgcacctgctgagggtgtggctagaggtaaagggactgtgacgaatgagtccttgattgccttcttggaagtattcagagatcattaaagaagcaggacgttctcagaggtcagtgtgtccaagggtgaaacaaaaacctaataagaaaaataggtccgtaagaaaagagacatctgaaaaggcctagaaattgtgaggtaagtacactttgttttgttcgtttttttttctggagttttttttttttttttttta

SEQ ID NO: 117805 - DNA, 490 bp, Homo sapiens
attagaggaccagaaatgtcttcttacagaacggttatttgacggctttgcttgtaaattaagacaccgttttagtgccagcgaactgctcggcttctgtggctctcgcgtgtgccgtggaagaactgtgaatgtctctcgaagttgtagaatggcgtgtgtgcttactcatttcgtgagatgatattctcattgaactgtcgggagtggaagggtgcgctgggacgtgaaggaagccagcacgtttatggataggctgtttctttggttcgggtgcattcacttagtaatagtattgttgtttggtgatttgtagtaaaaatagtagcgtgaactgaggcatagcagagctgggttgtgggaacccattgagctcttgacttgaatgtgctcttttcttgccccgctgtccttttactatgaaaatgattcagggccttcaacttgcctccatattttattgccagctgttacctagctatgataatcg

SEQ ID NO: 117806 - DNA, 738 bp, Homo sapiens
ccagaagtggctcaaaaaaacaagccacaacccagaactgaatcacaacagccttttcctttaacactatacttgctctatttaacctccgccatggccaattcaatagattcacagaaaatatcagcaggacgccttggttctcaacaccaagtctggaaagctgggtttacacgccccacctgagcaagcctgatcggtgattgtgttgggctcattcctcacttggccccttcaagcagagataggccctgcaagaactctctctaggaattgttttctcaatattttaaaatccacttttcctatatcctatcaatgggcacggagtgagagtgatacaggcatgtggaatttcacaaggctagatgtgccagcttcaagactactgagctttaggtatacacttgttatggtttggatttgtgtccccacctaaatctcatgtcgaatcgtaatctccaaagttggagaagggccctggtgggagatgattggatcaggggggcagatttcccctttcctgttctcatgatagtgagtgagttctcatgagatccggttgtttaaaagggtgtagcacctcccccttctctctcttccccctgctctggccatgtaagacgtgcctgcttccccttcaccttccaccatgattgtaagtttcctgaggcctccccagccatgcttcctgtatagcctacaatagagtaagccaattcaacctcttttatttat

SEQ ID NO: 117807 - DNA, 519 bp, Homo sapiens
tgaagtctaaaattaattaattttttaaattaattgagactaactttttagtgctgatatgattttaggtacatgtgaattggtgataacacattgtattctctctcctagattgcttagattgagattgataacatattagccttcttactcatttaaaattctttgtctggggtaggggaaatgggaagatactgctcaaaggttatacattttcagctgtaagttgaataagttctagcaatctagtgagcagtatggtaactgcagttaataataatgtatgatatacttgaaatttgctaagggagtagatcataagtgttctcaaccacacaaaacgtgtaactatgtgaggtgatggttatattaattagcttgattatgggtatcatcacagaaggtatacttgtatcaaaacaccatgttgcatactctaaatatatacagttttttatatgtctgttatatgtcgataagtcttgaaaaaacaaaaatattaaaaaagattctcaagtt

SEQ ID NO: 117808 - DNA, 406 bp, Homo sapiens
gactattatcaggcaggaaaagcacctggcacagtgcctgtacacaggtgtgaacagaggttagtgtctgctcccccaaggtggtgttgtgatgtgatgtcatacgtgattgtttacactctcacctgatgggcgagactattccattctcataggactcaatgagagagagtttgtcccaggattggggtgaatgtttcacctatatcatcctcttgggccttctccacctgaaatgtagcctagtttgataagcagtggtagaatacagagacaggttaggaacctggtgggggtagagggtccatactggagctctgggatctaattggagagtggaggagcgaccctgggctcaaaggtatggctgtcttcatccatttgggctgctgtaacaaataccaca

SEQ ID NO: 117809 - DNA, 108 bp, Homo sapiens
tggtgggaggcttttgtaacaatcctggagattactgcaacttggacaggttgtaggtagcgagcagtgcaggtggtgagaggggtcaggttttgggcaccttttgat

SEQ ID NO: 117810 - DNA, 314 bp, Homo sapiens
accgcttctgagagttctgccagcctggatccatgccttgtgtccccagaggtgactgagccaaggaaggacccacagggagccagggggccagaaggttctttgctgcccagcccaccaccgtcccaggagcgagagcacccctcgtcctccatgccctttgccgagtgtcccccggaaggttgcttggcaagtccagcagcggcacctgaagatggtcctcagactcagtctcccaggagggaacctgccccaaatgccccaggagacatcgcggcggcatttcccgctgagagggacagctctactccata

SEQ ID NO: 117811 - DNA, 380 bp, Homo sapiens
aggggatgcactctaatctctgagtaggtcagatatgatgaaaattctgtggtatttataaaggcttccagcaggtagaggttaaagccagaaaaagtcagacaaaagctgactaattttatgattctacaacacagacataaggcagaaagctctcgttttcaccctaaaaactagttcatttgaagctaaatctcactaaaattgaattacatgcataactcattttattgttcttttccttgagacaggggctggctctgttgcccaggctggagtgcaggggcatacaatctcggctcactgcagcctccacctccctaggctcaggtgatcttcctgcctcagcctcctgagtagttgggattacaggcacgtgc

SEQ ID NO: 117812 - DNA, 220 bp, Homo sapiens
gtgcaatgctgcataagctaagggtcagtgcattgcaggtgataagaagacatgcaaagattcaccataagggtggaagaattcaaacaaaacagcaactatagtgtgatcaatctgcaaagctttactgaaaaggaagattaccagggctttaaattatactaaggctatagttaccaaaacagcatggtactggtataaaaataggcacgtagaccaa

SEQ ID NO: 117813 - DNA, 395 bp, Homo sapiens
agcacacttcaagtgcatatttacaacactgctgaaagaaaaggcaatactattggagaatagacttaaatgacttattctagggcccacagtcacccagtggctgagtcaaaggccaaaaaactaggtctcatgattcccaaggcagtgggcaaagtagagagacaaccacagacctgagaaacagacctgggtatgaattccagtgccacttcttactagttgtgtgtgtgaacttgggacagccactttactttctgacctttggcttgctcatctataaaacagggatgctgactgggagcggtggctcacacctgtaatcccagcactttgggaggccgaggcgggcagatcacttgaggtcaggagttcgaaaccaacccggccaacat

SEQ ID NO: 117814 - DNA, 247 bp, Homo sapiens
gcctgccctgcaccctaacagcgtagccacaggacatgagccccaaggcctcctatcccctgccacagtcaggagtcccacccagtcttcctgaaaggctcccactcttccttcttctcttgcaggcggaatggccttacctcacacacccttccttccgtttcaaatcaggtaccccttctccctcctgtttttaggatggcaaagacttgagcactttttttttttttttttaagacagagtcac

SEQ ID NO: 117815 - DNA, 560 bp, Homo sapiens
agtcattatccctggcagcacctttgctgctgtgggaaatgcaactcatttattaccaccctccattttatggtggttccttggaggcactcccccaccccaagtcattttaacctttgggaagggctgaaatgctgtgcttttagtcattagttgcatttatgtaactgtagctctaaggttgtctttcccgcacaaatgccggcaaagccagtattgcaggccttgtagataaaggttgacggatttcattctttttaaaaaattactccttgagcttttaacaggttcaaggcaaggagctctcaaggtaaacaaagatgaataaggcagtccctactttttataatctcaaagtctaaaattatggaaggtgccctcttactgtaaatataactcataaaaaatcatatgggggctttagggaggatgtagctgtctcccttctggcttctgttggcattccttggctgtagccatgtcgatctctgctctgtcttcacattgctctctcctctgtgtctaatctcctgcctctctcgtagggatatacatgatta

SEQ ID NO: 117816 - DNA, 350 bp, Homo sapiens
ttggttatatttaaggtcggtgaagtctttctgtacttactagaagatacaataaaatgctagtgttcaaagggtttatagatctgtttccaagttgtttcaggttagagcagtgtatttttgttttgttgctgtaacaggggtaatattgccaacttccaaagagtaaattttagcttgagaattcaagttgtataatttgaacatcagaagtttattgtaagcacatcatattatttttaaatttatttatgaaaaacatgaacccaaaaaacccttttattgataaagttttttaaataggaaccctaaacttgtatgaagtctcatgtatgataatttattttctg

SEQ ID NO: 117817 - DNA, 576 bp, Homo sapiens
cacaggaagcactcagtgtttgttgcataaatgaaaaaaatttacatttatttaaccgaagggaatgttactactgttgatatggtatattcaaagtatggagtctctaaatgttactgtctttggtttgtagctcaggcattcctgttcctactccaagttcattgtgttcatttgctggttcacccagagtttcttgtcatgttcaaatgggaagtttctcccaatgaacctttttttccccaaggtatcctttcttccttcctttccttccctccctccttccctccttccctccctcccttccttccttccttccttccttccttccttcctccttccttccttccttccttcctttcttgacggagtcttgctctgtcgccaggccgcagtggcgtgatctcggctcactgtaaccttccactccctggttcaagtgattctcctgcctcagcctcctgagtaccaccacatccagctaatttttgtatttttagtacagatggggtttcaccatgttggccagcatggtctcgatctcccgacctcgtgatccgcctgcctcagcgtccc

SEQ ID NO: 117818 - DNA, 466 bp, Homo sapiens
ggaggaggaattcttcctccaacacagctcctgggtatctagtctggtttgggttcaatgtctgatccaactagctgtggccagagtgcagaattacctgttacaaaactgtggcaatgtagttattaaaacaagcaactttttgagggttttgcttaaacagagtggttggtgtggtagagacaacattgtatgtacttctctatcacagagagaaatttataaagtcaaggcaaaccaaatatctgaggctgggacttcaccccagatgtttgcaagtaaacaagttgtggaccttagagatccgctcctctcactttctgactgcctcttgctttggtctgtagaccaatgttccactagtatttagttttcattctggttttaaaacggtttatctgtaaacctgtaatttaaacttctgataagcaaaactaacatagtaatgagcccattagaaagcaat

SEQ ID NO: 117819 - DNA, 939 bp, Homo sapiens
agaaaaagggaactgagctcagaaaaaagattagggaacggagtctcctgtgagactggagtctgcaactctgcataatgcatctgtcctggtgggcaggaaagccaagagtttaaaacaaacaaaggggcttgacgggttatagcctggtctgttgatacatggttgcagagtcagcctgcatctctggtgagggagtgacatctgtgggctctttatgagtgtcatgcggagacattactgttgtgtgtgaatatggacagggatggtgggaggtcagggggtgcacagttctggactaggacttggagtatgagaacattgcacttgtctctatatatatgagctgggaggacaagtgggaggtttggtgtgtgtgtgtttgcataaggaacagaggtgtgaatcaaagtgtgggtaaggagaaagtttggcagttgacacatctgtgggtgagaggaaggcatgtgtgctcatgtgtgtgtaagaagttaggttccagttgtccctaaggagggacagtcccgcatggttaagagcatgggcctgggtgttagaccagctatgtgtccttcggcaagttatttaaccaatctgagctgttcttttcatatgaaaaatggggaagacattagtatctaccttaagggttattgtaggaagtaagtgagacattgcccaggatatagtaagtgtaaaaatcatgactggtatgattgttgttagcaggccagagtttttgcctttgggttttcagagacaaggatccacctgaggggccatgaagaccctttagactggtgggcagcatccagggcccagtcttacccatgtggatgagctgggggctggggtagagtgtagggggctgatgtgagtagagcccacaaattgcactggcactgaactaagcacacagaattagaggaggccacccag

SEQ ID NO: 117820 - DNA, 339 bp, Homo sapiens
caagggaggtagtgaaatggaagttggagctcagcgctccctcacctccactgccctcaggccttctctgcctctttcccatcagtcagctgcttctgggcatggtcctggcagagacttggcctccttccagttcaagctccctcttagattgtgtcccacgccactgagtctctgggacactgggtcagttgtctagtctggcacaattggcaggaatcccaagaaacagtgtgagtgaggggacagtcgtgttgagtgccctccatctgggactgggaggcaggtctatgtcaggcctgcatttagatctctaatagctccagacaagccccttca

SEQ ID NO: 117821 - DNA, 246 bp, Homo sapiens
tagtcaacatcagtgatatgtaagctctaggagggcagaaattgtgtcttgtttgccatttggaagtgagcttgtggatgaacaagggcatgaggaaatgagacgatctggggattggagaatggatgggctggctaacagatggatggagagatagatatgtgaatcaatggatacagacatggatggatggatgaatgggtgacagtgactctagatatgagtggatttgatggatagaaaagt

SEQ ID NO: 117822 - DNA, 816 bp, Homo sapiens
acgcctgtaatcccagcactttgggaggccgaggcgggcagatcacgaggtcaggaaatcgagaccatcttggctaacaagaaacaatcagctatgccttgggatcaagatccagaacaatcaactggaaattacagtgaagatgaacaaaatggaaagcagaaatggagagaagaaggagaagcaggcagaaagagagaacgagaaaaagaagaaaaaaacgaaaaggagctgcaagatgaacaggaaaacaaaaggaaaagggaaaatgagaaacagaaacagtatcccgagaaaagattagtcagcaaatccctcatgcatactctctgggcaaagtttaagttaaacaggtgccccactatacaagagagtctatcactgtcatttgaatttgacatgacacataaacagataagtcaatggttttgtaaaacgaggaagaaatataataaagaaatgtccaagagaaagcataagaaaaaacatatgagatggagatctctgtgttgccaaggctggtctcgaactcctgccctcaagtgatcttcctattttggcctccagaaatgctgtgattacaagcatgagccatcgcactggctaagacattttacatgacaccattctcaccaataaatggagttctgaaaggataaacaagaaaacattaacagtcgttgattccgtggagtagaactaaatgaggggtatgcaaaggagtttttatgtgttttatttttaccctactgtagatttaaagtttttataatggatgttaattgattttatttaagaaaaaaaatcgagtcaagg

SEQ ID NO: 117823 - DNA, 586 bp, Homo sapiens
gttattcaacaaacacatttgcagccaaaatctggcctacttcttggcagagcgcttatacttggtgctacgagaaaatgattgctggacctgaaaagaacctgaggtcaaggttgtgctatttccttaagtcttagttgtaggctcttggtagtttgaaaacaagattgggtttttaattcatttgtgtatccttaaatcctcactagtttttgtggatttcttttttcagttataagcaactgaatgtggatgagctataaatatttagtacaaagaatgtaatttgtccactctgaatagaaagtaagcattaagaactcttgaatgtcttcaagggttactttgttacgtgtaagatgtctccccttccttcatagcagtttttattcctgcttaaaaagggaactaaatatgaagtcagtagattttaaggtaattttcagaatgtttctactttcaccgtgccttaataaggaaaaaaggccattttccaagcgaatggaaacaccctttccttgttttgtgcctttaatcagcgtgtaccttcattgttcctgattgccaaatccacgaacttcttgag

SEQ ID NO: 117824 - DNA, 289 bp, Homo sapiens
aaaacaccttaaaaactacctatctcatcagctgtctaatgtgtacagtatgtttgacaaatgttccttcaatctgtacttaaacttttggagactgataattccctctttttttgaaatatctcaatataaagatcttacctaacatacatcttctcttgcctagtcttaacacattagttccttttctgttttttgctaagtggtttccagtttcctcaccatattcatttcagtttgaggacctactaggatccatttgtatagggtagaacttgtatatttaaga

SEQ ID NO: 117825 - DNA, 109 bp, Homo sapiens
cagggtccattccagtggggcccagtggagaggacctcagttccatacacaggaacatgtgttcctgcccagtttctaattttgctacctcttaaagttgtttcttcta

SEQ ID NO: 117826 - DNA, 378 bp, Homo sapiens
ataaagtaggtaatataagcagtattcctgttttacagatgaagccactaatatagagctttcttttttaaatcatactttaaattctgggatacatgtgcagaacgtgcaggtttgttacataggtatacacgtgccatggtggtttgctgcacccatcaacccatcatctacgttaggtatttctcctaatgctatccctcccctagccctccatcccctgacaggcccctgtgtgtgatgtaaccctccctgtgtccatgttttctcattgttcaacttccacttgtgagtaagaacatgcagtgttaagttttctgttcctgtgttagtttgctgagaatgatggtttccagcttcatccatctccatgcaaag

SEQ ID NO: 117827 - DNA, 272 bp, Homo sapiens
gtgtgtcttggaaattctccttaataactaaaggttaaaattgacaaccagctggtcttaatttctccttaccattagaacactcagcgatcatattgttggggttttttgttattgtttcagtcgttctcccatcggatttgaccaactctacccaatttggtcaaatctgaatgagaattccaaatcatggggaaaaaggcctctgaattggctaaaattccttgcagctgaaaacaaaacaaaaacatatgtttagtttctgtgtctgc

SEQ ID NO: 117828 - DNA, 315 bp, Homo sapiens
ctgaggggcaggaggtggagtgtcatggaagagtctttacttcagggacctggggggtcctaaggtctatggcccccacagtggcctgggagcaggctatgatgggggcgtgaagccacagaagccaggattcgtggtcaggcatgggctgggaacccagccagggttcaggaccttcgcaggtgctgcagcccagccaggatatggaaacgggctgggagcagcggccttcccagtggccggagcccagtcaggtcctgccgctcaaaatggctttggaccaggcttttggagggggttggaaaaccccagaag

SEQ ID NO: 117829 - DNA, 484 bp, Homo sapiens
agggactacattgaaaatggaagcacaggtgagtgtgcatgtttagggggcaggagtctccctggactcccctgcttgcctcctgccatcaaatcacgcaacaccgctggacaacattgtgtttgcactaagctggtctagggctcagcttttgattggtaggcatggcagccaagaagagaaggggtggggtgatgttgacatggttactgattcagcccaggctctgcagtccgatggccagagaaacgacaagggtgaccagtaggctggaggcaagggctccaccctcaagcctgggaccatggtccaaagtgagaacttacacccctattttcctgctcaaatgttgccttttccaaaaccacccatggcccagcccgccccccatcctgtccccataaaaaccccaggctccatcagagagaagaggagaagcagctggacgttggaggctacagttggacattggagagaagtagct

SEQ ID NO: 117830 - DNA, 414 bp, Homo sapiens
gattggtggaagactggtaattggaaaggaacaggaaaagggaggaatctgaaagggtgactttcaaattcctcagttttgaacatgggtgactgaaaagatggatatcattaacagagtcagggaatagaagaggtaagatgacaggtttagcatagtcaaaatggagctgtaaatcacagctgacttctcttcacaaattgacatatctgatcctaaaatgtatccagaaattcaacccagaatagcaaaagcaatctcgaaacagaaggacaaagttagaaaactcaaacttctcaactttaaaacttacaacaaaactacagtaatcaaagctgcatcttgctggcatgaggacagacatatagattaatggaagagttcagagtccagaaattaacccccacaattata

SEQ ID NO: 117831 - DNA, 248 bp, Homo sapiens
gtgatctacctgtcttggcctcccagagtgttgggattacgccactgtacccagccttagactcagtttaaaatgggcttattgtaatgaaaaaaaatacgctacccaaaatttgccatgatgcctgtgatggtgaaggcattaaacaattgaaatctttgccttgcccagagagttgcagttatttgtaattataaacagtaagtgtatcagggcaggggtgacaataaaaaaccaatcattactac

SEQ ID NO: 117832 - DNA, 206 bp, Homo sapiens
ttttaagtcctttcagctggaggtgaaactgcaacgttatcaaacatgccagtacacactgtttcccaggcctgtttttgcatgagttggggtagaaatgtacccagcttctgttccagtaggtggagaaagatgcttaaatcctagaagcactgttcacctacctttttagggtactgcaggtttagctcgagggttggagggca

SEQ ID NO: 117833 - DNA, 554 bp, Homo sapiens
ccacctcagcctcccaaagtgctgggattacaagagtgggtcaccgcgccctggccaatatttacttttatatcatgttttatatttttaattttgtgttccttgttttaaggaatagagtctccctcttccccgacccctaaataacattgtataagtatccagtctctaacaccttctctatggtgtaggaaacattcagattgtgtgtggaaatgcatgtgacctaaaagtatatatgaacacttgtaggaacaaaatgacacaaagaagctacagagttagaaaatcatattaaaagggagactttttttaaaaaacgtgaaggatggaaaagggttttaactgtttgcttctattagacctttctccagagaaaaccgtcaaaagcaaagctatcaaagagattctccagtagctctcagacagaacaacagtccaaagggctcttcaagagaaaatctaatgttgggaggctccttcttatagtgagggcacagaggagggctccttcttaagagaaggtcaactactctgcaagtgcctgaatttgg

SEQ ID NO: 117834 - DNA, 289 bp, Homo sapiens
gcccaaccctggcatcgagtttgagttctggctccctcgggagcgctacagccccttccaggctcgtgtgcaggccctgggctggcccctgaggcagcctcagccccggggggtggagcctcagccccccgcagcccctgctgtcacccctgcacagaccccaacgctggccccaggtgaggtggggacagccagggtgggggatgagtggggactgaggcctgtgcccctcacagcaccgcccatcccacagacccctgcccaccctgccctgacacccgcggccgcg

SEQ ID NO: 117835 - DNA, 728 bp, Homo sapiens
tcctgccctcagcgcccaaccagtgcgacctcaactgcctggctgaggggcacgccttctaccacagcttcggccgcgtcctggacggcaccgcctgcagcccgggtgcccagggggtctgcgtggctggccgctgccttagcgccggctgtgatgggttgttgggctcgggtgccctcgaggaccgctgtggccgctgcggaggcgccaacgactcgtgccttttcgtgcagcgcgtgtttcgtgacgccggtgccttcgctgggtactggaacgtgaccctgatccccgagggcgccagacacatccgcgtggaacacaggagccgcaaccacctggcactgatggggggcgatgggcgctacgtgcttaatgggcactgggtggtcagcccaccagggacctacgaggcggccggcacgcatgtggtctacacccgagacacagggccccaggagacattgcaagcagccgggcccacctcccatgacctgctcctacaggtcctcctgcaggagcccaaccctggcatcgagtttgagttctggctccctcgggagcgctacagccccttccaggctcgtgtgcaggccctgggctggcccctgaggcagcctcagccccggggggtggagcctcagccccccgcagcccctgctgtcacccctgcacagaccccaacgctggccccagacccctgcccaccctgccctgacacccgcggccgc

SEQ ID NO: 117836 - DNA, 564 bp, Homo sapiens
acaggctcctgagaggtcgcgggcagtgctgcggggaggcgcggggccctgctctgtagggctgaaggccgcccgaggttcgccaaggctctgggctctcgaaaggaagccaagaaaagaagctgcccaggtgaccagtcctgggagtgctctctcccaaggaagctccgagcgcccaggagcccttagccggggtctagtgccctttgaacaatctccagctcttcaaggaagtgggccgccgccgcctctcttgggacctggcctgggatcctttccccaaacgcaccccggcgatttttgcgcaccgggagccgaacccctgctgcgcgcagctggctgggctcaggcgcgcttcctcaacgtttcggagccgctgcccccagcgaagtccacattccaagctccaggggctttgagagagacgaccccaaggcaaggcgtttggagagctgctgaggagccaggggcttggaggagcgagaagacatgtattttcagctgagtctcagaaggggagaatctcctgtcaccaccagaaaagcaacagccccgaaatgtgat

SEQ ID NO: 117837 - DNA, 452 bp, Homo sapiens
gtcccatagcagagtgcggatggagccaggcctccctcaagatttcccacagccctcttccagcctcaaaccttctccaggacccgaaaccctgctacactgtgtttccatagctgcaaccccccaaaagagggtccccaaatcaaaggaatacaaaggaaaacaaaatagaaaggaaaagaaaggaagaggagagatggaatcctctctgtcattagttttctgtttgtttgttttttagggtctccctctgtcacccaggctggaatgctgtggcagctcactgtagtctcaaactgctaggctcaagcgatcctcccaccccagcttccctagtggctgagactgcaggcacacaccactacacccaatgttgtcattagtttttctctcaaacatttttctaatgccttgggtgcctgtcgtttcttgtctgctaggacagctcagta

SEQ ID NO: 117838 - DNA, 471 bp, Homo sapiens
tcccgtggcctggttcctctcatcaccatctgccttgtttggaggtcacacatgtgcttgtctgaaatgcttggagggcaaggacaggcaaggtcatccttgtttcaccacttgctcctgtacagagatctgggggcatttgatcagcatcaaataagtatcatttctttgtctaccatcttcccgctctggtgctatctccagccttttctctctttacgtttctttttcttttttctttgtcttttttttttgtttgagatggagtcttgctctgtcgcccaggctggagtacagtggcgtgatcttggctcactgcaacctccaccttccgggttcaagcagttctcctgcctcagcctcccaagtagctgagattacaggtgcccaccaccactcctggctaatttttgtatttttagtagagaaagggtttcaccatattggccaggctggtctcgaactcctgac

SEQ ID NO: 117839 - DNA, 307 bp, Homo sapiens
tccacactgagctctccattgccctgcatcctttccctcacactgccctttttcttttgctagaggtgagaggaaaagtgaaacgtttcttgtatccgtgtctctttgagaagtggaaaaaccaaagatagactgaaaggctccaagtagtaggagggcattttctttgagaatgtgaagaatattcttagtctttaatatgcaaatagagtgtccctatggtaagaatacaactcaaggggggctatttatgaaatacaccctacgttagagtttgagaccccagaggtagaccgtacagaaaccg

SEQ ID NO: 117840 - DNA, 308 bp, Homo sapiens
ggatgatccccctacctctttcacgtatccatatcaaactccttattttataggcccagttgtaggagtaataacatatccatggtaacatggctggatagtggtgaaattgagcatcaaacccaggttacctagtccagtattgttttcactatgttttatctctccttaaaactgaactttatttctaaatgtgccatctggtgtcatctgtagaaatacaaagtaagtggtcctcttcctatgagaaagttactccccaaataggggaattttaaagtagaaagtcaacgtgagaaaggaaggat

SEQ ID NO: 117841 - DNA, 187 bp, Homo sapiens
taatacagataaaatagttttggatatttaacccattcctgatatacttagtgtttttcatgattactattatagacacaaactatgagaaactcatagagctgaaagggctatgggatcaattattcctgttccttagttgaggaagactctgaacctatacaccaaacagcactcatcagcctag

SEQ ID NO: 117842 - DNA, 233 bp, Homo sapiens
cccctggaaaccagcatccctccaactgagccccatggggaggcagatacactaataaagatccccaaatatcaatcaaactcatatagccaacttctggccggctgtggtggctcatgcctgtaatcccagcactttgggaggccaaggtgggcggatcacttgaggtcaggagtttgagaccagcctgaccaacgtggtgaaacctcatctctactaaaaatacaaaaatt

SEQ ID NO: 117843 - DNA, 400 bp, Homo sapiens
tgagccactatgcccggcccggttctatcttacaaacgtcacaaggagaaagctaggagaggccgagatgggagtgtggtttaaggtcagggaagacacacatgcatttaaagttgaaaggaaaataaaaatggggatgagattaaagatatttgagagttaacatctgtgggagtaagatttcttagattagaatgaggctataaaacgtcaaaagagagatttagtgagaagcaatttactaaggatgataggaaacccacatgcattgtcaagacaagtgggaatttctctgccctttgatgagataatgatgatacctcagaatcctgtctagtaattctgaagggcagtgaaaaaattgtggagggaaaaaaagaatccctgccaaacctacttg

SEQ ID NO: 117844 - DNA, 1494 bp, Homo sapiens
ggaaaggacgctctatttccctcgtgtctctacctggtaggtaaatcggccgcagaaaagaccaatgctaactccaccctgcatttgcagagatccgtcgctcacaccttttcttgtcttccgttgaaaaaagagaatcgtgggagtaggacctatttgccaatctcctggtaacactatcacaactggccacttccgcccaacgcccggtagtctgagagcctccaaggtcctcccccgcacccctgaggtcctgcagacgacggcgtcgtgggtggtcaccgttatcccttaggtctggagaggggacatccgagcgagggccacttgcggccaggcccgagctcgtccagctccgggtgaccacagagtgccgcgggcgggcagaggggccggaaacccaggccgcttcgtccctgtttccggcagcgccgcgctgctccgggagccgctgtggcagcgtatgctgccacggggactgaagatggcgccgcgaggtgagattccggaggtaaacggttgtcctccaccccgctggaaatcctgttctttctgaacgggtggtataatgctacctatttcctgctggaacttttcatatttctgtataaaggtgtcctgctaccatatccaacagctaacctagtactggatgtggtgatgctcctcctttatcttggaattgaagtaattcgcctgttttttggtacaaagggaaacctctgccagcgaaagatgccactcagtattagcgtggccttgaccttcccatctgccatgatggcctcctattacctgctgctgcagacctacgtactccgcctggaagccatcatgaatggcatcttgctcttcttctgtggctcagagcttttacttgaggtgctcaccttggctgctttctccagtatggacacgatttgaagtacagaatttcagccagcagcccatcaggctgacaccacacatattgcttctggtactttagccacaccagtgagaattggtggggcaagttgtcctgagaaaggctgtgtggcttttcttcagcacagacatttgggcaagcaactcagcataaggccagtgggtaccatcttctaaaccaggaccatcagcccaagagactcttctacactccagtatagggaggggcaaggttattcccatcctgccccttctcagaaccagtcccctgctgacctcaagttctcctccttgatcaccgtggccagagcatctcgtgtggaccatctaggctccttgggcttcaagcaggacctgagccacatgctccctgtacgagctgtgctatacctgtcccacatgagcacggagagcctcatgttggtgggtttccagagtgatgtgaaagcctctcaccccaatcctcggagactgagttccacaacttttttagtagctcatagtgttatttttctactctcttcatgaaactaactttattttataataaatatatattttctgttg

SEQ ID NO: 117845 - DNA, 1052 bp, Homo sapiens
aagcagctggtaccgtccggaattcccggatcgggactgaagatggcgccgcgaggtgagattccggaggtaaacggttgtcctccaccccgctggaaatcctgttctttctgaacgggtggtataatgctacctatttcctgctggaacttttcatatttctgtataaaggtgtcctgctaccatatccaacagctaacctagtactggatgtggtgatgctcctcctttatcttggaattgaagtaattcgcctgttttttggtacaaagggaaacctctgccagcgaaagatgccactcagtattagcgtggccttgaccttcccatctgccatgatggcctcctattacctgctgctgcagacctacgtactccgcctggaagccatcatgaatggcatcttgctcttcttctgtggctcagagcttttacttgaggtgctcaccttggctgctttctccagtatggacacgatttgaagtacagaatttcagccagcagcccatcaggctgacaccacacatattgcttctggtactttagccacaccagtgagaattggtggggcaagttgtcctgagaaaggctgtgtggcttttcttcagcacagacatttgggcaagcaactcagcataaggccagtgggtaccatcttctaaaccaggaccatcagcccaagagactcttctacactccagtatagggaggggcaaggttattcccatcctgccccttctcagaaccagtcccctgctgacctcaagttctcctccttgatcaccgtggccagagcatctcgtgtggaccatctaggctccttgggcttcaagcaggacctgagccacatgctccctgtacgagctgtgctatacctgtcccacatgagcacggagagcctcatgttggtgggtttccagagtgatgtgaaagcctctcaccccaatcctcggagactgagttccacaacttttttagtagctcatagtgttatttttctactctcttcatgaaactaactttattttataataaatatatattttctgttg

SEQ ID NO: 117846 - DNA, 1780 bp, Homo sapiens
ggaaaggacgctctatttccctcgtgtctctacctggtaggtaaatcggccgcagaaaagaccaatgctaactccaccctgcatttgcagagatccgtcgctcacaccttttcttgtcttccgttgaaaaaagagaatcgtgggagtaggacctatttgccaatctcctggtaacactatcacaactggccacttccgcccaacgcccggtagtctgagagcctccaaggtcctcccccgcacccctgaggtcctgcagacgacggcgtcgtgggtggtcaccgttatcccttaggtctggagaggggacatccgagcgagggccacttgcggccaggcccgagctcgtccagctccgggtgaccacagagtgccgcgggcgggcagaggggccggaaacccaggccgcttcgtccctgtttccggcagcgccgcgctgctccgggagccgctgtggcagcgtatgctgccacggggactgaagatggcgccgcgaggtgagattccggaggtaaacggttgtcctccaccccgctggaaatcctgttctttctgaacgggtggtataatgctacctatttcctgctggaacttttcatatttctgtataaaggtgtcctgctaccatatccaacagctaacctagtactggatgtggtgatgctcctcctttatcttggaattgaagtaattcgcctgttttttggtacaaagggaaacctctgccagcgaaagatgccactcagtattagcgtggccttgaccttcccatctgccatgatggcctcctattacctgctgctgcagacctacgtactccgcctggaagccatcatgaatggcatcttgctcttcttctgtggctcagagcttttacttgaggtgctcaccttggctgctttctccaggtactgctgctgagggaccatttctcatcactagagggttgggttcccatcccagggagggattcacgtattcttctgaagcctaaggggtctagaagacttttttctagagggaggaaggggtggctatgggattgcctttcctgtttagggtaggtagatcgtttcccactcagggaagatactctccctatcctttggggccaggaggcttggaatatagaacagtcgaggccagctgctctcattcactggtcttttaacattttctttctttctgccatcgtatggacacgatttgaagtacagaatttcagccagcagcccatcaggctgacaccacacatattgcttctggtactttagccacaccagtgagaattggtggggcaagttgtcctgagaaaggctgtgtggcttttcttcagcacagacatttgggcaagcaactcagcataaggccagtgggtaccatcttctaaaccaggaccatcagcccaagagactcttctacactccagtatagggaggggcaaggttattcccatcctgccccttctcagaaccagtcccctgctgacctcaagttctcctccttgatcaccgtggccagagcatctcgtgtggaccatctaggctccttgggcttcaagcaggacctgagccacatgctccctgtacgagctgtgctatacctgtcccacatgagcacggagagcctcatgttggtgggtttccagagtgatgtgaaagcctctcaccccaatcctcggagactgagttccacaacttttttagtagctcatagtgttatttttctactctcttcatgaaactaactttattttataataaatatatattttctgttg

SEQ ID NO: 117847 - DNA, 931 bp, Homo sapiens
tgccttccagtcttcctgaccacttgcactattggactttggaaggaggtgcctatagacaacgatgttgaacatactctcatcgcagtggtctgtgtccctcggtgcaggatctaccagatttgagggacgaggtcaaggagatatgatagtcccggaagttgcttgtgccccctcagcagcgtgtcgctcgatcaccagttcgcattctcggacgcctccaactcgcagaacgccgtcgaagcttcgacggtgtcctgctaccatatccaacagctaacctagtactggatgtggtgatgctcctcctttatcttggaattgaagtaattcgcctgttttttgtatggacacgatttgaagtacagaatttcagccagcagcccatcaggctgacaccacacatattgcttctggtactttagccacaccagtgagaattggtggggcaagttgtcctgagaaaggctgtgtggcttttcttcagcacagacatttgggcaagcaactcagcataaggccagtgggtaccatcttctaaaccaggaccatcagcccaagagactcttctacactccagtatagggaggggcaaggttattcccatcctgccccttctcagaaccagtcccctgctgacctcaagttctcctccttgatcaccgtggccagagcatctcgtgtggaccatctaggctccttgggcttcaagcaggacctgagccacatgctccctgtacgagctgtgctatacctgtcccacatgagcacggagagcctcatgttggtgggtttccagagtgatgtgaaagcctctcaccccaatcctcggagactgagttccacaacttttttagtagctcatagtgttatttttctactctcttcatgaaactaactttattttataataaatatatattttctgttg

SEQ ID NO: 117848 - DNA, 1417 bp, Homo sapiens
ggaaaggacgctctatttccctcgtgtctctacctggtaggtaaatcggccgcagaaaagaccaatgctaactccaccctgcatttgcagagatccgtcgctcacaccttttcttgtcttccgttgaaaaaagagaatcgtgggagtaggacctatttgccaatctcctggtaacactatcacaactggccacttccgcccaacgcccggtagtctgagagcctccaaggtcctcccccgcacccctgaggtcctgcagacgacggcgtcgtgggtggtcaccgttatcccttaggtctggagaggggacatccgagcgagggccacttgcggccaggcccgagctcgtccagctccgggtgaccacagagtgccgcgggcgggcagaggggccggaaacccaggccgcttcgtccctgtttccggcagcgccgcgctgctccgggagccgctgtggcagcgtatgctgccacggggactgaagatggcgccgcgaggtgagattccggaggtaaacggttgtcctccaccccgctggaaatcctgttctttctgaacgggtggtataatgctacctatttcctgctggaacttttcatatttctgtataaaggtgtcctgctaccatatccaacagctaacctagtactggatgtggtgatgctcctcctttatcttggaattgaagtaattcgcctgttttttggtacaaagggaaacctctgccagcgaaagatgccactcagtattagcgtggccttgaccttcccatctgccatgatggcctcctattacctgctgctgcagacctacgtactccgcctggaagccatcatgaatggcatcttgctcttcttctgtggctcagagcttttacttgaggtgctcaccttggctgctttctccagtatggacacgatttgaagtacagaatttcagccagcagcccatcaggctgacaccacacatattgcttctggtactttagccacaccagtgagaattggtggggcaagttgtcctgagaaaggctgtgtggcttttcttcagcacagacatttgggcaagcaactcagcataaggccagtgggtaccatcttctaaaccaggaccatcagcccatgacctcaagttctcctccttgatcaccgtggccagagcatctcgtgtggaccatctaggctccttgggcttcaagcaggacctgagccacatgctccctgtacgagctgtgctatacctgtcccacatgagcacggagagcctcatgttggtgggtttccagagtgatgtgaaagcctctcaccccaatcctcggagactgagttccacaacttttttagtagctcatagtgttatttttctactctcttcatgaaactaactttattttataataaatatatattttctgttg

SEQ ID NO: 117849 - DNA, 1662 bp, Homo sapiens
ggaaaggacgctctatttccctcgtgtctctacctggtaggtaaatcggccgcagaaaagaccaatgctaactccaccctgcatttgcagagatccgtcgctcacaccttttcttgtcttccgttgaaaaaagagaatcgtgggagtaggacctatttgccaatctcctggtaacactatcacaactggccacttccgcccaacgcccggtagtctgagagcctccaaggtcctcccccgcacccctgaggtcctgcagacgacggcgtcgtgggtggtcaccgttatcccttaggtctggagaggggacatccgagcgagggccacttgcggccaggcccgagctcgtccagctccgggtgaccacagagtgccgcgggcgggcagaggggccggaaacccaggccgcttcgtccctgtttccggcagcgccgcgctgctccgggagccgctgtggcagcgtatgctgccacggggactgaagatggcgccgcgaggtgagattccggaggtaaacggttgtcctccaccccgctggaaatcctgttctttctgaacgggtggtataatgctacctatttcctgctggaacttttcatatttctgtataaaggtgtcctgctaccatatccaacagctaacctagtactggatgtggtgatgctcctcctttatcttggaattgaagtaattcgcctgttttttggtacaaagggaaacctctgccagcgaaagatgccactcagtattagcgtggccttgaccttcccatctgccatgatggcctcctattacctgctgctgcagacctacgtactccgcctggaagccatcatgaatggcatcttgctcttcttctgtggctcagagcttttacttgaggtgctcaccttggctgctttctccagtatggacacgatttgaagtacagaatttcagccagcagcccatcaggctgacaccacacatattgcttctggtactttagccacaccagtgagaattggtggggcaagttgtcctgagaaaggctgtgtggcttttcttcagcacagacatttgggcaagcaactcagcataaggccagtgggtaccatcttctaaaccaggaccatcagcccatgacctcaagttctcctccttgatcaccgtggccagagcatctcgtgtggaccatctaggctccttgggcttcaagcaggacctgagccacatgctccctgtacgagctgtgctatacctgtcccacatgagcacggagagcctcatgttggtgggtttccagagtgatgtgaaagcctctcaccccaatcctcggagactgagttccacaacttttttagtagctcatagtgttatttttctactctcttcatgaaactaactttattttataataaatatatattttctgttgtgaaaattgcagacctttccttatggcacctgtccctagaattcatccactccaagagagggtcatgactatcccagcagtttgttctcaggagctttgcttagtgatacagtgtggacaaaaggcagtgatgaccactgattttcttccccaagctgcagcctaaattaaaccctaaatgcactgccatcctctgtatcttcaagtctctcgtcatgcaaaagactgcttatttgcttcactct

SEQ ID NO: 117850 - DNA, 270 bp, Homo sapiens
agttcttgtgggtgctgttatatgctgtttgcaaactctggcttttgtattggcaggtgtcctgctaccatatccaacagctaacctagtactggatgtggtgatgctcctcctttatcttggaattgaagtaattcgcctgttttttggtaagtgttgtccagagaatatttccactccttatgagacaagctggtatctgtaacttgattaacaagaaaagtacataacctaggttgactatcatagactggatctgtatatcctatt

SEQ ID NO: 117851 - DNA, 1540 bp, Homo sapiens
ggaaaggacgctctatttccctcgtgtctctacctggtaggtaaatcggccgcagaaaagaccaatgctaactccaccctgcatttgcagagatccgtcgctcacaccttttcttgtcttccgttgaaaaaagagaatcgtgggagtaggacctatttgccaatctcctggtaacactatcacaactggccacttccgcccaacgcccggtagtctgagagcctccaaggtcctcccccgcacccctgaggtcctgcagacgacggcgtcgtgggtggtcaccgttatcccttaggtctggagaggggacatccgagcgagggccacttgcggccaggcccgagctcgtccagctccgggtgaccacagagtgccgcgggcgggcagaggggccggaaacccaggccgcttcgtccctgtttccggcagcgccgcgctgctccgggagccgctgtggcagcgtatgctgccacggggactgaagatggcgccgcgaggtgagattccggaggtaaacggttgtcctccaccccgctggaaatcctgttctttctgaacgggtggtataatgctacctatttcctgctggaacttttcatatttctgtataaaggtgtcctgctaccatatccaacagctaacctagtactggatgtggtgatgctcctcctttatcttggaattgaagtaattcgcctgttttttggaaaagcagaccatttggagatgactccatgggctgtgtctgacaggtacaaagggaaacctctgccagcgaaagatgccactcagtattagcgtggccttgaccttcccatctgccatgatggcctcctattacctgctgctgcagacctacgtactccgcctggaagccatcatgaatggcatcttgctcttcttctgtggctcagagcttttacttgaggtgctcaccttggctgctttctccagtatggacacgatttgaagtacagaatttcagccagcagcccatcaggctgacaccacacatattgcttctggtactttagccacaccagtgagaattggtggggcaagttgtcctgagaaaggctgtgtggcttttcttcagcacagacatttgggcaagcaactcagcataaggccagtgggtaccatcttctaaaccaggaccatcagcccaagagactcttctacactccagtatagggaggggcaaggttattcccatcctgccccttctcagaaccagtcccctgctgacctcaagttctcctccttgatcaccgtggccagagcatctcgtgtggaccatctaggctccttgggcttcaagcaggacctgagccacatgctccctgtacgagctgtgctatacctgtcccacatgagcacggagagcctcatgttggtgggtttccagagtgatgtgaaagcctctcaccccaatcctcggagactgagttccacaacttttttagtagctcatagtgttatttttctactctcttcatgaaactaactttattttataataaatatatattttctgttg

SEQ ID NO: 117852 - DNA, 1739 bp, Homo sapiens
ggaaaggacgctctatttccctcgtgtctctacctggtaggtaaatcggccgcagaaaagaccaatgctaactccaccctgcatttgcagagatccgtcgctcacaccttttcttgtcttccgttgaaaaaagagaatcgtgggagtaggacctatttgccaatctcctggtaacactatcacaactggccacttccgcccaacgcccggtagtctgagagcctccaaggtcctcccccgcacccctgaggtcctgcagacgacggcgtcgtgggtggtcaccgttatcccttaggtctggagaggggacatccgagcgagggccacttgcggccaggcccgagctcgtccagctccgggtgaccacagagtgccgcgggcgggcagaggggccggaaacccaggccgcttcgtccctgtttccggcagcgccgcgctgctccgggagccgctgtggcagcgtatgctgccacggggactgaagatggcgccgcgaggtgagattccggaggtaaacggttgtcctccaccccgctggaaatcctgttctttctgaacgggtggtataatgctacctatttcctgctggaacttttcatatttctgtataaaggtgtcctgctaccatatccaacagctaacctagtactggatgtggtgatgctcctcctttatcttggaattgaagtaattcgcctgttttttggtacaaagggaaacctctgccagcgaaagatgccactcagtattagcgtggccttgaccttcccatctgccatgatggcctcctattacctgctgctgcagacctacgtactccgcctggaagccatcatgaatggcatcttgctcttcttctgtggctcagagcttttacttgaggtgctcaccttggctgctttctccagtatggacacgatttgaagtacagaatttcagccagcagcccatcaggctgacaccacacatattgcttctggtactttagccacaccagtgagaattggtggggcaagttgtcctgagaaaggctgtgtggcttttcttcagcacagacatttgggcaagcaactcagcataaggccagtgggtaccatcttctaaaccaggaccatcagcccaagagactcttctacactccagtatagggaggggcaaggttattcccatcctgccccttctcagaaccagtcccctgctgacctcaagttctcctccttgatcaccgtggccagagcatctcgtgtggaccatctaggctccttgggcttcaagcaggacctgagccacatgctccctgtacgagctgtgctatacctgtcccacatgagcacggagagcctcatgttggtgggtttccagagtgatgtgaaagcctctcaccccaatcctcggagactgagttccacaacttttttagtagctcatagtgttatttttctactctcttcatgaaactaactttattttataataaatatatattttctgttgtgaaaattgcagacctttccttatggcacctgtccctagaattcatccactccaagagagggtcatgactatcccagcagtttgttctcaggagctttgcttagtgatacagtgtggacaaaaggcagtgatgaccactgattttcttccccaagctgcagcctaaattaaaccctaaatgcactgccatcctctgtatcttcaagtctctcgtcatgcaaaagactgcttatttgcttcactct

SEQ ID NO: 117853 - DNA, 332 bp, Homo sapiens
ggaattcaaaccacaaagaatgctgatgttgcttacaagacattttgtcccagtgcatttgtttgctttctcctggcttgatttgaccttttatctctccctcttcccccacctctttgtttgctactgtgtttatttcacccttcattaccatctttctttagatgacttattcattcttccatttattcacctgcttttgttaagtatctactctgtgctaggttatggtgatgagcaaggttaaaaaaaaaacaaaaaaccatgatcactgatcttgaaggcttctagaatattttaagagatacaacctagttaaagaaaaaataatg

SEQ ID NO: 117854 - DNA, 414 bp, Homo sapiens
tgagtgattttggattctatcctgaaatggtaagaatgaaaagaaaatctgccaagtccatccgttcctacactctcactgcctccaagtcattctgcgctcttgagccagaacgacctggccgtttttaaaaatggagttttttgccttagtaattgacttgtgtaagagttctttattccacttgtgaattgttttttatacgtacataatgtaaatattttctccccttctgtgcctttcagtatgaatctatctgaactcgattctgctgttgtgtgtgtgtcttttcctcagtaccagatggtcttgattactgtagatatatagtatatgtcttgaaatcaatagggtaaattctctaacttttgttctttttattaatgttgctgtggctaatctgtctgctacatt

SEQ ID NO: 117855 - DNA, 466 bp, Homo sapiens
agtaaaactttatttacaaaaacaggtggtgggctggatttggtatataggctctggtttgctgacccttgatatagcagtctcttcatttttttttttcttgtctatccctttacatgtaatctgacatgattgcttaaaaattgtgtgagtttccggtgtatctgttttcaaggaatccagcctattagacgaaagccatacccataagtttctttgacacaaacccttctctatcttgggtcccctgtgaggttcctatgggacagcacttttagatcttaaatccttgccccttagatcctgccttttgaacaataagagtttctgttacacatttctttaagatctggagagtgccttttgtctgtctgaaagttctggaaggcactgcctaggtctttctaaagtcttagcaaaggattcatctccccccaccccaatcaacctctatgctttcttctta

SEQ ID NO: 117856 - DNA, 721 bp, Homo sapiens
attaggcctaggaagctggactgtaatattcccataagctctaaccacaccagctttgggtgaatcatgctaaaagctggaggttaataactgagctaataaaactgggaaattggagtatgcgaccatgggctgatatctaggaggggttgcagttttgagattgactgttctaactagaatcctttgaaatttagaaggtagtctggtcgtctggctcctgaagaagacgaccagtagggaagaggtattctgcggctatgactggtatgagaacattgaagcctactgggatggggcagtatcttagagggaatgatagactccaccgatttcgaatagagatatgactggtgaatttctagggatcgccatacctccttttctctttcatttttgtttttgggctttgctggtttagttttttgccaattcatggtcctgaactttctcagttaactttggaaatgaataacgtaggaaatgtcctctcatctccctcccttattactctaaaggacagaaccaggatccacatggaggtacttctctacatggatctgaaatatgggactatcctgattgtattctaaaggatcaaggtgctagaaagtgaccactgggcaatggattacatttggggatacaaatatatagtattggggctaagagaacaggttttttagtcagtctagcaaagtctagaactcagttccaccac

SEQ ID NO: 117857 - DNA, 210 bp, Homo sapiens
ctctttgaggagagaaaggggaattcaaagattcagcttgatagatccttcatctttgacctcatgtgtattctacttaggaattaaaacgtaagaatggcctaaaagtgtggaaacttgaagtgagaggtgacatgctctccttgtaaatttaacaccaccactaagaaatgtaagctgttcacttgcttagtgtctcacttgctgcaa

SEQ ID NO: 117858 - DNA, 419 bp, Homo sapiens
caacaggactggaagtgggcctgagacactgagttctaacaagctcctaggtgaaactaatgctgctggtccacaaaacaaactttggacagtgaagtactagaggattctgatgcaggtggtcaaaaacacttacctagacttgaggatcaaagagcatctggcaaggactgtttccaacacatacagctttatctcccaacactgacttttaggatttgtttccttgctgcctcccattctcaaatatgttccagccctgttctttatgtcttggcagtgctgaactacacatactcctgcaaacatgacaggaaaacagctgcttccatgcccttcctctgagtatccagcaggttaagtcctattcatctgttaactgagccattgctggtgtttctcctatgaagccctctctg

SEQ ID NO: 117859 - DNA, 271 bp, Homo sapiens
tagagagaatgtctctcctccatctgcgaagtgctgcattttaggtttgatctgacaatttgatgcaacggctcaggtatatatgacaaggaaatggaatttctatcctcgaaatcaattctgaacaataaaagctgagaggataagtttattcaaaggtgatttggtattgcgacaggctgctccaaatcagaactcagcaacctgattttgaaaaatttccaagttcatgaaaagaatcactttgtacataagggctttctacttgttt

SEQ ID NO: 117860 - DNA, 903 bp, Homo sapiens
  misc_feature (823)..(823): n is a, c, g, or t
ctcggtgtcagccatctttcaatgtgttcgcagccgccgccgcgccgccgtcgctctccaacgccagcgccgcctctcgctcgccgagctccagccgaaggagaaggggggtaagtaaggaggtctctgtaccatggctcgtacaaagcagactgcccgcaaatcgaccggtggtaaagcacccaggaagcaactggctacaaaagccgctcgcaagagtgcgccctctactggaggggtgaagaaacctcatcgttacaggcctggtactgtggcgctccgtgaaattagacgttatcagaagtccactgaacttctgattcgcaaacttcccttccagcgtctggtgcgagaaattgctcaggactttaaaacagatctgcgcttccagagcgcagctatcggtgctttgcaggaggcaagtgaggcctatctggttggcctttttgaagacaccaacctgtgtgctatccatgccaaacgtgtaacaattatgccaaaagacatccagctagcacgccgcatacgtggagaacgtgcttaagaatccactatgatgggaaacatttcattctcaaaaaaaaaaaaaaaatttctcttctcccggtatgggaagttctgaacgttaaatatttttttcccatggggtcaaagggtacctaagtatatgatggcgagtggcaaaatcggggccagaaatcaggtatgggcagttttcccatttccattgtgtgtgtgaattttaatataaatgcggagacgtaaagctttaatgcaagttaacatgtttcagtgaacaagtttcagcggttcacctttatantattataataaacctgttaaattttctgggaaatgcacggatttggcatttttaaacaagtaaattctaatagtgggaca

SEQ ID NO: 117861 - DNA, 761 bp, Homo sapiens
  misc_feature (669)..(669): n is a, c, g, or t
  misc_feature (678)..(678): n is a, c, g, or t
ctcggtgtcagccatctttcaatgtgttcgcagccgccgccgcgccgccgtcgctctccaacgccagcgccgcctctcgctcgccgagctccagccgaaggagaaggggggtaagtaaggaggtctctgtaccatggctcgtacaaagcagactgcccgcaaatcgaccggtggtaaagcacccaggaagcaactggctacaaaagccgctcgcaagagtgcgccctctactggaggggtgaagaaacctcatcgttacaggcctggtactgtggcgctccgtgaaattagacgttatcagaagtccactgaacttctgattcgcaaacttcccttccagcgtctggtgcgagaaattgctcaggactttaaaacagatctgcgcttccagagcgcagctatcggtgctttgcaggaggcaagtgaggcctatctggttggcctttttgaagacaccaacctgtgtgctatccatgccaaacgtgtaacaattatgccaaaagacatccagctagcacgccgcatacgtggagaacgtgcttaagaatccactatgatgggaaacatttcattctcaaaaaaaaaaaaaaaatttctcttctcccggtatgggaagttctgaacgttaaatatttttttcccatggggtcaacaggtacctaggtattnatggagtgnaaacactggggacgaacccggttgggagtttccatttcttggggggcgattctatataatggaacgtaagctaagccggtacg

SEQ ID NO: 117862 - DNA, 1114 bp, Homo sapiens
  misc_feature (1034)..(1034): n is a, c, g, or t
cgcgacacagccatcttgcgtcgggggcccgggcccgggaggagagcgagccccgtcccctgatcccggaggccaacaccggcgaggggctgccctgcacgcaggcggccggcccaggagtcttagcggatcaagttgtctacggcggactcgggccggtcccgcaggacccggccgcacttggccgagcgcgcaggcgggaaggaggccgtcggtccgcccctcccgctgccgcagcggccagccgccgccgcgccgccgtcgctctccaacgccagcgccgcctctcgctcgccgagctccagccgaaggagaaggggggtaagtaaggaggtctctgtaccatggctcgtacaaagcagactgcccgcaaatcgaccggtggtaaagcacccaggaagcaactggctacaaaagccgctcgcaagagtgcgccctctactggaggggtgaagaaacctcatcgttacaggcctggtactgtggcgctccgtgaaattagacgttatcagaagtccactgaacttctgattcgcaaacttcccttccagcgtctggtgcgagaaattgctcaggactttaaaacagatctgcgcttccagagcgcagctatcggtgctttgcaggaggcaagtgaggcctatctggttggcctttttgaagacaccaacctgtgtgctatccatgccaaacgtgtaacaattatgccaaaagacatccagctagcacgccgcatacgtggagaacgtgcttaagaatccactatgatgggaaacatttcattctcaaaaaaaaaaaaaaaatttctcttctcccggtatgggaagttctgaacgttaaatatttttttcccatggggtcaaagggtacctaagtatatgatggcgagtggcaaaatcggggccagaaatcaggtatgggcagttttcccatttccattgtgtgtgtgaattttaatataaatgcggagacgtaaagctttaatgcaagttaacatgtttcagtgaacaagtttcagcggttcacctttatantattataataaacctgttaaattttctgggaaatgcacggatttggcatttttaaacaagtaaattctaatagtgggaca

SEQ ID NO: 117863 - DNA, 299 bp, Homo sapiens
tacttcctacctctggttgtgttgtccttaacctggcaggggaagcagctgtataaatggatctggtaaatatatagtagtgatataaactagtgtaatggtggcatagaggaaagtccggaaactcttcttgctagatttgacgtggggtggggggtgggcggttagggagagacagcgcatgaattataccttaaggacaagtggagttactgcagcaaggaggaaaagagaaggaggaatgttttgggcaaccgcatgatcatcagtacagatgcagaggtacgaaagagcattgc

SEQ ID NO: 117864 - DNA, 345 bp, Homo sapiens
cacagatggtggaccagatgggaagcaacagagacatgctgggagaggggcccaggcggggcctaagacgatggcggtgggggacacagggagaagtgtttgttcccagggctgaggggtggcaaagtttctcccgctccatggccttggttgccccctctcctctcttaatcagttatgggcactgtgtgtggagtcttgggctgctttctgcctggagggaatatcccgtcaaggaatcattaggcagatataccaggtatacaagagctctgtgccagctgagcatcctggtgcggggaagtctgaaacggagaggaaagtagagcctgatgacataaatct

SEQ ID NO: 117865 - DNA, 156 bp, Homo sapiens
tgtactggatctaaggaaatgggcactttaaattttaatagatactgaaaacttcgtctcctaaaagaatctaccaatttatcatccaaatcaatagcatttctctccacctcatcagcattagacagcattattctttttttttttttttttttt

SEQ ID NO: 117866 - DNA, 445 bp, Homo sapiens
gctttttctccctctgcactccctcttgtgggtgatctcattcactctttcactgaaatgctgtctccatggcagggactccaaaaaatttatatctccagcccagaactgtcttctaagcttcagatctgcataatccaatgtcttcttggtatttccgtacggcgtttgcttcccagacatctcaaacttatccaaaaccaaattcctaatcttaacaatctgatttatgcctgttgtctcctttcttcttaaaaatgtctcagtttggccgggcccagtggctcatgcatgtaatcccagctattctggaggctgaggcacgagaatcgcttgaacccgggaggcagaggttgcagtgagccgagattgcgccactgcactccagcctgggcaacatagtgagactctgtctcaaaaaaaaaagaagactaaaaaataagta

SEQ ID NO: 117867 - DNA, 160 bp, Homo sapiens
gccaaaaataatttttttaattacctttctggtgaatgagtctggggattctcttcagtgtgttattaataaaacacagaagtagagaggcctttctgcttctcagaagtttaaacagctgtgtgtgcagtggcttgcacctgtagtgccagctattcag

SEQ ID NO: 117868 - DNA, 457 bp, Homo sapiens
acacctttaaacagccagatctcatgagaactcattcaccatcacaagaacagcaccaagaggttggtactaacccattcatgagaaaccactcttatgatccactcatctcccaccaggccccacctccaacattgagaattacagtttgacatgggatgtgggcaaggacacagatccaaaccatatccacctagcagtggaattactgagtcatatgataacatttaaccctttgaggaactgccagactgtcttccaaagtagctgcacctttttacattcccagcattggggtatgagagttctaatttcctcatattcttgccatttgctattatctgccttttttattatagccatcctaactaagtacaaagtgatatctttgtgtggttttgatttgtattacctgatggctagtgaggttgagcatcttttcatgtgcttgttggcc

SEQ ID NO: 117869 - DNA, 303 bp, Homo sapiens
tgtaaatagctagatagtaaatattttaggctttgtgggccagaaagtcgtcatcacaactacttaactctgctattgtagtatgtgaaagcagccctagagaaaatgtaaacaaatgagtatggctgaggatagagaggagaaagtgctttttttatactctcaacaaccagtcaattctgcagtggacactggctgggtgtcctctaattcaattcagttcatacactatctacctggagatgttactgatggaagatatccgagttactggcagtgaatttgtaccggtctgcaacaacc

SEQ ID NO: 117870 - DNA, 829 bp, Homo sapiens
tttggaggcgatgggtccacctgtgagtggagtacagaacgtgggggaacagcttcccaggagtctggggctcaacctctccaggaggccctgaaggtggcctgagaaagttctgcctctcgggggggcagcgtggagcacaggagccgcagtgagtcctgcctggctctaagcaccactttccaagcatgcagctttggcagtttcttggcacgctggctgaagacatgttgcccacaagctgagggaggtccttacccgtggacgccaagctccgggaggctgcagtggcggcagctgagtctgcaggtggagaggtgcagggactgttttgcctccacctccttcaatacctacttttctttccagcaacagtcccttcccttacgctcccgaatccaccctggccctgaggctgcacctgagtaccacatcctgaccccacttgtttgcaagacgtctgcatgtccacaagtgcagcgttcatctcatctcaacaagcgatccctccggagcagacgggtgatccctaccaccttctgaacactcctactcatcatctcggtaacaccctctacctgttccatacctaggccagaggttttcaccccggccacacgtcagtaccacttaggaagttaaaaaaaaaaaaactatgccaatgcaagccaatgacagaaaaaaatcaattacccgattttaaaataggcaaagaacctcaatagacatttgtagcaagaaggtctaataaggagatgaaaagtgctcaaattaaaaccacaatgaggccaggcacagcagctcacagctgtaatcccagcacttaggg

SEQ ID NO: 117871 - DNA, 191 bp, Homo sapiens
aagcaatttatgcagaattcattgccagagctcctttatggacaagaactactggctcctgtttggagcctgatccagtccatctaatggagtcacacagaagggaatggtcttcatgagttccagaatcttgctgtgccgcagtttccttatctaaaggcactactctgcagagagattttgaagatgag

SEQ ID NO: 117872 - DNA, 527 bp, Homo sapiens
cttgagcctagaaggtccaggctgcagtgaactatgactgtgccactgcattccagcctgggcaagagggagactgtctttaaaaaaaaatttaaaaaatcaaccagtgaaaaatgattatatcatgaatgagaacaggcacagaagacgtttttggaaatttgaataaagaccatatattagatgacagggaattactcagttttataagtgtgatgatactattgtgagtatgtaagataatagtgtttttcttaggagatgtgcattgaaatatttaggcatgaagagtcaagatgtttgcaacttcaaatggagaaaaagaaattatttgtgtgtgtgtatgtatgtgtgcgtgtgtgtgagagacagagatagagcagggaaaatggcaatatgctaagaattactgaacccagctgggcgcggtggctcacacctgtaatcccagcactttgggaggccgaggcaggtggatcgcttgaggccaggagttcacgaccagcctggccaacatggcgaaaccc

SEQ ID NO: 117873 - DNA, 734 bp, Homo sapiens
tacccaatctaccatattttattggactctgcaaaacatgatgattttggacatcagcattctgcaaatatcacaagcaattacccaataagtaaaaattatcatgccataataaaaattattgtgccataatatgatagtaaaacttattagggaggtgaatctagtggtgatcaaatctttgcttgtgaaactgaataaaattaaataataattccaggtaagaagtaaaagtctaaaatctcagtaagcttcatgatgatgcctatactctttaagacagaatactataatctcaccatgtgccccaaatacaagaaaactgaaatggttttgaagaaatattcatgctttcatatagtcactgaagtgaggatcaaagcctttttggaggaaatagcatttaaactgagggaaatcaagtagctcttgggcaaataaaatgtttttttaacagagtttcagggaggaaaaaaatcatgtgaaaaagccataagccaaatgggactatgaaaaattttaaggaaaaaaaatgacattctggcatgattgttattctgggagtaaaggaggatggtgtgcaaagatagttttcttcgggacatagtagagccgcttacagattttggatatttaaaaaaaaaaatagaagatagtaacaaaaatgtgatgtgatcaaaatcaccctcattaaaatgtcattctagctgttgtagaggaaggaattggaagta

SEQ ID NO: 117874 - DNA, 549 bp, Homo sapiens
aagcctcgctcatgtccctggctttttgctttttgaggaagagacgcggtcgtaagggctgaggatttttggtccgcacgctcctgctcctgactcaccgctgttcgctctcgccgaggaacaagtcggtcaggaagcccgcgcgcaacagccatggcttttaaggataccggaaaaacacccgtggagccggaggtggcaattcaccgaattcgaatcaccctaacaagccgcaacgtaaaatccttggaaaaggtgtgtgctgacttgataagaggcgcaaaagaaaagaatctcaaagtgaaaggaccagttcgaatgcctaccaagactttgagaatcactacaagaaaaactccttgtggtgaaggttctaagacgtgggatcgtttccagatgagaattcacaagcgactcattgacttgcacagtccttctgagattgttaagcagattacttccatcagtattgagccaggagttgaggtggaagtcaccattgcagatgcttaagtcaactattttaataaattgatgaccagttgttaa

SEQ ID NO: 117875 - DNA, 607 bp, Homo sapiens
  misc_feature (45)..(45): n is a, c, g, or t
  misc_feature (53)..(54): n is a, c, g, or t
  misc_feature (59)..(59): n is a, c, g, or t
  misc_feature (61)..(61): n is a, c, g, or t
ggagcgataccatttcacacgggaacagctttgacatgttccganttaatcgnntcctntnggaatttgccctcgagcccaaagattcggcacgagcagagacgcggtcgtaagggctgaggatttttggtccgcacgctcctgctcctgactcaccgctgttcgctctcgccgaggaacaagtcggtcaggaagcccgcgcgcaacagccatggcttttaaggataccggaaaaacacccgtggagccggaggtggcaattcaccgaattcgaatcaccctaacaagccgcaacgtaaaatccttggaaaaggtgtgtgctgacttgataagaggcgcaaaagaaaagaatctcaaagtgaaaggaccagttcgaatgcctaccaagactttgagaatcactacaagaaaaactccttgtggtgaaggttctaagacgtgggatcgtttccagatgagaattcacaagcgactcattgacttgcacagtccttctgagattgttaagcagattacttccatcagtattgagccaggagttgaggtggaagtcaccattgcagatgcttaagtcaactattttaataaattgatgaccagttgttaa

SEQ ID NO: 117876 - DNA, 1573 bp, Homo sapiens
gttcgagaccagcctgaccaacatggtgaaaccctgtctctgctaaaaatgcaaaattagctgggcgtggcagtgcgtgcctgtggtcccagccacttgggaggctgaggcatgagaattacttgaacccgggaggcaagggtttccagcctgggcgacagactgagactctgtctcaaaaaaaaaaaaaaaaaaaaaaaaaaaaaaaaaaaaaaagattttttccccaaaaaaatatggaaatttttaattttaagaaacactgtcaaattgatgctttcaagcaactgtgcacatttgtattccccccaggagtcagtacaatatcatatatctggtatacaaaaaaaatcgctcattattttagccctaccctccatttgtctctcttctttctgggactcctattgattgcatgaccttctgaaggtcttgtgtgtgtcttacctttttttcataacttctcttaatttttttttttttttttttttagagtctttctctgtcacccaggctggagtgcaatggcgtgatctcagctcactgcaacctctgcctcctgggttcaagtgattctcgtgtctcagcctcctgagtagctgagactacaggtgtgcaccagtgttcccagctgatttttgtattttatgtagagatggggttatgccattttggccaggctagtctcgaactcctgagctcaggtgatacacacacctcagcaaatcttttaaattatacattctgtgatatttccttgactttcttatccagcacttgtattgattatttttcattttgataatgttgggtttttaaaaactcctttatgatggaaaatttcaaacatacacaaaagtagagagagaatggtataataaacccactcagttttaaggattgtcaactaataccagttttatttcatgtatgactccaacaacttccccaaccagccttcagattatttgaaagcaaatttcagacatcgtattttactcatacattttctagtatctaaatctgaaagagactcttttctaacagttctgtagcattaattatactcatactgttgtgcaacaaatatccagaaatcttttgtcttgcgaaactgaacctcttacccattaaacactaactcccttttttttcaccctgaaccattggcaaccacaattttactttctttttctgtgagtttgattacttgatacttcatgtgagtggaatcatataatatttgtctttttgtgactgacattttatttagcttaatgtcttcaagtttgacccataccatatcatgtggcaggatttttccctttttttttttttcagacagagtaagactccatctcaaaaacaaaaacaaaaaaagacaagaaaataggattgttttcttagtttacttgccagattatttactgttagtgtatagaaatgcacctgatatttgtattaattttgtgtgctgcaattttgctgaatttgttcattagttttcaatcttttgtgatataataccatgtcatctgtgaataaatacttctttcctttcagtttggatgta

SEQ ID NO: 117877 - DNA, 594 bp, Homo sapiens
aagcctcgctcatgtccctggctttttgctttttgaggaagagacgcggtcgtaagggctgaggatttttggtccgcacgctcctgctcctgactcaccgctgttcgctctcgccgaggaacaagtcggtcaggaagcccgcgcgcaacagccatggcttttaaggataccggaaaaacacccgtggagccggaggtggcaattcaccgaattcgaatcaccctaacaagccgcaacgtaaaatccttggaaaaggtgtgtgctgacttgataagaggcgcaaaagaaaagaatctcaaagtgaaaggaccagttcgaatgcctaccaagactttgagaatcactacaagaaaaactccttgtggtgaaggttctaagacgtgggatcgtttccagatgagaattcacaagcgactcattgacttgcacagtccttctgagattgttaagcagattacttccatcagtattgagccaggagttgaggtggaagtcaccattgcagatgcttaagtcaactattttaataaattgatgaccagttgttaaacaaccactagagcagggtccaggcctggggcggaggggaaatgg

SEQ ID NO: 117878 - DNA, 572 bp, Homo sapiens
gcagccgctactactactactaaattcgcggccgcgtcgaccacgaagacgacagaaggggcagagacgcggtcgtaagggctgaggatttttggtccgcacgctcctgctcctgactcaccgctgttcgctctcgccgaggaacaagtcggtcaggaagcccgcgcgcaacagccatggcttttaaggataccggaaaaacacccgtggagccggaggtggcaattcaccgaattcgaatcaccctaacaagccgcaacgtaaaatccttggaaaaggtgtgtgctgacttgataagaggcgcaaaagaaaagaatctcaaagtgaaaggaccagttcgaatgcctaccaagactttgagaatcactacaagaaaaactccttgtggtgaaggttctaagacgtgggatcgtttccagatgagaattcacaagcgactcattgacttgcacagtccttctgagattgttaagcagattacttccatcagtattgagccaggagttgaggtggaagtcaccattgcagatgcttaagtcaactattttaataaattgatgaccagttgttaa

SEQ ID NO: 117879 - DNA, 1848 bp, Homo sapiens
  misc_feature (548)..(548): n is a, c, g, or t
  misc_feature (550)..(550): n is a, c, g, or t
aagcctcgctcatgtccctggctttttgctttttgaggaagagacgcggtcgtaagggctgaggatttttggtccgcacgctcctgctcctgactcaccgctgttcgctctcgccgaggaacaagtcggtcaggaagcccgcgcgcaacagccatggcttttaaggataccggaaaaacacccgtggagccggaggtggcaattcaccgaattcgaatcaccctaacaagccgcaacgtaaaatccttggaaaaggtgtgtgctgacttgataagaggcgcaaaagaaaagaatctcaaagtgaaaggaccagttcgaatgcctaccaagactttgagaatcactacaagaaaaactccttgtggtgaaggttctaagacgtgggatcgtttccagatgagaattcacaagcgactcattgacttgcacagtccttctgagattgttaagcagattacttccatcagtattgagccaggagttgatcgaatctacagatgcagaacccatggatacagagggccagcagtacactttgagaagtgtantngaatccccggggacatgtcctttttaactgcattctcctccgccaaaaaagtgaccaagcagagtctttctctgtcacccaggctggagtgcaatggcgtgatctcagctcactgcaacctctgcctcctgggttcaagtgattctcgtgtctcagcctcctgagtagctgagactacaggtgtgcaccagtgttcccagctgatttttgtattttatgtagagatggggttatgccattttggccaggctagtctcgaactcctgagctcaggtgatacacacacctcagcaaatcttttaaattatacattctgtgatatttccttgactttcttatccagcacttgtattgattatttttcattttgataatgttgggtttttaaaaactcctttatgatggaaaatttcaaacatacacaaaagtagagagagaatggtataataaacccactcagttttaaggattgtcaactaataccagttttatttcatgtatgactccaacaacttccccaaccagccttcagattatttgaaagcaaatttcagacatcgtattttactcatacattttctagtatctaaatctgaaagagactcttttctaacagttctgtagcattaattatactcatactgttgtgcaacaaatatccagaaatcttttgtcttgcgaaactgaacctcttacccattaaacactaactcccttttttttcaccctgaaccattggcaaccacaattttactttctttttctgtgagtttgattacttgatacttcatgtgagtggaatcatataatatttgtctttttgtgactgacattttatttagcttaatgtcttcaagtttgacccataccatatcatgtggcaggatttttccctttttttttttttcagacggagtctcgctctgtcgcccaggctggagtgcagtggcgcgatctcggctcactgcaagctccgcctcccgggttcatgccattctcctgcctcagcctcctgagtagctgggactacaggcgcccaccactaaacccggctaatttttttgtatttttagtagagacagagtttcaccatgttaatgaggatggtctccatctcctgacctcgtgattcgctcgtctcggcctcccaaagtgctgggattacaggcgtgagccaccgcgcccggccatgatttttcttcttttttaaggctgaataatatctcaatgtatgtatatataccactttttaaaaattcattcatctgttggacatttagattgttcccacctcttgg

SEQ ID NO: 117880 - DNA, 253 bp, Homo sapiens
cattgcactccagtctgggcgacagagtaagactccatctcaaaaacaaaaacaaaaaaagacaagaaaataggattgttttcttagtttacttgccagattatttactgttagtgtatagaaatgcacctgatatttgtattaattttgtgtgctgcaattttgctgaatttgttcattagttttcaatcttttgtgatataataccatgtcatctgtgaataaatacttctttcctttcagtttggatgta

SEQ ID NO: 117881 - DNA, 712 bp, Homo sapiens
  misc_feature (619)..(619): n is a, c, g, or t
  misc_feature (621)..(622): n is a, c, g, or t
  misc_feature (625)..(625): n is a, c, g, or t
  misc_feature (630)..(630): n is a, c, g, or t
  misc_feature (632)..(632): n is a, c, g, or t
  misc_feature (637)..(637): n is a, c, g, or t
  misc_feature (650)..(650): n is a, c, g, or t
  misc_feature (662)..(662): n is a, c, g, or t
  misc_feature (669)..(669): n is a, c, g, or t
  misc_feature (674)..(674): n is a, c, g, or t
aagcctcgctcatgtccctggctttttgctttttgaggaagagacgcggtcgtaagggctgaggatttttggtccgcacgctcctgctcctgactcaccgctgttcgctctcgccgaggaacaagtcggtcaggaagcccgcgcgcaacagccatggcttttaaggataccggaaaaacacccgtggagccggaggtggcaattcaccgaattcgaatcaccctaacaagccgcaacgtaaaatccttggaaaaggtgtgtgctgacttgataagaggcgcaaaagaaaagaatctcaaagtgaaaggaccagttcgaatgcctaccaagactttgagaatcactacaagaaaaactccttgtggtgaaggttctaagacgtgggatcgtttccagatgagaattcacaagcgactcattgacttgcacagtccttctgagattgttaagcagattacttccatcagtattgagccaggagttgaggtggaagtcaccattgcagatgcttaagtcaactattttaataaattgatgaccagttgttaaaaaaaaaaacacaacacaaaaaaaaaaaaaaaaaaaaaacaaaaaaaaaaaaacaatgatttttgattgngnnagnttttncntgggnccgaatttgggcntattggccattncccttanggggnggtttacaattactgcccgcgttttaaaggctgggtgg

SEQ ID NO: 117882 - DNA, 680 bp, Homo sapiens
aagcctcgctcatgtccctggctttttgctttttgaggaagagacgcggtcgtaagggctgaggatttttggtccgcacgctcctgctcctgactcaccgctgttcgctctcgccgaggaacaagtcggtcaggaagcccgcgcgcaacagccatggcttttaaggataccggaaaaacacccgtggagccggaggtggcaattcaccgaattcgaatcaccctaacaagccgcaacgtaaaatccttggaaaaggtgtgtgctgacttgataagaggcgcaaaagaaaagaatctcaaagtgaaaggaccagttcgaatgcctaccaagactttgagaatcactacaagaaaaactccttgtggtgaaggttctaagacgtgggatcgtttccagatgagaattcacaagcgactcattgacttgcacagtccttctgagattgttaagcagattacttccatcagtattgagccaggagttgaggtggaagtcaccattgcagatgcttaagtcaactattttaataaattgatgaccagttgttaaaaaagaaaaaccctattataccctatatggcggttctgtctattactcggctcccgctttaaacagctgtgccttctaaaaccccatgggaatcccccatttttgtgggcggggcccctaaatttattcct

SEQ ID NO: 117883 - DNA, 587 bp, Homo sapiens
  misc_feature (560)..(560): n is a, c, g, or t
aagcctcgctcatgtccctggctttttgctttttgaggaagagacgcggtcgtaagggctgaggatttttggtccgcacgctcctgctcctgactcaccgctgttcgctctcgccgaggaacaagtcggtcaggaagcccgcgcgcaacagccatggcttttaaggataccggaaaaacacccgtggagccggaggtggcaattcaccgaattcgaatcaccctaacaagccgcaacgtaaaatccttggaaaaggtgtgtgctgacttgataagaggcgcaaaagaaaagaatctcaaagtgaaaggaccagttcgaatgcctaccaagactttgagaatcactacaagaaaaactccttgtggtgaaggttctaagacgtgggatcgtttccagatgagaattcacaagcgactcattgacttgcacagtccttctgagattgttaagcagattacttccatcagtattgagccaggagttgaggtggaagtcaccattgcagatgcttaagtcaactattttaataaattgatgaccagttgttaaaaaaaaaacanttttattattttcttaacaaaacatgt

SEQ ID NO: 117884 - DNA, 605 bp, Homo sapiens
aagcctcgctcatgtccctggctttttgctttttgaggaagagacgcggtcgtaagggctgaggatttttggtccgcacgctcctgctcctgactcaccgctgttcgctctcgccgaggaacaagtcggtcaggaagcccgcgcgcaacagccatggcttttaaggataccggaaaaacacccgtggagccggaggtggcaattcaccgaattcgaatcaccctaacaagccgcaacgtaaaatccttggaaaaggtgtgtgctgacttgataagaggcgcaaaagaaaagaatctcaaagtgaaaggaccagttcgaatgcctaccaagactttgagaatcactacaagaaaaactccttgtggtgaaggttctaagacgtgggatcgtttccagatgagaattcacaagcgactcattgacttgcacagtccttctgagattgttaagcagattacttccatcagtattgagccaggagttgaggtggaagtcaccattgcagatgcttaagtcaactattttaataaattgatgaccagttgttaaccctttccccttaccttcccatctcctcctccctctttctctcttcccccccctcc

SEQ ID NO: 117885 - DNA, 708 bp, Homo sapiens
aagcctcgctcatgtccctggctttttgctttttgaggaagagacgcggtcgtaagggctgaggatttttggtccgcacgctcctgctcctgactcaccgctgttcgctctcgccgaggaacaagtcggtcaggaagcccgcgcgcaacagccatggcttttaaggataccggaaaaacacccgtggagccggaggtggcaattcaccgaattcgaatcaccctaacaagccgcaacgtaaaatccttggaaaaggtgtgtgctgacttgataagaggcgcaaaagaaaagaatctcaaagtgaaaggaccagttcgaatgcctaccaagactttgagaatcactacaagaaaaactccttgtggtgaaggttctaagacgtgggatcgtttccagatgagaattcacaagcgactcattgacttgcacagtccttctgagattgttaagcagattacttccatcagtattgagccaggagttgaggtggaagtcaccattgcagatgcttaagtcaactattttaataaattgatgaccagttgttaacttcagaacaacacatgcaattcgcaacacttcccccaccgcctgccctcccctccttacctcactccccccccgcaactactctggccccttttcccacaatcgaccctgagcctacccccgctttcaacctcgctggcccctcctcggcccactcct

SEQ ID NO: 117886 - DNA, 495 bp, Homo sapiens
aagcctcgctcatgtccctggctttttgctttttgaggaagagacgcggtcgtaagggctgaggatttttggtccgcacgctcctgctcctgactcaccgctgttcgctctcgccgaggaacaagtcggtcaggaagcccgcgcgcaacagccatggcttttaaggataccggaaaaacacccgtggagccggaggtggcaattcaccgaattcgaatcaccctaacaagccgcaacgtaaaatccttggaaaaggtgtgtgctgacttgataagaggcgcaaaagaaaagaatctcaaagtgaaaggaccagttcgaatgcctaccaagactttgagaatcactacaagacacaagcgactcattgacttgcacagtccttctgagattgttaagcagattacttccatcagtattgagccaggagttgaggtggaagtcaccattgcagatgcttaagtcaactattttaataaattgatgaccagttgttaa

SEQ ID NO: 117887 - DNA, 670 bp, Homo sapiens
cgcggccgcgtcgacacggtgcgagaagacgacagaggggctgagagagacgcggtcgtaagggctgaggatttttggtccgcacgctcctgctcctgactcaccgctgttcgctctcgccgaggaacaagtcggtcaggaagcccgcgcgcaacagccatggcttttaaggataccggaaaaacacccgtggagccggaggtggcaattcaccgaattcgaatcaccctaacaagccgcaacgtaaaatccttggaaaaggtgtgtgctgacttgataagaggcgcaaaagaaaagaatctcaaagtgaaaggaccagttcgaatgcctaccaagactttgagaatcactacaagaaaaactccttgtggtgaaggttctaagacgtgggatcgtttccagatgagaattcacaagcgactcattgacttgcacagtccttctgagattgttaagcagattacttccatcagtattgagccaggagttgaggtggaagtcaccattgcagatgcttaagtcaactattttaataaattgatgaccagttgttaaacaacatgttggccggctgggccaagtcgacttagactcgggcagccttatcatgcggcccgaaatcgggtccactcggccttcgccctatagcgaggggtattcctcctggccg

SEQ ID NO: 117888 - DNA, 599 bp, Homo sapiens
gggaattcggccattatggccggggagagacgcggtcgtaagggctgaggatttttggtccgcacgctcctgctcctgactcaccgctgttcgctctcgccgaggaacaagtcggtcaggaagcccgcgcgcaacagccatggcttttaaggataccggaaaaacacccgtggagccggaggtggcaattcaccgaattcgaatcaccctaacaagccgcaacgtaaaatccttggaaaaggtgtgtgctgacttgataagaggcgcaaaagaaaagaatctcaaagtgaaaggaccagttcgaatgcctaccaagactttgagaatcactacaagaaaaactccttgtggtgaaggttctaagacgtgggatcgtttccagatgagaattcacaagcgactcattgacttgcacagtccttctgagattgttaagcagattacttccatcagtattgagccaggagttgaggtggaagtcaccattgcagatgcttaagtcaactattttaataaattgatgaccagttgttaacaaaaaacacacccaccccccccctcccccccttctctacaccccccccccacctcacaccttc

SEQ ID NO: 117889 - DNA, 432 bp, Homo sapiens
  misc_feature (34)..(34): n is a, c, g, or t
gctacttactatctaacattacgccggccggttncgaccgcttttaaggataccggaaaaacacccgtggagccggaggtggcaattcaccgaattcgaatcaccctaacaagccgcaacgtaaaatccttggaaaaggtgtgtgctgacttgataagaggcgcaaaagaaaagaatctcaaagtgaaaggaccagttcgaatgcctaccaagactttgagaatcactacaagaaaaactccttgtggtgaaggttctaagacgtgggatcgtttccagatgagaattcacaagcgactcattgacttgcacagtccttctgagattgttaagcagattacttccatcagtattgagccaggagttgaggtggaagtcaccattgcagatgcttaagtcaactattttaataaattgatgaccagttgttaa

SEQ ID NO: 117890 - DNA, 708 bp, Homo sapiens
gcagccgctactactactactaaattcgcggccgcgtcgacccctaacaagccgcaacgtaaaatccttggaaaaggtgtgtgctgacttgataagaggcgcaaaagaaaagaatctcaaagtgaaaggaccagttcgaatgcctaccaagactttgagaatcactacaagaaaaactccttgtggtgaaggttctaagacgtgggatcgtttccagatgagaattcacaagcgactcattgacttgcacagtccttctgagattgttaagcagattacttccatcagtattgagccaggagttgaggtggaagtcaccattgcagatgcttaagtcaactattttaataaattgatgaccagttgttaaacttctgttggtttttattcagaatactggcagattttaggaatataaaggtgtactatgagacttccacttttcaggtggaatatatgggtatcttagagtggtctatcctgttttcgttgtcgtttgagtcatttgaaaactggattccgttaactacataatatgtgagacctgactggttttattggacactggcagtttataactttggcatactctagataaattctgattggtatggggtgttaaggtttctggggcgtttgtaatgcacacccatggttgagaacctagtgcgctagtaggcacgtgttaaaaagctagtaactaatatt

SEQ ID NO: 117891 - DNA, 370 bp, Homo sapiens
gcagccgctactactactactaaattcgcggccgcgtcgacccctaacaagccgcaacgtaaaatccttggaaaaggtgtgtgctgacttgataagaggcgcaaaagaaaagaatctcaaagtgaaaggaccagttcgaatgcctaccaagactttgagaatcactacaagaaaaactccttgtggtgaaggttctaagacgtgggatcgtttccagatgagaattcacaagcgactcattgacttgcacagtccttctgagattgttaagcagattacttccatcagtattgagccaggagttgaggtggaagtcaccattgcagatgcttaagtcaactattttaataaattgatgaccagttgttaa

SEQ ID NO: 117892 - DNA, 639 bp, Homo sapiens
  misc_feature (560)..(560): n is a, c, g, or t
  misc_feature (562)..(562): n is a, c, g, or t
gcagccgctactactactactaaattcgcggccgcgtcgaccagagacgcggtcgtaagggctgaggatttttggtccgcacgctcctgctcctgactcaccgctgttcgctctcgccgaggaacaagtcggtcaggaagcccgcgcgcaacagccatggcttttaaggataccggaaaaacacccgtggagccggaggtggcaattcaccgaattcgaatcaccctaacaagccgcaacgtaaaatccttggaaaaggtgtgtgctgacttgataagaggcgcaaaagaaaagaatctcaaagtgaaaggaccagttcgaatgcctaccaagactttgagaatcactacaagaaaaactccttgtggtgaaggttctaagacgtgggatcgtttccagatgagaattcacaagcgactcattgacttgcacagtccttctgagattgttaagcagattacttccatcagtattgagccaggagttgaggtggaagtcaccattgcagatgcttaagtcaactattttaataaattgatgaccagttgttaaaaacaaananaatacaaactttattatggaatactaggtaaccgagaattcgatggagcggccggaattgggctccttgccttcgcc

SEQ ID NO: 117893 - DNA, 717 bp, Homo sapiens
  misc_feature (717)..(717): n is a, c, g, or t
gtgacgcgtgggtcgacccacgcggtcgcagagacgcggtcgtaagggctgaggatttttggtccgcacgctcctgctcctgactcaccgctgttcgctctcgccgaggaacaagtcggtcaggaagcccgcgcgcaacagccatggcttttaaggataccggaaaaacacccgtggagccggaggtggcaattcaccgaattcgaatcaccctaacaagccgcaacgtaaaatccttggaaaaggtgtgtgctgacttgataagaggcgcaaaagaaaagaatctcaaagtgaaaggaccagttcgaatgcctaccaagactttgagaatcactacaagaaaaactccttgtggtgaaggttctaagacgtgggatcgtttccagatgagaattcacaagcgactcattgacttgcacagtccttctgagattgttaagcagattacttccatcagtattgagccaggagttgaggtggaagtcaccattgcagatgcttaagtcaactattttaataaattgatgaccagttgttaaaaaaaaaaaatctcccaaactcttttactccaaacccctttccaatcctctcaaattcaaaacggggaaacaaaaaccctaaaaaaaacactgtggcccctttggcccagtcgacttggatctgggcaagtttttcatgcggcccttcgggcccattggccttgcccctatgggggcn

SEQ ID NO: 117894 - DNA, 539 bp, Homo sapiens
gtgacgcgtgggtcgacccacgcggtcgcagagacgcggtcgtaagggctgaggatttttggtccgcacgctcctgctcctgactcaccgctgttcgctctcgccgaggaacaagtcggtcaggaagcccgcgcgcaacagccatggcttttaaggataccggaaaaacacccgtggagccggaggtggcaattcaccgaattcgaatcaccctaacaagccgcaacgtaaaatccttggaaaaggtgtgtgctgacttgataagaggcgcaaaagaaaagaatctcaaagtgaaaggaccagttcgaatgcctaccaagactttgagaatcactacaagaaaaactccttgtggtgaaggttctaagacgtgggatcgtttccagatgagaattcacaagcgactcattgacttgcacagtccttctgagattgttaagcagattacttccatcagtattgagccaggagttgaggtggaagtcaccattgcagatgcttaagtcaactattttaataaattgatgaccagttgttaa

SEQ ID NO: 117895 - DNA, 555 bp, Homo sapiens
cgcggccgcgtcgacacggtgcgagaagacgacagaggggctgagagagacgcggtcgtaagggctgaggatttttggtccgcacgctcctgctcctgactcaccgctgttcgctctcgccgaggaacaagtcggtcaggaagcccgcgcgcaacagccatggcttttaaggataccggaaaaacacccgtggagccggaggtggcaattcaccgaattcgaatcaccctaacaagccgcaacgtaaaatccttggaaaaggtgtgtgctgacttgataagaggcgcaaaagaaaagaatctcaaagtgaaaggaccagttcgaatgcctaccaagactttgagaatcactacaagaaaaactccttgtggtgaaggttctaagacgtgggatcgtttccagatgagaattcacaagcgactcattgacttgcacagtccttctgagattgttaagcagattacttccatcagtattgagccaggagttgaggtggaagtcaccattgcagatgcttaagtcaactattttaataaattgatgaccagttgttaa

SEQ ID NO: 117896 - DNA, 332 bp, Homo sapiens
aagcctcgctcatgtccctggctttttgctttttgaggaagagacgcggtcgtaagggctgaggatttttggtccgcacgctcctgctcctgactcaccgctgttcgctctcgccgaggaacaagtcggtcaggaagcccgcgcgcaacagccatggcttttaaggataccggaaaaacacccgtggagccggaggtggcaattcaccgaattcgaatcaccctaacaaggtagtcagatcgagccccgtagtcagatcgagccgcgtagtcagatcgggccgcgtagtcagatcgagccgcgtagtcagatcgaccggcgtagtcacgtaa

SEQ ID NO: 117897 - DNA, 818 bp, Homo sapiens
  misc_feature (554)..(554): n is a, c, g, or t
cccacgctgtcgcggacgcgtgggtcgacccacgcgtccggacagagacgcggtcgtaagggctgaggatttttggtccgcacgctcctgctcctgactcaccgctgttcgctctcgccgaggaacaagtcggtcaggaagcccgcgcgcaacagccatggcttttaaggataccggaaaaacacccgtggagccggaggtggcaattcaccgaattcgaatcaccctaacaagccgcaacgtaaaatccttggaaaaggtgtgtgctgacttgataagaggcgcaaaagaaaagaatctcaaagtgaaaggaccagttcgaatgcctaccaagactttgagaatcactacaagaaaaactccttgtggtgaaggttctaagacgtgggatcgtttccagatgagaattcacaagcgactcattgacttgcacagtccttctgagattgttaagcagattacttccatcagtattgagccaggagttgaggtggaagtcaccattgcagatgcttaagtcaactattttaataaattgatgaccagttgttaancaaacagaaatataaactgtaattaggggaaacaaaaatgtgatgatccaatcccctttgggtgggcccgccggtggcctttaaattcctgctttaccccgccttttggattggctttttcccggggggctttttggcatgtccgtcatagcgggtattatggcattcaattggctggccaccccaaagggcttctttcccactttatggcgtcttctcagtataaaaagtttccaaccccccttggggggggccggtgagcaa

SEQ ID NO: 117898 - DNA, 553 bp, Homo sapiens
cccacgctgtcgcggacgcgtgggtcgacccacgcgtccggacagagacgcggtcgtaagggctgaggatttttggtccgcacgctcctgctcctgactcaccgctgttcgctctcgccgaggaacaagtcggtcaggaagcccgcgcgcaacagccatggcttttaaggataccggaaaaacacccgtggagccggaggtggcaattcaccgaattcgaatcaccctaacaagccgcaacgtaaaatccttggaaaaggtgtgtgctgacttgataagaggcgcaaaagaaaagaatctcaaagtgaaaggaccagttcgaatgcctaccaagactttgagaatcactacaagaaaaactccttgtggtgaaggttctaagacgtgggatcgtttccagatgagaattcacaagcgactcattgacttgcacagtccttctgagattgttaagcagattacttccatcagtattgagccaggagttgaggtggaagtcaccattgcagatgcttaagtcaactattttaataaattgatgaccagttgttaa

SEQ ID NO: 117899 - DNA, 548 bp, Homo sapiens
aaaaggaaacataggctaggtacgaggctgggtgttgcagagacgcggtcgtaagggctgaggatttttggtccgcacgctcctgctcctgactcaccgctgttcgctctcgccgaggaacaagtcggtcaggaagcccgcgcgcaacagccatggcttttaaggataccggaaaaacacccgtggagccggaggtggcaattcaccgaattcgaatcaccctaacaagccgcaacgtaaaatccttggaaaaggtgtgtgctgacttgataagaggcgcaaaagaaaagaatctcaaagtgaaaggaccagttcgaatgcctaccaagactttgagaatcactacaagaaaaactccttgtggtgaaggttctaagacgtgggatcgtttccagatgagaattcacaagcgactcattgacttgcacagtccttctgagattgttaagcagattacttccatcagtattgagccaggagttgaggtggaagtcaccattgcagatgcttaagtcaactattttaataaattgatgaccagttgttaa

SEQ ID NO: 117900 - DNA, 891 bp, Homo sapiens
  misc_feature (576)..(576): n is a, c, g, or t
  misc_feature (645)..(645): n is a, c, g, or t
  misc_feature (648)..(648): n is a, c, g, or t
  misc_feature (828)..(828): n is a, c, g, or t
cgacccacgcgttcggacccacgcgtccgagacagagacgcggtcgtaagggctgaggatttttggtccgcacgctcctgctcctgactcaccgctgttcgctctcgccgaggaacaagtcggtcaggaagcccgcgcgcaacagccatggcttttaaggataccggaaaaacacccgtggagccggaggtggcaattcaccgaattcgaatcaccctaacaagccgcaacgtaaaatccttggaaaaggtgtgtgctgacttgataagaggcgcaaaagaaaagaatctcaaagtgaaaggaccagttcgaatgcctaccaagactttgagaatcactacaagaaaaactccttgtggtgaaggttctaagacgtgggatcgtttccagatgagaattcacaagcgactcattgacttgcacagtccttctgagattgttaagcagattacttccatcagtattgagccaggagttgaggtggaagtcaccattgcagatgcttaagtcaactattttaataaattgatgaccagttgttaaaaaaaaaaaaaaaaaaaaaaagggggggggggnaaaaagattcccccgggggggcccaagttttaggggttacccaggttttttggtacaagggggccccanatnaggggggcggtataaatagacataaggaaaggggcccgttttaacacaggtcgtacgtgggaaacacgggatccctggggattcttgggggagagaacccttcttctgggggggtgcacatattggacaactccctacagagataaggcatcaaggtaatatacaactttagggttatgnggtgtacaacaggatagtgcggtgattggtaccggatgagttgagatttagagcgttgaatac

SEQ ID NO: 117901 - DNA, 1121 bp, Homo sapiens
  misc_feature (45)..(45): n is a, c, g, or t
  misc_feature (53)..(54): n is a, c, g, or t
  misc_feature (59)..(59): n is a, c, g, or t
  misc_feature (61)..(61): n is a, c, g, or t
ggagcgataccatttcacacgggaacagctttgacatgttccganttaatcgnntcctntnggaatttgccctcgagcccaaagattcggcacgagcagagacgcggtcgtaagggctgaggatttttggtccgcacgctcctgctcctgactcaccgctgttcgctctcgccgaggaacaagtcggtcaggaagcccgcgcgcaacagccatggcttttaaggataccggaaaaacacccgtggagccggaggtggcaattcaccgaattcgaatcaccctaacaagccgcaacgtaaaatccttggaaaaggtgtgtgctgacttgataagaggcgcaaaagaaaagaatctcaaagtgaaaggaccagttcgaatgcctaccaagactttgagaatcactacaagaaaaactccttgtggtgaaggttctaagacgtgggatcgtttccagatgagaattcacaagcgactcattgacttgcacagtccttctgagattgttaagcagattacttccatcagtattgagccaggagttgaggtggaagtcaccattgcagatgcttaagtcaactattttaataaattgatgaccagttgttaaaaaaaaaaaaaaaaaaaaaaaaaaaaaaaaacaaaaaaaaaaaaacaaaaaaaaaaaaaaaaaaaaaaagggggggggggggaaaaaaattccgggggggggccaacaattgtatgtatgcacccaggtttttgtattacaacaagggggggcccctacgaggggggggcgcactaaataaaacagcagcacgcgacggggcggcgcggggttaacaacaacaggctgggggagtgggggaaagaacaggtgcatatcgtgcagcacacctttgtggggacgaagaacaccccacatccttgtcgggggggtggggcaaacacatttggtgggccgacacaccacacccacgaagagaagattattaaaaacgccgccacgagagtactaaaataaaaactttgacagcggttaatatagggtgggtcacacacccagcaccgaattaaggcggctggaccaagaaaaaatggggccacggaagattatgattgtggagagatcatttataaaa

SEQ ID NO: 117902 - DNA, 552 bp, Homo sapiens
gcagccgctactactactactaaattcgcggccgcgtcgaccagagacgcggtcgtaagggctgaggatttttggtccgcacgctcctgctcctgactcaccgctgttcgctctcgccgaggaacaagtcggtcaggaagcccgcgcgcaacagccatggcttttaaggataccggaaaaacacccgtggagccggaggtggcaattcaccgaattcgaatcaccctaacaagccgcaacgtaaaatccttggaaaaggtgtgtgctgacttgataagaggcgcaaaagaaaagaatctcaaagtgaaaggaccagttcgaatgcctaccaagactttgagaatcactacaagaaaaactccttgtggtgaaggttctaagacgtgggatcgtttccagatgagaattcacaagcgactcattgacttgcacagtccttctgagattgttaagcagattacttccatcagtattgagccaggagttgaggtggaagtcaccattgcagatgcttaagtcaactattttaataaattgatgaccagttgttaa

SEQ ID NO: 117903 - DNA, 799 bp, Homo sapiens
  misc_feature (758)..(758): n is a, c, g, or t
aattacgctaggtacgaggctgggtggagagacgcggtcgtaagggctgaggatttttggtccgcacgctcctgctcctgactcaccgctgttcgctctcgccgaggaacaagtcggtcaggaagcccgcgcgcaacagccatggcttttaaggataccggaaaaacacccgtggagccggaggtggcaattcaccgaattcgaatcaccctaacaagccgcaacgtaaaatccttggaaaaggtgtgtgctgacttgataagaggcgcaaaagaaaagaatctcaaagtgaaaggaccagttcgaatgcctaccaagactttgagaatcactacaagaaaaactccttgtggtgaaggttctaagacgtgggatcgtttccagatgagaattcacaagcgactcattgacttgcacagtccttctgagattgttaagcagattacttccatcagtattgagccaggagttgaggtggaagtcaccattgcagatgcttaagtcaactattttaataaattgatgaccagttgttaaaaaaaaaaaaaaaaaaaaaaagtggggggttttatggggggggcgggagaaacagcagggtacatggaaattggggccaaggggtccatagctggtttcctggacccagttttcctgttgtcccacggggcgaggactctggccgggtctccccaaataggggagccggaataaattcgataaacgcaaggttaacctcgatagagtctcggagaaaaaanatcccaaaaaaacacaaaaaagaaaaccgaccaaaaacaga

SEQ ID NO: 117904 - DNA, 571 bp, Homo sapiens
  misc_feature (255)..(255): n is a, c, g, or t
cattcggctacagtatccctcgatcgtgccatacgctgatgctttacctcatgcgttgcattgatacaaagatgctggccccgtaatacgctgagtcggtataatcatctagtgcaactggactgctcgtattaacaaacgctgtgtgactcgggaagatagctgctatgcattcgggattctgtatgtcgaacgcgtaaccttacctgtactggtgtgtgtgaccattgagttgagagctagtgctactcgtancaggaagatatgaagagggctactaagagataaaatactatcaattgttgaaaggtgtactagattgtgtgtgaacttacgactgaactatgactagtcgctatgaaaagatattagtctctatgtgagttatgagttcattgaacgtgtgatccacaggagctaagtgatacacaagcgactcattgacttgcacagtccttctgagattgttaagcagattacttccatcagtattgagccaggagttgaggtggaagtcaccattgcagatgcttaagtcaactattttaataaattgatgaccagttgttaa

SEQ ID NO: 117905 - DNA, 533 bp, Homo sapiens
  misc_feature (5)..(5): n is a, c, g, or t
  misc_feature (15)..(15): n is a, c, g, or t
cgggntcaggaattnggacgagcagagacgcggtcgtaagggctgaggatttttggtccgcacgctcctgctcctgactcaccgctgttcgctctcgccgaggaacaagtcggtcaggaagcccgcgcgcaacagccatggcttttaaggataccggaaaaacacccgtggagccggaggtggcaattcaccgaattcgaatcaccctaacaagccgcaacgtaaaatccttggaaaaggtgtgtgctgacttgataagaggcgcaaaagaaaagaatctcaaagtgaaaggaccagttcgaatgcctaccaagactttgagaatcactacaagaaaaactccttgtggtgaaggttctaagacgtgggatcgtttccagatgagaattcacaagcgactcattgacttgcacagtccttctgagattgttaagcagattacttccatcagtattgagccaggagttgaggtggaagtcaccattgcagatgcttaagtcaactattttaataaattgatgaccagttgttaa

SEQ ID NO: 117906 - DNA, 425 bp, Homo sapiens
  misc_feature (1)..(1): n is a, c, g, or t
  misc_feature (4)..(4): n is a, c, g, or t
  misc_feature (18)..(18): n is a, c, g, or t
  misc_feature (21)..(21): n is a, c, g, or t
  misc_feature (36)..(36): n is a, c, g, or t
nttnaaggaaaacgcggncgnaagtgcttttggatncaccccccccaggaagcccgcgcgcaacagccatggcttttaaggataccggaaaaacacccgtggagccggaggtggcaattcaccgaattcgaatcaccctaacaagccgcaacgtaaaatccttggaaaaggtgtgtgctgacttgataagaggcgcaaaagaaaagactttgagaatcactacaagaaaaactccttgtggtgaaggttctaagacgtgggatcgtttccagatgagaattcacaagcgactcattgacttgcacagtccttctgagattgttaagcagattacttccatcagtattgagccaggagttgaggtggaagtcaccattgcagatgcttaagtcaactattttaataaattgatgaccagttgttaa

SEQ ID NO: 117907 - DNA, 206 bp, Homo sapiens
  misc_feature (19)..(19): n is a, c, g, or t
  misc_feature (21)..(21): n is a, c, g, or t
acgagagaccgtgttgcantncacaactttgagaatcactacaagaaaaactccttgtggtgaaggttctaagacgtgggatcgtttccagatgagaattcacaagcgactcattgacttgcacagtccttctgagattgttaagcagattacttccatcagtattgagccaggagtgcaacacgggtctctcagggtacgcgagc

SEQ ID NO: 117908 - DNA, 738 bp, Homo sapiens
gcagccgctactactactactaaattcgcggccgcgtcgaccacgaagacgacagaaggggcagagacgcggtcgtaagggctgaggatttttggtccgcacgctcctgctcctgactcaccgctgttcgctctcgccgaggaacaagtcggtcaggaagcccgcgcgcaacagccatggcttttaaggataccggaaaaacacccgtggagccggaggtggcaattcaccgaattcgaatcaccctaacaagccgcaacgtaaaatccttggaaaaggtgtgtgctgacttgataagaggcgcaaaagaaaagaatctcaaagtgaaaggaccagttcgaatgcctaccaagactttgagaatcactacaagaaaaactccttgtggtgaaggttctaagacgtgggatcgtttccagatgagaattcacaagcgactcattgacttgcacagtccttctgagattgttaagcagattacttccatcagtattgagccaggagttgaggtggaagtcaccattgcagatgcttaagtcaactattttaataaattgatgaccagttgttaaaaaaaaaaaaacaaaaaaaaaaaaacaaaaaaaaaaaaaaaaaaaaaaagaaaaaataaaagagcaggtttatgcatggggccgaatttagggctaactgggacaatttgccctatagggggccgtatcacattcacgggccggcgtttacaccgggggacgggaa

SEQ ID NO: 117909 - DNA, 1398 bp, Homo sapiens
gtggtgtatacgacggtgcgcgcgcacggggtggtccacgcgtgttttcgcggcgccttcttggggttctctcatgcccacaggtgtggcttgccacgagcggccggttgtgcctgccccggggtttgagaggggcggcgggtcttttgtatgactatccttgggggtggcgttccatcgtaggcgtaggggggtgggtcgtgggctggctctcgggtggttgtattcggcgggcggcccgcgctggttgtttgtgtgggtgcggttcgttgatcggctcgttgttgtcgggcgttgttgtggctgtgagtgtgtgagtgtgtgatattgatgtggtggttgtgtggtctgtgggatggatgtatgttttgttttagagacgcggtcgtaagggctgaggatttttggtccgcacgctcctgctcctgactcaccgctgttcgctctcgccgaggaacaagtcggtcaggaagcccgcgcgcaacagccatggcttttaaggataccggaaaaacacccgtggagccggaggtggcaattcaccgaattcgaatcaccctaacaagccgcaacgtaaaatccttggaaaaggtgtgtgctgacttgataagaggcgcaaaagaaaagaatctcaaagtgaaaggaccagttcgaatgcctaccaagactttgagaatcactacaagaaaaactccttgtggtgaaggttctaagacgtgggatcgtttccagatgagaattcacaagcgactcattgacttgcacagtccttctgagattgttaagcagattacttccatcagtattgagccaggagttgaggtggaagtcaccattgcagatgcttaagtcaactattttaataaattgatgaccagttgttaaaaaaaaaaaaacaaaaaaaaaaaaacaaaaaaaaaaaaaaaaaaaaaaaaagaaaaaaaaaaaaaaaaaggggggggggggaaaaaaattccgggggggggccaacaattgtatgtatgcacccaggtttttgtattacaacaagggggggcccctacgaggggggggcgcactaaataaaacagcagcacgcgacggggcggcgcggggttaacaacaacaggctgggggagtgggggaaagaacaggtgcatatcgtgcagcacacctttgtggggacgaagaacaccccacatccttgtcgggggggtggggcaaacacatttggtgggccgacacaccacacccacgaagagaagattattaaaaacgccgccacgagagtactaaaataaaaactttgacagcggttaatatagggtgggtcacacacccagcaccgaattaaggcggctggaccaagaaaaaatggggccacggaagattatgattgtggagagatcatttataaaa

SEQ ID NO: 117910 - DNA, 1257 bp, Homo sapiens
  misc_feature (914)..(915): n is a, c, g, or t
  misc_feature (920)..(923): n is a, c, g, or t
  misc_feature (925)..(925): n is a, c, g, or t
  misc_feature (927)..(927): n is a, c, g, or t
  misc_feature (972)..(972): n is a, c, g, or t
gtggtgtatacgacggtgcgcgcgcacggggtggtccacgcgtgttttcgcggcgccttcttggggttctctcatgcccacaggtgtggcttgccacgagcggccggttgtgcctgccccggggtttgagaggggcggcgggtcttttgtatgactatccttgggggtggcgttccatcgtaggcgtaggggggtgggtcgtgggctggctctcgggtggttgtattcggcgggcggcccgcgctggttgtttgtgtgggtgcggttcgttgatcggctcgttgttgtcgggcgttgttgtggctgtgagtgtgtgagtgtgtgatattgatgtggtggttgtgtggtctgtgggatggatgtatgttttgttttagagacgcggtcgtaagggctgaggatttttggtccgcacgctcctgctcctgactcaccgctgttcgctctcgccgaggaacaagtcggtcaggaagcccgcgcgcaacagccatggcttttaaggataccggaaaaacacccgtggagccggaggtggcaattcaccgaattcgaatcaccctaacaagccgcaacgtaaaatccttggaaaaggtgtgtgctgacttgataagaggcgcaaaagaaaagaatctcaaagtgaaaggaccagttcgaatgcctaccaagactttgagaatcactacaagaaaaactccttgtggtgaaggttctaagacgtgggatcgtttccagatgagaattcacaagcgactcattgacttgcacagtccttctgagattgttaagcagattacttccatcagtattgagccaggagttgaggtggaagtcaccattgcagatgcttaagtcaactattttaataaattgatgaccagttgttaaaaaaaaaaaaacaaaaaaaaaaaaacaannggggnnnnangngggggggggaaaaaggggtcgaaggggccggggccaaaggggttnccgggcccttttttttggttccaaaggggcggaactccggcggggcccccccatattggggaggccgaaataactttcgcaaaagcccgggtaaccctgctttatgacctctgccagcacctcccgacagaaagagcacaccccgcaccacgcaccgaccacccatgacagccaccagcggcagagcaccagagcagcacaccacgaagcccaacggcagcgaagataacgcagcacaacacagcaccagcgctcacccgcacgactgccccagcaccggacgag

SEQ ID NO: 117911 - DNA, 1100 bp, Homo sapiens
gtggtgtatacgacggtgcgcgcgcacggggtggtccacgcgtgttttcgcggcgccttcttggggttctctcatgcccacaggtgtggcttgccacgagcggccggttgtgcctgccccggggtttgagaggggcggcgggtcttttgtatgactatccttgggggtggcgttccatcgtaggcgtaggggggtgggtcgtgggctggctctcgggtggttgtattcggcgggcggcccgcgctggttgtttgtgtgggtgcggttcgttgatcggctcgttgttgtcgggcgttgttgtggctgtgagtgtgtgagtgtgtgatattgatgtggtggttgtgtggtctgtgggatggatgtatgttttgttttagagacgcggtcgtaagggctgaggatttttggtccgcacgctcctgctcctgactcaccgctgttcgctctcgccgaggaacaagtcggtcaggaagcccgcgcgcaacagccatggcttttaaggataccggaaaaacacccgtggagccggaggtggcaattcaccgaattcgaatcaccctaacaagccgcaacgtaaaatccttggaaaaggtgtgtgctgacttgataagaggcgcaaaagaaaagaatctcaaagtgaaaggaccagttcgaatgcctaccaagactttgagaatcactacaagaaaaactccttgtggtgaaggttctaagacgtgggatcgtttccagatgagaattcacaagcgactcattgacttgcacagtccttctgagattgttaagcagattacttccatcagtattgagccaggagttgaggtggaagtcaccattgcagatgcttaagtcaactattttaataaattgatgaccagttgttaaaaaaaaaaaaacaaaaaaaaaaaaacaaaaccgcgcgggggctttttgtgtgtgggggggggggaaaaaggggttttgggaagggggctgtgggtaaaggtgtgttttcggggcccccttttttggtgcacaggcgggggtttgggggggcccccaaaagggggcggggataaaatgggaaaaaagccggggttcctggtagttttttgcagaaa

SEQ ID NO: 117912 - DNA, 1032 bp, Homo sapiens
gtggtgtatacgacggtgcgcgcgcacggggtggtccacgcgtgttttcgcggcgccttcttggggttctctcatgcccacaggtgtggcttgccacgagcggccggttgtgcctgccccggggtttgagaggggcggcgggtcttttgtatgactatccttgggggtggcgttccatcgtaggcgtaggggggtgggtcgtgggctggctctcgggtggttgtattcggcgggcggcccgcgctggttgtttgtgtgggtgcggttcgttgatcggctcgttgttgtcgggcgttgttgtggctgtgagtgtgtgagtgtgtgatattgatgtggtggttgtgtggtctgtgggatggatgtatgttttgttttagagacgcggtcgtaagggctgaggatttttggtccgcacgctcctgctcctgactcaccgctgttcgctctcgccgaggaacaagtcggtcaggaagcccgcgcgcaacagccatggcttttaaggataccggaaaaacacccgtggagccggaggtggcaattcaccgaattcgaatcaccctaacaagccgcaacgtaaaatccttggaaaaggtgtgtgctgacttgataagaggcgcaaaagaaaagaatctcaaagtgaaaggaccagttcgaatgcctaccaagactttgagaatcactacaagaaaaactccttgtggtgaaggttctaagacgtgggatcgtttccagatgagaattcacaagcgactcattgacttgcacagtccttctgagattgttaagcagattacttccatcagtattgagccaggagttgaggtggaagtcaccattgcagatgcttaagtcaactattttaataaattgatgaccagttgttaaaaaaaaaaaaacaaaaaaaaaaaaacaatctccggggctatctctactggggggggcgggaacaacagggtcaaggaaggggcccagggccaaagcggttcccggaccacatttccggtacacggggaaatcggggccccaataggg

SEQ ID NO: 117913 - DNA, 1405 bp, Homo sapiens
gtggtgtatacgacggtgcgcgcgcacggggtggtccacgcgtgttttcgcggcgccttcttggggttctctcatgcccacaggtgtggcttgccacgagcggccggttgtgcctgccccggggtttgagaggggcggcgggtcttttgtatgactatccttgggggtggcgttccatcgtaggcgtaggggggtgggtcgtgggctggctctcgggtggttgtattcggcgggcggcccgcgctggttgtttgtgtgggtgcggttcgttgatcggctcgttgttgtcgggcgttgttgtggctgtgagtgtgtgagtgtgtgatattgatgtggtggttgtgtggtctgtgggatggatgtatgttttgttttagagacgcggtcgtaagggctgaggatttttggtccgcacgctcctgctcctgactcaccgctgttcgctctcgccgaggaacaagtcggtcaggaagcccgcgcgcaacagccatggcttttaaggataccggaaaaacacccgtggagccggaggtggcaattcaccgaattcgaatcaccctaacaagccgcaacgtaaaatccttggaaaaggtgtgtgctgacttgataagaggcgcaaaagaaaagaatctcaaagtgaaaggaccagttcgaatgcctaccaagactttgagaatcactacaagaaaaactccttgtggtgaaggttctaagacgtgggatcgtttccagatgagaattcacaagcgactcattgacttgcacagtccttctgagattgttaagcagattacttccatcagtattgagccaggagttgaggtggaagtcaccattgcagatgcttaagtcaactattttaataaattgatgaccagttgttaaaaaaaaaaaaacaaaaaaaaaaaaacaaaaaaaaaaaaaaaaaaaaaaaaaaaaaaaaaaaaaaaaaaaaaaaaagggggggggggggaaaaaaattccgggggggggccaacaattgtatgtatgcacccaggtttttgtattacaacaagggggggcccctacgaggggggggcgcactaaataaaacagcagcacgcgacggggcggcgcggggttaacaacaacaggctgggggagtgggggaaagaacaggtgcatatcgtgcagcacacctttgtggggacgaagaacaccccacatccttgtcgggggggtggggcaaacacatttggtgggccgacacaccacacccacgaagagaagattattaaaaacgccgccacgagagtactaaaataaaaactttgacagcggttaatatagggtgggtcacacacccagcaccgaattaaggcggctggaccaagaaaaaatggggccacggaagattatgattgtggagagatcatttataaaa

SEQ ID NO: 117914 - DNA, 1106 bp, Homo sapiens
  misc_feature (1013)..(1013): n is a, c, g, or t
  misc_feature (1015)..(1016): n is a, c, g, or t
  misc_feature (1019)..(1019): n is a, c, g, or t
  misc_feature (1024)..(1024): n is a, c, g, or t
  misc_feature (1026)..(1026): n is a, c, g, or t
  misc_feature (1031)..(1031): n is a, c, g, or t
  misc_feature (1044)..(1044): n is a, c, g, or t
  misc_feature (1056)..(1056): n is a, c, g, or t
  misc_feature (1063)..(1063): n is a, c, g, or t
  misc_feature (1068)..(1068): n is a, c, g, or t
gtggtgtatacgacggtgcgcgcgcacggggtggtccacgcgtgttttcgcggcgccttcttggggttctctcatgcccacaggtgtggcttgccacgagcggccggttgtgcctgccccggggtttgagaggggcggcgggtcttttgtatgactatccttgggggtggcgttccatcgtaggcgtaggggggtgggtcgtgggctggctctcgggtggttgtattcggcgggcggcccgcgctggttgtttgtgtgggtgcggttcgttgatcggctcgttgttgtcgggcgttgttgtggctgtgagtgtgtgagtgtgtgatattgatgtggtggttgtgtggtctgtgggatggatgtatgttttgttttagagacgcggtcgtaagggctgaggatttttggtccgcacgctcctgctcctgactcaccgctgttcgctctcgccgaggaacaagtcggtcaggaagcccgcgcgcaacagccatggcttttaaggataccggaaaaacacccgtggagccggaggtggcaattcaccgaattcgaatcaccctaacaagccgcaacgtaaaatccttggaaaaggtgtgtgctgacttgataagaggcgcaaaagaaaagaatctcaaagtgaaaggaccagttcgaatgcctaccaagactttgagaatcactacaagaaaaactccttgtggtgaaggttctaagacgtgggatcgtttccagatgagaattcacaagcgactcattgacttgcacagtccttctgagattgttaagcagattacttccatcagtattgagccaggagttgaggtggaagtcaccattgcagatgcttaagtcaactattttaataaattgatgaccagttgttaaaaaaaaagaaaaaaacaaaattaattattatatttttattaatatattttatatattttttggtataattttaatataatttttataaaaaacttgtgggccgccttggcccagtgatttttgattgngnnagnttttncntgggnccgaatttgggcntattggccattncccttanggggnggtttacaattactgcccgcgttttaaaggctgggtgg

SEQ ID NO: 117915 - DNA, 1223 bp, Homo sapiens
gtggtgtatacgacggtgcgcgcgcacggggtggtccacgcgtgttttcgcggcgccttcttggggttctctcatgcccacaggtgtggcttgccacgagcggccggttgtgcctgccccggggtttgagaggggcggcgggtcttttgtatgactatccttgggggtggcgttccatcgtaggcgtaggggggtgggtcgtgggctggctctcgggtggttgtattcggcgggcggcccgcgctggttgtttgtgtgggtgcggttcgttgatcggctcgttgttgtcgggcgttgttgtggctgtgagtgtgtgagtgtgtgatattgatgtggtggttgtgtggtctgtgggatggatgtatgttttgttttagagacgcggtcgtaagggctgaggatttttggtccgcacgctcctgctcctgactcaccgctgttcgctctcgccgaggaacaagtcggtcaggaagcccgcgcgcaacagccatggcttttaaggataccggaaaaacacccgtggagccggaggtggcaattcaccgaattcgaatcaccctaacaagccgcaacgtaaaatccttggaaaaggtgtgtgctgacttgataagaggcgcaaaagaaaagaatctcaaagtgaaaggaccagttcgaatgcctaccaagactttgagaatcactacaagaaaaactccttgtggtgaaggttctaagacgtgggatcgtttccagatgagaattcacaagcgactcattgacttgcacagtccttctgagattgttaagcagattacttccatcagtattgagccaggagttgaggtggaagtcaccattgcagatgcttaagtcaactattttaataaattgatgaccagttgttaaacttctgttggtttttattcagaatactggcagattttaggaatataaaggtgtactatgagacttccacttttcaggtggaatatatgggtatcttagagtggtctatcctgttttcgttgtcgtttgagtcatttgaaaactggattccgttaactacataatatgtgagacctgactggttttattggacactggcagtttataactttggcatactctagataaattctgattggtatggggtgttaaggtttctggggcgtttgtaatgcacacccatggttgagaacctagtgcgctagtaggcacgtgttaaaaagctagtaactaatatt

SEQ ID NO: 117916 - DNA, 1016 bp, Homo sapiens
gtggtgtatacgacggtgcgcgcgcacggggtggtccacgcgtgttttcgcggcgccttcttggggttctctcatgcccacaggtgtggcttgccacgagcggccggttgtgcctgccccggggtttgagaggggcggcgggtcttttgtatgactatccttgggggtggcgttccatcgtaggcgtaggggggtgggtcgtgggctggctctcgggtggttgtattcggcgggcggcccgcgctggttgtttgtgtgggtgcggttcgttgatcggctcgttgttgtcgggcgttgttgtggctgtgagtgtgtgagtgtgtgatattgatgtggtggttgtgtggtctgtgggatggatgtatgttttgttttagagacgcggtcgtaagggctgaggatttttggtccgcacgctcctgctcctgactcaccgctgttcgctctcgccgaggaacaagtcggtcaggaagcccgcgcgcaacagccatggcttttaaggataccggaaaaacacccgtggagccggaggtggcaattcaccgaattcgaatcaccctaacaagccgcaacgtaaaatccttggaaaaggtgtgtgctgacttgataagaggcgcaaaagaaaagaatctcaaagtgaaaggaccagttcgaatgcctaccaagactttgagaatcactacaagaaaaactccttgtggtgaaggttctaagacgtgggatcgtttccagatgagaattcacaagcgactcattgacttgcacagtccttctgagattgttaagcagattacttccatcagtattgagccaggagttgaggtggaagtcaccattgcagatgcttaagtcaactattttaataaattgatgaccagttgttaaaaaagaaaaaccctattataccctatatggcggttctgtctattactcggctcccgctttaaacagctgtgccttctaaaaccccatgggaatcccccatttttgtgggcggggcccctaaatttattcct

SEQ ID NO: 117917 - DNA, 994 bp, Homo sapiens
  misc_feature (886)..(886): n is a, c, g, or t
  misc_feature (890)..(891): n is a, c, g, or t
  misc_feature (898)..(898): n is a, c, g, or t
  misc_feature (901)..(901): n is a, c, g, or t
  misc_feature (904)..(904): n is a, c, g, or t
  misc_feature (911)..(911): n is a, c, g, or t
  misc_feature (914)..(914): n is a, c, g, or t
  misc_feature (925)..(925): n is a, c, g, or t
  misc_feature (931)..(931): n is a, c, g, or t
  misc_feature (936)..(936): n is a, c, g, or t
  misc_feature (942)..(942): n is a, c, g, or t
  misc_feature (944)..(944): n is a, c, g, or t
  misc_feature (948)..(948): n is a, c, g, or t
  misc_feature (965)..(967): n is a, c, g, or t
  misc_feature (994)..(994): n is a, c, g, or t
gtggtgtatacgacggtgcgcgcgcacggggtggtccacgcgtgttttcgcggcgccttcttggggttctctcatgcccacaggtgtggcttgccacgagcggccggttgtgcctgccccggggtttgagaggggcggcgggtcttttgtatgactatccttgggggtggcgttccatcgtaggcgtaggggggtgggtcgtgggctggctctcgggtggttgtattcggcgggcggcccgcgctggttgtttgtgtgggtgcggttcgttgatcggctcgttgttgtcgggcgttgttgtggctgtgagtgtgtgagtgtgtgatattgatgtggtggttgtgtggtctgtgggatggatgtatgttttgttttagagacgcggtcgtaagggctgaggatttttggtccgcacgctcctgctcctgactcaccgctgttcgctctcgccgaggaacaagtcggtcaggaagcccgcgcgcaacagccatggcttttaaggataccggaaaaacacccgtggagccggaggtggcaattcaccgaattcgaatcaccctaacaagccgcaacgtaaaatccttggaaaaggtgtgtgctgacttgataagaggcgcaaaagaaaagaatctcaaagtgaaaggaccagttcgaatgcctaccaagactttgagaatcactacaagaaaaactccttgtggtgaaggttctaagacgtgggatcgtttccagatgagaattcacaagcgactcattgacttgcacagtccttctgagattgttaagcagattacttccatcagtattgagccaggagttgaggtggaagtcaccattgcagatgcttaagtcaactattttaataaattgatgaccagttgttaantgcnncaagtgnggngtntgttttnatntttgcccttgnttccgngccgntgctgncngtgnccttcaatgggtgactnnnttcagccagtgcctgaggagcccgtcn

SEQ ID NO: 117918 - DNA, 1079 bp, Homo sapiens
gtggtgtatacgacggtgcgcgcgcacggggtggtccacgcgtgttttcgcggcgccttcttggggttctctcatgcccacaggtgtggcttgccacgagcggccggttgtgcctgccccggggtttgagaggggcggcgggtcttttgtatgactatccttgggggtggcgttccatcgtaggcgtaggggggtgggtcgtgggctggctctcgggtggttgtattcggcgggcggcccgcgctggttgtttgtgtgggtgcggttcgttgatcggctcgttgttgtcgggcgttgttgtggctgtgagtgtgtgagtgtgtgatattgatgtggtggttgtgtggtctgtgggatggatgtatgttttgttttagagacgcggtcgtaagggctgaggatttttggtccgcacgctcctgctcctgactcaccgctgttcgctctcgccgaggaacaagtcggtcaggaagcccgcgcgcaacagccatggcttttaaggataccggaaaaacacccgtggagccggaggtggcaattcaccgaattcgaatcaccctaacaagccgcaacgtaaaatccttggaaaaggtgtgtgctgacttgataagaggcgcaaaagaaaagaatctcaaagtgaaaggaccagttcgaatgcctaccaagactttgagaatcactacaagaaaaactccttgtggtgaaggttctaagacgtgggatcgtttccagatgagaattcacaagcgactcattgacttgcacagtccttctgagattgttaagcagattacttccatcagtattgagccaggagttgaggtggaagtcaccattgcagatgcttaagtcaactattttaataaattgatgaccagttgttaaaaaaaaaaacacaacacaaaaaaaaaaaaaaaaaaaaaacaaaaaaaaaaaaacaaaaaaaaaaaaaaaaaaaaaaagaaaaaataaaagagcaggtttatgcatggggccgaatttagggctaactgggacaatttgccctatagggggccgtatcacattcacgggccggcgtttacaccgggggacgggaa

SEQ ID NO: 117919 - DNA, 1263 bp, Homo sapiens
  misc_feature (1017)..(1017): n is a, c, g, or t
  misc_feature (1021)..(1021): n is a, c, g, or t
  misc_feature (1024)..(1025): n is a, c, g, or t
  misc_feature (1028)..(1028): n is a, c, g, or t
  misc_feature (1031)..(1031): n is a, c, g, or t
  misc_feature (1034)..(1035): n is a, c, g, or t
  misc_feature (1039)..(1039): n is a, c, g, or t
  misc_feature (1045)..(1045): n is a, c, g, or t
  misc_feature (1050)..(1050): n is a, c, g, or t
  misc_feature (1053)..(1053): n is a, c, g, or t
  misc_feature (1057)..(1057): n is a, c, g, or t
  misc_feature (1060)..(1060): n is a, c, g, or t
  misc_feature (1075)..(1075): n is a, c, g, or t
  misc_feature (1079)..(1080): n is a, c, g, or t
  misc_feature (1084)..(1084): n is a, c, g, or t
  misc_feature (1099)..(1099): n is a, c, g, or t
  misc_feature (1104)..(1104): n is a, c, g, or t
  misc_feature (1109)..(1109): n is a, c, g, or t
  misc_feature (1114)..(1114): n is a, c, g, or t
  misc_feature (1118)..(1118): n is a, c, g, or t
  misc_feature (1136)..(1136): n is a, c, g, or t
  misc_feature (1138)..(1138): n is a, c, g, or t
  misc_feature (1140)..(1140): n is a, c, g, or t
  misc_feature (1143)..(1143): n is a, c, g, or t
  misc_feature (1145)..(1145): n is a, c, g, or t
  misc_feature (1149)..(1149): n is a, c, g, or t
  misc_feature (1151)..(1152): n is a, c, g, or t
  misc_feature (1155)..(1156): n is a, c, g, or t
  misc_feature (1163)..(1163): n is a, c, g, or t
  misc_feature (1179)..(1180): n is a, c, g, or t
  misc_feature (1183)..(1183): n is a, c, g, or t
  misc_feature (1187)..(1187): n is a, c, g, or t
  misc_feature (1189)..(1189): n is a, c, g, or t
  misc_feature (1191)..(1191): n is a, c, g, or t
gtggtgtatacgacggtgcgcgcgcacggggtggtccacgcgtgttttcgcggcgccttcttggggttctctcatgcccacaggtgtggcttgccacgagcggccggttgtgcctgccccggggtttgagaggggcggcgggtcttttgtatgactatccttgggggtggcgttccatcgtaggcgtaggggggtgggtcgtgggctggctctcgggtggttgtattcggcgggcggcccgcgctggttgtttgtgtgggtgcggttcgttgatcggctcgttgttgtcgggcgttgttgtggctgtgagtgtgtgagtgtgtgatattgatgtggtggttgtgtggtctgtgggatggatgtatgttttgttttagagacgcggtcgtaagggctgaggatttttggtccgcacgctcctgctcctgactcaccgctgttcgctctcgccgaggaacaagtcggtcaggaagcccgcgcgcaacagccatggcttttaaggataccggaaaaacacccgtggagccggaggtggcaattcaccgaattcgaatcaccctaacaagccgcaacgtaaaatccttggaaaaggtgtgtgctgacttgataagaggcgcaaaagaaaagaatctcaaagtgaaaggaccagttcgaatgcctaccaagactttgagaatcactacaagaaaaactccttgtggtgaaggttctaagacgtgggatcgtttccagatgagaattcacaagcgactcattgacttgcacagtccttctgagattgttaagcagattacttccatcagtattgagccaggagttgaggtggaagtcaccattgcagatgcttaagtcaactattttaataaattgatgaccagttgttaaaaaaaaaaaaaaaaaaaaaaaaagaaaaaaaaaaaaaaaaaccgtgtgtggcggcgcgcgccccgcgggccccgcggagaagagccttttctaagaacccatgcgcgtgtggggcgcgcgcgcggggccccngggntannggnganacnngggnccaaancgcgngtncccnagngggaaaccgggggcngagnnacangagggcgggggattntctcncccantatanaaanagcgccgcgggggggaancncngangngttntnntgnnaacaaantctccagagagggggnntcncggngngngcaccataacgggggattcttattaaccgggggggtgcccagagggaaaggctcggaagtaatataattaac

SEQ ID NO: 117920 - DNA, 949 bp, Homo sapiens
gtggtgtatacgacggtgcgcgcgcacggggtggtccacgcgtgttttcgcggcgccttcttggggttctctcatgcccacaggtgtggcttgccacgagcggccggttgtgcctgccccggggtttgagaggggcggcgggtcttttgtatgactatccttgggggtggcgttccatcgtaggcgtaggggggtgggtcgtgggctggctctcgggtggttgtattcggcgggcggcccgcgctggttgtttgtgtgggtgcggttcgttgatcggctcgttgttgtcgggcgttgttgtggctgtgagtgtgtgagtgtgtgatattgatgtggtggttgtgtggtctgtgggatggatgtatgttttgttttagagacgcggtcgtaagggctgaggatttttggtccgcacgctcctgctcctgactcaccgctgttcgctctcgccgaggaacaagtcggtcaggaagcccgcgcgcaacagccatggcttttaaggataccggaaaaacacccgtggagccggaggtggcaattcaccgaattcgaatcaccctaacaagccgcaacgtaaaatccttggaaaaggtgtgtgctgacttgataagaggcgcaaaagaaaagaatctcaaagtgaaaggaccagttcgaatgcctaccaagactttgagaatcactacaagaaaaactccttgtggtgaaggttctaagacgtgggatcgtttccagatgagaattcacaagcgactcattgacttgcacagtccttctgagattgttaagcagattacttccatcagtattgagccaggagttgaggtggaagtcaccattgcagatgcttaagtcaactattttaataaattgatgaccagttgttaacaaaaaacacacccaccccccccctcccccccttctctacaccccccccccacctcacaccttc

SEQ ID NO: 117921 - DNA, 1044 bp, Homo sapiens
gtggtgtatacgacggtgcgcgcgcacggggtggtccacgcgtgttttcgcggcgccttcttggggttctctcatgcccacaggtgtggcttgccacgagcggccggttgtgcctgccccggggtttgagaggggcggcgggtcttttgtatgactatccttgggggtggcgttccatcgtaggcgtaggggggtgggtcgtgggctggctctcgggtggttgtattcggcgggcggcccgcgctggttgtttgtgtgggtgcggttcgttgatcggctcgttgttgtcgggcgttgttgtggctgtgagtgtgtgagtgtgtgatattgatgtggtggttgtgtggtctgtgggatggatgtatgttttgttttagagacgcggtcgtaagggctgaggatttttggtccgcacgctcctgctcctgactcaccgctgttcgctctcgccgaggaacaagtcggtcaggaagcccgcgcgcaacagccatggcttttaaggataccggaaaaacacccgtggagccggaggtggcaattcaccgaattcgaatcaccctaacaagccgcaacgtaaaatccttggaaaaggtgtgtgctgacttgataagaggcgcaaaagaaaagaatctcaaagtgaaaggaccagttcgaatgcctaccaagactttgagaatcactacaagaaaaactccttgtggtgaaggttctaagacgtgggatcgtttccagatgagaattcacaagcgactcattgacttgcacagtccttctgagattgttaagcagattacttccatcagtattgagccaggagttgaggtggaagtcaccattgcagatgcttaagtcaactattttaataaattgatgaccagttgttaacttcagaacaacacatgcaattcgcaacacttcccccaccgcctgccctcccctccttacctcactccccccccgcaactactctggccccttttcccacaatcgaccctgagcctacccccgctttcaacctcgctggcccctcctcggcccactcct

SEQ ID NO: 117922 - DNA, 1043 bp, Homo sapiens
  misc_feature (897)..(898): n is a, c, g, or t
  misc_feature (900)..(900): n is a, c, g, or t
  misc_feature (907)..(907): n is a, c, g, or t
gtggtgtatacgacggtgcgcgcgcacggggtggtccacgcgtgttttcgcggcgccttcttggggttctctcatgcccacaggtgtggcttgccacgagcggccggttgtgcctgccccggggtttgagaggggcggcgggtcttttgtatgactatccttgggggtggcgttccatcgtaggcgtaggggggtgggtcgtgggctggctctcgggtggttgtattcggcgggcggcccgcgctggttgtttgtgtgggtgcggttcgttgatcggctcgttgttgtcgggcgttgttgtggctgtgagtgtgtgagtgtgtgatattgatgtggtggttgtgtggtctgtgggatggatgtatgttttgttttagagacgcggtcgtaagggctgaggatttttggtccgcacgctcctgctcctgactcaccgctgttcgctctcgccgaggaacaagtcggtcaggaagcccgcgcgcaacagccatggcttttaaggataccggaaaaacacccgtggagccggaggtggcaattcaccgaattcgaatcaccctaacaagccgcaacgtaaaatccttggaaaaggtgtgtgctgacttgataagaggcgcaaaagaaaagaatctcaaagtgaaaggaccagttcgaatgcctaccaagactttgagaatcactacaagaaaaactccttgtggtgaaggttctaagacgtgggatcgtttccagatgagaattcacaagcgactcattgacttgcacagtccttctgagattgttaagcagattacttccatcagtattgagccaggagttgaggtggaagtcaccattgcagatgcttaagtcaactattttaataaattgatgaccagttgttaaaaaaaaaatatnntnacataanaattatgactcattaaaacatttaaatttgttcaaaattatatacaggaaaaaaaaatcaacctaaaacaaaaccatgtgggcccttgggcccagtgaactttttcgaccaagcttttcaatgcgcccgatttgag

SEQ ID NO: 117923 - DNA, 959 bp, Homo sapiens
gtggtgtatacgacggtgcgcgcgcacggggtggtccacgcgtgttttcgcggcgccttcttggggttctctcatgcccacaggtgtggcttgccacgagcggccggttgtgcctgccccggggtttgagaggggcggcgggtcttttgtatgactatccttgggggtggcgttccatcgtaggcgtaggggggtgggtcgtgggctggctctcgggtggttgtattcggcgggcggcccgcgctggttgtttgtgtgggtgcggttcgttgatcggctcgttgttgtcgggcgttgttgtggctgtgagtgtgtgagtgtgtgatattgatgtggtggttgtgtggtctgtgggatggatgtatgttttgttttagagacgcggtcgtaagggctgaggatttttggtccgcacgctcctgctcctgactcaccgctgttcgctctcgccgaggaacaagtcggtcaggaagcccgcgcgcaacagccatggcttttaaggataccggaaaaacacccgtggagccggaggtggcaattcaccgaattcgaatcaccctaacaagccgcaacgtaaaatccttggaaaaggtgtgtgctgacttgataagaggcgcaaaagaaaagaatctcaaagtgaaaggaccagttcgaatgcctaccaagactttgagaatcactacaagaaaaactccttgtggtgaaggttctaagacgtgggatcgtttccagatgagaattcacaagcgactcattgacttgcacagtccttctgagattgttaagcagattacttccatcagtattgagccaggagttgaggtggaagtcaccattgcagatgcttaagtcaactattttaataaattgatgaccagttgttaatataataaatggggcagcttatgctgcgtcccaaattgagcttattggtcaattcgcctataggaggggattaa

SEQ ID NO: 117924 - DNA, 1515 bp, Homo sapiens
gtggtgtatacgacggtgcgcgcgcacggggtggtccacgcgtgttttcgcggcgccttcttggggttctctcatgcccacaggtgtggcttgccacgagcggccggttgtgcctgccccggggtttgagaggggcggcgggtcttttgtatgactatccttgggggtggcgttccatcgtaggcgtaggggggtgggtcgtgggctggctctcgggtggttgtattcggcgggcggcccgcgctggttgtttgtgtgggtgcggttcgttgatcggctcgttgttgtcgggcgttgttgtggctgtgagtgtgtgagtgtgtgatattgatgtggtggttgtgtggtctgtgggatggatgtatgttttgttttagagacgcggtcgtaagggctgaggatttttggtccgcacgctcctgctcctgactcaccgctgttcgctctcgccgaggaacaagtcggtcaggaagcccgcgcgcaacagccatggcttttaaggataccggaaaaacacccgtggagccggaggtggcaattcaccgaattcgaatcaccctaacaagccgcaacgtaaaatccttggaaaaggtgtgtgctgacttgataagaggcgcaaaagaaaagaatctcaaagtgaaaggaccagttcgaatgcctaccaagactttgagaatcactacaagaaaaactccttgtggtgaaggttctaagacgtgggatcgtttccagatgagaattcacaagcgactcattgacttgcacagtccttctgagattgttaagcagattacttccatcagtattgagccaggagttgaggtggaagtcaccattgcagatgcttaagtcaactattttaataaattgatgaccagttgttaaggaagaagagttaaaaaattaaaaacaaaaaaaaaattaccttaaaaaaaaaaaaggggccgcggggcgcttcacacatgattttctcccccggaggggcgccaggagcttcgctcacaccggggtttggtcaacacgaggggccccacaattgtcgtggcctgtttcacagcctgtagagcaatgaggtccgagtcgtcttttaaacacgtcttttgttcttattgtgagtaaacacacgcgagccgtatgccgtggagcatatctttcgctgtagaaccgcgataaacaacttgtggctcaattagaggggggcgcattaaaaatgattccgtggtcccccataattattacccctatgaggagagaattatttgagagggcgccatataagagagagcgcagtaatataaaaccctgcggttttcacaaaaggggttgtatgtcgaataggtggcgtgttcttgaaacagaaattgcggccaaattttttttgacgggttggcttagctacccgttggggaagaattcttttgtgcggcccaaacgggtggaatatatggaccctatcgaaggaggccatatatttttgtattgcccctgagtgatctgttgctgtataaaaaactg

SEQ ID NO: 117925 - DNA, 907 bp, Homo sapiens
gtggtgtatacgacggtgcgcgcgcacggggtggtccacgcgtgttttcgcggcgccttcttggggttctctcatgcccacaggtgtggcttgccacgagcggccggttgtgcctgccccggggtttgagaggggcggcgggtcttttgtatgactatccttgggggtggcgttccatcgtaggcgtaggggggtgggtcgtgggctggctctcgggtggttgtattcggcgggcggcccgcgctggttgtttgtgtgggtgcggttcgttgatcggctcgttgttgtcgggcgttgttgtggctgtgagtgtgtgagtgtgtgatattgatgtggtggttgtgtggtctgtgggatggatgtatgttttgttttagagacgcggtcgtaagggctgaggatttttggtccgcacgctcctgctcctgactcaccgctgttcgctctcgccgaggaacaagtcggtcaggaagcccgcgcgcaacagccatggcttttaaggataccggaaaaacacccgtggagccggaggtggcaattcaccgaattcgaatcaccctaacaagccgcaacgtaaaatccttggaaaaggtgtgtgctgacttgataagaggcgcaaaagaaaagaatctcaaagtgaaaggaccagttcgaatgcctaccaagactttgagaatcactacaagaaaaactccttgtggtgaaggttctaagacgtgggatcgtttccagatgagaattcacaagcgactcattgacttgcacagtccttctgagattgttaagcagattacttccatcagtattgagccaggagttgaggtggaagtcaccattgcagatgcttaagtcaactattttaataaattgatgaccagttgttaacataagaccacacacgtgcatc

SEQ ID NO: 117926 - DNA, 922 bp, Homo sapiens
gtggtgtatacgacggtgcgcgcgcacggggtggtccacgcgtgttttcgcggcgccttcttggggttctctcatgcccacaggtgtggcttgccacgagcggccggttgtgcctgccccggggtttgagaggggcggcgggtcttttgtatgactatccttgggggtggcgttccatcgtaggcgtaggggggtgggtcgtgggctggctctcgggtggttgtattcggcgggcggcccgcgctggttgtttgtgtgggtgcggttcgttgatcggctcgttgttgtcgggcgttgttgtggctgtgagtgtgtgagtgtgtgatattgatgtggtggttgtgtggtctgtgggatggatgtatgttttgttttagagacgcggtcgtaagggctgaggatttttggtccgcacgctcctgctcctgactcaccgctgttcgctctcgccgaggaacaagtcggtcaggaagcccgcgcgcaacagccatggcttttaaggataccggaaaaacacccgtggagccggaggtggcaattcaccgaattcgaatcaccctaacaagccgcaacgtaaaatccttggaaaaggtgtgtgctgacttgataagaggcgcaaaagaaaagaatctcaaagtgaaaggaccagttcgaatgcctaccaagactttgagaatcactacaagaaaaactccttgtggtgaaggttctaagacgtgggatcgtttccagatgagaattcacaagcgactcattgacttgcacagtccttctgagattgttaagcagattacttccatcagtattgagccaggagttgaggtggaagtcaccattgcagatgcttaagtcaactattttaataaattgatgaccagttgttaaaaaaaaagtcgaccggccgcaaatttagtagtagtag

SEQ ID NO: 117927 - DNA, 913 bp, Homo sapiens
gtggtgtatacgacggtgcgcgcgcacggggtggtccacgcgtgttttcgcggcgccttcttggggttctctcatgcccacaggtgtggcttgccacgagcggccggttgtgcctgccccggggtttgagaggggcggcgggtcttttgtatgactatccttgggggtggcgttccatcgtaggcgtaggggggtgggtcgtgggctggctctcgggtggttgtattcggcgggcggcccgcgctggttgtttgtgtgggtgcggttcgttgatcggctcgttgttgtcgggcgttgttgtggctgtgagtgtgtgagtgtgtgatattgatgtggtggttgtgtggtctgtgggatggatgtatgttttgttttagagacgcggtcgtaagggctgaggatttttggtccgcacgctcctgctcctgactcaccgctgttcgctctcgccgaggaacaagtcggtcaggaagcccgcgcgcaacagccatggcttttaaggataccggaaaaacacccgtggagccggaggtggcaattcaccgaattcgaatcaccctaacaagccgcaacgtaaaatccttggaaaaggtgtgtgctgacttgataagaggcgcaaaagaaaagaatctcaaagtgaaaggaccagttcgaatgcctaccaagactttgagaatcactacaagaaaaactccttgtggtgaaggttctaagacgtgggatcgtttccagatgagaattcacaagcgactcattgacttgcacagtccttctgagattgttaagcagattacttccatcagtattgagccaggagttgaggtggaagtcaccattgcagatgcttaagtcaactattttaataaattgatgaccagttgttaacaaagaaccacacaacgtgaatcacaag

SEQ ID NO: 117928 - DNA, 2184 bp, Homo sapiens
  misc_feature (884)..(884): n is a, c, g, or t
  misc_feature (886)..(886): n is a, c, g, or t
gtggtgtatacgacggtgcgcgcgcacggggtggtccacgcgtgttttcgcggcgccttcttggggttctctcatgcccacaggtgtggcttgccacgagcggccggttgtgcctgccccggggtttgagaggggcggcgggtcttttgtatgactatccttgggggtggcgttccatcgtaggcgtaggggggtgggtcgtgggctggctctcgggtggttgtattcggcgggcggcccgcgctggttgtttgtgtgggtgcggttcgttgatcggctcgttgttgtcgggcgttgttgtggctgtgagtgtgtgagtgtgtgatattgatgtggtggttgtgtggtctgtgggatggatgtatgttttgttttagagacgcggtcgtaagggctgaggatttttggtccgcacgctcctgctcctgactcaccgctgttcgctctcgccgaggaacaagtcggtcaggaagcccgcgcgcaacagccatggcttttaaggataccggaaaaacacccgtggagccggaggtggcaattcaccgaattcgaatcaccctaacaagccgcaacgtaaaatccttggaaaaggtgtgtgctgacttgataagaggcgcaaaagaaaagaatctcaaagtgaaaggaccagttcgaatgcctaccaagactttgagaatcactacaagaaaaactccttgtggtgaaggttctaagacgtgggatcgtttccagatgagaattcacaagcgactcattgacttgcacagtccttctgagattgttaagcagattacttccatcagtattgagccaggagttgatcgaatctacagatgcagaacccatggatacagagggccagcagtacactttgagaagtgtantngaatccccggggacatgtcctttttaactgcattctcctccgccaaaaaagtgaccaagcagagtctttctctgtcacccaggctggagtgcaatggcgtgatctcagctcactgcaacctctgcctcctgggttcaagtgattctcgtgtctcagcctcctgagtagctgagactacaggtgtgcaccagtgttcccagctgatttttgtattttatgtagagatggggttatgccattttggccaggctagtctcgaactcctgagctcaggtgatacacacacctcagcaaatcttttaaattatacattctgtgatatttccttgactttcttatccagcacttgtattgattatttttcattttgataatgttgggtttttaaaaactcctttatgatggaaaatttcaaacatacacaaaagtagagagagaatggtataataaacccactcagttttaaggattgtcaactaataccagttttatttcatgtatgactccaacaacttccccaaccagccttcagattatttgaaagcaaatttcagacatcgtattttactcatacattttctagtatctaaatctgaaagagactcttttctaacagttctgtagcattaattatactcatactgttgtgcaacaaatatccagaaatcttttgtcttgcgaaactgaacctcttacccattaaacactaactcccttttttttcaccctgaaccattggcaaccacaattttactttctttttctgtgagtttgattacttgatacttcatgtgagtggaatcatataatatttgtctttttgtgactgacattttatttagcttaatgtcttcaagtttgacccataccatatcatgtggcaggatttttccctttttttttttttcagacggagtctcgctctgtcgcccaggctggagtgcagtggcgcgatctcggctcactgcaagctccgcctcccgggttcatgccattctcctgcctcagcctcctgagtagctgggactacaggcgcccaccactaaacccggctaatttttttgtatttttagtagagacagagtttcaccatgttaatgaggatggtctccatctcctgacctcgtgattcgctcgtctcggcctcccaaagtgctgggattacaggcgtgagccaccgcgcccggccatgatttttcttcttttttaaggctgaataatatctcaatgtatgtatatataccactttttaaaaattcattcatctgttggacatttagattgttcccacctcttgg

SEQ ID NO: 117929 - DNA, 2028 bp, Homo sapiens
  misc_feature (884)..(884): n is a, c, g, or t
  misc_feature (886)..(886): n is a, c, g, or t
gtggtgtatacgacggtgcgcgcgcacggggtggtccacgcgtgttttcgcggcgccttcttggggttctctcatgcccacaggtgtggcttgccacgagcggccggttgtgcctgccccggggtttgagaggggcggcgggtcttttgtatgactatccttgggggtggcgttccatcgtaggcgtaggggggtgggtcgtgggctggctctcgggtggttgtattcggcgggcggcccgcgctggttgtttgtgtgggtgcggttcgttgatcggctcgttgttgtcgggcgttgttgtggctgtgagtgtgtgagtgtgtgatattgatgtggtggttgtgtggtctgtgggatggatgtatgttttgttttagagacgcggtcgtaagggctgaggatttttggtccgcacgctcctgctcctgactcaccgctgttcgctctcgccgaggaacaagtcggtcaggaagcccgcgcgcaacagccatggcttttaaggataccggaaaaacacccgtggagccggaggtggcaattcaccgaattcgaatcaccctaacaagccgcaacgtaaaatccttggaaaaggtgtgtgctgacttgataagaggcgcaaaagaaaagaatctcaaagtgaaaggaccagttcgaatgcctaccaagactttgagaatcactacaagaaaaactccttgtggtgaaggttctaagacgtgggatcgtttccagatgagaattcacaagcgactcattgacttgcacagtccttctgagattgttaagcagattacttccatcagtattgagccaggagttgatcgaatctacagatgcagaacccatggatacagagggccagcagtacactttgagaagtgtantngaatccccggggacatgtcctttttaactgcattctcctccgccaaaaaagtgaccaagcagagtctttctctgtcacccaggctggagtgcaatggcgtgatctcagctcactgcaacctctgcctcctgggttcaagtgattctcgtgtctcagcctcctgagtagctgagactacaggtgtgcaccagtgttcccagctgatttttgtattttatgtagagatggggttatgccattttggccaggctagtctcgaactcctgagctcaggtgatacacacacctcagcaaatcttttaaattatacattctgtgatatttccttgactttcttatccagcacttgtattgattatttttcattttgataatgttgggtttttaaaaactcctttatgatggaaaatttcaaacatacacaaaagtagagagagaatggtataataaacccactcagttttaaggattgtcaactaataccagttttatttcatgtatgactccaacaacttccccaaccagccttcagattatttgaaagcaaatttcagacatcgtattttactcatacattttctagtatctaaatctgaaagagactcttttctaacagttctgtagcattaattatactcatactgttgtgcaacaaatatccagaaatcttttgtcttgcgaaactgaacctcttacccattaaacactaactcccttttttttcaccctgaaccattggcaaccacaattttactttctttttctgtgagtttgattacttgatacttcatgtgagtggaatcatataatatttgtctttttgtgactgacattttatttagcttaatgtcttcaagtttgacccataccatatcatgtggcaggatttttccctttttttttttttcagacagagtaagactccatctcaaaaacaaaaacaaaaaaagacaagaaaataggattgttttcttagtttacttgccagattatttactgttagtgtatagaaatgcacctgatatttgtattaattttgtgtgctgcaattttgctgaatttgttcattagttttcaatcttttgtgatataataccatgtcatctgtgaataaatacttctttcctttcagtttggatgta

SEQ ID NO: 117930 - DNA, 840 bp, Homo sapiens
gtggtgtatacgacggtgcgcgcgcacggggtggtccacgcgtgttttcgcggcgccttcttggggttctctcatgcccacaggtgtggcttgccacgagcggccggttgtgcctgccccggggtttgagaggggcggcgggtcttttgtatgactatccttgggggtggcgttccatcgtaggcgtaggggggtgggtcgtgggctggctctcgggtggttgtattcggcgggcggcccgcgctggttgtttgtgtgggtgcggttcgttgatcggctcgttgttgtcgggcgttgttgtggctgtgagtgtgtgagtgtgtgatattgatgtggtggttgtgtggtctgtgggatggatgtatgttttgttttagagacgcggtcgtaagggctgaggatttttggtccgcacgctcctgctcctgactcaccgctgttcgctctcgccgaggaacaagtcggtcaggaagcccgcgcgcaacagccatggcttttaaggataccggaaaaacacccgtggagccggaggtggcaattcaccgaattcgaatcaccctaacaagccgcaacgtaaaatccttggaaaaggtgtgtgctgacttgataagaggcgcaaaagaaaagaatctcaaagtgaaaggaccagttcgaatgcctaccaagactttgagaatcactacaagaaaaactccttgtggtgaaggttctaagacgtgggatcgtttccagatgagaattcacaagcgactcattgacttgcacagtccttctgagattgttaagcagattacttccatcagtattgagccaggagaataaattgatgcccagttgtta

SEQ ID NO: 117931 - DNA, 844 bp, Homo sapiens
gtggtgtatacgacggtgcgcgcgcacggggtggtccacgcgtgttttcgcggcgccttcttggggttctctcatgcccacaggtgtggcttgccacgagcggccggttgtgcctgccccggggtttgagaggggcggcgggtcttttgtatgactatccttgggggtggcgttccatcgtaggcgtaggggggtgggtcgtgggctggctctcgggtggttgtattcggcgggcggcccgcgctggttgtttgtgtgggtgcggttcgttgatcggctcgttgttgtcgggcgttgttgtggctgtgagtgtgtgagtgtgtgatattgatgtggtggttgtgtggtctgtgggatggatgtatgttttgttttagagacgcggtcgtaagggctgaggatttttggtccgcacgctcctgctcctgactcaccgctgttcgctctcgccgaggaacaagtcggtcaggaagcccgcgcgcaacagccatggcttttaaggataccggaaaaacacccgtggagccggaggtggcaattcaccgaattcgaatcaccctaacaagccgcaacgtaaaatccttggaaaaggtgtgtgctgacttgataagaggcgcaaaagaaaagaatctcaaagtgaaaggaccagttcgaatgcctaccaagactttgagaatcactacaagaaaaactccttgtggtgaaggttctaagacgtgggatcgtttccagatgagaattcacaagcgactcattgacttgcacagtccttctgagattgttaagcagattacttccatcagtattgagccaggagatatcaccaacagatgttccggccagc

SEQ ID NO: 117932 - DNA, 1106 bp, Homo sapiens
gtggtgtatacgacggtgcgcgcgcacggggtggtccacgcgtgttttcgcggcgccttcttggggttctctcatgcccacaggtgtggcttgccacgagcggccggttgtgcctgccccggggtttgagaggggcggcgggtcttttgtatgactatccttgggggtggcgttccatcgtaggcgtaggggggtgggtcgtgggctggctctcgggtggttgtattcggcgggcggcccgcgctggttgtttgtgtgggtgcggttcgttgatcggctcgttgttgtcgggcgttgttgtggctgtgagtgtgtgagtgtgtgatattgatgtggtggttgtgtggtctgtgggatggatgtatgttttgttttagagacgcggtcgtaagggctgaggatttttggtccgcacgctcctgctcctgactcaccgctgttcgctctcgccgaggaacaagtcggtcaggaagcccgcgcgcaacagccatggtgaggcggcagtcggcggcgggcggcgcaacgcagggctcgggcgccggggggaccccggtttcgagttcgtgctcctgagggcagatgccggggcgtgtaggggcggaaaggcgctcctgaaatggtggggaaacgcgggaagcttccggaagctgcctttctccagaagtggcagaccatttttggcttattgttctttttcatgtatctaataataggcttttaaggataccggaaaaacacccgtggagccggaggtggcaattcaccgaattcgaatcaccctaacaagccgcaacgtaaaatccttggaaaaggtgtgtgctgacttgataagaggcgcaaaagaaaagaatctcaaagtgaaaggaccagttcgaatgcctaccaagactttgagaatcactacaagaaaaactccttgtggtgaaggttctaagacgtgggatcgtttccagatgagaattcacaagcgactcattgacttgcacagtccttctgagattgttaagcagattacttccatcagtattgagccaggagttgaggtggaagtcaccattgcagatgcttaagtcaactattttaataaattgatgaccagttgttaa

SEQ ID NO: 117933 - DNA, 1308 bp, Homo sapiens
gtggtgtatacgacggtgcgcgcgcacggggtggtccacgcgtgttttcgcggcgccttcttggggttctctcatgcccacaggtgtggcttgccacgagcggccggttgtgcctgccccggggtttgagaggggcggcgggtcttttgtatgactatccttgggggtggcgttccatcgtaggcgtaggggggtgggtcgtgggctggctctcgggtggttgtattcggcgggcggcccgcgctggttgtttgtgtgggtgcggttcgttgatcggctcgttgttgtcgggcgttgttgtggctgtgagtgtgtgagtgtgtgatattgatgtggtggttgtgtggtctgtgggatggatgtatgttttgttttagagacgcggtcgtaagggctgaggatttttggtccgcacgctcctgctcctgactcaccgctgttcgctctcgccgaggaacaagtcggtcaggaagcccgcgcgcaacagccatggcttttaaggataccggaaaaacacccgtggagccggaggtggcaattcaccgaattcgaatcaccctaacaagccgcaacgtaaaatccttggaaaaggtgtgtgctgacttgataagaggcgcaaaagaaaagaatctcaaagtgaaaggaccagttcgaatgcctaccaagggtaaagtaaatcggaggggcaggaagtaggagttgcttccggatgttgcataaattcaggttctttaaggagttcggctgccaaaattgttaacactgatgctgtctacaaacgcacatagaaatcggtggtagattgcggttcctagtaagtagctaatgtttagatatgattgttgaattattgttgctgtgttcttggtgtgctttggtgcttaacaggcgcaagctctaagggtggtgtcctagcacagtgaaaacagacctggcattttcaacccatggtacctgaaaatctattagtgtaaattggaatcataccaaagggaaactaatgaaatgattagaagtaatgattttccagatgttctagggataagtataaaacgataaacacttggtttcctttgtcttttgttacagactttgagaatcactacaagaaaaactccttgtggtgaaggttctaagacgtgggatcgtttccagatgagaattcacaagcgactcattgacttgcacagtccttctgagattgttaagcagattacttccatcagtattgagccaggagttgaggtggaagtcaccattgcagatgcttaagtcaactattttaataaattgatgaccagttgttaa

SEQ ID NO: 117934 - DNA, 1365 bp, Homo sapiens
gtggtgtatacgacggtgcgcgcgcacggggtggtccacgcgtgttttcgcggcgccttcttggggttctctcatgcccacaggtgtggcttgccacgagcggccggttgtgcctgccccggggtttgagaggggcggcgggtcttttgtatgactatccttgggggtggcgttccatcgtaggcgtaggggggtgggtcgtgggctggctctcgggtggttgtattcggcgggcggcccgcgctggttgtttgtgtgggtgcggttcgttgatcggctcgttgttgtcgggcgttgttgtggctgtgagtgtgtgagtgtgtgatattgatgtggtggttgtgtggtctgtgggatggatgtatgttttgttttagagacgcggtcgtaagggctgaggatttttggtccgcacgctcctgctcctgactcaccgctgttcgctctcgccgaggaacaagtcggtcaggaagcccgcgcgcaacagccatggcttttaaggataccggaaaaacacccgtggagccggaggtggcaattcaccgaattcgaatcaccctaacaagccgcaacgtaaaatccttggaaaaggtgtgtgctgacttgataagaggcgcaaaagaaaagaatctcaaagtgaaaggaccagttcgaatgcctaccaagactttgagaatcactacaagacacaagcgactcattgacttgcacagtccttctgagattgttaagcagattacttccatcagtattgagccaggagttgaggtggaagtcaccattgcagatgcttaagtcaactattttaataaattgatgaccagttgttaaaaaaaaaaaaacaaaaaaaaaaaaacaaaaaaaaaaaaaaaaaaaaaaaaaaaaaaaaaaaaaaaaaaaaaagaaaaaaaaaaaaaaaaaggggggggggggaaaaaaattccgggggggggccaacaattgtatgtatgcacccaggtttttgtattacaacaagggggggcccctacgaggggggggcgcactaaataaaacagcagcacgcgacggggcggcgcggggttaacaacaacaggctgggggagtgggggaaagaacaggtgcatatcgtgcagcacacctttgtggggacgaagaacaccccacatccttgtcgggggggtggggcaaacacatttggtgggccgacacaccacacccacgaagagaagattattaaaaacgccgccacgagagtactaaaataaaaactttgacagcggttaatatagggtgggtcacacacccagcaccgaattaaggcggctggaccaagaaaaaatggggccacggaagattatgattgtggagagatcatttataaaa

SEQ ID NO: 117935 - DNA, 1600 bp, Homo sapiens
gtggtgtatacgacggtgcgcgcgcacggggtggtccacgcgtgttttcgcggcgccttcttggggttctctcatgcccacaggtgtggcttgccacgagcggccggttgtgcctgccccggggtttgagaggggcggcgggtcttttgtatgactatccttgggggtggcgttccatcgtaggcgtaggggggtgggtcgtgggctggctctcgggtggttgtattcggcgggcggcccgcgctggttgtttgtgtgggtgcggttcgttgatcggctcgttgttgtcgggcgttgttgtggctgtgagtgtgtgagtgtgtgatattgatgtggtggttgtgtggtctgtgggatggatgtatgttttgttttagagacgcggtcgtaagggctgaggatttttggtccgcacgctcctgctcctgactcaccgctgttcgctctcgccgaggaacaagtcggtcaggaagcccgcgcgcaacagccatggcttttaaggataccggaaaaacacccgtggagccggaggtggcaattcaccgaattcgaatcaccctaacaagccgcaacgtaaaatccttggaaaaggggtcagtgcattcgttatgcgggggggagggggaattgggcgaaaagcgacgagctttactcgttaatgttagtgtagaaggtggactgcaagaactaaagtgacaagttacttaaaaaagtaaagcgtggcttaaaattgcttttactgtcatacagctggcgatgaggaggtacctattgtgttgagtaacggtgataattttatacgctattctgagccagcagaagtgaaggccttaagccgattttaattgtttcgattatactgagaggtcttttatttcctgtagtgtgtgctgacttgataagaggcgcaaaagaaaagaatctcaaagtgaaaggaccagttcgaatgcctaccaagggtaaagtaaatcggaggggcaggaagtaggagttgcttccggatgttgcataaattcaggttctttaaggagttcggctgccaaaattgttaacactgatgctgtctacaaacgcacatagaaatcggtggtagattgcggttcctagtaagtagctaatgtttagatatgattgttgaattattgttgctgtgttcttggtgtgctttggtgcttaacaggcgcaagctctaagggtggtgtcctagcacagtgaaaacagacctggcattttcaacccatggtacctgaaaatctattagtgtaaattggaatcataccaaagggaaactaatgaaatgattagaagtaatgattttccagatgttctagggataagtataaaacgataaacacttggtttcctttgtcttttgttacagactttgagaatcactacaagaaaaactccttgtggtgaaggttctaagacgtgggatcgtttccagatgagaattcacaagcgactcattgacttgcacagtccttctgagattgttaagcagattacttccatcagtattgagccaggagttgaggtggaagtcaccattgcagatgcttaagtcaactattttaataaattgatgaccagttgttaa

SEQ ID NO: 117936 - DNA, 786 bp, Homo sapiens
  misc_feature (690)..(690): n is a, c, g, or t
  misc_feature (786)..(786): n is a, c, g, or t
gtggtgtatacgacggtgcgcgcgcacggggtggtccacgcgtgttttcgcggcgccttcttggggttctctcatgcccacaggtgtggcttgccacgagcggccggttgtgcctgccccggggtttgagaggggcggcgggtcttttgtatgactatccttgggggtggcgttccatcgtaggcgtaggggggtgggtcgtgggctggctctcgggtggttgtattcggcgggcggcccgcgctggttgtttgtgtgggtgcggttcgttgatcggctcgttgttgtcgggcgttgttgtggctgtgagtgtgtgagtgtgtgatattgatgtggtggttgtgtggtctgtgggatggatgtatgttttgttttagagacgcggtcgtaagggctgaggatttttggtccgcacgctcctgctcctgactcaccgctgttcgctctcgccgaggaacaagtcggtcaggaagcccgcgcgcaacagccatggcttttaaggataccggaaaaacacccgtggagccggaggtggcaattcaccgaattcgaatcaccctaacaagccgcaacgtaaaatccttggaaaaggtgtgtgctgacttgataagaggcgcaaaagaaaagaatctcaaagtgaaaggaccagttcgaatgcctaccaagactttgagaatcactacaagaaanaactccttggtggggtttggggaaaaaaaaaaaaggggggggggggtcttttttttttccccccttttttaaaaattgcacagtccttctgagatn

SEQ ID NO: 117937 - DNA, 1821 bp, Homo sapiens
gtggtgtatacgacggtgcgcgcgcacggggtggtccacgcgtgttttcgcggcgccttcttggggttctctcatgcccacaggtgtggcttgccacgagcggccggttgtgcctgccccggggtttgagaggggcggcgggtcttttgtatgactatccttgggggtggcgttccatcgtaggcgtaggggggtgggtcgtgggctggctctcgggtggttgtattcggcgggcggcccgcgctggttgtttgtgtgggtgcggttcgttgatcggctcgttgttgtcgggcgttgttgtggctgtgagtgtgtgagtgtgtgatattgatgtggtggttgtgtggtctgtgggatggatgtatgttttgttttagagacgcggtcgtaagggctgaggatttttggtccgcacgctcctgctcctgactcaccgctgttcgctctcgccgaggaacaagtcggtcaggaagcccgcgcgcaacagccatggtgaggcggcagtcggcggcgggcggcgcaacgcagggctcgggcgccggggggaccccggtttcgagttcgtgctcctgagggcagatgccggggcgtgtaggggcggaaaggcgctcctgaaatggtggggaaacgcgggaagcttccggaagctgcctttctccagaagtggcagaccatttttggcttattgttctttttcatgtatctaataataggcttttaaggataccggaaaaacacccgtggagccggaggtggcaattcaccgaattcgaatcaccctaacaagccgcaacgtaaaatccttggaaaaggggtcagtgcattcgttatgcgggggggagggggaattgggcgaaaagcgacgagctttactcgttaatgttagtgtagaaggtggactgcaagaactaaagtgacaagttacttaaaaaagtaaagcgtggcttaaaattgcttttactgtcatacagctggcgatgaggaggtacctattgtgttgagtaacggtgataattttatacgctattctgagccagcagaagtgaaggccttaagccgattttaattgtttcgattatactgagaggtcttttatttcctgtagtgtgtgctgacttgataagaggcgcaaaagaaaagaatctcaaagtgaaaggaccagttcgaatgcctaccaagggtaaagtaaatcggaggggcaggaagtaggagttgcttccggatgttgcataaattcaggttctttaaggagttcggctgccaaaattgttaacactgatgctgtctacaaacgcacatagaaatcggtggtagattgcggttcctagtaagtagctaatgtttagatatgattgttgaattattgttgctgtgttcttggtgtgctttggtgcttaacaggcgcaagctctaagggtggtgtcctagcacagtgaaaacagacctggcattttcaacccatggtacctgaaaatctattagtgtaaattggaatcataccaaagggaaactaatgaaatgattagaagtaatgattttccagatgttctagggataagtataaaacgataaacacttggtttcctttgtcttttgttacagactttgagaatcactacaagaaaaactccttgtggtgaaggttctaagacgtgggatcgtttccagatgagaattcacaagcgactcattgacttgcacagtccttctgagattgttaagcagattacttccatcagtattgagccaggagttgaggtggaagtcaccattgcagatgcttaagtcaactattttaataaattgatgaccagttgttaa

SEQ ID NO: 117938 - DNA, 1049 bp, Homo sapiens
gtggtgtatacgacggtgcgcgcgcacggggtggtccacgcgtgttttcgcggcgccttcttggggttctctcatgcccacaggtgtggcttgccacgagcggccggttgtgcctgccccggggtttgagaggggcggcgggtcttttgtatgactatccttgggggtggcgttccatcgtaggcgtaggggggtgggtcgtgggctggctctcgggtggttgtattcggcgggcggcccgcgctggttgtttgtgtgggtgcggttcgttgatcggctcgttgttgtcgggcgttgttgtggctgtgagtgtgtgagtgtgtgatattgatgtggtggttgtgtggtctgtgggatggatgtatgttttgttttagagacgcggtcgtaagggctgaggatttttggtccgcacgctcctgctcctgactcaccgctgttcgctctcgccgaggaacaagtcggtcaggaagcccgcgcgcaacagccatggtgaggcggcagtcggcggcgggcggcgcaacgcagggctcgggcgccggggggaccccggtttcgagttcgtgctcctgagggcagatgccggggcgtgtaggggcggaaaggcgctcctgaaatggcttttaaggataccggaaaaacacccgtggagccggaggtggcaattcaccgaattcgaatcaccctaacaagccgcaacgtaaaatccttggaaaaggtgtgtgctgacttgataagaggcgcaaaagaaaagaatctcaaagtgaaaggaccagttcgaatgcctaccaagactttgagaatcactacaagaaaaactccttgtggtgaaggttctaagacgtgggatcgtttccagatgagaattcacaagcgactcattgacttgcacagtccttctgagattgttaagcagattacttccatcagtattgagccaggagttgaggtggaagtcaccattgcagatgcttaagtcaactattttaataaattgatgaccagttgttaaaaaaaaagtcgaccggccgcaaatttagtagtagtag

SEQ ID NO: 117939 - DNA, 704 bp, Homo sapiens
gtggtgtatacgacggtgcgcgcgcacggggtggtccacgcgtgttttcgcggcgccttcttggggttctctcatgcccacaggtgtggcttgccacgagcggccggttgtgcctgccccggggtttgagaggggcggcgggtcttttgtatgactatccttgggggtggcgttccatcgtaggcgtaggggggtgggtcgtgggctggctctcgggtggttgtattcggcgggcggcccgcgctggttgtttgtgtgggtgcggttcgttgatcggctcgttgttgtcgggcgttgttgtggctgtgagtgtgtgagtgtgtgatattgatgtggtggttgtgtggtctgtgggatggatgtatgttttgttttagagacgcggtcgtaagggctgaggatttttggtccgcacgctcctgctcctgactcaccgctgttcgctctcgccgaggaacaagtcggtcaggaagcccgcgcgcaacagccatggcttttaaggataccggaaaaacacccgtggagccggaggtggcaattcaccgaattcgaatcaccctaacaagccgcaacgtaaaatccttggaaaaggggtgtgtgctgacttgataagaggcgcaaagaaagatctcaagtgaagacagtcgatgctacagacttgagatacatacagaaactctgtgtgagtcatagctgatcgacag

SEQ ID NO: 117940 - DNA, 885 bp, Homo sapiens
gtggtgtatacgacggtgcgcgcgcacggggtggtccacgcgtgttttcgcggcgccttcttggggttctctcatgcccacaggtgtggcttgccacgagcggccggttgtgcctgccccggggtttgagaggggcggcgggtcttttgtatgactatccttgggggtggcgttccatcgtaggcgtaggggggtgggtcgtgggctggctctcgggtggttgtattcggcgggcggcccgcgctggttgtttgtgtgggtgcggttcgttgatcggctcgttgttgtcgggcgttgttgtggctgtgagtgtgtgagtgtgtgatattgatgtggtggttgtgtggtctgtgggatggatgtatgttttgttttagagacgcggtcgtaagggctgaggatttttggtccgcacgctcctgctcctgactcaccgctgttcgctctcgccgaggaacaagtcggtcaggaagcccgcgcgcaacagccatggcttttaaggataccggaaaaacacccgtggagccggaggtggcaattcaccgaattcgaatcaccctaacaagccgcaacgtaaaatccttggaaaaggtgtgtgctgacttgataagaggcgcaaaagaaaagaatctcaaagtgaaaggaccagttcgaatgcctaccaagactttgagaatcactacaagaaaaactccttgtggtgaaggttctaagacgtgggatcgtttccagatgagaattcacaagcgactcattgacttgcacagtccttctgagattgttaagcagattacttccatcagtattgagccaggagttgaggtggaagtcaccattgcagatgcttaagtcaactattttaataaattgatgaccagttgttaa

SEQ ID NO: 117941 - DNA, 930 bp, Homo sapiens
gtggtgtatacgacggtgcgcgcgcacggggtggtccacgcgtgttttcgcggcgccttcttggggttctctcatgcccacaggtgtggcttgccacgagcggccggttgtgcctgccccggggtttgagaggggcggcgggtcttttgtatgactatccttgggggtggcgttccatcgtaggcgtaggggggtgggtcgtgggctggctctcgggtggttgtattcggcgggcggcccgcgctggttgtttgtgtgggtgcggttcgttgatcggctcgttgttgtcgggcgttgttgtggctgtgagtgtgtgagtgtgtgatattgatgtggtggttgtgtggtctgtgggatggatgtatgttttgttttagagacgcggtcgtaagggctgaggatttttggtccgcacgctcctgctcctgactcaccgctgttcgctctcgccgaggaacaagtcggtcaggaagcccgcgcgcaacagccatggcttttaaggataccggaaaaacacccgtggagccggaggtggcaattcaccgaattcgaatcaccctaacaagccgcaacgtaaaatccttggaaaaggtgtgtgctgacttgataagaggcgcaaaagaaaagaatctcaaagtgaaaggaccagttcgaatgcctaccaagactttgagaatcactacaagaaaaactccttgtggtgaaggttctaagacgtgggatcgtttccagatgagaattcacaagcgactcattgacttgcacagtccttctgagattgttaagcagattacttccatcagtattgagccaggagttgaggtggaagtcaccattgcagatgcttaagtcaactattttaataaattgatgaccagttgttaaacaaccactagagcagggtccaggcctggggcggaggggaaatgg

SEQ ID NO: 117942 - DNA, 943 bp, Homo sapiens
  misc_feature (908)..(908): n is a, c, g, or t
ctgatacttacgattcaagcatggaactgtttcatgtttacccgttcgtacagttaaaggatgccctgttactatatatgtggctttctagcatattactgattctgtacatatctttaaaagttggatatttgtaatagcttaaagggatttttggtccgcacgctcctgctcctgactcaccgctgttcgctctcgccgaggaacaagtcggtcaggaagcccgcgcgcaacagccatggcttttaaggataccggaaaaacacccgtggagccggaggtggcaattcaccgaattcgaatcaccctaacaagccgcaacgtaaaatccttggaaaaggtgtgtgctgacttgataagaggcgcaaaagaaaagaatctcaaagtgaaaggaccagttcgaatgcctaccaagactttgagaatcactacaagaaaaactccttgtggtgaaggttctaagacgtgggatcgtttccagatgagaattcacaagcgactcattgacttgcacagtccttctgagattgttaagcagattacttccatcagtattgagccaggagttgaggtggaagtcaccattgcagatgcttaagtcaactattttaataaattgatgaccagttgttaaaaaaaaacaaacaagggggggccatccgatctaaaactatccgtgcccgcgctgccagcaagaaggtgtacttcgctgagaaggtgacgtctctgggcaaggatgggcacgggccctgcctggctgagagcgctggggaagacactgaccccggggggcacgcggagcacgaggcagcctatgcaaagccgtgtatgaatctcttcggacccaggagtgacccgtgcgggggcagtaattatgacgggaccgaggaaggcaagcctaggtacgnggcccagaagggggcacctggccaaacgtgggcct

SEQ ID NO: 117943 - DNA, 1051 bp, Homo sapiens
gtggtgtatacgacggtgcgcgcgcacggggtggtccacgcgtgttttcgcggcgccttcttggggttctctcatgcccacaggtgtggcttgccacgagcggccggttgtgcctgccccggggtttgagaggggcggcgggtcttttgtatgactatccttgggggtggcgttccatcgtaggcgtaggggggtgggtcgtgggctggctctcgggtggttgtattcggcgggcggcccgcgctggttgtttgtgtgggtgcggttcgttgatcggctcgttgttgtcgggcgttgttgtggctgtgagtgtgtgagtgtgtgatattgatgtggtggttgtgtggtctgtgggatggatgtatgttttgttttagagacgcggtcgtaagggctgaggatttttggtccgcacgctcctgctcctgactcaccgctgttcgctctcgccgaggaacaagtcggtcaggaagcccgcgcgcaacagccatggcttttaaggataccggaaaaacacccgtggagccggaggtggcaattcaccgaattcgaatcaccctaacaagccgcaacgtaaaatccttggaaaaggtgtgtgctgacttgataagaggcgcaaaagaaaagaatctcaaagtgaaaggaccagttcgaatgcctaccaagactttgagaatcactacaagaaaaactccttgtggtgaaggttctaagacgtgggatcgtttccagatgagaattcacaagcgactcattgacttgcacagtccttctgagattgttaagcagattacttccatcagtattgagccaggagttgaggtggaagtcaccattgcagatgcttaagtcaactattttaataaattgatgaccagttgttaaaaaaaaaaaaacaaaaaaaaaaaaacaaaaaaaaaaaaaaaaaaaaaaagaaaaaataaaagagcaggtttatgcatggggccgaatttagggctaactgggacaatttgccctatagggggccgtatcacattcacgggccggcgtttacaccgggggacgggaa

SEQ ID NO: 117944 - DNA, 1379 bp, Homo sapiens
gtggtgtatacgacggtgcgcgcgcacggggtggtccacgcgtgttttcgcggcgccttcttggggttctctcatgcccacaggtgtggcttgccacgagcggccggttgtgcctgccccggggtttgagaggggcggcgggtcttttgtatgactatccttgggggtggcgttccatcgtaggcgtaggggggtgggtcgtgggctggctctcgggtggttgtattcggcgggcggcccgcgctggttgtttgtgtgggtgcggttcgttgatcggctcgttgttgtcgggcgttgttgtggctgtgagtgtgtgagtgtgtgatattgatgtggtggttgtgtggtctgtgggatggatgtatgttttgttttagagacgcggtcgtaagggctgaggatttttggtccgcacgctcctgctcctgactcaccgctgttcgctctcgccgaggaacaagtcggtcaggaagcccgcgcgcaacagccatggcttttaaggataccggaaaaacacccgtggagccggaggtggcaattcaccgaattcgaatcaccctaacaagccgcaacgtaaaatccttggaaaaggtgtgtgctgacttgataagaggcgcaaaagaaaagaatctcaaagtgaaaggaccagttcgaatgcctaccaagactttgagaatcactacaagaaaaactccttgtggtgaaggttctaagacgtgggatcgtttccagatgagaattcacaagcgactcattgacttgcacagtccttctgagattgttaagcagattacttccatcagtattgagccaggagttgaggtggaagtcaccattgcagatgcttaagtcaactattttaataaattgatgaccagttgttaaaaaaaaaaaaacaaaaaaaaaaaaacaaaaaaaaaaaaaaaaaaaaaaagggggggggggggaaaaaaattccgggggggggccaacaattgtatgtatgcacccaggtttttgtattacaacaagggggggcccctacgaggggggggcgcactaaataaaacagcagcacgcgacggggcggcgcggggttaacaacaacaggctgggggagtgggggaaagaacaggtgcatatcgtgcagcacacctttgtggggacgaagaacaccccacatccttgtcgggggggtggggcaaacacatttggtgggccgacacaccacacccacgaagagaagattattaaaaacgccgccacgagagtactaaaataaaaactttgacagcggttaatatagggtgggtcacacacccagcaccgaattaaggcggctggaccaagaaaaaatggggccacggaagattatgattgtggagagatcatttataaaa

SEQ ID NO: 117945 - DNA, 1419 bp, Homo sapiens
gtggtgtatacgacggtgcgcgcgcacggggtggtccacgcgtgttttcgcggcgccttcttggggttctctcatgcccacaggtgtggcttgccacgagcggccggttgtgcctgccccggggtttgagaggggcggcgggtcttttgtatgactatccttgggggtggcgttccatcgtaggcgtaggggggtgggtcgtgggctggctctcgggtggttgtattcggcgggcggcccgcgctggttgtttgtgtgggtgcggttcgttgatcggctcgttgttgtcgggcgttgttgtggctgtgagtgtgtgagtgtgtgatattgatgtggtggttgtgtggtctgtgggatggatgtatgttttgttttagagacgcggtcgtaagggctgaggatttttggtccgcacgctcctgctcctgactcaccgctgttcgctctcgccgaggaacaagtcggtcaggaagcccgcgcgcaacagccatggcttttaaggataccggaaaaacacccgtggagccggaggtggcaattcaccgaattcgaatcaccctaacaagccgcaacgtaaaatccttggaaaaggtgtgtgctgacttgataagaggcgcaaaagaaaagaatctcaaagtgaaaggaccagttcgaatgcctaccaagactttgagaatcactacaagaaaaactccttgtggtgaaggttctaagacgtgggatcgtttccagatgagaattcacaagcgactcattgacttgcacagtccttctgagattgttaagcagattacttccatcagtattgagccaggagttgaggtggaagtcaccattgcagatgcttaagtcaactattttaataaattgatgaccagttgttaaaaaaaaaaaaacaaaaaaaaaaaaacaaaaaaaaaaaaaaaaaaaaaaaaaaaaaaaaaaaaaaaaaaaaaagaaaaaaaaaaaaaaaaaggggggggggggaaaaaaattccgggggggggccaacaattgtatgtatgcacccaggtttttgtattacaacaagggggggcccctacgaggggggggcgcactaaataaaacagcagcacgcgacggggcggcgcggggttaacaacaacaggctgggggagtgggggaaagaacaggtgcatatcgtgcagcacacctttgtggggacgaagaacaccccacatccttgtcgggggggtggggcaaacacatttggtgggccgacacaccacacccacgaagagaagattattaaaaacgccgccacgagagtactaaaataaaaactttgacagcggttaatatagggtgggtcacacacccagcaccgaattaaggcggctggaccaagaaaaaatggggccacggaagattatgattgtggagagatcatttataaaa

SEQ ID NO: 117946 - DNA, 1233 bp, Homo sapiens
  misc_feature (918)..(918): n is a, c, g, or t
  misc_feature (987)..(987): n is a, c, g, or t
  misc_feature (990)..(990): n is a, c, g, or t
  misc_feature (1170)..(1170): n is a, c, g, or t
gtggtgtatacgacggtgcgcgcgcacggggtggtccacgcgtgttttcgcggcgccttcttggggttctctcatgcccacaggtgtggcttgccacgagcggccggttgtgcctgccccggggtttgagaggggcggcgggtcttttgtatgactatccttgggggtggcgttccatcgtaggcgtaggggggtgggtcgtgggctggctctcgggtggttgtattcggcgggcggcccgcgctggttgtttgtgtgggtgcggttcgttgatcggctcgttgttgtcgggcgttgttgtggctgtgagtgtgtgagtgtgtgatattgatgtggtggttgtgtggtctgtgggatggatgtatgttttgttttagagacgcggtcgtaagggctgaggatttttggtccgcacgctcctgctcctgactcaccgctgttcgctctcgccgaggaacaagtcggtcaggaagcccgcgcgcaacagccatggcttttaaggataccggaaaaacacccgtggagccggaggtggcaattcaccgaattcgaatcaccctaacaagccgcaacgtaaaatccttggaaaaggtgtgtgctgacttgataagaggcgcaaaagaaaagaatctcaaagtgaaaggaccagttcgaatgcctaccaagactttgagaatcactacaagaaaaactccttgtggtgaaggttctaagacgtgggatcgtttccagatgagaattcacaagcgactcattgacttgcacagtccttctgagattgttaagcagattacttccatcagtattgagccaggagttgaggtggaagtcaccattgcagatgcttaagtcaactattttaataaattgatgaccagttgttaaaaaaaaaaaaaaaaaaaaaaagggggggggggnaaaaagattcccccgggggggcccaagttttaggggttacccaggttttttggtacaagggggccccanatnaggggggcggtataaatagacataaggaaaggggcccgttttaacacaggtcgtacgtgggaaacacgggatccctggggattcttgggggagagaacccttcttctgggggggtgcacatattggacaactccctacagagataaggcatcaaggtaatatacaactttagggttatgnggtgtacaacaggatagtgcggtgattggtaccggatgagttgagatttagagcgttgaatac

SEQ ID NO: 117947 - DNA, 1152 bp, Homo sapiens
gtggtgtatacgacggtgcgcgcgcacggggtggtccacgcgtgttttcgcggcgccttcttggggttctctcatgcccacaggtgtggcttgccacgagcggccggttgtgcctgccccggggtttgagaggggcggcgggtcttttgtatgactatccttgggggtggcgttccatcgtaggcgtaggggggtgggtcgtgggctggctctcgggtggttgtattcggcgggcggcccgcgctggttgtttgtgtgggtgcggttcgttgatcggctcgttgttgtcgggcgttgttgtggctgtgagtgtgtgagtgtgtgatattgatgtggtggttgtgtggtctgtgggatggatgtatgttttgttttagagacgcggtcgtaagggctgaggatttttggtccgcacgctcctgctcctgactcaccgctgttcgctctcgccgaggaacaagtcggtcaggaagcccgcgcgcaacagccatggcttttaaggataccggaaaaacacccgtggagccggaggtggcaattcaccgaattcgaatcaccctaacaagccgcaacgtaaaatccttggaaaaggtgtgtgctgacttgataagaggcgcaaaagaaaagaatctcaaagtgaaaggaccagttcgaatgcctaccaagactttgagaatcactacaagaaaaactccttgtggtgaaggttctaagacgtgggatcgtttccagatgagaattcacaagcgactcattgacttgcacagtccttctgagattgttaagcagattacttccatcagtattgagccaggagttgaggtggaagtcaccattgcagatgcttaagtcaactattttaataaattgatgaccagttgttaaaaaaaaaaaaaaaaaaaaaaagcccgggaactagttccctctctccccccgggccaatcttgggggtggacctccctctcagttagggactccacgcggtttcctccctcccctctcttccttcccaatattaattccccattcctcccagatgctcccaaatttcttggccaattgagcgggccggggtgggagggggcgcagtggggctgttgccctggggtgttgcgctgatgtggggtgctagactagtggctctgacgcgaa

SEQ ID NO: 117948 - DNA, 1323 bp, Homo sapiens
gtggtgtatacgacggtgcgcgcgcacggggtggtccacgcgtgttttcgcggcgccttcttggggttctctcatgcccacaggtgtggcttgccacgagcggccggttgtgcctgccccggggtttgagaggggcggcgggtcttttgtatgactatccttgggggtggcgttccatcgtaggcgtaggggggtgggtcgtgggctggctctcgggtggttgtattcggcgggcggcccgcgctggttgtttgtgtgggtgcggttcgttgatcggctcgttgttgtcgggcgttgttgtggctgtgagtgtgtgagtgtgtgatattgatgtggtggttgtgtggtctgtgggatggatgtatgttttgttttagagacgcggtcgtaagggctgaggatttttggtccgcacgctcctgctcctgactcaccgctgttcgctctcgccgaggaacaagtcggtcaggaagcccgcgcgcaacagccatggcttttaaggataccggaaaaacacccgtggagccggaggtggcaattcaccgaattcgaatcaccctaacaagccgcaacgtaaaatccttggaaaaggtgtgtgctgacttgataagaggcgcaaaagaaaagaatctcaaagtgaaaggaccagttcgaatgcctaccaagactttgagaatcactacaagaaaaactccttgtggtgaaggttctaagacgtgggatcgtttccagatgagaattcacaagcgactcattgacttgcacagtccttctgagattgttaagcagattacttccatcagtattgagccaggagttgaggtggaagtcaccattgcagatgcttaagtcaactattttaataaattgatgaccagttgttaaaaaaaaaaaaaaaaaaaaaactcgagtttttttttggttttttgtttttgtttttgtttttttttttttgtttttttttttttttttttttttttttttttttttttttgtttgttttttttatttgttttttttttgttgtttcttgtttgatccttggcacaaggcaggcgagatcacccaatcctgggccagagcggcccacagtaaaacggagcggggctggcgacaacactggaccaggtcttatataggaagccgggggcgcgccgccacgcattcgagggtggagacgtagacacgcgcaaaaaattcagagcagcgccagaaaatagaaacaccaggactcgcacaggagctctggaaaacacgcgacagaaaaaagcatccccacataggtaggaggagaagagtgacccccaaacaggagcagcaaag

SEQ ID NO: 117949 - DNA, 1214 bp, Homo sapiens
gtggtgtatacgacggtgcgcgcgcacggggtggtccacgcgtgttttcgcggcgccttcttggggttctctcatgcccacaggtgtggcttgccacgagcggccggttgtgcctgccccggggtttgagaggggcggcgggtcttttgtatgactatccttgggggtggcgttccatcgtaggcgtaggggggtgggtcgtgggctggctctcgggtggttgtattcggcgggcggcccgcgctggttgtttgtgtgggtgcggttcgttgatcggctcgttgttgtcgggcgttgttgtggctgtgagtgtgtgagtgtgtgatattgatgtggtggttgtgtggtctgtgggatggatgtatgttttgttttagagacgcggtcgtaagggctgaggatttttggtccgcacgctcctgctcctgactcaccgctgttcgctctcgccgaggaacaagtcggtcaggaagcccgcgcgcaacagccatggcttttaaggataccggaaaaacacccgtggagccggaggtggcaattcaccgaattcgaatcaccctaacaagccgcaacgtaaaatccttggaaaaggtgtgtgctgacttgataagaggcgcaaaagaaaagaatctcaaagtgaaaggaccagttcgaatgcctaccaagactttgagaatcactacaagaaaaactccttgtggtgaaggttctaagacgtgggatcgtttccagatgagaattcacaagcgactcattgacttgcacagtccttctgagattgttaagcagattacttccatcagtattgagccaggagttgaggtggaagtcaccattgcagatgcttaagtcaactattttaataaattgatgaccagttgttaaaaaaaaaaaaaaaaaacctccggactctttctctcacccattctaatcgcaatggcattcctaatgcttaccgaacgaataattctagggctatatctacataccccataagtgcccaagcgttttagcccctaacgggctactaacaaccctttggtattagcccataaaagtctttcaccaaagagcccctaaaaaccggcaattttacattacctttaaattaccgccaaatttgtttcccctgctctttattaacccctccatatcacccttgacccacatcctctatttaccatctaccagtacctctaaggagacacaacccg

SEQ ID NO: 117950 - DNA, 951 bp, Homo sapiens
gtggtgtatacgacggtgcgcgcgcacggggtggtccacgcgtgttttcgcggcgccttcttggggttctctcatgcccacaggtgtggcttgccacgagcggccggttgtgcctgccccggggtttgagaggggcggcgggtcttttgtatgactatccttgggggtggcgttccatcgtaggcgtaggggggtgggtcgtgggctggctctcgggtggttgtattcggcgggcggcccgcgctggttgtttgtgtgggtgcggttcgttgatcggctcgttgttgtcgggcgttgttgtggctgtgagtgtgtgagtgtgtgatattgatgtggtggttgtgtggtctgtgggatggatgtatgttttgttttagagacgcggtcgtaagggctgaggatttttggtccgcacgctcctgctcctgactcaccgctgttcgctctcgccgaggaacaagtcggtcaggaagcccgcgcgcaacagccatggcttttaaggataccggaaaaacacccgtggagccggaggtggcaattcaccgaattcgaatcaccctaacaagccgcaacgtaaaatccttggaaaaggtgtgtgctgacttgataagaggcgcaaaagaaaagaatctcaaagtgaaaggaccagttcgaatgcctaccaagactttgagaatcactacaagaaaaactccttgtggtgaaggttctaagacgtgggatcgtttccagatgagaattcacaagcgactcattgacttgcacagtccttctgagattgttaagcagattacttccatcagtattgagccaggagttgaggtggaagtcaccattgcagatgcttaagtcaactattttaataaattgatgaccagttgttaagggcccattccatgtcggccgcttgggccaagcgtctttagccttgggcgtttatgcatgcgcccc

SEQ ID NO: 117951 - DNA, 863 bp, Homo sapiens
gtggtgtatacgacggtgcgcgcgcacggggtggtccacgcgtgttttcgcggcgccttcttggggttctctcatgcccacaggtgtggcttgccacgagcggccggttgtgcctgccccggggtttgagaggggcggcgggtcttttgtatgactatccttgggggtggcgttccatcgtaggcgtaggggggtgggtcgtgggctggctctcgggtggttgtattcggcgggcggcccgcgctggttgtttgtgtgggtgcggttcgttgatcggctcgttgttgtcgggcgttgttgtggctgtgagtgtgtgagtgtgtgatattgatgtggtggttgtgtggtctgtgggatggatgtatgttttgttttagagacgcggtcgtaagggctgaggatttttggtccgcacgctcctgctcctgactcaccgctgttcgctctcgccgaggaacaagtcggtcaggaagcccgcgcgcaacagccatggcttttaaggataccggaaaaacacccgtggagccggaggtggcaattcaccgaattcgaatcaccctaacaagccgcaacgtaaaatccttggaaaaggtgtgtgctgacttgataagaggcgcaaaagaaaagaatctcaaagtgaaaggaccagttcgaatgcctaccaagactttgagaatcactacaagaaaaactccttgtggtgaaggttctaagacgtgggatcgtttccagatgagaattcacaagcgactcattgacttgcacagtccttctgagattgttaagcagattacttccatcagtattgagccaggagcaccaccaactggtgaaacaatgaaaagacagtttacactgagata

SEQ ID NO: 117952 - DNA, 1012 bp, Homo sapiens
gtggtgtatacgacggtgcgcgcgcacggggtggtccacgcgtgttttcgcggcgccttcttggggttctctcatgcccacaggtgtggcttgccacgagcggccggttgtgcctgccccggggtttgagaggggcggcgggtcttttgtatgactatccttgggggtggcgttccatcgtaggcgtaggggggtgggtcgtgggctggctctcgggtggttgtattcggcgggcggcccgcgctggttgtttgtgtgggtgcggttcgttgatcggctcgttgttgtcgggcgttgttgtggctgtgagtgtgtgagtgtgtgatattgatgtggtggttgtgtggtctgtgggatggatgtatgttttgttttagagacgcggtcgtaagggctgaggatttttggtccgcacgctcctgctcctgactcaccgctgttcgctctcgccgaggaacaagtcggtcaggaagcccgcgcgcaacagccatggtgaggcggcagtcggcggcgggcggcgcaacgcagggctcgggcgccggggggaccccggtttcgagttcgtgctcctgagggcagatgccggggcgtgtaggggcggaaaggcgctcctgaaatggcttttaaggataccggaaaaacacccgtggagccggaggtggcaattcaccgaattcgaatcaccctaacaagccgcaacgtaaaatccttggaaaaggtgtgtgctgacttgataagaggcgcaaaagaaaagaatctcaaagtgaaaggaccagttcgaatgcctaccaagactttgagaatcactacaagaaaaactccttgtggtgaaggttctaagacgtgggatcgtttccagatgagaattcacaagcgactcattgacttgcacagtccttctgagattgttaagcagattacttccatcagtattgagccaggagttgaggtggaagtcaccattgcagatgcttaagtcaactattttaataaattgatgaccagttgttaa

SEQ ID NO: 117953 - DNA, 2130 bp, Homo sapiens
  misc_feature (830)..(830): n is a, c, g, or t
  misc_feature (832)..(832): n is a, c, g, or t
gtggtgtatacgacggtgcgcgcgcacggggtggtccacgcgtgttttcgcggcgccttcttggggttctctcatgcccacaggtgtggcttgccacgagcggccggttgtgcctgccccggggtttgagaggggcggcgggtcttttgtatgactatccttgggggtggcgttccatcgtaggcgtaggggggtgggtcgtgggctggctctcgggtggttgtattcggcgggcggcccgcgctggttgtttgtgtgggtgcggttcgttgatcggctcgttgttgtcgggcgttgttgtggctgtgagtgtgtgagtgtgtgatattgatgtggtggttgtgtggtctgtgggatggatgtatgttttgttttagagacgcggtcgtaagggctgaggatttttggtccgcacgctcctgctcctgactcaccgctgttcgctctcgccgaggaacaagtcggtcaggaagcccgcgcgcaacagccatggcttttaaggataccggaaaaacacccgtggagccggaggtggcaattcaccgaattcgaatcaccctaacaagccgcaacgtaaaatccttggaaaaggtgtgtgctgacttgataagaggcgcaaaagaaaagaatctcaaagtgaaaggaccagttcgaatgcctaccaagactttgagaatcactacaagacacaagcgactcattgacttgcacagtccttctgagattgttaagcagattacttccatcagtattgagccaggagttgatcgaatctacagatgcagaacccatggatacagagggccagcagtacactttgagaagtgtantngaatccccggggacatgtcctttttaactgcattctcctccgccaaaaaagtgaccaagcagagtctttctctgtcacccaggctggagtgcaatggcgtgatctcagctcactgcaacctctgcctcctgggttcaagtgattctcgtgtctcagcctcctgagtagctgagactacaggtgtgcaccagtgttcccagctgatttttgtattttatgtagagatggggttatgccattttggccaggctagtctcgaactcctgagctcaggtgatacacacacctcagcaaatcttttaaattatacattctgtgatatttccttgactttcttatccagcacttgtattgattatttttcattttgataatgttgggtttttaaaaactcctttatgatggaaaatttcaaacatacacaaaagtagagagagaatggtataataaacccactcagttttaaggattgtcaactaataccagttttatttcatgtatgactccaacaacttccccaaccagccttcagattatttgaaagcaaatttcagacatcgtattttactcatacattttctagtatctaaatctgaaagagactcttttctaacagttctgtagcattaattatactcatactgttgtgcaacaaatatccagaaatcttttgtcttgcgaaactgaacctcttacccattaaacactaactcccttttttttcaccctgaaccattggcaaccacaattttactttctttttctgtgagtttgattacttgatacttcatgtgagtggaatcatataatatttgtctttttgtgactgacattttatttagcttaatgtcttcaagtttgacccataccatatcatgtggcaggatttttccctttttttttttttcagacggagtctcgctctgtcgcccaggctggagtgcagtggcgcgatctcggctcactgcaagctccgcctcccgggttcatgccattctcctgcctcagcctcctgagtagctgggactacaggcgcccaccactaaacccggctaatttttttgtatttttagtagagacagagtttcaccatgttaatgaggatggtctccatctcctgacctcgtgattcgctcgtctcggcctcccaaagtgctgggattacaggcgtgagccaccgcgcccggccatgatttttcttcttttttaaggctgaataatatctcaatgtatgtatatataccactttttaaaaattcattcatctgttggacatttagattgttcccacctcttgg

SEQ ID NO: 117954 - DNA, 1353 bp, Homo sapiens
gtggtgtatacgacggtgcgcgcgcacggggtggtccacgcgtgttttcgcggcgccttcttggggttctctcatgcccacaggtgtggcttgccacgagcggccggttgtgcctgccccggggtttgagaggggcggcgggtcttttgtatgactatccttgggggtggcgttccatcgtaggcgtaggggggtgggtcgtgggctggctctcgggtggttgtattcggcgggcggcccgcgctggttgtttgtgtgggtgcggttcgttgatcggctcgttgttgtcgggcgttgttgtggctgtgagtgtgtgagtgtgtgatattgatgtggtggttgtgtggtctgtgggatggatgtatgttttgttttagagacgcggtcgtaagggctgaggatttttggtccgcacgctcctgctcctgactcaccgctgttcgctctcgccgaggaacaagtcggtcaggaagcccgcgcgcaacagccatggcttttaaggataccggaaaaacacccgtggagccggaggtggcaattcaccgaattcgaatcaccctaacaagccgcaacgtaaaatccttggaaaaggtgtgtgctgacttgataagaggcgcaaaagaaaagaatctcaaagtgaaaggaccagttcgaatgcctaccaagggtaaagtaaatcggaggggcaggaagtaggagttgcttccggatgttgcataaattcaggttctttaaggagttcggctgccaaaattgttaacactgatgctgtctacaaacgcacatagaaatcggtggtagattgcggttcctagtaagtagctaatgtttagatatgattgttgaattattgttgctgtgttcttggtgtgctttggtgcttaacaggcgcaagctctaagggtggtgtcctagcacagtgaaaacagacctggcattttcaacccatggtacctgaaaatctattagtgtaaattggaatcataccaaagggaaactaatgaaatgattagaagtaatgattttccagatgttctagggataagtataaaacgataaacacttggtttcctttgtcttttgttacagactttgagaatcactacaagaaaaactccttgtggtgaaggttctaagacgtgggatcgtttccagatgagaattcacaagcgactcattgacttgcacagtccttctgagattgttaagcagattacttccatcagtattgagccaggagttgaggtggaagtcaccattgcagatgcttaagtcaactattttaataaattgatgaccagttgttaaacaaccactagagcagggtccaggcctggggcggaggggaaatgg

SEQ ID NO: 117955 - DNA, 1177 bp, Homo sapiens
gtggtgtatacgacggtgcgcgcgcacggggtggtccacgcgtgttttcgcggcgccttcttggggttctctcatgcccacaggtgtggcttgccacgagcggccggttgtgcctgccccggggtttgagaggggcggcgggtcttttgtatgactatccttgggggtggcgttccatcgtaggcgtaggggggtgggtcgtgggctggctctcgggtggttgtattcggcgggcggcccgcgctggttgtttgtgtgggtgcggttcgttgatcggctcgttgttgtcgggcgttgttgtggctgtgagtgtgtgagtgtgtgatattgatgtggtggttgtgtggtctgtgggatggatgtatgttttgttttagagacgcggtcgtaagggctgaggatttttggtccgcacgctcctgctcctgactcaccgctgttcgctctcgccgaggaacaagtcggtcaggaagcccgcgcgcaacagccatggcttttaaggataccggaaaaacacccgtggagccggaggtggcaattcaccgaattcgaatcaccctaacaagccgcaacgtaaaatccttggaaaaggggtcagtgcattcgttatgcgggggggagggggaattgggcgaaaagcgacgagctttactcgttaatgttagtgtagaaggtggactgcaagaactaaagtgacaagttacttaaaaaagtaaagcgtggcttaaaattgcttttactgtcatacagctggcgatgaggaggtacctattgtgttgagtaacggtgataattttatacgctattctgagccagcagaagtgaaggccttaagccgattttaattgtttcgattatactgagaggtcttttatttcctgtagtgtgtgctgacttgataagaggcgcaaaagaaaagaatctcaaagtgaaaggaccagttcgaatgcctaccaagactttgagaatcactacaagaaaaactccttgtggtgaaggttctaagacgtgggatcgtttccagatgagaattcacaagcgactcattgacttgcacagtccttctgagattgttaagcagattacttccatcagtattgagccaggagttgaggtggaagtcaccattgcagatgcttaagtcaactattttaataaattgatgaccagttgttaa

SEQ ID NO: 117956 - DNA, 691 bp, Homo sapiens
gtggtgtatacgacggtgcgcgcgcacggggtggtccacgcgtgttttcgcggcgccttcttggggttctctcatgcccacaggtgtggcttgccacgagcggccggttgtgcctgccccggggtttgagaggggcggcgggtcttttgtatgactatccttgggggtggcgttccatcgtaggcgtaggggggtgggtcgtgggctggctctcgggtggttgtattcggcgggcggcccgcgctggttgtttgtgtgggtgcggttcgttgatcggctcgttgttgtcgggcgttgttgtggctgtgagtgtgtgagtgtgtgatattgatgtggtggttgtgtggtctgtgggatggatgtatgttttgttttagagacgcggtcgtaagggctgaggatttttggtccgcacgctcctgctcctgactcaccgctgttcgctctcgccgaggaacaagtcggtcaggaagcccgcgcgcaacagccatggcttttaaggataccggaaaaacacccgtggagccggaggtggcaattcaccgaattcgaatcaccctaacaagccgcaacgtaaaatccttggaaaaggtgtgtgctgacttgataagaggcgcaaaagaaaagaatctcaaagtgaaaggaccagttcgaatgcctaccaagcgacgcgattccgccccgcacgccc

SEQ ID NO: 117957 - DNA, 1398 bp, Homo sapiens
gtggtgtatacgacggtgcgcgcgcacggggtggtccacgcgtgttttcgcggcgccttcttggggttctctcatgcccacaggtgtggcttgccacgagcggccggttgtgcctgccccggggtttgagaggggcggcgggtcttttgtatgactatccttgggggtggcgttccatcgtaggcgtaggggggtgggtcgtgggctggctctcgggtggttgtattcggcgggcggcccgcgctggttgtttgtgtgggtgcggttcgttgatcggctcgttgttgtcgggcgttgttgtggctgtgagtgtgtgagtgtgtgatattgatgtggtggttgtgtggtctgtgggatggatgtatgttttgttttagagacgcggtcgtaagggctgaggatttttggtccgcacgctcctgctcctgactcaccgctgttcgctctcgccgaggaacaagtcggtcaggaagcccgcgcgcaacagccatggtgaggcggcagtcggcggcgggcggcgcaacgcagggctcgggcgccggggggaccccggtttcgagttcgtgctcctgagggcagatgccggggcgtgtaggggcggaaaggcgctcctgaaatggtggggaaacgcgggaagcttccggaagctgcctttctccagaagtggcagaccatttttggcttattgttctttttcatgtatctaataataggcttttaaggataccggaaaaacacccgtggagccggaggtggcaattcaccgaattcgaatcaccctaacaagccgcaacgtaaaatccttggaaaaggggtcagtgcattcgttatgcgggggggagggggaattgggcgaaaagcgacgagctttactcgttaatgttagtgtagaaggtggactgcaagaactaaagtgacaagttacttaaaaaagtaaagcgtggcttaaaattgcttttactgtcatacagctggcgatgaggaggtacctattgtgttgagtaacggtgataattttatacgctattctgagccagcagaagtgaaggccttaagccgattttaattgtttcgattatactgagaggtcttttatttcctgtagtgtgtgctgacttgataagaggcgcaaaagaaaagaatctcaaagtgaaaggaccagttcgaatgcctaccaagactttgagaatcactacaagaaaaactccttgtggtgaaggttctaagacgtgggatcgtttccagatgagaattcacaagcgactcattgacttgcacagtccttctgagattgttaagcagattacttccatcagtattgagccaggagttgaggtggaagtcaccattgcagatgcttaagtcaactattttaataaattgatgaccagttgttaa

SEQ ID NO: 117958 - DNA, 1435 bp, Homo sapiens
gtggtgtatacgacggtgcgcgcgcacggggtggtccacgcgtgttttcgcggcgccttcttggggttctctcatgcccacaggtgtggcttgccacgagcggccggttgtgcctgccccggggtttgagaggggcggcgggtcttttgtatgactatccttgggggtggcgttccatcgtaggcgtaggggggtgggtcgtgggctggctctcgggtggttgtattcggcgggcggcccgcgctggttgtttgtgtgggtgcggttcgttgatcggctcgttgttgtcgggcgttgttgtggctgtgagtgtgtgagtgtgtgatattgatgtggtggttgtgtggtctgtgggatggatgtatgttttgttttagagacgcggtcgtaagggctgaggatttttggtccgcacgctcctgctcctgactcaccgctgttcgctctcgccgaggaacaagtcggtcaggaagcccgcgcgcaacagccatggtgaggcggcagtcggcggcgggcggcgcaacgcagggctcgggcgccggggggaccccggtttcgagttcgtgctcctgagggcagatgccggggcgtgtaggggcggaaaggcgctcctgaaatggcttttaaggataccggaaaaacacccgtggagccggaggtggcaattcaccgaattcgaatcaccctaacaagccgcaacgtaaaatccttggaaaaggtgtgtgctgacttgataagaggcgcaaaagaaaagaatctcaaagtgaaaggaccagttcgaatgcctaccaagggtaaagtaaatcggaggggcaggaagtaggagttgcttccggatgttgcataaattcaggttctttaaggagttcggctgccaaaattgttaacactgatgctgtctacaaacgcacatagaaatcggtggtagattgcggttcctagtaagtagctaatgtttagatatgattgttgaattattgttgctgtgttcttggtgtgctttggtgcttaacaggcgcaagctctaagggtggtgtcctagcacagtgaaaacagacctggcattttcaacccatggtacctgaaaatctattagtgtaaattggaatcataccaaagggaaactaatgaaatgattagaagtaatgattttccagatgttctagggataagtataaaacgataaacacttggtttcctttgtcttttgttacagactttgagaatcactacaagaaaaactccttgtggtgaaggttctaagacgtgggatcgtttccagatgagaattcacaagcgactcattgacttgcacagtccttctgagattgttaagcagattacttccatcagtattgagccaggagttgaggtggaagtcaccattgcagatgcttaagtcaactattttaataaattgatgaccagttgttaa

SEQ ID NO: 117959 - DNA, 811 bp, Homo sapiens
gtggtgtatacgacggtgcgcgcgcacggggtggtccacgcgtgttttcgcggcgccttcttggggttctctcatgcccacaggtgtggcttgccacgagcggccggttgtgcctgccccggggtttgagaggggcggcgggtcttttgtatgactatccttgggggtggcgttccatcgtaggcgtaggggggtgggtcgtgggctggctctcgggtggttgtattcggcgggcggcccgcgctggttgtttgtgtgggtgcggttcgttgatcggctcgttgttgtcgggcgttgttgtggctgtgagtgtgtgagtgtgtgatattgatgtggtggttgtgtggtctgtgggatggatgtatgttttgttttagagacgcggtcgtaagggctgaggatttttggtccgcacgctcctgctcctgactcaccgctgttcgctctcgccgaggaacaagtcggtcaggaagcccgcgcgcaacagccatggcttttaaggataccggaaaaacacccgtggagccggaggtggcaattcaccgaattcgaatcaccctaacaagccgcaacgtaaaatccttggaaaaggactttgagaatcactacaagaaaaactccttgtggtgaaggttctaagacgtgggatcgtttccagatgagaattcacaagcgactcattgacttgcacagtccttctgagattgttaagcagattacttccatcagtattgagccaggagttgaggtggaagtcaccattgcagatgcttaagtcaactattttaataaattgatgaccagttgttaa

SEQ ID NO: 117960 - DNA, 786 bp, Homo sapiens
gtggtgtatacgacggtgcgcgcgcacggggtggtccacgcgtgttttcgcggcgccttcttggggttctctcatgcccacaggtgtggcttgccacgagcggccggttgtgcctgccccggggtttgagaggggcggcgggtcttttgtatgactatccttgggggtggcgttccatcgtaggcgtaggggggtgggtcgtgggctggctctcgggtggttgtattcggcgggcggcccgcgctggttgtttgtgtgggtgcggttcgttgatcggctcgttgttgtcgggcgttgttgtggctgtgagtgtgtgagtgtgtgatattgatgtggtggttgtgtggtctgtgggatggatgtatgttttgttttagagacgcggtcgtaagggctgaggatttttggtccgcacgctcctgctcctgactcaccgctgttcgctctcgccgaggaacaagtcggtcaggaagcccgcgcgcaacagccatggcttttaaggataccggaaaaacacccgtggagccggaggtggcaattcaccgaattcgaatcaccctaacaagttgacaaatcctaaaggcctgggggaggagtggtctgtctttttacaggggccaaaaagagtatttcttttgtgagggcccgttttgttgccttctcatgacttttagaatcccttcaagaaaaacctacctgtggtggaaggtttttaaacgagggggtcgtttttcgttttagcaatttaaaatctatttattgaacttgtccttgcccctttttgag

SEQ ID NO: 117961 - DNA, 646 bp, Homo sapiens
  misc_feature (533)..(533): n is a, c, g, or t
  misc_feature (608)..(608): n is a, c, g, or t
gtggtgtatacgacggtgcgcgcgcacggggtggtccacgcgtgttttcgcggcgccttcttggggttctctcatgcccacaggtgtggcttgccacgagcggccggttgtgcctgccccggggtttgagaggggcggcgggtcttttgtatgactatccttgggggtggcgttccatcgtaggcgtaggggggtgggtcgtgggctggctctcgggtggttgtattcggcgggcggcccgcgctggttgtttgtgtgggtgcggttcgttgatcggctcgttgttgtcgggcgttgttgtggctgtgagtgtgtgagtgtgtgatattgatgtggtggttgtgtggtctgtgggatggatgtatgttttgttttagagacgcggtcgtaagggctgaggatttttggtccgcacgctcctgctcctgactcaccgctgttcgctctcgccgaggaacaagtcggtcaggaagcccgcgcgcaacagccatgcttttaaggataccggatgtcatctttgtatttggattcanaactcattttggtggtggcaagacaactggctttggcatgatttatgattccctggattatgcaaagaaaaatgnacccaaacatagacttgcaagacatggcctgtatgaga

SEQ ID NO: 117962 - DNA, 2110 bp, Homo sapiens
agaagctctacattgacagttgtgcttgaagaaacctaggctccatcaacactgaattgcaagatgtgcagaggatcatggtggccaatatcgaagaagtgttacaacgaggagaagcactctcagcattggattcaaaggctaacaatttgtccagtctgtccaagaaataccgccaggatgcgaagtacttgaacatgcgttccacttacgccaaacttgcagcagtagctgtatttttcatcatgttaatagtgtatgtccgattctggtggctgtgaaataatgaatacagtcactggtaagggagaacctagaacccagtaggtgtatattttcaggaaactgagctcacagagatgtgtattagaatccaagtggaacttctgcctctaaagaccttgcaagaaaagagatgccctgaaaatgaaaggttgcacctcatttaatgaagcttaaccctatgtagaaagtctctttcgggggcagaggctttctctgggtgccaagccatatatattagggaatagtagattgttaatttcgttttttccctcccagtgcattttaaaaacagcactggctggggcattctcattctctgatggagccatcaatgagatttaacttagtcaacctgtgctagcaacattctgaaattccttcaaagaaggcagtcctttgggaaggtgttttttttttttttttttttttgactctaatcaacattccttttgttggtgacatttgtgattttcagtaatctgagtttttgatggccttttaaacaagactccagtatgtgaaggttaattgctgtgctccacagatcttgtctattggcccctgtagaaagttaacctttgttgttttccttttataatttgcttattgcacaattgctttagggtaagtgaattatattaagatgccttgaaattatagcactccttgattaagaagctaaaatgtttctctcatttactccttaaacaaaagacttaaattagtttgggtcattattacttttattttgcagcatttggtttgttattagcgtaagagcaagtataggatatggagaggcccctggcttcatgagaacaaaggcaggcccaggttataattacagctttctcctgccccttctttactttctctaccacagttttctccactgtttgttttcctcttgccacaatttgctaacatttaaaaaattttcctgcacccagtagtttcatatcctgtagacatcctcttaggacattctcaaatttcaaaataaaaaatattcatctatgtagttaattaaagttaaagtttttgcagatcaactactcaaactactaaatacatttacctgagaaaaaagtctctgagagcacttcattcctgttttagttcgtgtaaattctctgagaatgttctggagatagatactcatttacagtggtttctattaactaattaaagtacccatgattttttccttttctgctcagggatgatggagatttccttttaccttttttaatgtttttaatggggaaaataggccttttaaatattattgccagggtctgcaatataacttaaaattcctgtacatactgcaaatatttctttaaattgcacaggaaaatgagcgaactttttatttcttaatatctttggcaaaaaactttaaccagtaagcaattttataaccctgagggatcatcaaagatactatcctgattcctggtaaggaaaaatatattatttccttataacaaggcaaggagaaatgctattttattcctgataatttatataactagaataatttttttcctttcttttatggacctaaatctgccaattgggaattttgtgcatgaaatatgaagttactttttatagataatcagtgcttttaagtccctaaaaggctcctgctgaagtaatgatgatgttaataataaaagcctttgaaaggctgaaaacctacatagtggtaccatagtatttggagcttctataggagtggagaggggcagctcattgttgagagttgcatgctgcaacctaatggtcagcaatgaaataaatacttgtagaatgttca

SEQ ID NO: 117963 - DNA, 2284 bp, Homo sapiens
agaagctctacattgacagttgtgcttgaagaaacctaggctccatcaacactgaattgcaagatgtgcagaggatcatggtggccaatatcgaagaagtgttacaacgaggagaagcactctcagcattggattcaaaggctaacaatttgtccagtctgtccaagaaataccgccaggatgcgaagtacttgaacatgcgttccacttacgccaaacttgcagcagtagctgtatttttcatcatgttaatagtgtatgtccgattctggtggctgtgaaataatgaatacagtcactggtaagggagaacctagaacccagtaggtgtatattttcaggaaactgagctcacagagatgtgtattagaatccaagtggaacttctgcctctaaagaccttgcaagaaaagagatgccctgaaaatgaaaggttgcacctcatttaatgaagcttaaccctatgtagaaagtctctttcgggggcagaggctttctctgggtgccaagccatatatattagggaatagtagattgttaatttcgttttttccctcccagtgcattttaaaaacagcactggctggggcattctcattctctgatggagccatcaatgagatttaacttagtcaacctgtgctagcaacattctgaaattccttcaaagaaggcagtcctttgggaaggtgttttttttttttttttttttttgactctaatcaacattccttttgttggtgacatttgtgattttcagtaatctgagtttttgatggccttttaaacaagactccagtatgtgaaggttaattgctgtgctccacagatcttgtctattggcccctgtagaaagttaacctttgttgttttccttttataatttgcttattgcacaattgctttagggtaagtgaattatattaagatgccttgaaattatagcactccttgattaagaagctaaaatgtttctctcatttactccttaaacaaaagacttaaattagtttgggtcattattacttttattttgcagcatttggtttgttattagcgtaagagcaagtataggatatggagaggcccctggcttcatgagaacaaaggcaggcccaggttataattacagctttctcctgccccttctttactttctctaccacagttttctccactgtttgttttcctcttgccacaatttgctaacatttaaaaaattttcctgcacccagtagtttcatatcctgtagacatcctcttaggacattctcaaatttcaaaataaaaaatattcatctatgtagttaattaaagttaaagtttttgcagatcaactactcaaactactaaatacatttacctgagaaaaaagtctctgagagcacttcattcctgttttagttcgtgtaaattctctgagaatgttctggagatagatactcatttacagtggtttctattaactaattaaagtacccatgattttttccttttctgctcagggatgatggagatttccttttaccttttttaatgtttttaatggggaaaataggccttttaaatattattgccagggtctgcaatataacttaaaattcctgtacatactgcaaatatttctttaaattgcacaggaaaatgagcgaactttttatttcttaatatctttggcaaaaaactttaaccagtaagcaattttataaccctgagggatcatcaaagatactatcctgattcctggtaaggaaaaatatattatttccttataacaaggcaaggagaaatgctattttattcctgataatttatataactagaataatttttttcctttcttttatggacctaaatctgccaattgggaattttgtgcatgaaatatgaagttactttttatagataatcagtgcttttaagtccctaaaaggctcctgctgaagtaatgatgatgttaataataaaagcctttgaaaggctgaaaacctacatagtggtaccatagtatttggagcttctataggagtggagaggggcagctcattgttgagagttgcatgctgcaacctaatggtcagcaatgaaataaatacttgtagaatgttcactcacttcagtgtgaagttttgttatctagttaatttatatacatatatcctttgtagatacatttctatctaatcttgttgagctaattaagaaataaggggtggggtaattgtcaacaaagggagaagaaagtggtttaagatcagggcagcagaaaaattagagaacaaga

SEQ ID NO: 117964 - DNA, 298 bp, Homo sapiens
gattacaggtgtgagccactgcacctggccaactcagaacttttaatttcctacctcagtactttgatggccatgaaagaaatggtcagttttcttcatcattctagatactttcattcagaaaaccaagaagctctacattgacagttgtgcttgaagaaacctaggctccatcaacactgaattgcaagatgtgcagaggatcatggtggccaatatcgaagaagtgttacaacgaggagaagcactctcaggtatctaaaagcaatgagtcttatgaagaaatggttctcattcc

SEQ ID NO: 117965 - DNA, 379 bp, Homo sapiens
cagagtacaagatgaacctggaacttcttgttctagacagtaaggaattactcaaataatgatggggacatgtcaaaaggacacaggaaccagctggcaagaactcccactatctaaatgtggagagatctgagcatcaaaataatgatggtaacagactataacccaaataaaataaaaatccatcatccaaactgatgaggatttatggattaagtcaaataaagagtaagttgaaagtttatggaaagcagtctcaaagtacctgctcaaaacacacttattacaaagggaaaaagaagaataagtttaagtggggaagcctggcagatgctgccttatcaagtgatcaaagttaacaccaccagcaatgggacaa

SEQ ID NO: 117966 - DNA, 833 bp, Homo sapiens
gttagaaagaatgctgtgatttacctataggcaaaagtttaaatgccttaactgtagacaaaagttaaaatatcttacttttttaaaaatttcattgccaaattgctttcccaaagaattgtgccaatatgtgaacatggccatttcattctaccttccccatcgttggttttttttttaattgcttgctattttaatagtgaaaaatgatgtcacatttttattgcatttctcaattacgtggttggccatattcccatatattaatcatagtatttggtatcttgtaaacattctttttatgtcctttgcccatttattcattgagaattttaagatttttttctcatccgttttatgagctcctgattaacaacctcctttatagcatcttatttgaatatttttatcaggctggttgtttcagcataatggggatttggtatagaccaatctattgataatttcttggtgatggtctttttttctaattaaatagccttccacctgaagacttacaaatatttttaaattcttctgctggttttatgacttcctgtgtccatgtttcctttcacttggtcagtgtatcacatgaagtgagtgttaaactggaactttttttccaatttcctcatctcatttatggagtcttttcctttccccttgggtttctgattttctttccacagctaacaatgttcggagaatttacctgtgtgctaggcacctgttctaaacactttatcggattatctcatttcttctcacaacaaccctgtaggaaatagaggccagaaacctaattgctgaagtgacacagctagtaagta

SEQ ID NO: 117967 - DNA, 542 bp, Homo sapiens
gaaaagattgagaaatcggatggttgccgtgtctgtgtggaaagaagtagacatgggagacttttcattttgttctgtactaagaaaaattcttctgccttgggatcctgttgatctgtgaccttacccccaaacctgtgctctctgaaacatgtgctgtgtccactcagggttaaatggattaagggcggtgcaagatgtgctttgttaaacagatgcttgaaggcagcatgctccttgtttctttgttcacttgtttatctgctgaccttccctccgctattgtcctatgaccctgccaaatccccctctatgagaaacacccaagaataatcaataaaaaaaaaagaccctgtcccctccaaaataaataaataaataaataaataaataaataaataaaaagactgagatttgctaagcacaaagttctttgattatgacacaaacccactgcatgtgtagtattcatctggactgagtacaaacaagatgctcatgctgtgtgctgtgctgtgagtaataaagtcctttgtctctga

SEQ ID NO: 117968 - DNA, 542 bp, Homo sapiens
gggttatataaccttgcttgacattagtttcctcatctataaaatagggatataatggtatctacctcattgagatgttaggggaattaaatgagaaagtgtgtggaacgtgcttagcacaatgccagacattattaccatgatagagcagttgatgaccttccaaaggcatttgagagcctcagggatatggaaaagggcagagaccagtggattgggcaaaaaagatgttttaatcacctcctattcaccccatccgaagagagagggatttccactgtagggttatggggatgctgaacacatgacacctgacagtggacagatgagcttgacagctgtagtcacatatactcacagcctggaagctgggataccacacaccacgtaggcccacacgggagctgcactcgagagcagagtaagccaccggcgaggggctgtgggaagcagcctttgtagtgtcaagagcggatggtgccccctggttctggccagaggatatgattggcttgtttgaataattccaggggctggctggg

SEQ ID NO: 117969 - DNA, 441 bp, Homo sapiens
tttcactgtaccttgaacatacatttatatcatattttgtgctttcatgtctgtgactggcagatagtctagaaatgactgctaaaatgaacaaagaacatttagatctgtgacaacttacaaatggagtgaagcatgacttctctatgaccaatttattatttctggaggaatatgaagaaatatttagagcatgaatgtaagcacatgctaccctccatttacctgctttgtaggatatattcctatgaatattactaaccacagaaaggttatatgaaaatgaaaagcattaagcaggcccacaacaaatggaggttattttttcacaaacttacctatagtaactaatttaagttacttcaaatttcttttctttttttttgagacagagtcttgctctgttgcccaggctggagtgcagtggcacaatctcggctc

SEQ ID NO: 117970 - DNA, 250 bp, Homo sapiens
gttttgactatgtttcagggaatctcagtctttgaggagattttaatctcacatgcaaattcagtggcttagtcagcttccccaccctgcaacttcttcctacaaacttcctagaggaagaccatcagcctggagactattcgctgtaaagattataacggtgagaataagctctaaaataaaacttcttgttgtgctttacctgacttttctgaagcaaggacacccattctcccagaaaacccaaagg

SEQ ID NO: 117971 - DNA, 412 bp, Homo sapiens
ggtaccagttcggaccattgacagcctggctaattttttgcatttttagtagagacggggtttcaccgtgttagccaggatggtctcgatctcctgacctcgtgatccgcccgcctcggcctcccaaagtgctgggattacaggcgtgagccaccgcgcccagttgaaatgagggtattctctaagaggcagatgacagaacctactgcaatgaatttgtcaagctcaaggctaaggacacagtccctccacaaggcagccttcacttcaaatgccaggtgcaactggggattcctgggccaccctcacttctgaccgcttggctgcattgagggttcccactaccccctgtggttcaataattcactagaatgactcatggaactcaggaaagtgccccgcctcataacga

SEQ ID NO: 117972 - DNA, 739 bp, Homo sapiens
gtccatgtgtacccattattagcttccacttataagtgagaacatgcagtatttggttttctgtttctgagttagctcacttaggataatggcctccagctccatccatgttgctgcaaaggacatgatttcattctttttttatggctgtgttgtactcattttttaattggattgtttgtatttctgctgttaagttgcaagagttctttatatattctggatggtggacccctgacagatagataatttgcaagtatagaaaaacacccattctgcagactgtcttttcactctcttgatagtgtcctttgatgcacaaaaggttttaattttgctgaaatacaatttatctatttttccttctgttgcttgtgattttggtgtcatatctaggaattcattaccaaatccagttcatgaagattttcccttatgttctcacctgagacacttataaatagttttagctcttatatttaagtctttgatcagtttttttagttaatttatatatatggtgcaaggtaagggtcaaacattattctctgtcagaattccagtgacttttttttttttggcagaaatggaaaaatcgattctgaaattcttacggaatctcaaggaatcccaaataatcaaaataatcttgaaaaagaaaaagttggtggactcacacatccccattttacaacttacaacaaagatttagtagtcaaaacagtgtaggatataaaaa

SEQ ID NO: 117973 - DNA, 661 bp, Homo sapiens
ggctctgtcctccagcgtgtgggctctgtgttttctctctctctctctcactcacacacacgcacgcacacacacacacacacataggaagccaggctcccctctgccctcagccactcgtggttcacaaaaatggcaaataataggagcactagaataggagctctccatcctggttcgagtctttccagctggggcagtttagcctttgcagaatttctcaagggtaacatcagcataatgacctctgtctgtaagcccgtgagtgtaagcctgtaaagtgctgtgctcatgcgagggatcaggtctgacctgggaaactaaaagcatcttcatggagcaagggtgctcctccagtgggggcgctcagtgagttctgcggtatgggtgacagtattcttgtgtggacagtattcatgtggtgattggggtaaatggccctcttttgcctggttttctgcctcggtcattgtgcatctgctgactgaacctgccttttggtcctagtaaagtacagatttcaggaaaagtgtacctggccccgggggtggccaacctctgtgtgacggctttaagcacagtgtgtcttgagggggcctgactccatctgaaaagtgcctgtctggatgtacctgtctataaccatggacctgcctccaag

SEQ ID NO: 117974 - DNA, 337 bp, Homo sapiens
agcggagggaagccaagggaagaaaattgcgcagttagttggctttttacagcacttacaggcaagcaggccttgggagtacaatgtgcccacaatgaggggcgttcagagcacaaaagagcagggatcgtggggctgtagccaggggccacccccgatctcgctcaagctgcctggcccctcctagctcgttcattttaacatcacctttcgctctggttggggcacctttcggtgagcagcggggttttccctggagctgtgccctggctgtggcccggccagtttccaaggcctggttttcatttgctgagagctgcttcccgcagacagctcc

SEQ ID NO: 117975 - DNA, 571 bp, Homo sapiens
ccactagaggatccccccctggtatacccaccttaagactggatagtcgcacctttcccaggctctcataatgcccagtatttttccctacggtaacaccatattctaccattccccattagaactgagcctctagcataatacttgcttcgttgcacaggctaaataaataaaaaataaaggaatgactcttcctttataattatgacaagatatatattttggtaagaggggaaaaaattatgtaagtatttattggctccaacgtagggtttctacttcttatagaatttccagtggaatatatatataatgctccaggtctccataaccttttactcagagttctgggtaggatactctgaacttttaaagcatcctcagatcctcagggaacatagaatagggtatcacttctagatattcaactctaaaagtctgcctaagagtttttagaaaatacagaattgaagtcaatttttctctttttttttttttttggagacagagtctaggctggagtgcagtggcacgattccagctcattgcaacctccacctcccgggttcaa

SEQ ID NO: 117976 - DNA, 233 bp, Homo sapiens
tcactgcctccacagttctgtcttttccaggctgtctgtagttggagtcccagtgttgcaggcttttcagactggcttcttccacttcacaaccagcatttaaggttcctgcatgtcagttgggcacggtggcttacataatcccagtgcactgggaggccgaggcaggaggatcacttgagcccaggagttccagatcagcctgggcaacataacaagaccctgtctctacc

SEQ ID NO: 117977 - DNA, 728 bp, Homo sapiens
gcaagtttctacaaagttacaacagtggggaggcgccacaacttcactgccattttgtgaggtgctgccgcccctcctccggcaaggaaacaatgaccgataaaacagagaaggtggctgtagatcctgaaactgtgtttaaacgtcccaggaatgtgacagtccttcgtatcagaaaaggcagaggatggccctgttggcaaggaaacaaggagcaggagacagccttattgcaggctctgccatgtccaaagaaaagaagcttatgacaggacatgctattccacccagccaattggattctcagattgatgacttcactggtttcagcaaagatgggatgatgcagaaacctggtagcaatgcacctgtgggaggaaatgttaccagcaatttctctggagatgacctagaatgcagaggaatagcctcctctcccaaaagccaacaagaaattaatgctgatataaaatgtcaagtagtgaaggaaatccgatgccttggacgaaaatatgaaaaaatcttcgaaatgcttgaaggagtgcaaggacctactgcagtcaggaaaacgatttttttgaatccatcatcaagggaagcagcaagatgtattgagacgagactttgttaagcaccttaagaagaactgaacgtatgatttgagaatacttggtccctggaggattatcacacccaaatgcatatctcattaatgattgaggagagaa

SEQ ID NO: 117978 - DNA, 440 bp, Homo sapiens
cattgtctactgtcctgtggatggaaggctagactgacagcttgcctgcaagggctggacttcctgatgctccaaaattgaaatataacaaataaggatttggctattgaatttcaatttcataagaaaatgggacctgtaagagggagagaacaaactttcactgtagcccaatgagctcgtccttggaaaaaaaatgggcagctgtgtttgtaaggagtgttggattggcaaaagagtaactgtgaatatctctcaagcagcagaaaattacacatgaatatgtaatttattttttataaaatgtctcttagcttataagtttagattacaagttcagcatttagtattcaaatcttcaattgatgaaacttcacaataacgtttttcatcaaacttctggacttgggcactggacagtgtgtttataatctactttt

SEQ ID NO: 117979 - DNA, 217 bp, Homo sapiens
gctcccccttatccagtttcatttttacgatttcagttatctctagtcaaccacagtccaaaattatggaaaactacagaaatagtaaacaattcctaagttttaaactgcctgcagttctgagtagtgtgataaaatctcacaccatcctgctccaacacttgatctcatcatgtaggcattttatcatcccctatcatcccaagaagggtaaata

SEQ ID NO: 117980 - DNA, 531 bp, Homo sapiens
aggtgactcctgcgcccatctgtggtcctggtgatgcgtccattgctgtggggtgcccaccctcccatggctaggagtgggcacatagattgactgggccaactggattctgtcccccagagttttggatggagagaggcccagagggaaaagcagctccgattcgttccttctgtgcttgtgcctgagaaaattgcgctgtgccctcgcacctgcctcggttcctgtctgtttctgaccctggttcttcttccctgtgtaggcttctccgggtctgttaatctcccaatacttgctaacattacaggtctgtttcccgtgtgtcttctctgagccttgttcacattgatgtgcctgacgaatgtctaacatattatggcatgcagcagaagggtgatctagcagacctcacaaacctagagttgtccaggtcagacaggaagataaatagcggtggctgtctgcagtgttagtacggagagctgggggctggagccaaccggagatgtgtgcctcatcaaaggggacatg

SEQ ID NO: 117981 - DNA, 497 bp, Homo sapiens
agcccagactttgggcagtgtatatgtgggagttggcgggttggtggcaggaaccttcctggaagcagtggtttctatgttgagtcctgtaggatggggaggagctaagaaggcatcagcagacaggggttgacagggaagggatgtgctctgcagaggacggagcatggtcagaagccccaggcagacatcatggggagtgtgagtgatgaggctagagtgaataggggcagggtctgtgctgaggcttggactttattctcagggcagtgcggagccactgaaatcttggatgtcggggagtgacatgattggatgtgcatggtcttaaggccaccctgatgtcatagcagggaatgggtcagagagaggcaagactagacaggccgtgggagcagttaggagaccattgccatagcccaggtaggagttgatggtgacctggatgaagtaggtagcagtggggacagtgagatgcaaaaggatttgggagctct

SEQ ID NO: 117982 - DNA, 664 bp, Homo sapiens
ctacggagcctgaagatgaggctttaattgctgtcagtgtttatgatttagtaggacttggtgtcctttttagacccagaagtcaaagccatgtaactcaatggcacaggtactttgaacatatagaaagatacatgaatgttaataaccttaattaaaaatttttttttttaatttcagcttttttccccaagcaaaccaaactgaatcataatagcatagaattgtttcaataaaccataaaatatgttagaccagttactaaaaggcaacagaaaagacctgcactgccagaatattatgttggaagaaaacatttcctttggatattcatgaaaacattgttagcatcaggccataacaaacagaacttgaggaaaaaaacttaatatgagctgaaaatgagttgaaagagagtgttacaatttcacaccctttaaaaggagagagaaaactaaaaacagtgagatgcaataaaagttgaagtttgggttagaaaaaaattaaaatctcttataatttattaaacgtgaatcaataacttaagaaaatgtcattgttttaaccagtgatttagtgtgtgtgtatatatatatagacataattttttttacatcaagtccaatcatctctagaaagaccattttaatttccctttaattat

SEQ ID NO: 117983 - DNA, 160 bp, Homo sapiens
aagcggccctacctctgcctgaagagagagactcccacctcaacagccagctttctgccttctagtcacgcctctcaattaggggtaaaaagaggggtcttcttgttttttgtagtggggggtgtctcactgtgttgcccggactgttctctaactcctg

SEQ ID NO: 117984 - DNA, 218 bp, Homo sapiens
gcacgagattggctaaaatattagtcatctttggttacaagttgatggctgagcagtttttcattccacagtgttgagaaactagactggaatcttgagctgataaaccagaatgcagatgtggtagatattggagtcttggaatcagcagacccatgccctagttctggctctgaactcattcaacttctacatgatttctgagaaacccgtaatta

SEQ ID NO: 117985 - DNA, 297 bp, Homo sapiens
gcatggtgggtgacgtgtgcctgtaatcctagctacttggaaggctgaagcaggagaattgcttgaacctgggaggcagaggttgcagtgagctgagatggcgccattgcactccagcctggtgacagagcgagactccgtctcaaaaaaaaaaaaaagaaagaaagaaatcatgcagctgatagacacagcgcattgtgactttcttctaccttggccagtctggagcagaacacagccagtccctcatgcagggtccgcatcagctctcattttccacccacacatttctaggtg

SEQ ID NO: 117986 - DNA, 209 bp, Homo sapiens
gttactctgggtgtagagagaggccttgcctaaaatccaaaattgtcgggttccttgattcttaatgacattagcaaaatcagttctgaaacaccactctccaagcaaagtttggatcaaattaacatttcatctctccttcagccagttactaaaaaaggcattttcagtcttcacgtacaaaccccaaatataagtgccaatggata

SEQ ID NO: 117987 - DNA, 846 bp, Homo sapiens
cattttcttaaatttgtgatgaatttctttgccatgtattcttttcacattacagcagtttctcaaaaaacaattccaattaaccaagggaaatatatttagtaggattttaggttattaagattttattgtaccatgtaatttgctgcaacttatatatttattgctgaatgattatagtacatttttctcaatgtagggcattgagtatttctagtattttgcttctctgttttgaagagtaaagttaggttaagaataatggtcatttttttgccgccatttagttgagataatagcttctttactcttttggtgcatgtttgggatggaaggaaagctatgaatcaaaacatacatagagaaactataatgtgtgaatcacagttgaatatatgttggatgattaaaaaaatacatagacacttgacccagtttctcctaatggtaacatcttgtaaaattatagacaaatgtcacaaccaagatactgatgttgatacaacccaccaatcttactgtgacttctgcagttttgcttgtacagtaatttgtgtgtgtgtgtgcatgtatttttattcaattttatcaaaagtgaagattcatatatctgccaccacagtcaagatatggaacagttatataccacaagaatctcttgtgttgccctcttaaaaccacacatacttttctctgtcccaccccacccatccattcctaacccatagcatccatgaatctgtttttcacttccaaaattttgccatttcaaaaatgttataaaaatagaatcatgcaatatgtaaccttctgggatcggccttactcagtgtaattctttcaaga

SEQ ID NO: 117988 - DNA, 756 bp, Homo sapiens
atgcgcgggctcgggccttcccggcatctccgcgcaggcctcggggaagcggggtccgggggagccgtggtgcggtgggaccgcgtgggtcctggaagagctgcagaggagagtgacggctttggatgcgctttgccccagggcctttcttcccggagttggccttttccctgcccttctcttctcctggcgtggtgacctgcctcccttctcctggatcgctttgctggcagccaccttgtaacacctcagactgcagcccgtgctgatgactgtggctgtgatgaattcgtgcctgtgaccacagctgctctccaggtgctgggtggctcctcccttgacgcccatccattctgtctcctgcctggccttgttcactgtcgctcatctcgctcagctgaggtccctcctcctccgctgtttggtgtccttgccagttaatcacccttaggtgctgggccctggacttacggacaacatggagcctggcttgttgacaggacagtgtctgcgcctctccgtctacacccccacaacaggggttactggggaggcggcgtctgggagtgacagagatcgctgtggggtctgtgtgaccatcagctgtccctgtagctggggaatggtgctgcgcggcgggcgggtggcacagtgagcagccctgggtcctcactgagtaagggagtggctggggagtggggaggcttgcctttgtatcctgggtgggcatggggctgggggagtcacggagacctg

SEQ ID NO: 117989 - DNA, 337 bp, Homo sapiens
gcctggaaactgtcacaggattgcaggacagccaaatgctgttgggtggctgaggaaaaaggagatagttcaaggactaaactcagccaatgtggcttaggtctgcttatgaattgtaaggccagggccactatgtcattaactctgaaatgaacaagcaggtgtccctggacctgcatgtcaagcatcccattgtgggaaacaacctcagactgggcgtcaggatgtcctctcaagtcaatactttccctctctggacctctgcttcctgcatcataagaaatcagagagtactagtccattacccacttttttttttttttttttttttttgaga

SEQ ID NO: 117990 - DNA, 108 bp, Homo sapiens
tcaaaatttccaatccttcagtggagccaatctaaggaaaggaaaagcaatttgactccatttgtgcatttatatatgaatgacccttactgaccattccagaggtgc

SEQ ID NO: 117991 - DNA, 247 bp, Homo sapiens
gtttggaggctcaaatcattaagttggcagtagaaatatgaatagaaactcagctggagagttgactcctcgcactcctgtttgtcttgactgtgcctcagatggcgtctcgcgcccgtttggttttgtctttcacagacgtttgccagggaccatgtttttccatctcccctctgttttaacacagcgccttaccaatcacacaccaaattagtgcagtgattttgtgagcgtggagagagtaaat

SEQ ID NO: 117992 - DNA, 411 bp, Homo sapiens
gcaccagtgggcactcttaacagtcattattactcagtagttattagtaaatcagacaaaattgccatcttagttttgagtgtctaaattaggtgataatggttattataatttggttattttgcatgactcaagctagtaagtaaatacactctgtaatctcaaccaattttttaatttgttaaatactatcattgtcaatatcttttttcatttgcttcagacttaatgaacaagccagtgaggagattttgaaagtagaacagaaatataacaaactccgccaaccattttttcagaagaggtcagaattgatcgccaaaatcccaaatttttgggtaacaacatttgtcaaccatccacaaggtatgttttggacagggcattgttaaaggataaacagtgtttgtt

SEQ ID NO: 117993 - DNA, 818 bp, Homo sapiens
atcgtggggggcagcgcggcgccgcccggggcctggccctggctggtgaggctgcagctcggcgggcagcctctgtgcggcggcgtcctggtagcggcctcctgggtgctcacggcagcgcactgctttgtaggcgccccgaatgagcttctgtggactgtgacgctggcagaggggtcccggggggagcaagcggaggaggtgccagtgaaccgcatcctgccccaccccaagtttgacccgcggaccttccacaacgacctggccctggtgcagctgtggacgccggtgagcccggggggatcggcgcgccccgtgtgcctgccccaggagccccaggagccccctgccggaaccgcctgcgccatcgcgggctggggcgccctcttcgaagacgggcctgaggctgaagcagtgagagaggcccgtgttcccctgctcagcaccgacacctgccgaagagccctggggcccgggctgcgccccagcaccatgctctgcgccgggtacctggcggggggcgttgactcgtgccagggtgactcgggaggccccctgacctgttctgagcctggcccccgccctagagaggtcctgttcggagtcacctcctggggggacggctgcggggagccagggaagcccggggtctacacccgcgtggcagtgttcaaggactggctccaggagcagatgagcgcctcctccagccgcgagcccagctgcagggagcttctggcctgggaccccccccaggagctgcaggcagacgccgcccggctctgcgccttctatgcccgcctgtgcccggggtccca

SEQ ID NO: 117994 - DNA, 109 bp, Homo sapiens
ctccttctgtcaattctgtacagcagaggatagccatactgcacttctcaaaaacgttagtgttttcttcaataatgcatgcctccttggatgcagaaacccaggtatt

SEQ ID NO: 117995 - DNA, 810 bp, Homo sapiens
agaatgaatatggaaggtacttgaccgcatcagagggatttggaagcaggccttaaaaagcttctgctttttaatatggtgcttctccaggtgtgatctggggagctccggtcatcctccagcactttcaaggggtcttgggggtcaaaaatcttatcaatatggagacgttactggcctttttcactctactttcacaaatgcattgtagagttttccagaggtggtgtggcgtgtgagataagaacggactggatacagaagcagatgggggctccagcggacccctatcaagccagaccctaaagagatttttagaatactatgcagtccagattttccatgatgccacaaagcatggcaaattcgagtgcaacctggaagcctgcacgagactgcccatgatgtacattgacgactgcctcagagccaccctggaggtcatggaggccccagctgagtccctttccatgaggacctacaatgtcagcgccatgagcttcacacccgaggagctggcccaggaggtcctcaagcacgtgccggaattccagatcacatacaacgtggatgccgttcgccaggccatagcggatggttggccgatgaactttgatgacagcaatgctcggaaggactgggggtggaaacacgactttgatcttccagagttggtgactgccatgttgaacttccatggttctgaaagcagagttgcccaagccaactgaaagaatctggaagaggagctcctgtgtcctggtccactgtcaagggagaactgtcacaactccaaggttatagactcca

SEQ ID NO: 117996 - DNA, 700 bp, Homo sapiens
cgaggtggctcacgcctgtaatccccacactttgggaggccaaggcaggcaggtcacttgaggtcaggagttcgagaccaccctggccaacatagcgaaaccctgtctctaccaaaaatacaaaaattagccaggcatggtggtgcatgtctgtaattccagctacttgggaggctgaatcaggagaatcgcttgaacccggaaggcagaggttgcagtgagccaaggtcgcaccactgcactccagtctgactccatctcaaaaaacaaaaaacaaaaaaacaccacattattttccagactacaatctactacagaatatacaccaaacatactcatactattgggggcggggtacatgtggatgtgactgaacatccagactaccatttaaagtggaaactataacttgagcacccatccaaaaaggaacatattcagaataaggaaaggagccctggatgaagattaagattttgttctaatcctgacactgctgacaatgttaaacaataccttactcctctctctctacgtctgtttacttatttgtaaattgagaggtgttgggataaataatcactaagatccatttgagacttcctttactttttccctccttccaaactagaatgttgtcctagaaaccaaaaaccgttcctagaaaaccaaaaactacagcatcaataaatgtgagaac

SEQ ID NO: 117997 - DNA, 217 bp, Homo sapiens
gcctgcaggcagcagagtttgaaaccatatttctgtttcatgtgctgtagctcctgatgtctagagccacagcccctgtgctagttacagcaaccactgtccagttctgttgagcaccagccagttctacccagcctttgaccgacatgaagctctctcagagcccctggcccagcccttccctcttcatacctgatatttaactccttctgtttag

SEQ ID NO: 117998 - DNA, 430 bp, Homo sapiens
ggaagaccctattacttgggctaaagagaagctaaacgtgaccagcctacccaccttgctactgctgatgaccaccctgactcatgtcccttgtctgcataggtgttttcctataaatgtttaattcctgaggttgctgaatctcagggcttggaaggcccagactggacaggggaaggggtacagtcccttcttgctggtatgttgggaagctctggtgcaaagggcagtgatggcccttcaatcccaggcccacaagcaccacagccaggagagtcaaggttggatatgaagagggacttcctgaaagcaggcacaggaagggatgggagctcagctcaccgggtgctagacaagggagtgtgtctctttccccatgagtgacagcagccacaaggggatgcccagcattgggggtggggtgggggga

SEQ ID NO: 117999 - DNA, 506 bp, Homo sapiens
atatcttaagactaggtttaagcacttctttaagttactgaggggacacgcttccctcttccctctacggaggctgctgctatgacttggtgtcaggctccaggaccagccctgaatggtgccaagtcggatagcacagaggtgggaagagagactggcaggtgtgcaggataagcagagaactcttcctcccttacctcatctcagtatggaatttaacagcatttagcagagaatgtcatataaaaagatgacacgctgcatgtgaaaaaaaaaaaacaagcattttcaaattgcggaagaactcgctctagaatgacgctcccttctgtgctgcaatcatctattcaaactgtcttccaaaagtagcatcgtcgatcatttccatcatgatacaaagtggtaagaagtcactcactatctgattccaacctcgattcatgccactgcctgtgcttggtatctgctcaacagcagctgcaaattattctcaaagggtacagcgt

SEQ ID NO: 118000 - DNA, 1014 bp, Homo sapiens
caccattttcctgatgccaaactgaggctcagagaggtgaagtaacttcttcaagtcacaacacaactgttgtccaggaatcaggcagtctggctctgctaacccagttttacccactgcattaatgtaccgcatccacttgttcactcagtttcacctgacaaatactaattttgtctctctgtggaacaagttctttgctgggtgcagggaataaagcagaacaccgttcagttcctgccttcccaacgcttgtaaatctagtgcaggtcattcatggccgggctgcagggtgtccatgaatcctgctaaaatcatttgcgaaatgttgtgagcgtgggtcttttcttctggaaagagagtctgtgactctcaggttctgagttgatctgtgatccaaacagaggtgtgaagaagtgttgttttagcagatctgtgcctagtatgcctgatacacagcttgaacttcaaacaaacagcaacaaaattcctactggttggaagaatgaagaacttgtaagagcataataagtgctgcagtagcgtccggagcagggtgctgtggaagagcacacagaaggccacctgcccaggaatgcctcctagaggcagtgaaggcagctgggtgaaggatagggaagcagttcattggaacactgtggtgaccagtctgtccatgtagtgttgagacagaaacaacacgtgaacagctgcagctgttgtaccacttgtgcgcaagtgtaaaagtccatggtgccatgaaatcatgtaatggggacaggaggcttcatgtattcgtgaaggttagaaaagtttccttgagaaagtgacacttaggcctaaaagttggagcattttgggcatggaatctggcccacagtcttcaaagaccacatggtagaaaccagtagagcaccagggactgacaggaagcaaatgcagctggtgcaggagagggaaatgggaattagggtggtggcagagcccaaagaggccttgtaggccatggtaagg

SEQ ID NO: 118001 - DNA, 312 bp, Homo sapiens
atgaacttgttctgtagggagcatctggtgaaaaggaggtagaaagttataattgcacttccagagggctaagtaggaagtggggaagaaggggaaatggagaaaaaagaagagaaaataatttttaaaaagtaacttactctctttcacttagaaaaatgggggtactcggttatacttccaccccctctccattagaaatacaacttaatccaaacaaaaaaatcaccacatatacagcaagtaaattccatgtgaaggtcctcatgctttattcatgcttttggaatgggaagagcaattgtaacattt

SEQ ID NO: 118002 - DNA, 593 bp, Homo sapiens
gcagtggcgtgatctcggctcactgcaaccttcgcctcctgggttcaagcaattctcctacctcagcctcccgagtagctgggactacaggcacgtgccatcgtgcctggctaattttttgtatttttagtagagatggggtttcaccgtgttagccaggatgatctagatctcctgacctcgtgatccgcctgcctcagtctcccaaagtgctgggattacaggcgtgagccaccacgcctggcaactctctattgttaatacagtcataaccagaataacacttctctgcttgcttagttattcagggacttcctttgcttaactttgtacttatagtacatgtaaagattacaaagtcaactgtgctgcttgcaaagttcctagattttttttaaaaaaaatgaaatctggattttaaaagatttataattacactgttcaattttcctttgcattttgaaatatagcattaatattcccataggctagagggaaatctgaagaaagttttcttgatatgaagagtgaagggagatagttcactgtacttcatgaaattttttttaattctgatgaatattacaacttgg

SEQ ID NO: 118003 - DNA, 438 bp, Homo sapiens
agtaggaaaggcacagtcatgggagattatgtgatccttggatccagcttgaacaaaagtccccagagaatggcttgatcaggggagaagacattgagaaggatgagaacaacatcgctccttctaaattaagatgatgtaatatggccatggaccctgctaaggtttaatcagcacctgacttttagttgtgtccacacaatggagtctgaccattgggttggtggtctcctacgtcatgaagaatattgagaaatggagttaacagtttaccagaaaaagacagtctttacaaacacctgagtatgtaccaatggctggctctttcctctgctctaatacactgtctaggccagtcattcccaaacctgtctgtgcattggaatcaccagggtagcttcaaaacacactgaggtctgagtctcaacctgagattag

SEQ ID NO: 118004 - DNA, 2021 bp, Homo sapiens
aggcaaggtgtttccagccggcaggatggaggacgaggaaggccctgagtatggcaaacctgactttgtgcttttggaccaagtgaccatggaggacttcatgaggaacctgcagctcaggttcgagaagggccgcatctacacctacatcggtgaggtgctggtgtccgtgaacccctaccaggagctgcccctgtatgggcctgaggccatcgccaggtaccagggccgtgagctctatgagcggccaccccatctctatgctgtggccaacgccgcctacaaggcaatgaagcaccggtccagggacacctgcatcgtcatctcaggggagagtggggcagggaagacagaagccagtaagcacatcatgcagtacatcgctgctgtcaccaatccaagccagagggctgaggtggagagggtcaaggacgtgctgctcaagtccacctgtgtgctggaggcctttggcaatgcccgcaccaaccgcaatcacaactccagccgctttggcaagtacatggacatcaactttgacttcaagggggacccgatcggaggacacatccacagctacctactggagaagtctcgggtcctcaagcagcacgtgggtgaaagaaacttccacgccttctaccaattgctgagaggcagtgaggacaagcagctgcatgaactgcacttggagagaaaccctgctgtatacaatttcacacaccagggagcaggactcaacatgactgtgcacagtgccttggacagtgatgagcagagccaccaggcagtgaccgaggccatgagggtcatcggcttcagtcctgaagaggtggagtctgtgcatcgcatcctggctgccatattgcacctgggaaacatcgagtttgtggagacggaggagggtgggctgcagaaggagggcctggcagtggccgaggaggcactggtggaccatgtggctgagctgacggccacaccccgggacctcgtgctccgctccctgctggctcgcacagttgcctcgggaggcagggaactcatagagaagggccacactgcagctgaggccagctatgcccgggatgcctgtgccaaggcagtgtaccagcggctgtttgagtgggtggtgaacaggatcaacagtgtcatggaactccggggccgggatcctcggcgtgatggcaaggacacagtcattggcgtgctggacatctatggcttcgaggtgtttcccgtcaacagtttcgagcagttctgcatcaactactgcaacgagaagctgcagcagctattcatccagctcatcctgaagcaggaacaggaagagtacgagcgcgagggcatcacctggcagagcgttgagtatttcaacaacgccaccattgtggatctggtggagcggccccaccgtggcatcctggccgtgctggacgaggcctgcagctctgctggcaccatcactgaccgaatcttcctgcagaccctggacacgcaccaccgccatcacctacactacaccagccgccagctctgccccacagacaagaccatggagtttggccgagacttccggatcaagcactatgcaggggacgtcacgtactccgtggaaggcttcatcgacaagaacagagatttcctcttccaggacttcaagcggctgctgtacaacagcacggaccccactctacgggccatgtggccggacgggcagcaggacatcacagaggtgaccaagcgccccctgacggctggcacactcttcaagaactccatggtggccctggtggagaaccttgcctccaaggagcccttctacgtccgctgcatcaagcccaatgaggacaaggtagctgggaagctggatgagaaccactgtcgccaccaggtcgcatacctggggctgctggagaatgtgagggtccgcagggctggcttcgcttcccgccagccctactctcgattcctgctcaggtactggcacctgacacccatcactccatgggccatagtccctgtgt

SEQ ID NO: 118005 - DNA, 3225 bp, Homo sapiens
aggcaaggtgtttccagccggcaggatggaggacgaggaaggccctgagtatggcaaacctgactttgtgcttttggaccaagtgaccatggaggacttcatgaggaacctgcagctcaggttcgagaagggccgcatctacacctacatcggtgaggtgctggtgtccgtgaacccctaccaggagctgcccctgtatgggcctgaggccatcgccaggtaccagggccgtgagctctatgagcggccaccccatctctatgctgtggccaacgccgcctacaaggcaatgaagcaccggtccagggacacctgcatcgtcatctcaggggagagtggggcagggaagacagaagccagtaagcacatcatgcagtacatcgctgctgtcaccaatccaagccagagggctgaggtggagagggtcaaggacgtgctgctcaagtccacctgtgtgctggaggcctttggcaatgcccgcaccaaccgcaatcacaactccagccgctttggcaagtacatggacatcaactttgacttcaagggggacccgatcggaggacacatccacagctacctactggagaagtctcgggtcctcaagcagcacgtgggtgaaagaaacttccacgccttctaccaattgctgagaggcagtgaggacaagcagctgcatgaactgcacttggagagaaaccctgctgtatacaatttcacacaccagggagcaggactcaacatgactgtgcacagtgccttggacagtgatgagcagagccaccaggcagtgaccgaggccatgagggtcatcggcttcagtcctgaagaggtggagtctgtgcatcgcatcctggctgccatattgcacctgggaaacatcgagtttgtggagacggaggagggtgggctgcagaaggagggcctggcagtggccgaggaggcactggtggaccatgtggctgagctgacggccacaccccgggacctcgtgctccgctccctgctggctcgcacagttgcctcgggaggcagggaactcatagagaagggccacactgcagctgaggccagctatgcccgggatgcctgtgccaaggcagtgtaccagcggctgtttgagtgggtggtgaacaggatcaacagtgtcatggaactccggggccgggatcctcggcgtgatggcaaggacacagtcattggcgtgctggacatctatggcttcgaggtgtttcccgtcaacagtttcgagcagttctgcatcaactactgcaacgagaagctgcagcagctattcatccagctcatcctgaagcaggaacaggaagagtacgagcgcgagggcatcacctggcagagcgttgagtatttcaacaacgccaccattgtggatctggtggagcggccccaccgtggcatcctggccgtgctggacgaggcctgcagctctgctggcaccatcactgaccgaatcttcctgcagaccctggacacgcaccaccgccatcacctacactacaccagccgccagctctgccccacagacaagaccatggagtttggccgagacttccggatcaagcactatgcaggggacgtcacgtactccgtggaaggcttcatcgacaagaacagagatttcctcttccaggacttcaagcggctgctgtacaacagcacggaccccactctacgggccatgtggccggacgggcagcaggacatcacagaggtgaccaagcgccccctgacggctggcacactcttcaagaactccatggtggccctggtggagaaccttgcctccaaggagcccttctacgtccgctgcatcaagcccaatgaggacaaggtagctgggaagctggatgagaaccactgtcgccaccaggtcgcatacctggggctgctggagaatgtgagggtccgcagggctggcttcgcttcccgccagccctactctcgattcctgctcaggtacaagatgacctgtgaatacacatggcccaaccacctgctgggctccgacaaggcagccgtgagcgctctcctggagcagcacgggctgcagggggacgtggcctttggccacagcaagctgttcatccgctcaccccggacactggtcacactggagcagagccgagcccgcctcatccccatcattgtgctgctattgcagaaggcatggcggggcaccttggcgaggtggcgctgccggaggctgagggctatctacaccatcatgcgctggttccggagacacaaggtgcgggctcacctggctgagctgcagcggcgattccaggctgcaaggcagccgccactctacgggcgtgaccttgtgtggccgctgccccctgctgtgctgcagcccttccaggacacctgccacgcactcttctgcaggtggcgggcccggcagctggtgaagaacatccccccttcagacatgccccagatcaaggccaaggtggccgccatgggggccctgcaagggcttcgtcaggactggggctgccgacgggcctgggcccgagactacctgtcctctgccactgacaatcccacagcatcaagcctgtttgctcagcgactaaagacacttcgggacaaagatggcttcggggctgtgctcttttcaagccatgtccgcaaggtgaaccgcttccacaagatccggaaccgggccctcctgctcacagaccagcacctctacaagctggaccctgaccggcagtaccgggtgatgcgggccgtgccccttgaggcggtgacggggctgagcgtgaccagcggaggagaccagctggtggtgctgcacgcccgcggccaggacgacctcgtggtgtgcctgcaccgctcccggccgccattggacaaccgcgttggggagctggtgggcgtgctggccgcacactgccagggggagggccgcaccctggaggttcgcgtctccgactgcatcccactaagccatcgcggggtccggcgcctcatctccgtggagcccaggccggagcagccagagcccgatttccgctgcgctcgcggctccttcaccctgctctggcccagccgctgagcgcccgcacccgccgcaccccgaggccgccaattgtccgccccgccagcgctgcaaataaaccttctgagtcagccctcctgctcgccgctcccgcctcacccgcaggggctccggccgcctcctcggtcaggtccacctgc

SEQ ID NO: 118006 - DNA, 1587 bp, Homo sapiens
aggggtaggagcagagggtccccaaacagcacgtcgcaaacatcgatacaagcaggaaccagcacgctgctggcctcaagacaccaaaatatctgggaagacatgtgtgtgagcacatgcatgtggggacatacaggtgggaacatgggtatgagggctgtgtgaggacatgtatgtgaggacatgtgtatgggaagacatatgtgcacaggtgtcataagtgctccaggaacacactctgtatccctgccatctccccaggtgtggggtgggcagggtgggctccatcatctctcccccaggcctgggccacactgccctgtcctgtggtgacaggtacaagatgacctgtgaatacacatggcccaaccacctgctgggctccgacaaggcagccgtgagcgctctcctggagcagcacgggctgcagggggacgtggcctttggccacagcaagctgttcatccgctcaccccggacactggtcacactggagcagagccgagcccgcctcatccccatcattgtgctgctattgcagaaggcatggcggggcaccttggcgaggtggcgctgccggaggctgagggctatctacaccatcatgcgctggttccggagacacaaggtgcgggctcacctggctgagctgcagcggcgattccaggctgcaaggcagccgccactctacgggcgtgaccttgtgtggccgctgccccctgctgtgctgcagcccttccaggacacctgccacgcactcttctgcaggtggcgggcccggcagctggtgaagaacatccccccttcagacatgccccagatcaaggccaaggtggccgccatgggggccctgcaagggcttcgtcaggactggggctgccgacgggcctgggcccgagactacctgtcctctgccactgacaatcccacagcatcaagcctgtttgctcagcgactaaagacacttcgggacaaagatggcttcggggctgtgctcttttcaagccatgtccgcaaggtgaaccgcttccacaagatccggaaccgggccctcctgctcacagaccagcacctctacaagctggaccctgaccggcagtaccgggtgatgcgggccgtgccccttgaggcggtgacggggctgagcgtgaccagcggaggagaccagctggtggtgctgcacgcccgcggccaggacgacctcgtggtgtgcctgcaccgctcccggccgccattggacaaccgcgttggggagctggtgggcgtgctggccgcacactgccagggggagggccgcaccctggaggttcgcgtctccgactgcatcccactaagccatcgcggggtccggcgcctcatctccgtggagcccaggccggagcagccagagcccgatttccgctgcgctcgcggctccttcaccctgctctggcccagccgctgagcgcccgcacccgccgcaccccgaggccgccaattgtccgccccgccagcgctgcaaataaaccttctgagtcagccctcctgctcgccgctcccgcctcacccgcaggggctccggccgcctcctcggtcaggtccacctgc

SEQ ID NO: 118007 - DNA, 2789 bp, Homo sapiens
aggcaaggtgtttccagccggcaggatggaggacgaggaaggccctgagtatggcaaacctgactttgtgcttttggaccaagtgaccatggaggacttcatgaggaacctgcagctcaggttcgagaagggccgcatctacacctacatcggtgaggtgctggtgtccgtgaacccctaccaggagctgcccctgtatgggcctgaggccatcgccaggtaccagggccgtgagctctatgagcggccaccccatctctatgctgtggccaacgccgcctacaaggcaatgaagcaccggtccagggacacctgcatcgtcatctcaggggagagtggggcagggaagacagaagccagtaagcacatcatgcagtacatcgctgctgtcaccaatccaagccagagggctgaggtggagagggtcaaggacgtgctgctcaagtccacctgtgtgctggaggcctttggcaatgcccgcaccaaccgcaatcacaactccagccgctttggcaagtacatggacatcaactttgacttcaagggggacccgatcggaggacacatccacagctacctactggagaagtctcgggtcctcaagcagcacgtgggtgaaagaaacttccacgccttctaccaattgctgagaggcagtgaggacaagcagctgcatgaactgcacttggagagaaaccctgctgtatacaatttcacacaccagggagcaggactcaacatgactgtgcacagtgccttggacagtgatgagcagagccaccaggcagtgaccgaggccatgagggtcatcggcttcagtcctgaagaggtggagtctgtgcatcgcatcctggctgccatattgcacctgggaaacatcgagtttgtggagacggaggagggtgggctgcagaaggagggcctggcagtggccgaggaggcactggtggaccatgtggctgagctgacggccacaccccgggacctcgtgctccgctccctgctggctcgcacagttgcctcgggaggcagggaactcatagagaagggccacactgcagctgaggccagctatgcccgggatgcctgtgccaaggcagtgtaccagcggctgtttgagtgggtggtgaacaggatcaacagtgtcatggaactccggggccgggatcctcggcgtgatggcaaggacacagtcattggcgtgctggacatctatggcttcgaggtgtttcccgtcaacagtttcgagcagttctgcatcaactactgcaacgagaagctgcagcagctattcatccagctcatcctgaagcaggaacaggaagagtacgagcgcgagggcatcacctggcagagcgttgagtatttcaacaacgccaccattgtggatctggtggagcggccccaccgtggcatcctggccgtgctggacgaggcctgcagctctgctggcaccatcactgaccgaatcttcctgcagaccctggacacgcaccaccgccatcacctacactacaccagccgccagctctgccccacagacaagaccatggagtttggccgagacttccggatcaagcactatgcaggggacgtcacgtactccgtggaaggcttcatcgacaagaacagagatttcctcttccaggacttcaagcggctgctgtacaacagcacggaccccactctacgggccatgtggccggacgggcagcaggacatcacagaggtgaccaagcgccccctgacggctggcacactcttcaagaactccatggtggccctggtggagaaccttgcctccaaggagcccttctacgtccgctgcatcaagcccaatgaggacaaggtagctgggaagctggatgagaaccactgtcgccaccaggtcgcatacctggggctgctggagaatgtgagggtccgcagggctggcttcgcttcccgccagccctactctcgattcctgctcaggtacaagatgacctgtgaatacacatggcccaaccacctgctgggctccgacaaggcagccgtgagcgctctcctggagcagcacgggctgcagggggacgtggcctttggccacagcaagctgttcatccgctcaccccggacactggtcacactggagcagagccgagcccgcctcatccccatcattgtgctgctattgcagaaggccactgacaatcccacagcatcaagcctgtttgctcagcgactaaagacacttcgggacaaagatggcttcggggctgtgctcttttcaagccatgtccgcaaggtgaaccgcttccacaagatccggaaccgggccctcctgctcacagaccagcacctctacaagctggaccctgaccggcagtaccgggtgatgcgggccgtgccccttgaggcggtgacggggctgagcgtgaccagcggaggagaccagctggtggtgctgcacgcccgcggccaggacgacctcgtggtgtgcctgcaccgctcccggccgccattggacaaccgcgttggggagctggtgggcgtgctggccgcacactgccagggggagggccgcaccctggaggttcgcgtctccgactgcatcccactaagccatcgcggggtccggcgcctcatctccgtggagcccaggccggagcagccagagcccgatttccgctgcgctcgcggctccttcaccctgctctggcccagccgctgagcgcccgcacccgccgcaccccgaggccgccaattgtccgccccgccagcgctgcaaataaaccttctgagtcagc

SEQ ID NO: 118008 - DNA, 515 bp, Homo sapiens
agatgaaggatagctatgctgattcacagacagctgctatcaattgagtctggtcccatgactcaatcccaagcagcgccccctcccctccatctgtcctcaggccactgacaatcccacagcatcaagcctgtttgctcagcgactaaagacacttcgggacaaagatggcttcggggctgtgctcttttcaagccatgtccgcaaggttagacaagggacaaggatggcttcagggctgtgctctttttctagccacgtctgcaaggttagaagctggtgcagagttttgggggggcacttgggagaaaatggaggcaaccccagcccaggcccagctgctcctgacactcccaaaactgtcgccagcggggaggggaggcagtagggactgccgaagcctggggccctggtgggtgacagggcagcaccagcctgggtccagccacctctcccacaggtgaaccgcttccacaagatccggaaccgggccctcctgctcacagaccagcacc

SEQ ID NO: 118009 - DNA, 501 bp, Homo sapiens
cgctccccgggtgcggttgggggttcggcagaggcttcctggggagggggtgagtccggctaggctggggtgcgggttgaggcggctgcactctgaccccgcgctccgctcaggtgacggggctgagcgtgaccagcggaggagaccagctggtggtgctgcacgcccgcggccaggacgacctcgtggtgtgcctgcaccgctcccggccgccattggacaaccgcgttggggagctggtgggcgtgctggccgcacactgccagggggagggccgcaccctggaggttcgcgtctccgactgcatcccactaagccatcgcggggtccggcgcctcatctccgtggagcccaggccggagcagccagagcccgatttccgctgcgctcgcggctccttcaccctgctctggcccagccgctgagcgcccgcacccgccgcaccccgaggccgccaattgtccgccccgccagcgctgcaaataaaccttctgagtcagc

SEQ ID NO: 118010 - DNA, 3158 bp, Homo sapiens
aggcaaggtgtttccagccggcaggatggaggacgaggaaggccctgagtatggcaaacctgactttgtgcttttggaccaagtgaccatggaggacttcatgaggaacctgcagctcaggttcgagaagggccgcatctacacctacatcggtgaggtgctggtgtccgtgaacccctaccaggagctgcccctgtatgggcctgaggccatcgccaggtaccagggccgtgagctctatgagcggccaccccatctctatgctgtggccaacgccgcctacaaggcaatgaagcaccggtccagggacacctgcatcgtcatctcaggggagagtggggcagggaagacagaagccagtaagcacatcatgcagtacatcgctgctgtcaccaatccaagccagagggctgaggtggagagggtcaaggacgtgctgctcaagtccacctgtgtgctggaggcctttggcaatgcccgcaccaaccgcaatcacaactccagccgctttggcaagtacatggacatcaactttgacttcaagggggacccgatcggaggacacatccacagctacctactggagaagtctcgggtcctcaagcagcacgtgggtgaaagaaacttccacgccttctaccaattgctgagaggcagtgaggacaagcagctgcatgaactgcacttggagagaaaccctgctgtatacaatttcacacaccagggagcaggactcaacatgactgtgcacagtgccttggacagtgatgagcagagccaccaggcagtgaccgaggccatgagggtcatcggcttcagtcctgaagaggtggagtctgtgcatcgcatcctggctgccatattgcacctgggaaacatcgagtttgtggagacggaggagggtgggctgcagaaggagggcctggcagtggccgaggaggcactggtggaccatgtggctgagctgacggccacaccccgggacctcgtgctccgctccctgctggctcgcacagttgcctcgggaggcagggaactcatagagaagggccacactgcagctgaggccagctatgcccgggatgcctgtgccaaggcagtgtaccagcggctgtttgagtgggtggtgaacaggatcaacagtgtcatggaactccggggccgggatcctcggcgtgatggcaaggacacagtcattggcgtgctggacatctatggcttcgaggtgtttcccgtcaacagtttcgagcagttctgcatcaactactgcaacgagaagctgcagcagctattcatccagctcatcctgaagcaggaacaggaagagtacgagcgcgagggcatcacctggcagagcgttgagtatttcaacaacgccaccattgtggatctggtggagcggccccaccgtggcatcctggccgtgctggacgaggcctgcagctctgctggcaccatcactgaccgaatcttcctgcagaccctggacacgcaccaccgccatcacctacactacaccagccgccagctctgccccacagacaagaccatggagtttggccgagacttccggatcaagcactatgcaggggacgtcacgtactccgtggaaggcttcatcgacaagaacagagatttcctcttccaggacttcaagcggctgctgtacaacagcacggaccccactctacgggccatgtggccggacgggcagcaggacatcacagaggtgaccaagcgccccctgacggctggcacactcttcaagaactccatggtggccctggtggagaaccttgcctccaaggagcccttctacgtccgctgcatcaagcccaatgaggacaaggtagctgggaagctggatgagaaccactgtcgccaccaggtcgcatacctggggctgctggagaatgtgagggtccgcagggctggcttcgcttcccgccagccctactctcgattcctgctcaggtacaagatgacctgtgaatacacatggcccaaccacctgctgggctccgacaaggcagccgtgagcgctctcctggagcagcacgggctgcagggggacgtggcctttggccacagcaagctgttcatccgctcaccccggacactggtcacactggagcagagccgagcccgcctcatccccatcattgtgctgctattgcagaaggcatggcggggcaccttggcgaggtggcgctgccggaggctgagggctatctacaccatcatgcgctggttccggagacacaaggtgcgggctcacctggctgagctgcagcggcgattccaggctgcaaggcagccgccactctacgggcgtgaccttgtgtggccgctgccccctgctgtgctgcagcccttccaggacacctgccacgcactcttctgcaggtggcgggcccggcagctggtgaagaacatccccccttcagacatgccccagatcaaggccaaggtggccgccatgggggccctgcaagggcttcgtcaggactggggctgccgacgggcctgggcccgagactacctgtcctctgccactgacaatcccacagcatcaagcctgtttgctcagcgactaaagacacttcgggacaaagatggcttcggggctgtgctcttttcaagccatgtccgcaaggtgaaccgcttccacaagatccggaaccgggccctcctgctcacagaccagcacctctacaagctggaccctgaccggcagtaccgggtgatgcgggccgtgccccttgaggcggtgacggggctgagcgtgaccagcggaggagaccagctggtggtgctgcacgcccgcggccaggacgacctcgtggtgtgcctgcaccgctcccggccgccattggacaaccgcgttggggagctggtgggcgtgctggccgcacactgccagggggagggccgcaccctggaggttcgcgtctccgactgcatcccactaagccatcgcggggtccggcgcctcatctccgtggagcccaggccggagcagccagagcccgatttccgctgcgctcgcggctccttcaccctgctctggcccagccgctgagcgcccgcacccgccgcaccccgaggccgccaattgtccgccccgccagcgctgcaaataaaccttctgagtcagc

SEQ ID NO: 118011 - DNA, 3507 bp, Homo sapiens
aggcaaggtgtttccagccggcaggatggaggacgaggaaggccctgagtatggcaaacctgactttgtgcttttggaccaagtgaccatggaggacttcatgaggaacctgcagctcaggttcgagaagggccgcatctacacctacatcggtgaggtgctggtgtccgtgaacccctaccaggagctgcccctgtatgggcctgaggccatcgccaggtaccagggccgtgagctctatgagcggccaccccatctctatgctgtggccaacgccgcctacaaggcaatgaagcaccggtccagggacacctgcatcgtcatctcaggggagagtggggcagggaagacagaagccagtaagcacatcatgcagtacatcgctgctgtcaccaatccaagccagagggctgaggtggagagggtcaaggacgtgctgctcaagtccacctgtgtgctggaggcctttggcaatgcccgcaccaaccgcaatcacaactccagccgctttggcaagtacatggacatcaactttgacttcaagggggacccgatcggaggacacatccacagctacctactggagaagtctcgggtcctcaagcagcacgtgggtgaaagaaacttccacgccttctaccaattgctgagaggcagtgaggacaagcagctgcatgaactgcacttggagagaaaccctgctgtatacaatttcacacaccagggagcaggactcaacatgactgtgcacagtgccttggacagtgatgagcagagccaccaggcagtgaccgaggccatgagggtcatcggcttcagtcctgaagaggtggagtctgtgcatcgcatcctggctgccatattgcacctgggaaacatcgagtttgtggagacggaggagggtgggctgcagaaggagggcctggcagtggccgaggaggcactggtggaccatgtggctgagctgacggccacaccccgggacctcgtgctccgctccctgctggctcgcacagttgcctcgggaggcagggaactcatagagaagggccacactgcagctgaggccagctatgcccgggatgcctgtgccaaggcagtgtaccagcggctgtttgagtgggtggtgaacaggatcaacagtgtcatggaactccggggccgggatcctcggcgtgatggcaaggacacagtcattggcgtgctggacatctatggcttcgaggtgtttcccgtcaacagtttcgagcagttctgcatcaactactgcaacgagaagctgcagcagctattcatccagctcatcctgaagcaggaacaggaagagtacgagcgcgagggcatcacctggcagagcgttgagtatttcaacaacgccaccattgtggatctggtggagcggccccaccgtggcatcctggccgtgctggacgaggcctgcagctctgctggcaccatcactgaccgaatcttcctgcagaccctggacacgcaccaccgccatcacctacactacaccagccgccagctctgccccacagacaagaccatggagtttggccgagacttccggatcaagcactatgcaggggacgtcacgtactccgtggaaggcttcatcgacaagaacagagatttcctcttccaggacttcaagcggctgctgtacaacagcacggaccccactctacgggccatgtggccggacgggcagcaggacatcacagaggtgaccaagcgccccctgacggctggcacactcttcaagaactccatggtggccctggtggagaaccttgcctccaaggagcccttctacgtccgctgcatcaagcccaatgaggacaaggtagctgggaagctggatgagaaccactgtcgccaccaggtcgcatacctggggctgctggagaatgtgagggtccgcagggctggcttcgcttcccgccagccctactctcgattcctgctcaggtacaagatgacctgtgaatacacatggcccaaccacctgctgggctccgacaaggcagccgtgagcgctctcctggagcagcacgggctgcagggggacgtggcctttggccacagcaagctgttcatccgctcaccccggacactggtcacactggagcagagccgagcccgcctcatccccatcattgtgctgctattgcagaaggcatggcggggcaccttggcgaggtggcgctgccggaggctgagggctatctacaccatcatgcgctggttccggagacacaaggtgcgggctcacctggctgagctgcagcggcgattccaggctgcaaggcagccgccactctacgggcgtgaccttgtgtggccgctgccccctgctgtgctgcagcccttccaggacacctgccacgcactcttctgcaggtggcgggcccggcagctggtgaagaacatccccccttcagacatgccccagatcaaggccaaggtggccgccatgggggccctgcaagggcttcgtcaggactggggctgccgacgggcctgggcccgagactacctgtcctctgccactgacaatcccacagcatcaagcctgtttgctcagcgactaaagacacttcgggacaaagatggcttcggggctgtgctcttttcaagccatgtccgcaaggtgaaccgcttccacaagatccggaaccgggccctcctgctcacagaccagcacctctacaagctggaccctgaccggcagtaccgggtgatgcgggccgtgccccttgaggcggtgacggggctgagcgtgaccagcggaggagaccagctggtggtgctgcacgcccgcggccaggacgacctcgtggtgtgcctgcaccgctcccggccgccattggacaaccgcgttggggagctggtgggcgtgctggccgcacactgccagggggagggccgcaccctggaggttcgcgtctccgactgcatcccactaagccatcgcggggtccggcgcctcatctccgtggagcccaggccggagcagccagagcccgatttccgctgcgctcgcggctccttcaccctgctctggcccagccgctgagcgcccgcacccgccgcaccccgaggccgccaattgtccgccccgccagcgctgcaaataaaccttctgagtcagctcaaaaaaaaaaaaaaaaaaaaaaaaaaaaaaaaaaaaaaaaaaaaaaaaaagggggggaattgggggggaaaaaagtgttatgagagggcatgtaggtaatacgtgatttgggcccgaatttttgtaaaggggagaaatggggagcacccaatgagggataaattgaacgcgggttctgttttttgagtgtaatgagatgatgaaaaggaataaggattaaagcacataagaggaaggaaggaaaataaagaaaataagagagaagatgacattgagaaatatagagagtgataagtaagaagggatagaagataggatgaagtaaataaaaatgaaataaaatcatg

SEQ ID NO: 118012 - DNA, 2208 bp, Homo sapiens
aggcaaggtgtttccagccggcaggatggaggacgaggaaggccctgagtatggcaaacctgactttgtgcttttggaccaagtgaccatggaggacttcatgaggaacctgcagctcaggttcgagaagggccgcatctacacctacatcggtgaggtgctggtgtccgtgaacccctaccaggagctgcccctgtatgggcctgaggccatcgccaggtaccagggccgtgagctctatgagcggccaccccatctctatgctgtggccaacgccgcctacaaggcaatgaagcaccggtccagggacacctgcatcgtcatctcaggggagagtggggcagggaagacagaagccagtaagcacatcatgcagtacatcgctgctgtcaccaatccaagccagagggctgaggtggagagggtcaaggacgtgctgctcaagtccacctgtgtgctggaggcctttggcaatgcccgcaccaaccgcaatcacaactccagccgctttggcaagtacatggacatcaactttgacttcaagggggacccgatcggaggacacatccacagctacctactggagaagtctcgggtcctcaagcagcacgtgggtgaaagaaacttccacgccttctaccaattgctgagaggcagtgaggacaagcagctgcatgaactgcacttggagagaaaccctgctgtatacaatttcacacaccagggagcaggactcaacatgactgtgcacagtgccttggacagtgatgagcagagccaccaggcagtgaccgaggccatgagggtcatcggcttcagtcctgaagaggtggagtctgtgcatcgcatcctggctgccatattgcacctgggaaacatcgagtttgtggagacggaggagggtgggctgcagaaggagggcctggcagtggccgaggaggcactggtggaccatgtggctgagctgacggccacaccccgggacctcgtgctccgctccctgctggctcgcacagttgcctcgggaggcagggaactcatagagaagggccacactgcagctgaggccagctatgcccgggatgcctgtgccaaggcagtgtaccagcggctgtttgagtgggtggtgaacaggatcaacagtgtcatggaactccggggccgggatcctcggcgtgatggcaaggacacagtcattggcgtgctggacatctatggcttcgaggtgtttcccgtcaacagtttcgagcagttctgcatcaactactgcaacgagaagctgcagcagctattcatccagctcatcctgaagcaggaacaggaagagtacgagcgcgagggcatcacctggcagagcgttgagtatttcaacaacgccaccattgtggatctggtggagcggccccaccgtggcatcctggccgtgctggacgaggcctgcagctctgctggcaccatcactgaccgaatcttcctgcagaccctggacacgcaccaccgccatcacctacactacaccagccgccagctctgccccacagacaagaccatggagtttggccgagacttccggatcaagcactatgcaggggacgtcacgtactccgtggaaggcttcatcgacaagaacagagatttcctcttccaggacttcaagcggctgctgtacaacagcacggaccccactctacgggccatgtggccggacgggcagcaggacatcacagaggtgaccaagcgccccctgacggctggcacactcttcaagaactccatggtggccctggtggagaaccttgcctccaaggagcccttctacgtccgctgcatcaagcccaatgaggacaaggtagctgggaagctggatgagaaccactgtcgccaccaggtcgcatacctggggctgctggagaatgtgagggtccgcagggctggcttcgcttcccgccagccctactctcgattcctgctcaggtacaagatgacctgtgaatacacatggcccaaccacctgctgggctccgacaaggcagccgtgagcgctctcctggagcagcacgggctgcagggggacgtggcctttggccacagcaagctgttcatccgctcaccccggacactggtcacactggagcagagccgagcccgcctcatccccatcattgtgctgctattgcagaaggctgcaaataaaccttctgagtcagc

SEQ ID NO: 118013 - DNA, 437 bp, Homo sapiens
atgggcagtagaaagttcctgaaaagaagtttcttccttcaaggcagtgtaatatagtgacgagaacaggggctttgaagctagcagacccgggttatcatctcagctctaccacttcctgtgtgactctgggcaagttacttaagctcccagtgtctcagttttctcttcagtaaagtaggcataatcttaccactggggttgtcaagggaataacatgtaaactgtttagtgtagtgcttggtacagaatgagcatttaataagaacagttactaatatgacattactactgctgttatttaaatagtttttaacagtattatcaaaacagcaagcacagttcatggtggtaaatgccctaatggaagtgttcatctgtcaccattgagaagggaactgttaatatccactgactgttactgacagcttcataag

SEQ ID NO: 118014 - DNA, 377 bp, Homo sapiens
ctctccctctcctgaatgtgctctactctcagaggtttgtgtatctggacatgtgtgaatctgtgttttaagaagcccatgaggccaggtgcagtggctcacacctgtaatcccagcactttgggaggctgaggctggcagatcacctgaggtcaggagttcgagaccagcctggccaccatggtgaaacccgtctctactaaaaatgcaagaatcagccagtgcgtggtgacgggcacctgtaatcccagctactctggaggctggggcaggagaatcacttgaacccaggaggcggaggttgcagtgagctgagatcgtgccactgcattccagcctcagcgacagagtgaaactctgtcttcaaaaaaaacaaa

SEQ ID NO: 118015 - DNA, 272 bp, Homo sapiens
caggcgcccgccacctcgcccagctaattttttttgtatttttagtagagacggggtttcaccgtgttagccagatggtctcgatctcctgatctcgtgatccgcctgccttggcctcccaatcctgctgggattacaggcgtgagccaccgcacccggccacctcatttgttttaacagttgtgttacattctgttgtgaggatgtgttactttattaaaccattctcctaatgatagacatttataacccagattttctgtggacgggtg

SEQ ID NO: 118016 - DNA, 439 bp, Homo sapiens
gatgcttgtgaggattaaatgaatatggtaggtggagtagggcttttttcccagtaagcgcttgataaacatgagctgtccattattgttctctggggagaatcctgtgcccccaggtgtgggttcccatcctgtctgtggcttcagagtccagacctaatgccaccgacctccttgcccttcctgcacccctaccatggatcaccattggaggagtggggttgggggcttatcaccccaggaagattagataaattgggaagtggggaagtcttgggcagactcaagacccctgagtcccagctttgtcatgctgtgaccctgggcaggtcccctcctgggaatccatttcctaatctgtgaaataagcacgactgttgctggtgtcacgagaacatggtcagtgccataaagcatgtggcgggtggacttccatcca

SEQ ID NO: 118017 - DNA, 469 bp, Homo sapiens
agagatgacacaagcagttaatctgatttaataaatcctttaattctgtcggtaaatactgggaaggaaaggggatcatggagaaagagggcccagaaatagacattaagccctttttccgtcgtcttcctacactttagtaatattaagacagttccttgagaaagagagcaatctctgccttgctcaggggaaaaagaattgggagtctccatggcctagttgaagagagagagagagagagagacagagacagagacagagacagacaatcatgtatgctttctttcatggtggcgtcctggctgctgcaatagttgcaactcagggaggttaggagcagccccctcctgcatgatcatgcattatcccatgaattctaccatccataatgcacattctctagttgaaggttttattttcccttttctttgttgtaatggaattttctattataccctaaaatatt

SEQ ID NO: 118018 - DNA, 262 bp, Homo sapiens
gtacgtaatctccctactcaacctcttgaaacaactgcacatatcagcacagctaacatttaaaaataatacttttttcactatcgcagtctcctcctccctcagattctaataacgtattacagtttcttttttctttttttttgagacagtcttgctctgttgcccaagctggagtgcagtgataaaatttcggctcaccgcaacctccacctcccaggttcaagcgattcttgtgcctcagcctcctgagtagctgtga

SEQ ID NO: 118019 - DNA, 579 bp, Homo sapiens
cagactctgtcaatcaccgctctttgttctgtctctacagatttaatttctttaagtagctcatataagtagaatcatacaatatttgtccttttgggtgctgcaagaatttaatgtatcatacctgtttaatttactgccttcatatattagagttggaagaaactaaggctcagaaggatgaaagtgagtgtgcatagacacataacacactgatggtccacttactctggaaagaaagaccgtttctttcctccaagatctgtgttctttgtactgcaacatgctgaattacccattttaccacttacagaaggaagtgttctagacttctaagtcaagaatgagtgaaaacatcacaattagactaaatttagcccaaacttatgtcatggcatggaatttgaaaagaatccttaatcatatgataatgtacaaaaagtcacacccacaaacttataagtaaattgtaatcatttaaaatctctctctattctctgttgaattatctgattgcatatatctctatttttggcaacctactgaaagaacttacactagcataagcatacaaacaaa

SEQ ID NO: 118020 - DNA, 124 bp, Homo sapiens
tgcctactggtggccgggcgggatgtaaccggctgctgagctggcagttctgtgtcgctagggttttgcccggccgccgccgcacataagccacgaggaggagctttacgacttcccggttttc

SEQ ID NO: 118021 - DNA, 809 bp, Homo sapiens
tggaaagcagcaggtcagatttactttctgactgcgactggcttagcagaggttagggcaggactgctgaggcagcacatgccctgagtatggcaaacagacttttgtcaaagaccagaagaaagtgtttttaaacaaaagcccagtagttcctaaagttgggcggttttggtttttagcttttttaaaaaaaatatttgatcgaaagtggaaagtggaatacttcccgactcattctctgaggccagcactacctgatacccaaaccaaagacaccgctagaaaatggcagaccctatccttatgactgtaatatatagtaagcaataggtaaaaaggattgtgcaccaagggggacttaccccatgcatgcaaggttagttcaacatacaagtcaattaaagtaatgtatctttcacataaaggacaaaacccacatgatcttctcaacaaatacaggaaaagcatttgacagaactcaaaactccttcacgataaaaacacttaaaaagctaagacaggcatggaacttcttcaacatgatggagggtacctataaaaaaccccactttaacatcatacttaatgatgaaagactgctctcctgctaagatcaggaacgagacaaggaggtctgctcttagtactgctgttcagcccggtgctggcacgccttgccaggacagttagacaagaacataaagacatccaaattggaaaggaagaaattaaattctatttgcagatgatgcaatcatatatatagaatatcctaaggaatcattaaaaactattagaagtaatacatt

SEQ ID NO: 118022 - DNA, 199 bp, Homo sapiens
tctgccaaccacccacactctgtatacgaatccattgtaatgcttccgttctgcacacttactaggcaccaggattaaatgttaattcatttaatcccccaacaagcctctggggctgctactaccagcagcccagttttgtggatgaaataactgaggcacagaaagattaagccacttgcccaaagtcacacagcta

SEQ ID NO: 118023 - DNA, 927 bp, Homo sapiens
ttttttttggtttgccaccattcagctgtctctttaggaactggagtaccaattcctgcatctgtgttctctgttccaacctttctgtgcctatggtgagacaagacacaacttagagtcacgtcggtgtgaaaatcaacttcttgtttaaaatctaagttaaaatatatccccctcacattggataggaatatctaatctatatcattttctatgttacatttatataatgcctctatctcaactgtcctcttaactcatctcatgttatgtccttgttgaaccgtatcccatgcagtgtcctgaaggctgcatttgctcacgtgataataatagtccatgtttcaattttgagtattcctaggatgcaatatttacattcggtttccccaactccaatgcctccttagaagagatctacttctatttgagttcttttgcttgaagacaaaatacttcgttatctttgttcctatatcactgctaacaaagccaagctatcaaggagcctggctttctagtgctggaaaacttgatctgatctcttagatgaagatccaggaaaatatgatcttactcatcatttccattccatctggctaccattatttctcataatagtaaatgatattgaccaagatagtgttaatcaaaatcctacgcttttggaggtgatagatatgtttatggcattgattgtggtgatggtttcttgggtgtatacttatctccaaattcatcaagttgtattaaattatgtacatctttttgtaaacaaaatatcctaacagtctctaggtggttattactcagtgtgcctacacaaacatttcttttaacatcaattgaaagttacattgttgttttatcatatagcaatccaattccttggatatgcgaagagaatttctagtctagtctagtcaa

SEQ ID NO: 118024 - DNA, 510 bp, Homo sapiens
gtgcctcctccttaatcatcacactgaggcctttgtcattccactgttctctgcatttgtttcttgttgtttggagccgagtcagtttacttattcaacattataggtcctattcaacattataggtcctcgaattatctggactgtcccttaatttctgctgataaactggaaaacttgtctgcgggctcatttctttcttgtaagatctttccaaatatagtcaaccacccataccattggcattctgctttccacctcttcccttacagccactggctcataggtgcgtgacctgccccgagttactgctgcccagtacatactccttctatgttggtttatttgcatttttgcagcttgcaactaaaaaatgtcccgaccgattgtctcatagcatttgtttgatttacccattaatgatcctccagttggtagatgttttcttcagctgacagatcgggtttgtacttcctgctgtatttaaaattaaactttttacatgcgaat

SEQ ID NO: 118025 - DNA, 403 bp, Homo sapiens
ttgttctgctctgccaaaaatatttcatggtttaccagactgttctccccagctttgtatcattttttaatgtgatcagcctaggttttgaaggccttgtgaaaaatcattaatgaaaacactgaactgagtgaaacaagggtagagccctgtgacataccattagagacctttcagcaggttggcatcagccacatgaaatcagcccttcttggttcctcactgtaatggttatgaaaccatttaatcatgctcttacccagctcacatttctctatcttatttatgggaaacagaggcaaagtttttgataatgcaagctgaacttcagatatccttatactacaaaattcctctctgtatcactcgtgtaaccctatcaaatatataaaaggcatttgtc

SEQ ID NO: 118026 - DNA, 580 bp, Homo sapiens
ggaaagccccagttttaatatctgagattgtgttatgaggcttaagtcagaacaaagagagctggatgatgataaaggattgtaccaataactgaaggtagtcttattccttattcttccctgtcctccgtaactacttgcctactagcccatctggccatccatccatccatgcagttcttgtccagggtctactgagtgccagtgctatgccaagtgtgaggccacagtggtgaaaaaaagacaggccgggcgtggtggctgacgcctgtaatcccagcactttgggaggccgaggcgggtggatcacctgaggtcgggagttcaagactagcctgaccaacgtggagaaaccccgtctctactaaaagtacaaaaaattagctgggcatggtggcacatgcctgtaatcccagctactgaggaggctgaggcaggagaatcgctttaacctgggaggtggaggttgcggtgagccgagatcgcaccattgcactccaacctgggaagcaagagtgaaactccatctcaaaaataaataaataaataaataaataaatataaaaataaaaatacagat

SEQ ID NO: 118027 - DNA, 278 bp, Homo sapiens
cacgggacataagctgtcacttcaggacgcagtctcccaggtgtgattgaccaagacatggccaccaggctgaagcctgctcagaaagccttcataggcttcgagggtgtgaagggacagaagaagatgtcagcagcagaggcaggacaagcatgggattacaggtgtgagccaccgcacccgggccgattgttgctttctttttaagaatgtgatgtcgatacctgttcctttttgaaaaattggaaagtatagaatagcacagaggaaaaaattaa

SEQ ID NO: 118028 - DNA, 259 bp, Homo sapiens
gcacgaggtcaacttttgcatgcatatctatttttctgggctccggatccatggccattcaaaaagtggtctgtgagcttaaaaatttttagtaatacccgctgggatctttcaaagactctgtagaagccaccaactttggccaggagtggtggctcacacctataatcccagcagtttgggaggccaaggcttgaagatcacttgagatcaggagttcaagaccagcaacagagtgagaccctgtctctattgttta

SEQ ID NO: 118029 - DNA, 316 bp, Homo sapiens
catgggtctacagtctgcaaggtacacagtcagtgagccttggtggcccagatgtcaggcttctgtcacatgggagatctcaacactgccaagctcaatggcccagagactgaaattcttctaactgggaattgattacaaaactcattattcatacccaaaaatgtttttctccttcaaagcttaggtcacctaacgtgaacactcatggaaacaggttttaaaaatagttctacttcattcttgagtaaacaaaacaccctataactggcacctggtaggtaatcaatgaatatctgattagataaaaaccaag

SEQ ID NO: 118030 - DNA, 674 bp, Homo sapiens
gcgagctgcgagaagccattgcggctttgggaggccgtttctgaacgtgaagttccgtttcttttctcataaagtgcagaggagaaaaggatacttaaaataaccatgagagtgatagaaattattatcagtagaccgctcgcacacttcaccctttgctcagtcctctcacggggtggagactagacatgtacttctgcaatttcacagatgagttgacattggtccctggaaagccgcagatgcaggatttggagcagattaaatgaacaaacactggaatgaggcggcataagggttgggggagaaagataaattggtgaaatgggatgtttttgtggccaaaggtgaaatcttgtgggatctgagaagttgatgagaatggagaatgttcgcacgtagtaactaacgatgttactactactgtggactgaaagtaaatgcaccgtttatttcttatcccctctccagttattttaagtcgatagacttttttttacggtcacagagaagccttagcggggccatgctgccaaccactcagcttttttggagaggcagtatcaaatagtagttttaaaaagtgttcactgccagggttcaaattttaaggctatcattaactactataaccctgggcaagttaacctgtgtgcttcacattactcaccggc

SEQ ID NO: 118031 - DNA, 297 bp, Homo sapiens
attgagcgccagtacagctcaatatacagtggtgaccaagacagacaaggtccctgctgtcatagggcttacattatagttggggagacagtccctgtaggagcaaatacacacctaagacaatttcagggaatctaagtgcccctgagggaaatgaaacagggtattgagactagttgggaaagaatgaatgaatgaataaatggtgagccatggaggcacccacccactgggctggggtgggagatgaggaggaggagttggggatcttagagcccagggcagggagcttggtca

SEQ ID NO: 118032 - DNA, 214 bp, Homo sapiens
taagtgcctccttaaggatcactataccttaaggatagtgatcatgaatttaaaatgagaccagagaacatggttgcatgttttttctctaaccatattcaagtctgccagttcaaatgtagagtgagtagagaaatttaactagggttagttttgccagggaggtaaagtacaaaaaataagagaatgaaaatggtaacagagtgcaaagttg

SEQ ID NO: 118033 - DNA, 495 bp, Homo sapiens
gtgggagcaaggccagccacccatgctgccccgggcagctgaagggacaagggcagatggtgagggcagacatttatggggccaggtgctctacccaacccttgacacccaatctcgcactccatcctcccagcacctgatgaagtaggactgcaactatccccacttcccagatgaggggaccaaggtacacattaggacccggatgggagcacagatttgtccgatcccagactccaagcactcagcgtcactccaggacagcggctttcagataaggtcacaaacatgaatggctccgacaaccggagttagtccgtgctgagttaaggcaatggtgacacggatgcacgtgttacctgtaatggttcatcgtaagtgtcaattgggctggggtatggtactcaaatatttagtcaaacactagcctggatgttgctgtgaagctatattttagagattaatattggccaggcacgatggctcacacctgta

SEQ ID NO: 118034 - DNA, 684 bp, Homo sapiens
gtgattagtaaattaattcaacaaattattgagcatctactgtgttccagacactgttctatgtgctggctttagattactcatagtctcctgtgagcctcttttatataaagagtgagttaatctaaattacccatcaattctgtctcattaactgaaacttaattttaaagctttcctgtagaatggagagtcagcattataaaaaggtagctgaaaccataggagtaaacaagatcatcctgggcaaaggaagagattgagaagggcatctagaacagagcccatggattatcaaattttagaaaatgggcagagaaggaccatccaagagggaggaaaagcacgagagaggaatattatggcaagccctaggaagagaatgtttcaaggagcagccaggtgtcagttgctgccaagaggtcaagcaacataagacttaacaaaagtctactaagatttgttgacatagagaccactggtgactttgaatacagtttcagagaaccagtgtgggtagcagccacactgcagttgggtgggaagaaaatggagactcccagtgaggacagtatgttcaagaagaatctgttaccatttactgaatatctttctgtgcacagccctgtactgggtgctgtggaaaaatagtttattctcttaaggagctgtggcctaagcaga

SEQ ID NO: 118035 - DNA, 531 bp, Homo sapiens
gtttgcctaacatctctcttttctggacattaccactttccattgttccacatgatttcaatgggagtgccatgctctcccaagcacaccccatccctttggccacagcgaattagtccagggattaaacacatgacccaagtgtgaccagtcagatcccctcgctagaaatttggaggctggaacagagcaatgagtttctttccatgtgcctggacaggagctgctggtaaccacattccactataggatcaaggaaaagaggaaggtagtttttagaaaagctaaaactgaagctgatgtgtagagaaaggaagagaaaagcaacagagaaagggtttcccaccagactcaagccccagactccagtccattcctaaactgctcctgtctcagagattctatggaagtctctgagacaaggtagagccgagctcggctctaccttgtctagatggatccaccagcatgatgttttctggtttgaggtcaagcgtggataagacctaggcttatgagtttcatcagggc

SEQ ID NO: 118036 - DNA, 516 bp, Homo sapiens
aatttttaaaaaagcgtaacagttgcttcaaaataatctgatgagcagggaaaggaaatatagggtcggttttacattaggcaagattatgtctcaattattgaagcaaagtgatacttaggaatttattatactctttgccttacttttgcatattttaatttttccaccaaaaaagactgaaaaatataatttttaaaaaggcctaacaaaaattatacatgttcatcctccatatggttgcagaagttcaactcaaattctggttgtaggtatgactcactccatcatttcatttaggtctctgctccaaggttattttggaaaggcctttccctgccagccttatatgaaatagcatagcatctggtcttgctgtactcatgtcctgctttattttcatttgtagtacttaactactacctgacatgataatataatcaacatttacttgtttatctaaccctttgactaggacaaaagccccatgaaggcaaaggctttgtctctttcaca

SEQ ID NO: 118037 - DNA, 954 bp, Homo sapiens
  misc_feature (954)..(954): n is a, c, g, or t
agcggaagagggagggccgggcgcgccgcggctgcttgcagtctccgcaagcggctacatcacagagctcagcgtgcggtgtcacaggccccgcggtcccgcccaacagatgcaccgagatgcgcgtgcgcagaaagcgtcccggggatttcctcctagagtgccaaaatcttttccattcaacacctcagtcgtgtacaaaaagactctgtttgtagaattcacggatcaccttttcaacatcgctaagccaaggccaccctggatgggtctgctaggtcctaccatccaggctgaggtttatgatacagtggtcattacacttaagaacatggcttcccatcctgtcagtcttcatgctgttggtgtatcctactggaaagcttctgacgggacgctgaatatgatgatcagaccagtcaaacgggagaacagaagatgatacaagtcttccctggtggaagccatacctcatgtctggcaggtcctgcaaagagacatggtccacctggcctctgacccactgatgccattacctactcatatctttctcatgtggacctggctacaagacttgaatctcaggactcattggagccctactagtatgtacgagcagggagtctggcgcaggcaaaccgacacagaccttgcacaccatctatactacttgttggctgtaattgatgaacgggaaacgttcggcactcagaaaacgacagaactccttgatgcagcgatagggatgctgcatctgctcggggcctggccttacattgcacacagtacaatgggtcatgtcacccaggtactctgccaggtattgtccacacctgctcaacactccccagggtctccacaattacgcaccagagttctgcactcagttcacaacagctcggcatctaacagattagccacccaatcctgcaatcctggccacggggcctcacn

SEQ ID NO: 118038 - DNA, 311 bp, Homo sapiens
atgcgctcttttgataatcatgtgtctggtgcgtatggggtgcctgcctttgatggggtcccaatctcattggggagacataaccataaaaatataaaatacagcatgtcctgccaagggttcaaaaagagctctgagcagagtgctctgaaaaaaagagggagaaataaattctctttgtgggagggaatcaaggaaggctgcagaggaggtgacaggtaagtggggttttgaaggatgagtagaagtttgccaggctgggggtgagaggaggagctggggaaaggctactttaggaaaaggcacttggc

SEQ ID NO: 118039 - DNA, 290 bp, Homo sapiens
tcctcatccagtgagtgccacgtggttccactcattttaacaagcgttttttgagctgtgctctgcgcaggccatgtgacaggtgtaagcaagacagacaggccttgggctaatggagtaaaactcctggcagtgcgtgggtgcaggaagaacagttggagtttggagaaactgaagcctccggaggctgaagtggtgtgtctgaggtctcagtcattctgggctctcatcttggggaggaggggccatcactgagcacgtggctgggggtcctgggccacaccagccag

SEQ ID NO: 118040 - DNA, 821 bp, Homo sapiens
catagatacatagtttcaggtcatatgattggatttctttttgttattgttaagctttgatatttttattatttgctcttgtttttctgataaccaaagtaatactttgcattgctataaagatatacctgagactgggtagtctataaagaagagaggttttattggctcacagttccgtaggctttacagaaagcatagtgctggcatctgcttagctcctggggaggcctcaggaatcttacagtcatggtggaaggtgaaggcagagcaggcatgtagcgtggtgaaagagagagagagaaaaaacaatgactaaatctggaaataagtcactattgtgaagacagcaccaagccatgagggatctgtccccatgatccaaacacctcccaccaggccccacctccagcactggggattacaattcagcatgagttttgggcaggcacacatatctaaactatattaacattcttattgtgaaaattttaaacattactgaaatgtataacttacctattaaaaggttctcataagcccaccccttcccaccagcatatgtgtcattgtatcacaattactcatccttcagaatcagaatcagcttcaactggcatctctttggggaagcatttccctgattctctatctcccaggctggggtcgattggcttgtaataggcaacattctacgtggtagttaccccttatacatgggccattgtcacttaaccaataggcctcattggaaattggcccctcaagctcacattcagggccaacttggtttacccatggttctaaaagtccagaaccct

SEQ ID NO: 118041 - DNA, 830 bp, Homo sapiens
catagatacatagtttcaggtcatatgattggatttctttttgttattgttaagctttgatatttttattatttgctcttgtttttctgataaccaaagtaatactttgcattgctataaagatatacctgagactgggtagtctataaagaagagaggttttattggctcacagttccgtaggctttacagaaagcatagtgctggcatctgcttagctcctggggaggcctcaggaatcttacagtcatggtggaaggtgaaggcagagcaggcatgtagcgtggtgaaagagagagagagaaaaaacaatgactaaatctggaaataagtcactattgtgaagacagcaccaagccatgagggatctgtccccatgatccaaacacctcccaccaggccccacctccagcactggggattacaattcagcatgagttttgggcaggcacacatatctaaactatattaacattcttattgtgaaaattttaaacattactgaaatgtataacttacctattaaaaggttctcataagcccacccttgaaggtaacagaaaagtttcatgtatcttaaaattcaacaaatgttttagtacccactctgtgccaggcaaatagcctaccctcatggagcttacattttaatagggagacagtcaataaagcaaacgaacatgcaaatagataatggactgtcagttggtgacaaatgccatagagtaggctaagatgctattttagaagggcttggaaagtcttctgcatagggtaatattggagcagagactaaatggtggaggagaggaatatgggactgttcagag

SEQ ID NO: 118042 - DNA, 824 bp, Homo sapiens
tgcgtcatcccagacacccgatgttacaagaccgttataacaaagtctcattttcactgttcttcgtgcctctaagtccattctttgggtttgaacgggtgagtgtgtttctcacaacctgagggcccgttcgggatctctgtgcctacgtggagtgggactccggctgagagaagagacatgtcccacccgatttttgtgccccactctgtctgggtgtcctggctccccacagaagccatagataaacccgagactgttattcaggagacggtggaggtgacgcagggagcaaaagcaggcactgcggcaaacaggcaacctcgtgcaccagccaaggttgggtatttccttcagcctattaaaggaattgggaacctgtggtacccagatccataagagtgacacggagtaccatctcttcaccttggcaagagcagatccttcatatctgtagttgaatcacacactctcagatatctgagcttgaattctacagggacacttatctcagcttttgagtctcacggagaaatagcctgcagaccaagataataccggcaacagctagtcttcctgcccaacgacacaagccagtttggtgaccatataacacatttatcgtaagcgggtgcaacgacaattatccgtattcaacactttggcagtaacaccatcgtacgcagatgccttggtttatcccttcaccttcccgccattgattcgtaagatctccctgacgccctattaccaagacattcctccctgtacaagacctgtacaactattctgacccctcaaattaacaaacaaaactccaataa

SEQ ID NO: 118043 - DNA, 437 bp, Homo sapiens
gccaagagtgaacagccgaggcagagggggcccggagctctgagggctgcgctctctgctgaccactggctaggctgtccggaggaagccgcctcagctctctgagcttgagtcttgggcctctgggggggcctgaatctcagctccccacctccctgctgtgtgcatgcgggtaggcctgtcagagccgttctctcatctgtgaagcagaggtgatgacagccctccctctagcacagatggacaaatgagacaagatgtgtccagggcccgggaaccagcaggactgcaggtggaggcccatagttggaggcccacagatggaggccatggtgattgctattgtctgtcccatgcattcccattctaggatgtatacagaaatgtcctgtgggcggctgggcacagtggctcacgcctgtaattccagcactttg

SEQ ID NO: 118044 - DNA, 791 bp, Homo sapiens
cctcccgggttcaagtgattctcctgcctcagcctcccgagtagctgggattacaggcatgcaccactacgcctggctaattttgtatttttactaaaaacggggtttctccttgttggtcaggccggtctcgaattcctgacctcagttgatctgcccgccttggcctcccaaaatgctgggattacaggcatgagccaccgcacctgacctcattagagttttaattcgcacttacttaatggttagtgatgttgaacatctttttatgtacttatttgccacctgtatctcctctttcgtgtagtgttttttctccttttttgctgattttccaattgtttggtttttattttttgttttttttgtgtgtgtttttttgaaacagagtctctgtctgtcacctaggctggagtgcaatggcatgatcatagctcactgcaggctcaacctcccagctgcaaaggatccttccaccttaggctcctgagtaactgggattataggcacgtgccaccatgcctggctgattgttttctattttttcatagagacagggtctcactattttgtctaggctggtattgaactcctgggcttaagggattccccccctcttcagcccctgttgggctcccaaagtgctaggtttacaggcatgagccaccatgcctggcatactgttgagttttgataggttgttaatagattttagatattagtccttatcctgaatgtggtatgtaagtattttctcatagtctgtagcttgtcttttcatccttttagcc

SEQ ID NO: 118045 - DNA, 643 bp, Homo sapiens
gtgctggggttacaggcgtgagccaccgcgcccggcctccttttttttaatggagacagggtctcactatgttggtcaggctggtcttgaactcaagtgattatcccacctcacttcctgagaagtaactgggattacaggcataagccacggcacctggcatctttctacttttgtcttttctttgaaaaggtcttttgaaggttatttctcttagatacagaattctggtgtgatggttagtattaagtgtcaacttgattggattgaaggatgcctaggtagctggtaaagtattgtttttgggtgtgtctgtcagggtgttgccagaggagactgacctttgagtcagtggactgggagaggaaaacccaccctcatcagtgtgggtgggcaccatccaattggctgccaccgaggctagaacaaagcaggtggaagaagatgggataagctggcttgctaagtcttttggctttcatttttcatccgtcctggatgcttccttctgttcctcctgcccttgaacatcagactccagattgtttgggctttggactcttgacttagaccagtggtctgtcgggggttctccagccttcagccacagattgaaggctgcactgttagcctccctgctttt

SEQ ID NO: 118046 - DNA, 660 bp, Homo sapiens
tgcatcacatggcacaaccccatgtggccctaaccccagcccagtacctttctacgtttcttcccactttcctccctcattctctgcctgtgtcttttaatactgaaacaccttcttgttcacatggtgaatctgttctgaggataggaactattattttcaacagttactctttccattctcatagtaaagaaacactctagcaatatattcctttatcttcagtgccacctcttatccccagtaaacaaacacattttgaaagcaatgtcaaattttaagatgcatgttatatttaagtatagttaaagtagtagtatgcacaatgaagttatagctttgacctaatctggaagtcactgtatgagaagttggaaaatgtcacctttgaacaatgttccacttactatggctggaaaatattgttaactagacatattcttgtgcagtggaattgtgtcgtgttcagaggcaataaatctcaaagaggccctgcttatcttagtttactgcaggttgaatatccctaattcaaaaaatgcgaaatctgaaatgcctcaaaatctgtaatttatcaccaggtgtggtggctgatgcctgtaatacctcccctgggaggccgaggcggggagatcacctgagttcgagagtttgagacca

SEQ ID NO: 118047 - DNA, 384 bp, Homo sapiens
atgaatgatgcagggagccctcagcaacaccctgggcccatgaatccccaacggggacagcaaggtgggagagatgagccccagctggaatccctgggaccaggtctgtctctgcccatacccagactctcttttctcttgagaaaggaggaagaatgaggagtaagaaggaaaaaaaaatccagtcactgtccctagttaagccatctccttagaagtgagggcccagtggggcaggtaggctgtgtatactccacgaggatccctaaggacctctgcctggagacatgagtcgaaaacagaggaagcccacagcaaacccgtagatgagcaagaagccagtgtcaaatgcttgggcacatggcttcggacgtggtggagtta

SEQ ID NO: 118048 - DNA, 412 bp, Homo sapiens
ccaaaccctgatgtgtaacaggtggcaatctaaatggaaattgtacgcagatggaaactcagaagggacccaccttgcaggagagtggtaaccaaaagtcctattttgaacacatgtattttttttttcacaaatggaattgtacattatgttttgctttgtgtattactcttttactgatgtcataattttttcatgttcataatagatatagaccataatttttacgctacatagctctcctttgaaaatcaaactctgactctaccatttaccactttttaacattgggtaagttacttaacctctctatgaaagttcttagtgcagcacctaaaacacagtaagtgctcaatcaaatttggcctccttttcttttcccaaggtactttacaagagcaggatattactg

SEQ ID NO: 118049 - DNA, 341 bp, Homo sapiens
aaatataagcagaagtgtcctgtgacagtttctaggagcactttgtcaggggacaagaggtgaggagagtaatgtgtagaaagaaaagacatgataattatcacaaatagaatacttgtattcattgttagtccagaccttaaggtttcaaatttgaaggtttaccacctaagggaggaatagaaaactgggagaggatttatgatgcaggaaagaaaagagatgtatgccaggtgcagtggctcacacctgtaatcccagcattttgggaggccaaggcaggaggattacttgagcccaggaggttgaggctgcagtgagccatgatctcgccactgccc

SEQ ID NO: 118050 - DNA, 377 bp, Homo sapiens
catcaaaatactggatgttaaagaaaaagaaaacattttttaggtatttaggcaaaaacaaaaacatgacctttatatcattaggagaataaaattatgttcttacactgatagtaatgctttatgccaggagaacatggactaccatgtttcagatatcaaggaaagcacatatgatccaaggacttcgtattaagcagaactggctttcaagtataaagggcatagcaagcagctattagcaattaaagaactcagaaaatattgttcccagcagttttccctaagaaatttagagaatgaggttcagtcaactagagtagggagattgtagtatgtgatggctataggatctgacaatgaagatagagtaaacc

SEQ ID NO: 118051 - DNA, 463 bp, Homo sapiens
acttcatttcagatgcttccccatgcactctatactcagtatgcccatcattgaactctcaaattttccctcccctcttcctccccagtcttctctatttcacacatccagctaatcaagaggctgaggaggagaatggcttgaaaccaggaagaaaaggttggttcaatatacgcaaatcaataaatgtaatccagcatataaacagatccgaaagaaaaaaacccaaataaccaatcaaaccgggcagagcacagaagcacaattcagaagataccaaatggctgacacaactttaaaagcatcctggccctagctaacagtcacataaacacatattttcatctctcagaatggaagaaaagatgaaggctgatcacaccaaaagtgtcaacaagggtgtaaagaaatgcacatatcattcactgctggtgggaatagaaattgatataagcttactgga

SEQ ID NO: 118052 - DNA, 4177 bp, Homo sapiens
caatgaactccatctctgacttccccagctcgggcaggtatgagtgggactctggccgcaggtggagctcctgggacctgcaggaggtgaggcatccaacgtcacataggagattgcggctctgagaactcccgaggccccgaccaccctctgcgccgagcatctactgcgcgccgtgctctgtatgatcctgccaggaaggtgctcacaggagcccacctcccacggtcccacagcagggcaggactccaatgcagcgctgccttccttcaggtccacattcaccgaggacatttacagggagggagtgtgctacggtggcactggaacaccccagagtgactgcccctcccttgctacggaccaccccaccgtccccacctggggctggctacaatgcagaatctccagtaccatctgaggcctactgagtcagactcggcattttaacaagatcattgggtggttcacaggcacagtccatccgggaaacgctgtgagcctaacacagataacagcacccgtgatgccatttccctctcacccacgcagggcagacatcgctggccgatcgcagaactcttgctgctgaacctggcctaaccaccttctcaactcagcctagcagcctggtgcagagactggagctgcccagtttccccagcgactggctctcctgaaccctcctccgcagtgtgcctagagagggcatggccttgcctaactaagcacaccccacggagctgggactcctggcctccacctctgaggctccaaccatcacccaccagaaagagcctgaatatgggccttgctgaaatgcttttcccagaggctaagcagggaatccacagctgttcccctcctgcacaagccctgcctggcctggccctcgccgtcccgccactgcactcctgccccagggcctttgcacctgctgggctctgcctggagcactgagacctcaggccctccatgtgagctcctccccttcctgtcatggtgcagatggcgcctccttgtcccaggccagaccacactacacccgcctgtctgctctctctccactgccctcccacgcgcttggtgacaacaggtgtttcctggccacctcccccacccatgaatgaacgcagggtggttcacctgtcttgttcatggctgtccccaggtactggcgcacagtaggtgttcaatcagtgcctgtagactgactgaatgctgcccactgcagcacgggctggggccgtgttgctggcccccccggggagcggggcagccacccctctgtgctcacctccctggagggccctcaagtccttgtccctccaaagctgggccccaagacatccccctcttcaaggcccagaacccagggcttcaccattacatggggcttggcaggaagcgcatggtgttttctcttaaacatgatagtggcactgcagtggctcaaataatgtcctcccaaaatccacggccactggaacctccaaatataacatcctcccaaaatgcacagccactggaacctcaaaataagaccttctttggacctagggtcattgcagatggaattaagctaagatgaggccatcctggattaggatcactgggatccttgtaacacaacaagagaacacagagacagacaaggaaatggccacgtgagacagaggcagaggcagaggcagagattggaccgatgcagccacagctgaggaacgcctgtagcccccagaagctggaggagacagaaaagcatcctccccttgagccttctgagggggcgcggccctgcggacgccctgacttcagatcacgggaatgcacttctgtggcttaaagccgcccagtttgtggcacgttgcgacggcaggcccaggaaaccaatccaggtacagaaggcacgctgcctcggcctcccctcctccagacgcctgcgcccacctgagttcaccagccccgcctgatctggggccctgggacacctccgtggtaccatgaagggctggggcctggtgcctcgacttctagtcctggctgagtaaacaagagcccatccctcaacctcgcagcctcagctgccccatctgagaaataggcacaactccccacacctcagccgtctccagcagaagctcctagagaagatgggagaaagaacgtggcctaccgatcccaagtgaatgcatggagagctggctctgacccagccctggccctccccttgctgtagtccctccagctccccaccccacctccctcccactccccacctccctctcaccctaccacctaacctgttcattcccttcccacctggatcaaggaaagtaaggctggcccagcacaggcacacaccagagggtgtcctctgccagctggagaagaaggaagaatgggaggagagggcaggggccccaggggcaccaggtgtggactcaaatcttcccacagaagcccagccctgctgcagcccagcttggaggtccccactgctgcctaaacccacagaggccactgaagttccacgctggaagtctgagggccacgtggctcttccctgctcgtcccatcctcaccccgagtcacgcccacgccaggtcaagggtgaacacacggcccgacaccccatcatttcacaggaccctgtgtgctcctgctctgctacgggcctctgcttctccatctgagaaggagctctcacgccctggacagggaggcagcaactctctcctcaccgttcattcccgggctggaactcagacagcagggagggcctccgccgctggggctggatgatggagccgggcgacaggtgggaggcatagtcgcgggagtggtgctggtactccaggagcccgacgtcctgcaggaggggacagaggagtggtgagcgtgggcgggcacgggcatggcggggcacggcagggcacagtgggcaaggccgtggactccctgctcaggctcgctcctgccctaggcagataagcccaagtcctgcagggaacctcagggaccgtctggccagaggctacccttggggccgaacaccaaggaggagaaagaacacagctgaacggccctgggctgcatccttcccacacagcatcccagggacccacgatcacgcccaccttccaaatgagaccgccaagcctgggaggtctgatggggctgtctgaggccacaggctaatacaggcctggaaccatcctaaccatggcctctgtctgccggccatgctggcgttgactggggggccagagtagaggaagctgtcttcgcttttctaccctcccaccccatcctacccctgccaggctgtgggtccctccagcctgaggagctgaagcttggaaatgcaggcctgggaagacaggactgaaggtgcatacggggcagcattatttgtaaaaacagaaatgcatttgcagcaacaactgggaaaaggcccaacctagatgcccagctcttggcagggtgggtaagtgatgcccacgcgagagaacgaggctcgggcctcactcgccaggagaaggatggatggtggcaagtgatggcgacaaacacccgacagccagcgaggcccaaagaccaggtttcagaacaaagcgacccctgaccccaaggccgccctgtaaaagaggaactccccgctcgtatcacagccagaagggtaagccttaggcagaccttcctcctttaataacacaccgtcgtccatttgacaaagactctccttgcccacacctgagtcaagctcctctgacccatcctctctctacggggcctcggccttggccttggccttgcggggctctgcccagctgcaggcatcctgctaagtcagtctagaggaaccccccaccctcaagcgctcctcttagtaattttccatccaccgacccctccctccgccctgcggctaggctatgaggccccagctgtcttggccgtatttggcgctgagcctggtctctctcccttatcgtgacagtcttgacgctgatagcacaattgtcctgtacggtcttcctgcttaacaagagtccaaatacttgtttctttaacacattatccattatcatagggggtaaaactcaatatcaacaaattagatgtataccaattgccaagtacacccagatttgagaaacattaaactgtgttt

SEQ ID NO: 118053 - DNA, 402 bp, Homo sapiens
gctcgggaccgttgggcacgcaccgtagtctaatagaaaacaaccgaaacaataattcaagcactgcttattacaattttactgggtctctattttaccctcctacaagcctcagagtacttcgagtctcccttcaccatttccgacggtgcgttggcccaacattttttgtagccacaggcttccacggacttcacgtcattattggcccaacacggtgcgttggcccaacgttgggccaaccaaccgtaggagaacctcgaaggcatcttggaggtccctgtctctgccaggcactccctccctgtcttctcagcaccctgctggcatcacaaggaaatgtgggccaaagaccctcatcccacactaagaatggtccaacagaaaccagcctggtcccag

SEQ ID NO: 118054 - DNA, 105 bp, Homo sapiens
aaatatagagcttttttgtgggggtgattcattgaacagttaatattggcttgctaggattataaaaggtaataggctgttaaaattaggaggggtgacatcagc

SEQ ID NO: 118055 - DNA, 604 bp, Homo sapiens
aagattccttgtaaattaaaaaaattattcaaccttaacatggtactatttatctttctaatatacacaacttcagatgttatgatgaaatactggaaatattctcattaaataaaaaagtaagataagtcttcccagtattgccactattattcaaaattattctggaactgcttcaccgtgcaataagtaaagaaaaggaaaaaaagagttataaatattggaaggaaaaaatgttatttcctaatgttgacattatcttcctaaaaaaccttaaaaattaaaaataaaaataattagagataattatctcctcccaagtggttttctaattaaacagacaaaagaaaaaaatgtgcttataagtggtataattacatttaaaaacaaaaaatgtactccataagtaacctctatcccttccttctccaacatatatagattaagttttgtcttagctctaggtcataatttaattaaagggagattgatcttatgactctgactctgttttaaaaagtaaatattttcctgttttttgcattataaataaactacctgtttattgtataaattttagaaaaatacagatgagattcacggg

SEQ ID NO: 118056 - DNA, 249 bp, Homo sapiens
tatctgtaaggtggcaatagggattctagtttcctgacacttgaaatggctggtataggagcacctcagaaacaagctaggctgctagaaagaagaaaggtattctctaaatttagaacattattccaatatttcagaaaaagggagagtcctaattataaggtagttgcgctgtgctttgtaatgccagggcagagacagcccaggtattaggttctcgcttgcttttgtgctctgtttggaagcacg

SEQ ID NO: 118057 - DNA, 371 bp, Homo sapiens
ctcagttggcccctggtcccattgtgtagggtggctgcccaccgctggcgagggcaaagggccagtgtgacaacctttctggttaccctcagttggtggatcctgagcttttgtccggtgtccaagaagaatgaggtcacactgacaattgaaggatggtgagggcagataattttactgagcaatgaaaacagctcttaatggagaggagagctggagagggaatgggactagcaggttgtcttccccaaactcaggtcgtctctctctgtctacccactgagtctggggcctttataggcacagaatagtggcagggcgggccacaggtagtattggaaaaggcaacattcagttggttgaaaggcatt

SEQ ID NO: 118058 - DNA, 676 bp, Homo sapiens
gttaatctttttcccagtcttccccaaagggacctacagccttctaccaggatgactgtgacttagagaaaagaaaattctcagatatttggggaattctggacactggctctgatttgacaggaattcccagagaccaaaaacatcactgtggtccaccagagtagggacttatggaggttagctggtggatggagtgtgagctcatgtctgtttcacagtggatccaatgtgtccctgaacccaccctgtggttggaatagacacatactcagcaactttcagcatccctacatttgttgtttcacctacggactgaggacaagtatgataggaaaacccagttatgagccactaggactggtttcacctagtaaaagagtaaaccaaaagcaagagtgcattgagtgctatgtaaatgctctccaaagggtggccttggcagagaaggatttcaataatcaagcagataggatgacctgttctgtggacaccactcagcctctttccccagccacccctgtcattgctcaatgggctcatgaatacagtggccatggtggcaggggtggaggtgatgcctgggctctgcaacatggacttccactcccaaggtaacctggctgtgactctgaaccacctccatcatagaagaggcagtgtcttgttctcactg

SEQ ID NO: 118059 - DNA, 613 bp, Homo sapiens
cttaatcttcaagtattaaggacaacctgtcctttttatacaagtcatacattagacatgtgcctgagattacaaaacactgtgatcgagttttcaaggctagggatacacctcaaactcagatgtacttctttggtgcctatttgtaagtcagcaaaatccagaactcagcaatatgttaattaatgtattaatacagaaaatatttttgtgcattatattttctgcattttagatatttgtgtgccatggaatatttgatgatttttggctttatttaggttaagtcaaccaaagcattttgaaatgctgctttttttttaacacatgtatttgtgggtttttgttttgttattgttgttgtttgagacagggtcttaactctgtcatgcaggctgaagtgcagtgtcacaatcacggctcaccgcagcctcaacctcccgggctcgggtgatcctcccacgtcagcctccttagcagctgggattacaggtgcccaccaccacgcccgtctcctttttgtatttttagtagagacggagtctcaccatgttgcccaggctggtctcaaactcctgggctcaagtgatctgccctcctcaacttcccaaag

SEQ ID NO: 118060 - DNA, 642 bp, Homo sapiens
agttgctgacttatttatctcccacgggacaaaagtaaccttctccaagccaagaagtgcttcttagaggccaagagtgcttctgtttctttgtagtttttgtttgtttccaatctgcacaaataagtggattgtaacaggaactcccatcacctagattccacagctgctaagattttgctacatttgtttccacttcatgtttgtattccacttccaccaaaacagtgcctaacactgccttgaacagcactttgaataaagaagccaggactctgggaaatggtgggaattcaggtttgcagaacagcctcctaggagtggcatgggatggggaagtgggtaacgaatataaaaagttgtccatgcctgagtacctattatgagccaggtgctttacaggccatctcatttcaccctcacaactttatggagtaggtactgttattatcccaattttatagagaaagaaatgaggttcagagaaggaaagggacctccctaggtcacccagataggcaatggcacagctgggatttaaatccaagccctgcgcccttctcactgtgccctgcagcttgcctcaaagggtgccaaacaggctgccacctgatctgcttctatttcacagtgtacatgaca

SEQ ID NO: 118061 - DNA, 276 bp, Homo sapiens
ggagtgcggtgatgtgatcctagctcactgcagcctcgctcctgggctcaagcagtccttccacctcagcctttcaactagctgggaccacaggtgtgggccaccactcctggctaatttaaaaaaaaaaaaaaatttacttttttaagagatggatcttgttatgctgttctggctggcctcaaactcctggcctcaagtgatctttccactttagcttcccaaagcacatactctttttgaaacattattttccaacaaacatttgtgtctact

SEQ ID NO: 118062 - DNA, 218 bp, Homo sapiens
taactttgacttatggacagctcacagccaagttaaggcccgcctttagcacatacataggatataaactgtagtgtatttaacttttctttcatcttattttccctgctctttccttagcccagattttttcacttaaaaagataacgtatttactgacttttacacatttttattagctacctggaattatttttgtaacacgttaagtgtaaata

SEQ ID NO: 118063 - DNA, 487 bp, Homo sapiens
gcaaaccctttgtcttcttcagccactaacacataggccccatccagttacttccaagtggtttgtgggctaaaaaaccccagttactaaaggaagtgtcctcaccaaaccccagaattatgcctaggcatcctgagacatgagaaacaacagggaggagagatcacacagctgacacggagctcccgctgagcttgtccagacagcttttccatgcacggctccagggccgctggaagccctcacccgggtcctgtagctctgggtgggttgtactgatttctgtgcacctccacggctagctcagattgttttaatgctgtgaatatccatagaaggcaactggcaagttgtcaaagtcagagaggctatagaggaaggcacgttactaaaattagagaggcctagtggtgtaatgaaaatcagggcccaccagggccgggattcccactcctcagcctcagcggctatgtgacttggaagaagt

SEQ ID NO: 118064 - DNA, 694 bp, Homo sapiens
gcatgcctgtagtctcagcttctggggaggccgaggtgggaggatcacttaaacctggggaggtcaaggctacagtgagccatgagttgtgagtgtgccactgcactccagcctgggtgacacagcaagaccttgtctcaaaaaaaaaaaattggtttcatgctagggaatctgtcttactagttacatgccagggaatcatggcattccatcaattcatgacaacccaacatatctgcatacgtgtctatatagcatatctgcagacatggtgagcaggcatgtgataacattcagcatccattctcacagttaaaaagttttttgagcagggcgtggtggctcaaacctatagtctcagctacttgggagaataggccggaggattgcttgagcccagaagttctgggttgcagtgtgccatgccaacagggtatccacactaaatttggcatcaatatggtgaccttcctggagcagggttgcctaaaaagaggtgtgaaccggcccaggatggaaatggaccaggtcaaaactcccatgctgttgagtagtgggatcatgtcactgcactgcagcctggacaccatagcaagggtccatctctcaaaaacaaacaaaaaccaaaaaacttttggggctgggcagggtggctcacacctataaccctagcaccttgggagactggggtggg

SEQ ID NO: 118065 - DNA, 297 bp, Homo sapiens
acacacacacgcgctccatcagtcccacgcctgcttgtccgtcaagtctcagtctagccctcacctcctcctttgggaagccagcccagagcccctgacctgcctcatccctccctccccagagaaccaggaggcagttaggggacaggccttggcaatcaagcgccagattcaaatcctccctacttagaatctctgaacctcagttttcttcatctgtaaaatggagataataataacagaccattaaaaacccaccctcaggtagtaagtgaaatccgaaggttcaattgtata

SEQ ID NO: 118066 - DNA, 628 bp, Homo sapiens
ctctcacacctaatggattataggcagtcataacttcagcaagttggtttgaaggtgggttccacatataaatcacatttcagcaagtatttttgcttctacctgaaaaacaccctcaatttaacagtgataaaaacaagatttgtgatctgaaagaacactgtccaacatataacaagcacaataaccttttggtatatgtgctgctgaagtgagcacatgggcgtgataacctttttagcgctcaaataagggctgcaaatacaacccaaccctctgtaaggggaggagagtaggcagaatttgagactcacacacatctcactctttcagggcaaattctgatgcactttagatttccccttgaattacacaaggcattccattttaaccgaaattttttctgtatcatcaaatactaagggaggccaggcaaggtggctcacgcctgtaatcccagcattttgggaggccgaggcaggtggatcacaaggtcaggagttcgaaaccaggctgaccaacatggtgaaaccccatctctaccaaaagtacaaaaattagctgggcaggcacctgtagtcccagctactcaggaggctgaggcagaagaatagcttgaacccagggg

SEQ ID NO: 118067 - DNA, 414 bp, Homo sapiens
atatgttatctaaaataaacaaactttaaatataaagacacaaatagattaaaagtaaaaggtaaaaatacacacacacacacacacaaagtagatctcaaaccagagaatattttcagggacaaagaaggtcattccataacgataaacgagttaattaatcaagagtatgcaatcctaaacatttatctcctaataatagaacttcaaaattcatcaagaactcacagaacttagaaacctgaacattgaaaattagacaaataccaattatattgggagatttcaatacccctcctcagtaattgatagaaagagtagaatcagcaaggatacaatagacctgaacaactctaccaaccaacttgacctaattaacatttgtttttcttttttcaaacagagtttcgctct

SEQ ID NO: 118068 - DNA, 105 bp, Homo sapiens
gcacgagaatgcgaggagacagtgaaccaggagcagagaagctgggagagtagagacaaagcgtcagtagactgaagctgagattcaagagctcggtaagatgga

SEQ ID NO: 118069 - DNA, 800 bp, Homo sapiens
ggaacagtattgaaactctgggaattatctgagatgtttttggctttctgtgacaacagtggggaactcttccagtcagaacagggtgttaatcaaggcattgctaataatgagagcctctgttcctggtctcatttctccctgtgatctgggaaggctgccattttggtccagtaactccaatggagtcccttccaggaagtccttgactggctgagccctgtctcatggttcaatacataaatacgtagaaacctaggaactttccctttcgctttcttaagttcctccctatggtctcaggaactggccctttgagggtacatcaggctgaactgagagcttttgtggttggagtagttgcctgtagtcttgaggatctaagtggcaaaggcctttgagaaattcctggagactgtcctgaaaggatacagaaagccagagccctggcacagtggatttgttttataaatccatgaagtctcttaacaaagaaagactcagcagagtaaaaatgaatttggtgtcactgcagagatgaaaagtaaaggaaagtttgtgtcttggtgtcgtgtgtttgtgtgactttggtatccccaccaactcccccatttccaagagtgaaacactggttacattgggatcatagccttttgaaaacctccatttggttgctttctaagaaccactcagataccagagtctgggtcagtgaccccaatcttgccaccattgtctcttgccaaaaatgtgagcagacagatcaaatgatatattcacactccctgggtgagtgtggg

SEQ ID NO: 118070 - DNA, 174 bp, Homo sapiens
ctaagtaaggaaccacatttttctaccctgtaatcttttttactctgtaaactaattactttccatgctagaatgctcacacagcactggctacgtaatttgtagggcccaggtaaagtgaaaatacagggcccgttacgcaaataaatattacaaatttcatgatggcaacag

SEQ ID NO: 118071 - DNA, 190 bp, Homo sapiens
caagaactccagtgtctaattctggcaaattcctgttttagcatgaccttagatgactagtctaattggttcagcatcttcctttgttaatgtgatgatcattattttgccctgctttgtatgttgcagtaaataaagtgctgtgtaaatgctaattattagtgattatcaactgaattatttaatctag

SEQ ID NO: 118072 - DNA, 444 bp, Homo sapiens
gggctgggattgggttgggattggaggctgtgggtttggaggcatcttcgagggcactgcccgtctctgcccgagtgatgctctgaccacagatgaattcatcgttcactgtaaaaatcaaatacgtggcccttgcgtgtttttttttcctcttttgacaagacaattgatgtgccatctccagcgtatctgcttgggtcggaagacttgctttagcctcctctagaacaaccagcgtgtctttgggtttattgcagtctacaggatctctatgttatttaaggactagagaggtgagcgatgaaaaagggaaagatataatgggaaccatttttttaaacaactttattgagatgtgatttacatactgtaaaatttacacatttcaagggttctatgcaataatttttagtaaacttactgagctgtgcaaccaacaccata

SEQ ID NO: 118073 - DNA, 213 bp, Homo sapiens
tgcatgttctttatgtgttagtaagtgatcttttgctctttttcatagaacatctttgtattgatgacatgtcaattcctttgtattactcattagggaattagttcagtttcctgaaagaatctttctccctggggaaagagggtcaataaacaggtaggttcaaagcaatgttccagtggttgttttcacaacacaaatattcttcttttt

SEQ ID NO: 118074 - DNA, 204 bp, Homo sapiens
agcaataccagacagcaaggacacctgagcgtgtgttaaaaatacaggttcctgggaccaactcctacgtgtctgagtgcctcggcgaaacctggagatgtgtatttttaaaggcccccgaggattcggatgcacggtgaggttggagaagagctagcccaggggtctctacaaatgaagggagccctggaggctgagtcccct

SEQ ID NO: 118075 - DNA, 829 bp, Homo sapiens
aagctgctccaggtagtcccagaaacaagtggaggtggtgggagatgccacgtggctgggctgagatcctgagtcagcaggcaggtgcagggagacagaaaattaaaatgtgacttttatgttgatgtaaccttctttagagccacaggctggggcttaggcacatttggtaatagaagacatcgcgcttccatccacaagcaaggaaaatacacaaaaatacacaaaactctcaggaatatcttctattattatctcacacatgaaaaaagatcttcggaggttttagaaagttatctgagagtccctctccctctcccgctccctctccccacggtctccctctccctctctttccatggtctccctctgatgccgagccgaagctggactgtactgctgccatctctgctcactgcaacctccctgcctgattctcctgcctcagcctgccgagtgcctgcgattgcaggcgtgcgccgccacgcctgactggttttcgtattttttttggtggagacggggtttcgctgtgttggccgggctggtttccagctcctaaccgcgagtgatctgccagcctcggcctcccgaggtgccgggattgcagacggagtctcgttcactcagtgctcaatggtgcccaggctggagtgcggtggcgtgatctcggctcgctacaacctccacctcccagccgcctaccttggccgcccaaagtgccgagattgcagcctctgcccggccgccaccccgtctgggaagtgaggagcgtctctgcctggccgcccatcgtctgggatgtgaggagcccctctgcccggctgcc

SEQ ID NO: 118076 - DNA, 309 bp, Homo sapiens
aaaatcagtactttgggagccaggcagttgaagagtaaagaaagtgagtggatcacagtcaggggttagacaatagaggctggtggagaccatggataactagagatttggctttaggagattgttgtcatgttgtacccactgttgtcagatcatttagatttcaagagaagctgaaaatttgaattttcatgttaacgtgtcctaatttttaaatgttgatgactaattcaaggttttcaaaatagtgagatctaagcaaaatacatctgctgaccagatgtggctctaggcttttagtgtgtaacc

SEQ ID NO: 118077 - DNA, 313 bp, Homo sapiens
agcaatggatttccttttaaatggagaggaggatgtcggagagataccatgaaacgaattctcgaaactccaggcagcaataccgatgaaagcgcattcttccaaaacagagctcctcattcagggccacatctgagcctgggggcccaatgctcagagcgtgcctggctttctggggaaaagcgccaggaacatgaacgagctacgaagagctggagcgggcgctgcgggagcagcgtgtggggaacggctcgggagtcgctgctggtaaccccggcccagccgcccgcagctgggctcgcagccggctcgc

SEQ ID NO: 118078 - DNA, 417 bp, Homo sapiens
tgtgtgataaagatatttcttcatttagtcacttcatctacctgaatacctgtgtaaataatgcacatgcaggctaccagatgtgctgccagatacctactaaataccattaataaagcttccagatttccagctctagctttcaactgctaggcctctgaaccagaatcagtggtcatttcctaggaattctatgcccctttctatcctatccttttcccatacagtacctagtcatacctcctcaaagtcggaaactttagattggacctaggtaggtaaaggtaagagctgggagtctgaagcactcacaatcaagggaactgcacttggcatagaaattgagagcaaagagaagacagacatttattgtttcactcaactatgggactgggactggtagggttaataaaagct

SEQ ID NO: 118079 - DNA, 354 bp, Homo sapiens
cctcatttagccacatcttcatggacatattttatcactggtcatttttattatagttattctagtgtgtgttaagtggcttctcattgtggttttaatttgcatttcactaatgactaatgattctgataatcttttcatctgtttatgcccattcacatattttctttggtgaaatgtgtactcaaatcttttgcctgttatcttatttattaacaaattattaattataaattgataaattatagttgtcttatttattgggtacaaagtgatgttatgatttatgaattcaatgtggaataattagatcatggtaattcacacaccaatcacctaaaatcattatttttt

SEQ ID NO: 118080 - DNA, 642 bp, Homo sapiens
cgattctagtttgttcaagtacttagtactgtcacttttaaaacttggggattctagaggtctctactcttttacttatgtaatatttttcctggagatctttgtattgctttgttgtagcattagagatagctttcttgcttagaaagttaactctactgacctcaagtgatctgcccaccttggcctctcaaagtgctgagattataggcatgagccaccacacccggccacattaattaaattaattaattaatgtatttatttattttcgagacagagtctcgctctgtcaccccggctagagtgcaatggtgcaatctcggctcactgcaacctctgcctcttgggttctagcgattctcctgcctcagcctccggagtagctggctttacaggtacgcgccaccacacccggctaattttgtatttttattagagacagggtttcaccatgttagccaggctggtctcaaactcctgacctcaggtgatccacccaccgcggcctcccaaagtgctgggattacaggtgtgagccactgcacccagccacatttattttttatatgaataaatggatggagacaatcactatgaaatgcagtggtcaagagaagattggggcttgagccaaatctt

SEQ ID NO: 118081 - DNA, 88 bp, Homo sapiens
ttcttctcccagaatatggaggcaccaaagtagttctagatgacaaggattatttcctatttagagatggtgacattcttggaaagta

SEQ ID NO: 118082 - DNA, 124 bp, Homo sapiens
accacttcagctggccccatccttccctctctacgatcctcctctctcacctataaatgttaacatcctctactctggccatcttatacagggttgttaggcgaattaagcaacacagtacgtg

SEQ ID NO: 118083 - DNA, 112 bp, Homo sapiens
acttgggtggatcttggagagatatggagaggccgggggagggagcagctgctcatgggggagaagctttaggtgtaagtcagcaatctgttctcagcatctggaaattgcc

SEQ ID NO: 118084 - DNA, 300 bp, Homo sapiens
gaaactccgtctcaagaaaaaaaaccaaagaaaaaacggacaaaagggaagataatcccagtggataaaattataaacccatagattcaggtaacttaaatagccccaagctgaagaaaactacaccaaagcccatcataatcaaatcatggaaaaccggagataaagagaaaatcctgaaagaagctattgaaaaaaattatacattaaatagagaaggacaatgataaaaattccagcagagactcatcaggaacaatgcatgccagaaaacaatgaaacaacatttttagtactgga

SEQ ID NO: 118085 - DNA, 299 bp, Homo sapiens
ctcccaaagggctgggattacaggtgtgagccaccacacctggcccccttcatatattttaaagccattaaagcaagctgtgatggacaataagattggtttcttttgctcacatccatgtgaacttatttaattgtgtgtctgtggtagtgaaactttgaaccacaaaagacagggactactttaagccttcgcttttgcagattgatacgtgtatctcgtccttttgcagttacttgtcattatctgcctaagaatagtatttctaagaagttgtttctgtgtatcttctggggaag

SEQ ID NO: 118086 - DNA, 461 bp, Homo sapiens
tggcggaagcaatggctgccattgagggtctaacagtggccaggtcccagcggcagatgaaaggcgttccacccagatgtcagggaagaaccctggagtagaacacatctcagcacacctccagtgagtgagcagaagctgcagtccctgtcccgggctttgcagagtggggagaaggtgaggtgggctcagggtccctaatcaaagcccagcccatgtgcaagaaacgggaaagaacctgccttgtgacatcaaaggctgacatcaaaggctgcagggtcgaccacactgaagacccccactctgctctcttgtgggtcactgcagctgcctggaattaggggtgtctcaccacacctagctccccctccagaatgagcaatcactgggagagggtacacagtacactgtgctcacctgcctgactttttttttttttttttgagatggagtctcgctct

SEQ ID NO: 118087 - DNA, 690 bp, Homo sapiens
agcaggggaacagtgcggtcagccacaggcaggatctgcaaaacaagaacaacaggaataacagaccatcaaatcaataagggccttagcgacactcatcttgaacctctcaatgtaaagagggggaatttgaaacccggagagggagagggaccctgtctcaagtgcggtggtgagacagcagagagctgaaccagaatccagtgtgacatcaataccaggacccaggagttccactgcccacttcaggaacctctaccataagcaccctgcattcctatctactttgcaagcttggacccactggctgcattcacacaagcccttttttcccttcttccttcctgctccctacctctgtcccagtggacacttggcagcccctcagaggcccactgggggtcaggagggaatgttgaacatctggccagagcccaggccagccctgtgggttcacaatagggaacctgctaatgtgcaggaccctagagcagcggccctgtgattggctggcaaggccaggcatcaggccatcccagcacccggggcctcgtgaccccaaatcccagctattaatagatgagaacccttcagcaacccctgcccctacccagcctcccctccctcttggctgaaaataaaagggctccttgaaatggtacagaggcccagatatccagctcagctgct

SEQ ID NO: 118088 - DNA, 544 bp, Homo sapiens
tcattatgtgaacaaactaataaataatttccaaattatcttgtatcccataaaaatataatgagggaattattttacttttaagtacattccttgtagtcttctaaatttgctttgaaatagaaaaacacaccttatttttgttaaatgtataaaatatcaaatgactgataatattgttgaattggttaaattttaaaatattcatgaataataataattcttcaggcaaggaatatctctgaaagaatatacgttttaaagatgggtttttcagaaagaatagctaatggatgctgggcttaacacctaggtgatgtgatgatctgtgtaacaaactgctatggtacatgtttacctatttaactaacctgcacatcctgcacatgtacccctgaactaaaaataaaagttggaaaaacaaaaaaagaaaagaaaaaaattctttttttttgtttaagtataatgcatactgattgtagctagtgtagttaaaaattctgcatctggaaatataaacaacaaaattatcccaagtcttttg

SEQ ID NO: 118089 - DNA, 586 bp, Homo sapiens
ataaggaggttttttaagggcagaatgatatattcacttcactatttttggaaaatgattccgaggatagtgtgaaggatggattaggagatgaagctggaaataggaccatcagctaggaagctcatgtgctgtcagtgaaagataatgaaggcctcattaagacaggtgctgaggaagtaacagggcattctgaggggccattgaccactcacagggagaagaattcataattgtctatgaagaataggggaaaattaaggatgggatcaaagaagaactgacggctctagccatggtgacttgggagatgataggttctgggttccctggagaaactggagcttctggaaagtctcatgctttcatttcatgaccgtgcccagctacaatgcatgagtagtattttccaactcctctcaatattacaaggcataatttttttattgtcaagccacagatctgtttgataaaagtaaaccattcaaaagaaagattaggccaggcacggtggtttacacctgtaatcccagaactttaagaggctgaggtgggaggatcacttgagaccagaagttcaagacta

SEQ ID NO: 118090 - DNA, 151 bp, Homo sapiens
gaattttaaacagatacatcttaaaggttagagattaataaaaataattttttacttctttgttacagacacttaaaaaatgatgatgaagcatataatgactatcgttatagttacggatcctggccttttttttttttttccttttttt

SEQ ID NO: 118091 - DNA, 426 bp, Homo sapiens
acagggaaaatgatgccaggccccattttccccagtctgccacagagcctgaggtcaaaaacaaaaagaaaccaattatctgagcccaccaaaagtgcatgtcacatgaagtcattatggaaaagagcacaggcagaggctctatgacccagtaaattcaaagcagggctcgagatggctcactcctcaaagaacacatgacagcaaacagacaaacatttacccggggcaaaaggcccatctgtgctcctagacccatgccctataaggagatcccccaccttcttcttgccatcagaaccagatataccacctgatgggtgcactttacaccacagcatgaggggaagagtggcctgaagcccaaagaactggcatggaccacactcctccccagccacaccaaaaaggtaccatctcctgaca

SEQ ID NO: 118092 - DNA, 609 bp, Homo sapiens
taagggaagtaatagagaaagaaaaatattcctggaggtaaatcttcagtttggattaatgtgaacatgaagaaacctgtagaaaccttcatttctcaagacaaagctcaaattcaaggttgtgaggaatgcagtcactgcttttgttaggggcagttgtgacagtgattgcagaaactgagactgcaaagcccgtattatataaagaatgtgcaagtgccatagaagacactgcaaggattgggtgctggagcagtgctggacctgccatcatcaccagagtgcagcagagagaatctcctctcttgccatcactaacccagcacttgactttgtcccactcctaaaagatcttggaaggaattaaaggtgcttggtggtttctcattccagcataaccttacttggcctgaccatgaaccatgcattagtctttggacagggcaattcaaatcacagaccacataacaaaagaattttgtggccatcagaactgtctccttaaacacaccatgggtgcactgtgtcctcagcttggtgaaaggtagatgtcacacacgagaaggtggtggagccaggcatgtgatggagcctcgaagagtgggaggt

SEQ ID NO: 118093 - DNA, 425 bp, Homo sapiens
gtggtctggatacatggggatggatacagcagctggtacagctgcctgaggtcctgcaacctcatggccacattggaaaattgtccagattgtgcaatgaagctgtgtgtgtgtgtgcgtgtgtgtgtgtgtgtgttcatctctgtgtgtgtatgagcacacatacatgaagcttgaccaataactgaaagactcacaacttgcaaaatcagccacaactagctctcttacaaacactattaactgaataactgcctacactggcgtgaagcaactgaaggagggaagagctgaagagaagagtactttgctccaaagaaaggaaacagccttcacatcaaagcttactataagccaatttgcagagctatccttgcatccatccagctaatatttgatgagcagctactatgtataaaaaatcc

SEQ ID NO: 118094 - DNA, 725 bp, Homo sapiens
agcggggcagtggatgggaaactctatgtctgcgggggattccatggagcagatcgccatgaggttatctccaaagaaatattggaactggacccatgggaaaaccagtggaatgttgtagccatcaacgtcctcatgcatgacagctatgatgtctgcctagtagccaggatgaatccccgagacctcatccccccgccttcagatttggtggaagaaggcaatgagcactaaggtgaccttgctggaggacctcctgctgttctgcaaacaaggccttcagaacggagagggcccacagcatctctgtcatgccagtcatgtgcactgcatgcgtagtggcctgtgtgtgaagaagcagtgtgtgctgggcactgggtggggagcatggggagtctcccttcagggacttcccagcctgatagggtaaataagacactacaaagaagaggtgatgacggccacaggaggggcacagggccacaggagagcagcagagggagggtctcactctgctggggacccatgaacagcactgccaaggagcagaccttttattgggtccccaaaaggatgaggaggaagtggtcccatgggtgcagtcaatgatgagttcatggaaacagccaagcaagggcccagagacagaaagctcgtgcctgtctgcagtatcctggctgggccagattgcctggggcacagggtttgtggtcaaggctggaaaa

SEQ ID NO: 118095 - DNA, 474 bp, Homo sapiens
ggcgcctgccaccacgcccagctaatttttttttatttttagtagagacggggtttcactgtgttagccaggatggtctcgatctcctgacctcgtgatccacccgcctcggcctcccaaagtgctgggattacaggcgtgagccactgcgcccggccatgtgttttcatttcacttaggtaactatccaggaatggaattaatggatcctgtggtcagtgtgtttgtagaaggaactaccaacagttattagcacatatgagaggtttttttgtttgttttgttttctttttgagacggattctccctctgttgcccaggctgcagttcagtggcgcgatctgggctcactgcaaccttcgcctcctgggttcaagtgattctcctccctcagcatcccaagtagctgggactacaggcacgtgccaccacacccagctaatttttgcatttttagtagaggcagggtttcat

SEQ ID NO: 118096 - DNA, 493 bp, Homo sapiens
ctttataggacacacattgacattataggatcttcttctgacacttacctgtttaaaaaaggggtcatgaaattaatagggcaaaaggttagttaataaaatctcagcaatatagtcataagggctgctttctcttgctgagcagtgaccattgccatgaatgaggctagctttacacaccgtatctcatgaatccttatagtcatccttctttgtcagtgttgactatcctcatgttacagcggaagaaactaggatttggagaagttaaaacacttttctgaagttatccagttgacaaagaatgaggctgtggcttagcccagtctatctgattacacagataatatctaaggaataaaactttgaaaaaaactcaccaaacttttttttttttttttttgagatggagtctcgctctgttgtccaggctggagtgcagtggcgtgatctcggctcactgcaacgtccacctcctgggttcacaccattc

SEQ ID NO: 118097 - DNA, 232 bp, Homo sapiens
taatttttttgtatttttagtagagatggggtttcaccgtgttagccaggatggtctcgatctcttgacctcgtgatctgcttgccttggcctcccaaagtgctgggattaacaggtgcgagccaccgtgcccggctgtcactttgctttttaatgaaaaaagctggtgtccaaataaaccatccgcagggagactattctcccagataaaagcgtcctagagacctcccgc

SEQ ID NO: 118098 - DNA, 402 bp, Homo sapiens
accatcttaccacacaggctgcttttagtttcttgagttatccatcttccttctatcttatagggctcaacctaaatattactcagggaagccttccttgagagtctttctttttgcactcattggtttggggcttctttatattatactgttaattgaattctgagtcgtgtttatctcaactgagattaggtaatttattttgagaacagtaaatgtttatcatctgtcattctttttttcatgcccacattcagttatttgtaagtgctgaatgtataagtgttcatctacagataaggatcagttcttttttccccaactagaaatgttactccagttgataataacagctcaaacggaaatataaggcagaggtgagagagtcacttgaggccacga

SEQ ID NO: 118099 - DNA, 320 bp, Homo sapiens
tgcttatgttatgcatcaaaaacttggctagaatattctggaaaaagttcccttggatttttttttctttaatattaaaacagatttgaatttctaatacatattatttcgagttaggccagagttactttaaaatggcaattgaataaattgcagtttttaattctaaattaagtgccccagaaagagattaaagtagggtgggggaaaataaggtttggtggtgaagtggaggttgcaggcagctagcttgatgttaggtacaagactgtctacaagacagatttaagaatggttttgatggcacgtgagcatatgct

SEQ ID NO: 118100 - DNA, 809 bp, Homo sapiens
aaccaaactttttttaagtttatctaattttttagttctttgcttttttgatatattttatatgtaagtatgtatttatctgttgtatagattttcattccctctgcctgcttttcttagactgtttctgtcttccttgaagatatggaagaaatattcatagattaaatgtactgacacataagccttctcatatgtgattactatatttgttgacctgttcccgcacccccgcattgtttaaatgataaacttctaagtcctcttcttcctcaaatggctatgaggtttgctattttgtgtgtgtgtgtgaattttgcattatttttgcttacttcaaaactgtaactttcagaatatacataatgtgattgtatcttttggtctataactggattttaaatttatatttcaacctacaacagtgccacaatattttcattactgtaatattaaacagttgacatgtcagactcataattaataagtattataaacaacttgcctgcttattaactgatatttattctcctaaaaaattcggtatttctaacaaaattaaaactttcttttacatcacaaattgtaatttttaaaaactcatagattatttttggaaaaattaacacttttgtaacatatttcctaaaaacaaaacattttacatctgaccgtatattcaagtattaatatatgtccctcattaatcttttgaaaatttaatatacattttgtataataattgttaattgtatatcttgatactttatgtatcccccgccccccgccctgaacacttagtaagtttt

SEQ ID NO: 118101 - DNA, 936 bp, Homo sapiens
attgccttctgactgcttctagctaaagaggggcaatgttggccgggcgtggtggctcacgcctgtaatcccagcactttgggaggctgaggtgggcagatcacgagacaagcctgctatccttgttcctgttgcggtgggcaacaccacatagagctccaaggagaccttctccactattcccctacggtgctggcagtgattgggcctgacagcaccaaccgtgctgccaccacagccgccctgctgagccctttcctggtgcccatgattagctatgcggccagcagcgagacgctcagcgtgaagcggcagtatccctctttcctgcgcaccatccccaatgacaagtaccaggtggagaccatggtgctgctgctgcagaagttcgggtggacctggatctctctggttggcagcagtgacgactatgggcagctaggggtgcaggcactggagaaccaggccactggtcaggggatctgcattgctttcaaggacatcatgcccttctctgcccaggtgggcgatgagaggatgcagtgcctcatgcgccacctggcccaggccggggccaccgtcgtggttgttttttccagccggcagttggccagggtgtttttcgagtccgtggtgctgaccaacctgactggcaaggtgtgggtcgcctcagaagcctgggccctctccaggcacatcactggggtgcccgggatccagcgcattgggatggtgctgggcgtggccatccagaagagggctgtccctggcctgaaggcgtttgaagaagcctatgcccgggcagacaagaaggcccctaggccttgccacaagggctcctggtgcagcagcaatcagctctgcagagaatgccaagctttcatggcacacacgatgcccaagctcaaagccttctccatgagttctgcctacaac

SEQ ID NO: 118102 - DNA, 150 bp, Homo sapiens
gcctgagccctgtctattactctcatcgccacctccctgacaagcgcctatagcactcgaataattcttctcaccctaacaggtcagcctcgcttcccagccctcactaacattaacgaaaacaaccccaccctactaaaccccattaaa

SEQ ID NO: 118103 - DNA, 429 bp, Homo sapiens
gcttaaaatgctccaatgcttcccattttgactcaattcaagtcttatatgattgggctcctgactacttcaccaacttcacctctacccacattgccactcactgatgtgactgctgtactggtcttactgtctctagtacattgtcaagctgtggtcaactcaagtacccttgcattggctattccttttgcctaaaatactctccccttggatctttatatgtctttgacttttttcattattcatatttgagctcaaatgtcacttcttcagaaagatcactttaatagtgaagaagccagttctctatcacacaaccctgctttatgttttcacagtactttccacaatctgaagttactatatttatctttgttttcattagctttttgcctgcttctcctcacccagaatgtgtgtttcatg

SEQ ID NO: 118104 - DNA, 295 bp, Homo sapiens
aacatagttttaatcattactgttattgtcaaaaacattcaaagtctccctgttgcttatgtgataaagttgatactcctcagcttgccattcaagaaccatcctagcttaaccttttctcctgtttacatctcacccatacacctttcagatgccagtgtcatttccctttcatgcctctcagtgatatttctttacccttagctatcttgcctgttttgaactttatccaggatgttgaggctttactcagttttcaagatccaaatgaaatagtttattattcctcttatac

SEQ ID NO: 118105 - DNA, 478 bp, Homo sapiens
atgtggttcctgctacttgaaatgtggctactatgactgaggattggaattttaattataattcatttcaattaatttaaatgtaaatcatcacagaaatatcagatcaagaggtcaagtgactttgtcaagattatacagttagtttgagacatggggttctaaacccaagtgttttgttttttaaaggatgaccgttttcaagaagcaggaactggccagttcctgcttcttgaaaaagtgatagctcagaaacatttgtaaaagcaaggtttttatttcattttggctctgtcattttcagaggcaaagaagttggcctgtaaaatagagtgctagagctcttacgcccctccccttcttcccaacttcctacttcctagcccttttatcaactcctagaatagttaaagagagacacatctagatgggatgaaaggtgccctaagcaggaatggaggaactggtttcaagaagc

SEQ ID NO: 118106 - DNA, 361 bp, Homo sapiens
ggcctctgccagtcagactcacatgctaggaggagcagggccaggcaggagagccgtgtctcctggcattggggctgcaggaaagacgagctcctaggccacagtgccagtggccagtgctgctgccttgcagggtcgcacaggcagtgctggctgtttggactggcttggcagaaggatttgaagtattgttcctagccaactggactcaaacctgttcctccaaccctctagggattctcttatcacccagtagccttttccccctagttttaaaaattgcagtaaaatacacaaaagataaaatgtactgccttaaccatttttaagtgtacaattctgtggtattgagcacatttat

SEQ ID NO: 118107 - DNA, 264 bp, Homo sapiens
tttttgccggaccttcctctcctcccacctcacaattagcaaggaaaaaaggaaaaagacaaaaatgatacactcatcatctctccacgcagaagcaagcacgctaatatactgatcattctcccaaactttcccctgtggggatcttttctcccctaagcaattaagatcaaactagtaacaacaatctcattaaaatgctcttccttgactgggcctggtggctcacacttgtaatcccaagacttggggaggctgaggtag

SEQ ID NO: 118108 - DNA, 236 bp, Homo sapiens
gaatatttgacaatgaacatatttccataaatcccagtactgttagatatgcttgcaatggattcacatgcagagcatgttctgctaatgatttaaactcttttgtaagaaggtgagtttccttggatgatcaaccaccccactgtgttccttgtatgttctatatccagggaccaaatagagtcatgcatgaaaaatactctcaaggtcaggttctctccctgcaaacgtgtatt

SEQ ID NO: 118109 - DNA, 241 bp, Homo sapiens
gagacggagtctcactctgttgcccaggctggagtgcagtgatgcaatctcagctcactgcaagctccgccctccaggttcacgccattctcctgcctcagccttgatctatgtagagtccttttatcagagtgctatagacatcttcaacctcagtttacatagtgttttgaaaactaactaggggaatgaggaggtggtagtcggtgaataatgaaggaacaaaccaattcatgtagca

SEQ ID NO: 118110 - DNA, 343 bp, Homo sapiens
acctcccgggttcacgccattctcctgcctcagcctcccgagtagctgggactacaggcttccgccaccacacccggctaattttttgtatttttagtagagatggggtttcactgtgttggccaggatggtctcgatatcctgacctcgtgatctgcccgcctcggcctcccaaagtgctgggattacaggcgtgagctaccgtgcccggcccattggctcttttttttaccatctcatcttctctcacacgagttattctcactgttggaaagaacttgtccttaaagcattgcttccaggtgagtgtaacggtgcccagcatgtgatacaagttaaaaat

SEQ ID NO: 118111 - DNA, 224 bp, Homo sapiens
atactgtgcagcagttaaaaagaatcaggagatggaaccatgtcttcagtatattgaaaaatgaaaaaaatgagtgacatgatcccaacttaatataaaagtacttacatttacatatgtttgtctgcataagcagagaaaagaatttgatggttgtcaactgggtggggtagggatgatctgagatgggggtggtctcaaatggggacatactgacaatgaac

SEQ ID NO: 118112 - DNA, 474 bp, Homo sapiens
cctcagccttcgcgtgagtcactttgtggctgtgcccggtgctgacgtgcacgtggccgcgctctgcccgcctcctgtctgcactgctcgccccctttgggccctggcctcattggtctccctgcactcacagttggttgcttttcgtgactgattttgggttgggaaatcagataagtaactgttcattcgtagcccctcctgaacactcctgggaattaacaaccctgaccttaatacttggcctctccccagccactgccttcagggcagctgatgtcccccagtgggttttgccagacccaaagtgatgatcgcatatctgtccctcaagtaagaggcgggcttctccccagcagtggcgatgtcaccagaagctgccctgcgtcaccagagttggcttaatgcgaaatgtttccccgtcaggtgcctttttccagcaaggggctccaggtgctatccaggaagtcagag

SEQ ID NO: 118113 - DNA, 430 bp, Homo sapiens
ttcttggggcctctcatgagtagtcttccagggactacaaggagtctacaagcagacatgcaggatgtagagaagcaaaccagagaagacctgaggtcaagaagacagatgttgcctgcacagtgggtgaaaggaaactgctcaggttgtgacatattataatctcctcagagcccaggccttgacagatttatagtaaaagtgcaagaggaggctctaactggactaaagggattgcctccagccctggtcctatgaagtaggctccagacatgcggagcagtggatgaaaactagagttgacccaacagggagggagaattgtaagccagtaggagccatgagagtgccgtcgatttcctagagctctgcatgaaggagctgcgcagagtatgcccacttcttgctagggtcaccaacttgctcagat

SEQ ID NO: 118114 - DNA, 512 bp, Homo sapiens
atcttctgaggtcaggagtttgagaccagcctggccaacatggtgagacccgtctctactaaatatacaaaaattagccaggcatggtagtgcgtgcctgtaatcccagctatttgggaggctgaggcaggagaatggcttgaacccaggaggcagaggtttgcagtgagcagagatcatgtgagactctgtctgaaaaaaaataataataatgtggatagagatcattaataaagaaatagcagagttaaatggcaaagaaaaggtagtggaatggcaaagtgccacatgttccttccaccttgcatatataaatgaataaaattaacacatcatttaaatctgctttgtacattgaaaatcagtgtactgataaaatagtagaaaatgtaagccacatgcatctttttcctttcagcttgatgtgactgtgccttgttactctgagatacagattagagcttcatttgtaagacctgaaattatatttagagattattttttctgagtta

SEQ ID NO: 118115 - DNA, 421 bp, Homo sapiens
taaccgattccctctccctctatagactgtaagctccatgagagcaggcggcctgtccattttgctcaccactgtgtccatggcatatagtacgtgctcagtaagcgtttggtacacacatgtttgcaaggcaggaaagctggtagaacatctcagccttcagaccccatgtcctccactctacctggacaagccaaagccccctcacatctgcagagagctcagcctgggaggcagggtactgggtgcaggttcagctcagtcagggggctctggacagtctgctcccatccagaaaatgagggcgtggggttcaatggtcccagtggctcttttggtcctgactaacaggctccaaccccagactagaagccaatgggtggaccccaaaccccatgttttggggtaaactgtgcctcct

SEQ ID NO: 118116 - DNA, 576 bp, Homo sapiens
ctactaaaattacaaaattaactgggtgtggtggcatgcacctgtagtcccagctactcgggaggctgaggcaggagaatcacttgaacttggaaggaggaggttgcagtgagccgggattgcaccactgcactccggtctgggcaacagaacgaaactctgtctcaaaaaacataaaaagaaagtagttggctcttcttgccctggaagagtgtctgtatccaagcccagcacagccagtttcctcctttgagctgtgtgtggtggagctcccaaactcctcccacttccaggtgctttccttgccctctgtgttggtgatcttctcttcatgtacgtgtccagagctgaactccctgttttcgatggcctctggccaacatagaacacaccggggtgctgctcccctagaagtgttttaattgagataaaatgcctatagagagataggcacacatcttgaaagtacaatttcacaggttttatgacatgtctgcccttgaactcaacatttcaatcaaggtacagacatttcctctcgtgttaagtcatacaaaaaaaatttaacaaaaaaaa

SEQ ID NO: 118117 - DNA, 252 bp, Homo sapiens
aggctatggatatagaaacatgaaacaagttcttgccttcctgttgcttatagatttgggaaaagagagatggttaataaaaggtgaggatttggtttttagaaagcaattaagatctttgaaggaaatgaaataacaaccaacctgtgagattaatagggaagctatggttgtgttggataccttagctttggagggtagggacctccaatattgtcattgatcatttatttccattatctaacatatctt

SEQ ID NO: 118118 - DNA, 541 bp, Homo sapiens
tttttttggagttattgattttaaagcttttttcttttccttttccttttttttaacctgcttcacttttttttctccttcttttaatcactatcattctcaaaatgtttgtttaaaatggaagtgtatatgtagctattgccttatatttagtgctcatccacattaaggtctaaagtagtatactttgaacttgaggtataagtttaggctaattgtatggaatgtgagactattttgaaaggggggcagtaactttactgttggaatcagctgagtgatcccaaagtacaattttaaaattgtttagtaacagaacagattctttctagaccagaaataaatgctattactggcatcccaagacaaccactaacccaatttaaatgaagggaattcatttcttactgacctccatttaaaatgttgacccattatcccaaatgccagttttactggtatgaatgatatataatcaaaaggtcacccatcttatttcacttataaaggttactagatacaatagaaatagaaaatattt

SEQ ID NO: 118119 - DNA, 250 bp, Homo sapiens
agccgggaggcgggcgttgtgcgcggccgcgggcggagcggaggggcgcgaggggcggagcggagcgcgggaggaggcgggggaggagaggccaccgggaccgcgagcggcagctggggagggggccgcggagcccgagcgggagcaaaacagctgatctggttttcctttaaagcgagagaaaatggaagtcgggtagcggcgactgcggcgctgcgggctggcggagcggagcggcgcggcgcggcag

SEQ ID NO: 118120 - DNA, 509 bp, Homo sapiens
tccgcctcggcctcccaaaatactggggttataggcatgaaccactatgccaggccaagatctagtgactttggatacggaccaccacggaacagttcctcttccatgtgggtgtgggggcatgaagggctgttttcaggaggatcaaagtcacctctaccccagcatgggaagtcccagaaacttgagttccaggtaaggtagtgcagaaaaaagcaggctcatgagccagtgctgtctctctctgtgcaagggggaaagagcccctctgaggcctccacacacagtcagcaggacacaggacacagaggtcagcctgttgtggccactgtgaaatgtcccgttggagttgacaggagcctgctctgacctcagtcctcctcctccaaacaggtgaccctgtaatgctctggttaaaaagcaagccagctggactgtgttatcttttagtgtgggaaaaatgctcttaggccgggcgtggtggctcacacctgtaatcccagtacttt

SEQ ID NO: 118121 - DNA, 558 bp, Homo sapiens
aaggatatatgagttgttttaaaatgttggctgttataaagctgctataaacaattatgtgcaggtttttgtgcagacataagtcttcagttctttgggataaatgcctaggagtacaattgccagatcatgtggtagttttattaagaaactgaaaaacttttccagagtagctgtaccattttacattccctccagcaatgtgtgaatgatctagtttctctgcatcctcaccagcatttgatattgtcactattttttattttagccactcttttaagtgtgtggtgatagctcattgtggttttaacttgcgttgtttaacatcattagctaatgatgctaaacattgtttcatgtatttgtcatgtgtatattcagtgaaatgtctacatcttttgatttttttttttttttttaatttgtgacgagtcttgctctgtcacccaggctgaagtgcagtgtcatgatctcggctcactgcaacctccacctcccgggtttaagtgattcttccgccttagccacccgagtagctaggattacaggtacccacca

SEQ ID NO: 118122 - DNA, 740 bp, Homo sapiens
tagtagagacagagttttaccaagtgatccgcccatcttagcctctcaaagtgctgggattacaggcgtgagccaccgtgcccagccaagttgtttatttaaaatgtgatttcaggcccaactccagacctgccgagtcagggcctgggactctgcctggggtagttttatttatttatttcaaaaatatcatttaattgtaagaaatagagatgggggtctcactgtgttgaccaggctggtctcaaactcctggccttgagcagtcttcccatcttggcctcccaagatgggaattaacacgggatcacaggcatgatccaccacgtctggcctgccctgggtaatgtaaagcctgcggtcggtcacacagacctggtcctgttccagaccagtgaccgtaggtgaacgccgaacctctctgagcctcagtggcctcatgtgagagtctctcctttgttggttgttgaggggattaggtgagataccattcagcgccttgccaaaacaggcccctctaacaggctgttgttaagtactaagcccttcatcagcatagggaggaaagcttcttaaaaatacaaaactgtagaattttgaacttggaatggaatgtggagatctcgtacaggggttttaatcttggtctgcaaaagccctgcgatgtaggctgaaggtgtgtgagcagagggtcgccagagcccctcatggtgtgaaactcaagaaaggtgcaggagatg

SEQ ID NO: 118123 - DNA, 381 bp, Homo sapiens
ccagacaagacacttccgtccaggtgctgggcagagccccactgccaccccctgcagcatcctcagcatcttgcagacccccgagcagctgccagcagagctcagttcttcctcctcgccagccttcccctcctccctggggctccctccagaaggaggcagggagggagggtaggaaggcgcaggtggaggaagatgaggaagggactccggcagccagctcctccccggcaccacaaggaggaaaggggaaagaggagcagacgctgggcagcaccttgacctctgagagggttcctgttaaaaaagaaggcggtgaaccatcattctgagcaaactgtcgcaaggacagaaaaccaaacaccgcacgttctcactcat

SEQ ID NO: 118124 - DNA, 407 bp, Homo sapiens
gcacgaggatatttgttgtggcattatttataaagcaaaggattaggggaaaacctcaaaatccatcaatagactgaatctgacagaagagaaacccagaaaaaagttgatgtgtgccttggaactctcaaagagccagccgggcgcagtagtccacacctgtaatcccagaattttggaaggctgggtggatcacctgaggtcgggagtttgagaccagcctggccaacatagtgaaacccctctactaaaaataaaaaaattagccaggcgtcgtggcacacccctgtaatcctggctactcaggagtctgaaacaggaaaatcgcttgaaccggggagatagaagttgcagtgagatcatgccactgccctccagtctgggtgacagagtgagactccgtcaca

SEQ ID NO: 118125 - DNA, 785 bp, Homo sapiens
gggaaaaacgatctgggaagtaaagaaagaatcaaggagcaaagatttagcaagcctgtggaccctgacaactccaataagagaacactagggaattttgtgatttaaaatatattattgcttaaaactacagtagtgttcaaggaaactttaaatagaaaattactcttcttgagatgattctgtcttccaaagagaacaaatcacaaggatgttaaaaggaacattttatgtgacaagtttggggtaggtactatgtaaatagaagagaaagtcactcaaggtacatttgaatgtagggcagagattattccatagcattccacaggccagaaacagaaagtgtcttctagttttcttgccctttatagtaataggggtcatgggatagaaattctcagaaaatctccaaatctcatttttgccaattgtttcaacatcttttccttcccagcattttagcagagctgccaaacaggtgattaattaaatacatatgtgcatgcttgtacctcgtgtagaaggtctaatgagtaaatttatttgatatgacatagactgaacagtagaaggaaggattaatgacagtcagatcaacaaacaaaagtacaaatggtatctgggctatgaaaagataaagcaatatttgcccaaacaagaagatctagatatccctaaattacctcctatattattaggaagtaaagaccaaatctacaactttgatctggaaattgtatagtagctgatatgaacagggatcataggagagtgtggtctcatag

SEQ ID NO: 118126 - DNA, 510 bp, Homo sapiens
gactgagaagaacagtcagagagccattgaaacaggcccaggaggggggcatgtccttcccttcaccctgcactgcaacccagagccatggtggcagggccagattaaggctttagaggccctagaagaggaacagaatgtgatgctcccgtctgtatgtaatgcaaaagaaaaacaacaataagccattgaaggccaggtgcggtggctcacgcctgtaatcccagcactttgggtggccgaggtgggtggatcacctgaggtcaggagttcgagaccagcctggccaacatggtgaaaccctgtctctactaaaaatacaaaaattagctgggcccagtggcacacacctgtcatcccagccactcgggaggctgaggcaggagaatcacttgaacccgggaggcagaggttgtagtgagccgagatcgcaacactgcactccagcctaggcaacagagccagactcggtctcaaaataaaataaaaataaaaaataaaaaaaagcca

SEQ ID NO: 118127 - DNA, 367 bp, Homo sapiens
ccccaggttctcacgctagtgcctactcggcagtgttggcccagtggcagcctgcacacgtgtgcacccacacacaccctggcatgttctcaccctgcccattttcatgccactcccaggggcatgtgaatacccgctggtgcccacacctctatccgaaccatgggcccttgcactctcacctgaacagacagacacacacacgcatatattctccaacagccattcagccatccactgagtcatgccccagggcaccaatcagtcccactgatgcctatacccacagcagccatgatgtcatcatgagcagtcacactcccagcccaggtacctacagcctcacacattaaaaagtctcactgtc

SEQ ID NO: 118128 - DNA, 347 bp, Homo sapiens
gtctgacttagaaggagagacagcagaggcttcttccttggaatagagaaagctaaaggtcctaaaagtctaggtggacaggtaagttttaggatcaaatgtgatgaaactggaacttctctgtgggctgcccatccctgaggaagcccaatcctgttatccatacctcccaagccccagagaactccacaactgtaaacatccttgaaaaggataaagactcctaataatcagacaggatggtcacaatgggcatcatttattcagtgtctactgagaggtactgaatgtggcactttgtattcacagtgtcgtttaattctcattacagaattaaatctagaaat

SEQ ID NO: 118129 - DNA, 376 bp, Homo sapiens
taagacagagtcttgctctgtcgcccaggctggagtgcagtggcccgatctcggctcactgcaagctccgcctcccgggttcacgccattctcctgcctcagttggttgttcttccaggctcctttcctatgtccttctcttctactggactcctcaaacttgcagggccttggagctcagtcccaggccagtctcttgcttcaaataccatctatacgccaggcacagtggctcatgcctggaatcccagcactttgggaggtcaaggtgggcagatcacctgaagtcaggagttcaagatcagcctcaccaacatggggaaaccccaactctactaaacataaaaaattagctgggcatggtggtgcatgtctg

SEQ ID NO: 118130 - DNA, 489 bp, Homo sapiens
acggctgcttctttgtcacatggtactccacctccacctccatgcaacattagttgcaactgatcattcctctttctgcttaattttagaaaaacatttgttcagatttcagattttgtccttcccaatgctgaaaattacactccagcctttcaatcactttcttagcttagctactgtgataccacaccctgatagttttccttttgcctcagttggttgttcttccaggctcctttcctatgtccttctcttctactggactcctcaaacttgcagggccttggagctcagtcccaggccagtctcttgcttcaaataccatctatacgccaggcacagtggctcatgcctggaatcccagcactttgggaggtcaaggtgggcagatcacctgaagtcaggagttcaagatcagcctcaccaacatggggaaaccccaactctactaaacataaaaaattagctgggcatggtggtgcatgtctg

SEQ ID NO: 118131 - DNA, 514 bp, Homo sapiens
tgtaatatgcttccccctgaacagatctctccctcccccctctccacccccaaaatgcttaaaagggccctggggctgtggaagacctggcatccaaggcatgccatgggggagtttcacccggatggagactggctctccccgcatcctgcccagcagtgcaactgaacctgagatggggctgcaggatgacaccagcacttcaggaaccgcgttgcaggtgtcacaccttggattcaccatagctggctgaaactagcagcagcagtgactcccgactatgaccagtggattaaccaacaagaccctgattgccccacccgaatagacctacggcgaatcccaaccaccagtaagaaggacaactgccctgctctgaccacactggaggctggtcagtctacacatggctgaagcttgaagatcttgcaagctctgctctagtcacatcctggaagctgactagtctacacacagccgaagctaagaggaccatctctagataagtaaatgt

SEQ ID NO: 118132 - DNA, 665 bp, Homo sapiens
cagcgttaagacgactgcctaactttggccacatgcgttgttttttgggttccgtttcgtatcagggcatgctggctaaaagatgggagccagcaacattctcttgggctccatcatttatatgagggttggcaatgccatctgtaccctctgtgaactcccactgctgttcactcagttaatctaagggacaccaaggggtctgcgggaggatgacctcacaagggactgaggacatgggagaccaccctcctgtgggtagaatacaccagagggcccaggcttgactctgtcctgtgttaaggaggcatcggtagttttgctgagcttgtcaggtgtttataatggacagttggagattggggtcctaggcttaggtctttgagagcctctgtgtccaggagagcccagtaggcatccagccatttactgctttaatagggtagcatgaggctgagagggatagtttcttgcatccaaagcccttaggcaccttatgtccatcctaagtgggccagagactccagggctgcatagagcttgccagagcttctataatgaaggggtctctgagggcaccaacaggagtgcccatggattttaaggtttgattatagaggttgtttatggagggtgccccatttaaagcaagctgatttgtaagc

SEQ ID NO: 118133 - DNA, 398 bp, Homo sapiens
catactggaccttcttcaacattaacccgagcgctaccaggcatcggtagttttgctgagcttgtcaggtgtttataatggacagttggagattggggtcctaggcttaggtctttgagagcctctgtgtccaggagagcccagtaggcatccagccatttactgctttaatagggtagcatgaggctgagagggatagtttcttgcatccaaagcccttaggcaccttatgtccatcctaagtgggccagagactccagggctgcatagagcttgccagagcttctataatgaaggggtctctgagggcaccaacaggagtgcccatggattttaaggtttgattatagaggttgtttatggagggtgccccatttaaagcaagctgatttgtaagc

SEQ ID NO: 118134 - DNA, 581 bp, Homo sapiens
acagtctttttctctaagaagcccaagggtgcatgatgaataaaatgtaaatttgagaaggcagtgtttttattagtgaaaagggcaatgagccatgtagttggagcagtgacctgcatggtggccaacgctggtgcaggaagcaggagcaggcactacagagtctagttattttacagcacaagaaaaaacaggcacggaaagtttcactggtctcccagcagatattcacagaagtgtacattgtcttgtgtatgttagaactaaggtcaaatctttgatacgtttcagaaattgacaagtctcaaaagtcttgaagattttatgcaaataaatgacaatgcacgttttttacattttatagcagtattgaatattctcggagtaatggagcatttgtttttattaaaattaaaaattgctaaatagtttgcaacagacttggtatatttgtatttgcatagcaacaatttatgtttatacatacatatatattttttaactacctggaagggatttagatacatttgtttgctgacattttgagctcttgaaatttatttgctcatttgcccttggtg

SEQ ID NO: 118135 - DNA, 532 bp, Homo sapiens
gccacatacctctctgagactggcagatcgctcactgttgtgaatcaccaaaggagctatggagagaattaaaactcaacattactgttaactgtgcgttaaataagcaaataaacagtggctcataaaaataaaagtcgcattccatatctttggatgggccttttagaaacctcattggccagctcataaaatggaagcaattgctcatgttggccaaacatggtgcaccgagtgatttccatctctggtaaagttacacttttatttcctgtatgttgtacaatcaaaacacactactacctcttaagtcccagtatacctcatttttcatactgaaaaaaaaagcttgtggccaatggaacagtaagaacatcataaaatttttatatatatagtttatttttgtgggagataaattttataggactgttctttgctgttgttggtcgcagctacataagactggacatttaacttttctaccatttctgcaagggaggtatgcttgcaggagaaaagtatcaagacg

SEQ ID NO: 118136 - DNA, 611 bp, Homo sapiens
agcggggttcggtggcgcgagaggcggggagtcgccgtggcacaaatcctgaagagcccgtgggcgtggactgctcatctgtaaagaaagtggagacatgaccttgagatttggctgacccagcaatgctggggccttcgcaagtctgatgttccaggactccagtgcctgttggtgtggacggaggacacggggccccgaccatggtcacactcatcactgagaagctgcagagccagagcctggacgacctcacctgcaaggcggaggctggcccgttgcagtattctgcggaaaccctgaacaagagcggtcgtctgttccctttggagctcaacgaccagaagtccctggaaggtctccagtggaggaccgccagtcagaaagccaggcagacacggggcccatgaattcatccttacctgacgggcctgtcttgctggccggtcacaaccatggggtctatcacggtggcagccacagtgcccgggccaaaggcgacaaggcctgggtgcagcaagcaccgtggaccccagtggaaagcacaggctcgtccaagggaccccaacgaaccaagcgcgatggccgggtcctggtcaagaacccgagga

SEQ ID NO: 118137 - DNA, 804 bp, Homo sapiens
gaacatcatgggtagaaactggaaagctactctcttcatcagtagaatgctaactcgtcatgtagtgccactaaatgtaatattaaattaacttcttagaaaacctcttaatttttttgttagaacagagcttagttactgttgggggaaaggcttatggggtgcctgtataaactggccataaaaatatgggacaataaattgtgcaaagccacaagaggcctcttgtgggaggaggaaagccttatcaccattatgttcccatgctctcagcaagacttgctctcttatccataaacactgtgttcaaggagaaagacactcctttgaagcactggaatgtggccagacatgcaggctcctagttaagctcgctcccaccagctactctccgataagttaaagatatgctgtctaagcacaaaggagattcatttaaactgccactgctgtagattacgtgtatgacgcactgccttcctttcagcactgcctgcctttcaccgtttcgtcctgaatgtctgcttcttagatctaagtgattgtactcagtaaatagtgtggagaccagaactctgagccttttgcagcctccattttgcaattggccccctggcccccactctttatgcactcttaacctctctcttctcattccttcgtcgccaccagactttgggtaccctacgggtggtgttgaggctggtccccaacagttaccacccttagttggttctacatgtctgtaccttcaggcagttccactctcaggaaacgagagtaatagataattgagcagatttc

SEQ ID NO: 118138 - DNA, 455 bp, Homo sapiens
agcacgagaattgctttaacccgggaggtggaggttgcagtgactgagatcgggccactgcactccagcctgggcaacagagagagactccatctcaaaaaaaaaaaaaagaaagtggggtcagtgagcagccctagctgaaactaaatcagaaaaaactgcattgaaataacaacaaaacatttcgctttgaaaataattttaggcttagagaaaagttgcaaacattatagtaaaaaatcccgtagagcctttaccagacgcaccaagtgttcacacagtctttcctttgttctctccccaccttctttgttacttttctgaactgtttttgaaagtaaactacaggctgggcatggtggctcatgcctgtaatcccaggactttgggaggctgaggccgacggatcacttgaggtcaggacttcgagaccagcctggcccgcatgataaaac

SEQ ID NO: 118139 - DNA, 587 bp, Homo sapiens
tctctcagtcattacttgactttcatgaatcagaatataccacagcaaactgaatccctatgaaaccagtacaggactaacctgctttcttgttcttaccggaaaaggcaggggacacactcaccctccctttgggctccacgttcggatagtgtcttccccagctgcaccaccttattaaatcttaggttcaggtcagacagggagggagactcccagcctgcctgctgtctctcaatttcggttcttgagcagctgcctcccaaggtgttacaaatccagcagccacttgttcctgctcattcattctcgttcctctccaccccccacacaaaatctggcaaccaggcaggaacacagttccagctctgagtcactgccccactgtggccaaggggagcagtggctagaggtaatcaaccaggcaagcacttcatgtctctagaatccaattcttccgttctttgagaccgtggggttggctgcccttctagaatcaggacataaagaaacacccctatctacagctctggagtcagaacaaattgctcattcaggtttgccctacagacaaggtagagccgaaa

SEQ ID NO: 118140 - DNA, 383 bp, Homo sapiens
cctattttaaattaggtttgtcttttattattgagatttggaatttttaaaatatcaacacaagttatttgccagatatatgtatttttaatatatttctctatatgtcttatccccattttcttaatgatgtctttcataaatagaattttcatttttataaaattcaatttataattttttatggtttctctttattaatcccatttaagaaatctttgtgccatgattatgaagatgcactctaatgttttttcccagaagctctgtaggtttagcttttacctttctgggtttgttttgttttgttttttgagatggagtcccactcgtgtcacccaggctggagtacaatggtgcaatctcggttcactgcaacctcc

SEQ ID NO: 118141 - DNA, 216 bp, Homo sapiens
gatggttgtagaatgctgattttcaactccagtaccccctttacatttatcacctggccctaagcattctattgtaagcaaattgcctcccttctttcttatttgtctgtatagactcattaattccaattttttaaaatgacttataattcattactgtactcattgtcccagatttggccagtagaagccccttcaagatgactccttcaaggt

SEQ ID NO: 118142 - DNA, 341 bp, Homo sapiens
cctctccctcccccgggtcactcttttgcattgtgttgggggctggtgctactgtggtgctctttatgtcgatggttactgcttttccaccacggccgttgggtagcagatgctcagtggcagcccctctgagggactcacatgggtatcttgtagtaggccctttagaaagaagcctctggccagacacggtggctcacgcctgtaatcccagcactttgggaggccgaggcgggtggatcacctgaagtcaggagttcgaggccagcctggccaacatggtgaaacactgtctctactaaaaatacaaaaattagctgggtatgatggtgggtgcccgt

SEQ ID NO: 118143 - DNA, 144 bp, Homo sapiens
agcagaccaggtggtacggtggtgggcctccctctttggaattggatgttagcactgtctgtcattctagggactgagaagtcaacctgggaatgataagaagctagggaaaacttttctcctccgtatgggagaccttgatct

SEQ ID NO: 118144 - DNA, 738 bp, Homo sapiens
ccccagccagcaccaacttgtgagcccatgtttggaagtacagttaaaccttcagatggctaccgcccaaggtgatgtatgactaccactacttgagagacacgatgctgaacgcttccaaattccagaccaagggaactatgaaaaataagtgttgtttcaagccactaaattttgaagcaatatgttacatagtattaggtaactaaaataattataagccacaatcacaaatcaatattatctataattatatgtacatactgtatgtatcttcatcaaatacaaataaaattaggtatttgattttcatcttaatttttaaataacttctattttgtgcttcataatgtatataaaacagcacaaaaattcatatatctatataagcataggtatcaaaaattttttttaactaatatggataaaggataaaacaattctagaaacaaattactctgctcagataaacaggatttcttggattcccacaagtgaagatccagcattgtctctgaggcagtgatctgaattctgacctcactgcttcctaactgtatggccttgggcaaattaattaacttctctaagcttcagtttccctcatgtgaagatgagaataaaaagagtatcctaataaacagggcttttgggaggattaaatgagataatcaatgtaaaatccttagtacagtgtgtggcatacagcaaggttcaattataatgaagaaaataata

SEQ ID NO: 118145 - DNA, 617 bp, Homo sapiens
ttactatacataatttttttttaaacctcacccataaggggaaggttcccccttttatccatgcaggtattccacccagcagcttacaagccccatttcacaaaatccttaccaaattctgggaatgcataattactgttactagggctcagacctgactgaactaagtcctgattgtttcagacaacaaaaattctatttgatctttccaagaccccgggtatttgcgaattctcacttatcatatagtagtgggaatttacggcttggcagaaacatgtccacacataatgaatctttctccctggggacaaggtccacagagtttccatcagactcctgggagacctatgatcttaaaaagctcaggaacctctgttccagttcaaggccctccaattatagagtggggttcagaggcccaggaaggaatcctggcttgccccagaggacatggtgtgtctgtggcagtgctaagctggttccctcttcatcacccaaagatgccacaggtccaggcatttctggtgatcatgactcacacgctccccatgactttagcctacagaatttcctcagcagtacgtgcatttctcctgccaagctgaggccaggga

SEQ ID NO: 118146 - DNA, 692 bp, Homo sapiens
atcctagtgaccagatatccctgtattctgggtatacagcgacttaaagtgtttggtattttacgcaggaagggtctcctatatagaaagtgactccttaaatagtccttgatttttgtcccctttgcctcctgacagactcaaaattgaagtccaggtttgctcaaatgaacaaatgccttaaggacagaactagcaccccactttcccttagttttgatttcttctattagctcttttgatgctttcaggatacttattttatctagcacgctcggttgtcctcaagcaaaaggaatgctatcaataagccttcctaccacgtattgaaaattaaagtccttcctttttacactttaagaccttctaataagaaatgatggctagattttatatttcttgcgcctattaatatttttcctttatattgttgataaaaccaattatcttgaaagatttcctaatactgaacccatgcaggacgggttcaatattatgttattcttttaatacatcactaggtatattaaaataggttattccaacaggttattcttttttcttttttttaattaaaaaattgttctcataccttcttgctgaaaacagcttattcttttaatacaccactagctatggtttattatttaaaactttttcatctgtattcatgagggaaactagtcaacagc

SEQ ID NO: 118147 - DNA, 313 bp, Homo sapiens
tttttttttttgcctaatactcatttgcaaggtagctttctgccaacagcatctttccaatgctggaaaattggacttctgctttgagcacatttaaaaagagacgttttgtattttctttttgttttatttagatgtgctaaacatacataactgcaaaaaatgggacaatgaaattaggaaacataggtttacttattacttactagaaaacgcccaccccaaggttagttaaggcaggcaatcacttgcccgctatgatctagacttgtgatactcagtttgatagtcaagtgtggagctacttaagtta

SEQ ID NO: 118148 - DNA, 797 bp, Homo sapiens
aagtaaattaaaataaatgcacacaagaaaatatgtgtttttcagagaaatgcaaataaaatgatatatgtcaaaaattaaaatgcatgtatatttaaggggaagacaatggtagtggagacaggaataaattgatgtcaaaataaagagaaggcatttgcttgtgtcagcaataatgctccatttaatgtgataataatgtgatgagtatggatgaactcaactctctgtacttgaggtttcaaataaaaataagaatacctttattaaggggaattctctaaatggggtagttgagagatgtttctgactaggctggtttgaatcagaaatgctgtttccataaaggggcagacttgatgcatcccaagaattgacttatctaaagtcagataagtaacatctcctacagccagtaacaaccttcttatctggcaaatagatgtaaatatcaacatgattgtcatcctggcaggtattgctgagggccatgcagtttgcatcgttgtacatagatatcaaatgcttgtccaaagtaattttttcagcattctatggggagtaacaccttacatttgtacactttatattattcaaagcactttatttacaatcccctttgattctcctaaagttggctgagtcagatattattatacacttcacagataaagactgtgaaacacagcatagctcagtgattgtcccaatgtcacacaagttagtagatctggtctaaaacccatgtctctggaggaactgttatgtttcttttctctctcctcatgagaatatac

SEQ ID NO: 118149 - DNA, 275 bp, Homo sapiens
aaattccagctccaagtaattttgggctagaggcataatttcccacaacaaacatgggaaacctactttcatatgagagtgactaggctaaagcaaaactaaactggaaaatatacaggaaaggtagagctatttgccaggctactttctagcctccgtatatatctgttatttcttgagtccaaatctagttctccattcttaatctctcccagatgaaatcttcagggacttgcagaaagtgtgcaaatatgcatcctgctcatttttataag

SEQ ID NO: 118150 - DNA, 246 bp, Homo sapiens
caccactcctaatgccacccaaccctgccatgggccttctctttggaacatctacagactgcatctcttttccgccctagtgacctaatgtggatgcaacttgagtttgtgagggaaattctcaaacttgcttgtgatgatcaatctgccatgctgccttttgccaaacagagaattcagtatactataaagaacaaaaactacattaaaagatagccaaactcccaggaatatttattttctttt

SEQ ID NO: 118151 - DNA, 181 bp, Homo sapiens
cagctgctttcgctggagtggtcgggtgggggcaggggtaggtgctgtatccatagggtgcagacagagccaggcatgaaaggtgaagccaggccctggccatcgctgtacagggggtaccatgatgcccgccatgctgggcgtgaggtcaaagtagcgcagagcacgtgcaggaccctgg

SEQ ID NO: 118152 - DNA, 690 bp, Homo sapiens
aagcaattctcctccctcagcttcccaagtagctgggattataggcctgggccaccatgcccagctaattttttttgtatttttagtagaggtggggttttgccacgttggccagcctggtctcgcactcctgacctcaaatgatccacccacctcgacctcccaaagtgctgggattataggcatgagccactgcgcccagccaaaactccccattttaaacatcagatctcatgagacttattcactatcatgagaacagcatgggaaagacctgcccccatgattcaattacctcccaccaggtccctcccacaacacatgggaattcaagatgagatttgggtggggacacagccaaaccatatcatgggtgaatcttgaatacattacgttgagtgaaagtagacagtctcaaaggctacgtactctaaaattacatttgtatgatattctggaaaaggcaaaacttatagtgacagaaaacaaataaatggttgaaaagaggttggagaagagatgaagtacaccaaggagcttccagggatgatagaaatagaaatatcgtgattgtagtggtagttacccaactggggttggctgtcagtgctcatggaattgtactgaaaagggtgacttttgctgaatgcaaattatacccaataagcctgaccttaaaaagcaagctag

SEQ ID NO: 118153 - DNA, 359 bp, Homo sapiens
tccctgaagtatcagtttttgtaaaatctcccaatcaatttcttatcagattatattaaatacctatcatctagagtactccagaagccaaataaatattaaaaacaaaaacaaaaacaaaaaactgagatagggccaggcatagtggctgacagtaatcccagcattttgggaggctgaggtcgaagaataacttgaggccaggagttcacaaccagcctgggctatatatagcaagatgctgtctctctaccaattctaccaatatttttaaaaaaactaggtgtggtggtggcacctgtactcctagttactcaggagactgaggtgggaggactgattgcttgaggccagcagtt

SEQ ID NO: 118154 - DNA, 527 bp, Homo sapiens
ccaagattacacaactatactccagcctggatgacagagacccccatctcaaaaaaaaaaaaaaaaaaaaaaggtatctggcagctggtctgaagataggcatctcaattgttcacggccagttacagattgaactactctttcccccttctcactactgcacttgactagtcttttttttttcccccacaaagaatggggcttcagatagaactgaaaaataaaagtgtctggtggtaggcaatccagagctggcatggtggctctgcaattaacaaggacttatgcttctttttgcttcaccatcctagcgtgcagcttccatcctcatggtcatctcatggtctaatatggcttctagagcttaattcatctcatctacattccagatagcagacagaaggaaggaaagatgattagggggagagagagcagcacagaaggacgctttctagttaactctttaaagggccttcttggaagtccaggacaatacttccaacacttctgtttatgttctcttggcc

SEQ ID NO: 118155 - DNA, 573 bp, Homo sapiens
ataatagtaaccaggcaacaccattgaaggctcatatgtaaaaatccatgccttcctttctcccaatctccattcccaaacttagccactggcttctggctgaggccttacgcatacctcccggggcttgcacacaccttcttctacagaagacacaccttgggcatatcctacagaagaccaggcttctctctggtccttggtagagggctactttactgtaacagggccagggtggagagttctctcctgaagctccatcccctctataggaaatgtgttgacaatattcagaagagtaagaggatcaagacttctttgtgctcaaataccactgttctcttctctaccctgccctaaccaggagcttgtcaccccaaactctgaggtgatttatgccttaatcaagcaaacttccctcttcagaaaagatggctcattttccctcaaaagttgccaggagctgccaagtattctgccaattcaccctggagcacaatcaacaaattcagccagaacacaactacagctactattagaactattattattaataaattcctctccaaatct

SEQ ID NO: 118156 - DNA, 854 bp, Homo sapiens
aaaaaggaggggcgtacgcgggcaagatggaggcgactacggctggtgtgggccggctagaggaagaggcgttgcggcgaaaggaacggctgaaggccctacgggagaaaaccgggcgcaaggacaaggaagatggggagccaaagaccaagcatctcagagaagaggaggaagaaggcgagaagcacagggaacttaggctgcggaactatgtcccggaggatgaggacctgaagaagaggagggtgccccaggccaaaccggttgcagtggaggagaaggtgaaggagcagctggaggccgccaagcccgagcccgtcatcgaggaggtggacctggccaacctcgctcctcggaagcctgactgggacctcaagagagatgtggccaagaagctggagaaactaaaaaagcggactcagagggccattgccgagctgatccgtgaaaggctgaaaggccaggaagacagcctagcctctgcagtggatgctgccaccgaacaaaagacctgtgactccgactgaggcatgccctgccccaccactcgcccatcaggcctgtcctgcaggggatggtcttgggcagggatgggggctaggcttgccatcacctccagtttggcttctgagcagagactccctgcccatcaagtctgaaacccccatggatgaggtcagctccttgtctgctgggtggcccctgccattctgaatggaggcagaaccagcaacaactctgggcgtgcctgtgtctgcacatgtggatgtacatatgtctgtatatatgtatatattttgaactttctaaaaaaaaatctggaaatagaaacaagtaaacccctgtgtgtggca

SEQ ID NO: 118157 - DNA, 490 bp, Homo sapiens
  misc_feature (38)..(38): n is a, c, g, or t
gcctactactactactactactaaagacgcggccggtncgacaaaaaagcggactcagagggccattgccgagctgatccgtgaaaggctgaaaggccaggaagacagcctagcctctgcagtggatgctgccaccgaacaaaagacctgtgactccgactgaggcatgccctgccccaccactcgcccatcaggcctgtcctgcaggggatggtcttgggcagggatgggggctaggcttgccatcacctccagtttggcttctgagcagagactccctgcccatcaagtctgaaacccccatggatgaggtcagctccttgtctgctgggtggcccctgccattctgaatggaggcagaaccagcaacaactctgggcgtgcctgtgtctgcacatgtggatgtacatatgtctgtatatatgtatatattttgaactttctaaaaaaaaatctggaaatagaaacaagtaaacccctgtgtgtggca

SEQ ID NO: 118158 - DNA, 474 bp, Homo sapiens
aaaaaggaggggcgtacgcgggcaagatggaggcgactacggctggtgtgggccggctagaggaagaggcgttgcggcgaaaggaacggctgaaggccctacgggagaaaaccgggcgcaaggacaaggaagatggggagccaaagaccaagcatctcagagaagaggaggaagaaggcgagaagcacagggaacttaggctgcggaactatgtcccggaggatgaggacctgaagaagaggagggtgccccaggccaaaccggttgcagtggaggagaaggtgaaggagcagctggagaaacacaaaatgtagaagtagcagcagggcccgctgggaaatgtgctgccgtagatgtggagcccccttcgaagcagaaggagaaggcagcctccctgaagagggacatgcccaaggtgctgcacgacagcagcaaggacagcatcaccgtctttgtcagcaacctgccctacag

SEQ ID NO: 118159 - DNA, 399 bp, Homo sapiens
ggtcgtcgcgcatgcgcgggggtgggcaaggcagtggtcagcgacccgcagtccatctgactcctgcttcccgggtgttgctcgtgacaaggaagatggggagccaaagaccaagcatctcagagaagaggaggaagaaggcgagaagcacagggaacttaggctgcggaactatgtcccggaggatgaggacctgaagaagaggagggtgccccaggccaaaccggttgcaggtaagcaagctgtccctctccacctctgcttcctggcactgtcagccaccctccacctcagcaggctttgctctctgagaataaccagcagtaccaggacaggagttgggcctgcaggcaggaccctttgttaccatctcatggcagatgcacacagtcggccttc

SEQ ID NO: 118160 - DNA, 136 bp, Homo sapiens
ctactactgctcgaattcaagcttctaacgatgtacggggacatgtggatgtacatatgtctgtatatatgtatatattttgaactttctaaaaaaaaatctggaaatagaaacaagtaaacccctgtgtgtggca

SEQ ID NO: 118161 - DNA, 832 bp, Homo sapiens
cggcgccacagctctctctgagctgggtgttgtcagccacatgttgtacctgataaaaccagaggtgaggccttgctttgggtcacaaccaagtactgcagagtttggatttgagcgtaagtccctcagagactaaagataccactaggccttacaattttatgaataattttggtttcatactagagtaaaggaaacaagggaagtaatttgaagaagcttttaccgaacaggttgtgtgttctttgtggaggagaaggtgaaggagcagctggaggccgccaagcccgagcccgtcatcgaggaggtggacctggccaacctcgctcctcggaagcctgactgggacctcaagagagatgtggccaagaagctggagaaactaaaaaagcggactcagagggccattgccgagctgatccgtgaaaggctgaaaggccaggaagacagcctagcctctgcagtggatgctgccaccgaacaaaagacctgtgactccgactgaggcatgccctgccccaccactcgcccatcaggcctgtcctgcaggggatggtcttgggcagggatgggggctaggcttgccatcacctccagtttggcttctgagcagagactccctgcccatcaagtctgaaacccccatggatgaggtcagctccttgtctgctgggtggcccctgccattctgaatggaggcagaaccagcaacaactctgggcgtgcctgtgtctgcacatgtggatgtacatatgtctgtatatatgtatatattttgaactttctaaaaaaaaatctggaaatagaaacaagtaaacccctgtgtgtggca

SEQ ID NO: 118162 - DNA, 884 bp, Homo sapiens
aaaaaggaggggcgtacgcgggcaagatggaggcgactacggctggtgtgggccggctagaggaagaggcgttgcggcgaaaggaacggctgaaggccctacgggagaaaaccgggcgcaaggacaaggaagatggggagccaaagaccaagcatctcagagaagaggaggaagaaggcgagaagcacagggaacttaggctgcggaactatgtcccggaggatgaggacctgaagaagaggagggtgccccaggccaaaccggttgcagtggaggagaaggtgaaggagcagctggaggccgccaagcccgagcccgtcatcgaggaggtggacctggccaacctcgctcctcggaagcctgactgggacctcaagagagatgtggccaagaagctggagaaactaaaaaagcggactcagagggccattgccgagctgatccgtgaaaggctgaaaggccaggaagacagcctagcctctgcagtggatgctgccaccgaacaaaagacctgtgactccgactgaggcatgccctgccccaccactcgcccatcaggcctgtcctgcaggggatggtcttgggcagggatgggggctaggcttgccatcacctccagtttggcttctgagcagagactccctgcccatcaagtctgaaacccccatggatgaggtcagctccttgtctgctgggtggcccctgccattctgaatggaggcagaaccagcaacaactctgggcgtgcctgtgtctgcacatgtggatgtacatatgtctgtatatatgtatatattttgaactttctaaaaaaaaatctggaaatagaaacaagtaaacccctgtgtgtggcagaaatgtgtcagatatttcctaggtctgag

SEQ ID NO: 118163 - DNA, 758 bp, Homo sapiens
aaaaaggaggggcgtacgcgggcaagatggaggcgactacggctggtgtgggccggctagaggaagaggcgttgcggcgaaaggaacggctgaaggccctacgggagaaaaccgggcgcaaggacaaggaagatggggagccaaagaccaagcatctcagagaagaggaggaagaaggcgagaagcacagggaacttaggctgcggaactatgtcccggaggatgaggacctgaagaagaggagggtgccccaggccaaaccggttgcagtggaggagaaggtgaaggagcagctggaggccgccaagcccgagcccgtcatcgaggaggtggacctggccaacctcgctcctcggaagcctgactgggacctcaagagagatgtggccaagaagctggagaaactaaaaaagcggactcagagggccattgccgagctgatccgtgaaaggctgaaaggccaggaagacagcctagcctctgcagtggatgctgccaccgaacaaaagacctgtgactccgactgaggcatgccctgccccaccactcgccatcaagtctgaaacccccatggatgaggtcagctccttgtctgctgggtggcccctgccattctgaatggaggcagaaccagcaacaactctgggcgtgcctgtgtctgcacatgtggatgtacatatgtctgtatatatgtatatattttgaactttctaaaaaaaaatctggaaatagaaacaagtaaacccctgtgtgtggca

SEQ ID NO: 118164 - DNA, 434 bp, Homo sapiens
ctccccaccccttctgtctgccatccatcccaggtgaaaggctgaaaggccaggaagacagcctagcctctgcagtggatgctgccaccgaacaaaagacctgtgactccgactgaggcatgccctgccccaccactcgcccatcaggcctgtcctgcaggggatggtcttgggcagggatgggggctaggcttgccatcacctccagtttggcttctgagcagagactccctgcccatcaagtctgaaacccccatggatgaggtcagctccttgtctgctgggtggcccctgccattctgaatggaggcagaaccagcaacaactctgggcgtgcctgtgtctgcacatgtggatgtacatatgtctgtatatatgtatatattttgaactttctaaaaaaaaatctggaaatagaaacaagtaaacccctg

SEQ ID NO: 118165 - DNA, 218 bp, Homo sapiens
accctggtttccagagatcactgccggccacagggctgcatgatcactgcccgatgattgatggcttggaaacagtgttattttctctggctctgatgggactcactggggtgaacatcccccctggggacgtcttctcacatctggttctgaggctgagagacactgggccagtgcagaggggatgcctgccctgccctgccagctctgaggctgag

SEQ ID NO: 118166 - DNA, 299 bp, Homo sapiens
tttataacacaaaaaagaaggggggccttcaattccaaacagctgctttacttggagaaatactgacctaagatgtgattacgcttcagagataccaacgggcactgctgtgttcagtagaaagaaatgtaaatgaaggctcacttgattgtggcatttagagggaacccttggtacctggaaatgtgaatctggaatcttacctgtgtcatcaaagtagtgatggattcactactcctcaaccactctcctcatgattggaacaaaagcaaacaaaaaagaaatctctctataaaatg

SEQ ID NO: 118167 - DNA, 174 bp, Homo sapiens
agtctgcagcctacacagaggacaaacctgccccaagggcctccctataaacagcagtagtcaaggttaagtgggggaagttctgagaccagaagccataagaggctttctagctaagtgattatgaacagaaaagtaacaaaaaatggaaaggccaggaaatgtgggaaggag

SEQ ID NO: 118168 - DNA, 302 bp, Homo sapiens
ggaagtgttgaagtctacagctattgtgaaggatttgtctgtttctccttgaagttctagcaatcttcacgtattttgaggctctgcatctatgtattttgaggctccttcctaaagtccataaacctttaggaaggattgttttatcctcttaattatttaacccctttatctatatctatatctgttaagaggtggaactgaaatggccttttaatgatctggcccttccttcattacaacctactttgggcagggaaagtcccattcagtctctggagtgcctggttaaatctcttgaa

SEQ ID NO: 118169 - DNA, 392 bp, Homo sapiens
actccaaggtctctgagtggacgaccactgcgccttcagacttgccagggtacagcactcagatccggattccctcaccccaggacctctcctcccacagccatccccatcacgcggatggcaactccattctcctgtctgctgcagccaaacacaccctcctctcacaccccacaccaggtccaccaggaaagtccagtggggcccacccccaaggcacatccagattctgagtgcttctcacagcctccctgaagtgaggtaagccatggccatctggcccgtgggaccacataacaactggcctacaagctcctctctctgatcccagctgccacagcgtgcccctgcaacccaagacaggccttctccccctgcatgaaactgtgtac

SEQ ID NO: 118170 - DNA, 215 bp, Homo sapiens
ctggcctctggtgatccgcccacctcggcctcccaaagtgctgggattacaggcgtgagccaccacacccggctgaaaaagttttttctaaaatatttttggaattttgtttttcaggattttaacattggggatgatggcatttgggattatggtcagctcccatcttggacttctggcctctagaattgtgagaaaataaatatctgtgattt

SEQ ID NO: 118171 - DNA, 767 bp, Homo sapiens
acgcgcatgcgtagcactcgtgcggccgtgccttggaatagcacgtcctgcggcctcagccgcctcttccgccatcctccgtaggctgcattctgccctagtgagcgccggtttttgagccttgctcttccctcgctaccgacgtcgaatcattatgcggtcaacaaccgcaggtgggttatgtgtcatagcccgcctccgctggagggaaaaggcctggtgcgagaaatgcccaagggaaagcctgtctagggtatcgagtgctggccgagggccctgcacccggactgggactgcgccgggccccgctttccctcaggccctccacccccagcggcccggcggcatttgtgaacagccatctgggactcccacgcctaggcttttcggcttcacagaccttccactccctcaggggtccagccacagcggctcattcctgccccaggggcccttgcactggctctttcgagacctcagcaggtcttcccttctgatttgcacttacgagacgcgttcagattcactgcttcaaaggacttcagaaagtagttgtcagatcttaacaatcttgaacaactgttcacacccatacactttctgcatagcgctcaccacgacccggcgtttctagtttctcatttaccttccacataaattacatgagaacctaatcttaacttgttcacaggtgtatcctgaacacctgagacaaggaacagatgtacagtaaatacttgatgagttaatgaatggcccacatagaa

SEQ ID NO: 118172 - DNA, 664 bp, Homo sapiens
ctactactactaaattcgcggccgcgtcgacgatgggatattgacattgagcgggcatcgtgccttcccctggtggcctccgaagctcatgcaagtttgcaggaagagacattcagagtgaaatacggcctgaaaagccactccaagttgtattatttatgaaacacaacactcaacacaagaagaaacccaatacagcacatcattctgcctgctccgtggcttctgcttctcaagcgacttaaaatgattgtctcactttgtctcccaggctggagtgcagtggcgtgatctcggctcactgcaacccccacctccctggttcaagtaattctcctgcctcagccccccgagtagctgagattacaggatcctctctctgggagccctcatctacctccagctgcaatcatcaccacaggagtgagagagagacttggacctgagctggaccctccagccctccttcgctgaactaccttccaaccttatgttcctactgatgtttaccaggttattcaataaatattgtatgttctgtggcagtggccaccagtcattttcaaatacctgttttcccttcttccttaccaaaaacacccatggtttttagctggacacctggttgcccaaaataaacactgcatttgcagcctcccttgca

SEQ ID NO: 118173 - DNA, 152 bp, Homo sapiens
cttgaggagcacccccgccagccactggtttgagcaacaagcaccctgcaccaacagcatcatgtccatccctgctagggctgctcactctccagcagctttcagctcgcactcccccaccccctggtgctggcgagtcttcccgggaacca

SEQ ID NO: 118174 - DNA, 436 bp, Homo sapiens
taacagaaaatgttgatgctatacaaatgtattttaccttaagaaaaaggagcatatatcaaataattttataaagatacccatacaaaataaagtttgaatcaaaaaatgtatataaacctgctctaaaaatgtctacacaagtgttacaaaaaaaaaaagttgattgaggaaacattccagaacattggtctaaacaaagattttatggagaagacctcaaaaaaattacagggaaccagagcaaaaatagacaaatgggattacatcaagctaaaaatcttctgtataacaacaacaacaacaacaacaacaacaaaaatcaacaaagtgaaaagaccacttacagaatgggagaaaatatttgtaaactatccatctgagaaggcattaataaccagaatatgtaagaagctcaaacaactcaatagcaaac

SEQ ID NO: 118175 - DNA, 151 bp, Homo sapiens
ttgctgtgctgctgggaaatagaaaacatgaaacaaagtgaggtgaggtagtgagatgatcaattggtagccctacttgggaagaatcattcttagaaatgctgcagctctttcaagctctcttatgagttggccagccccagagacccaa

SEQ ID NO: 118176 - DNA, 459 bp, Homo sapiens
cttgaacaggtttaggagacagtaggtctcacctcatgtttataatcttaaagaggcattgcagtcactgaaaatctgagatcagtgaatcatcgccaaattactgagaagtaatagttgcaacaactattacagctttttgcaaaacaacaataccacaaccaccaccaacaaaatcagtaccagaagagtctgctaactccagcatcttatcaatactgctgtggtcatttcagcatggtctaaatgctattgtcatcttggtgtagagtctcaaagaaggaggtttttagggactggggccactgcatcaaagagacagtgttgacattgggctgatgaaaagggctgcaggagcaggttcttactggacaacaaagaaattctcatagtgtggatttgtcacagacatggcactcagggagaagagacagagagacagagagtttatatatgtca

SEQ ID NO: 118177 - DNA, 1026 bp, Homo sapiens
attggctttgtcccttaagcttaggtggttgctcttttcctgatgagtctactttatcctaaagttagtaaacttgctttgccactggccctttcaaactaggggtgataaaaatcactctaaccaaaggttactgcagtctcttgtgttctttctcatcccttcaacagctttgcaaagagtctccaaatcctctctgcattatccttattaaattgcactatcagtttctttatatgaccccaacaaatacatgaatctcctagttagggaaactgatagactaagagtacttttctttcatgttcaaagctagaaggtaagtattttctaataatgtgaagcagttgaaatgacaatttgggttagagctgtgctgtggactacagctatttgaaagtacagttttatttttatgacagtttgctctctgctgtctgggatatttacattttcctttcctatggagaaggtcagagtatgattgattcaacattaaaaataactttaggttgtttaaagtgaggatgttctaaatgataatatttgtgaagtcctctattttgatatttttcacttaagatcagtgatttagaaatcaagtgaaaatcttgttaccatttgaatgaacatactgatattaataaaatgataagtattttacatgatcatccaagttagattttgacagaatgcctagggtcttggagtaaccagcttttggcagttcctggctctctttttcatattcaaatttgtaaagaaagcagagaagagtaaatgtgtgtgggtgtcttcctcctggaagtaggcacaaactgcatggaaaaccaaccaaaaaatggtaacagaaaaatatgataataatttatttaaaaataaaattcttagactttgtcataactggaagactatctagaattgtgaatgaagtaaggaccccaaataaagacgcatttctaattctcatatttctggcccatgcgggtggatgagcgggtacggccgattcgatcgcaggggggc

SEQ ID NO: 118178 - DNA, 295 bp, Homo sapiens
gggagtcttctgttttttcttctctttacttttctgcattgacatatatttttactatgcttttaatacccttcccttcccctattaatcctgaagcttcatctcatgagatttttcctgtttcggactgctgagctgttaactaagagcaactgtaatttcttctgaagttctaactcccttctactggatttttgaacaacttgaggacagagtgatgctataatctttatacttttagcatgtggacagtaatagtagtatatatagcaggaaatcaaatagctaattgaat

SEQ ID NO: 118179 - DNA, 205 bp, Homo sapiens
attacaggtgtgagccactgcactcagcctcagtcattgtttcattcattcatcacacatctgagtactgcagtgtgccaggatgacagtgaggtaggaacacagaccagcacggaggtgggacagagcttcctggagaagggcttttcaaggttgaataggagtttgcaatgaggaaaaaaagtcacatgatctttcttttttt

SEQ ID NO: 118180 - DNA, 642 bp, Homo sapiens
tgtctgccactgcaatggcatctttcctcttggcaattgtataacagcattcttaccttcaggcttttcattcctgtggctctttctgtagctctggtgttggacatttggtcattatttgtcaataagaaacacattcatgttatcaggataacaccaaaggcaaataataatgtcctaatcatagaaaccatgttaaggccatagttcattttttaaaaaatcattagaatggaattattttttaaaagtgttttctttctggattacatttttttccggtggtagaatttattctttaatatcatttggcaaaatcaatggttttggcagccattggactggttcagttcttaaggcaacaggtcccttgcttgaagcagtcacttgagagaaagtgaggatttgctcttgggaggaagacctgagtaagttcaaggagcaaatttagtgactaccaggaaagaaaactgtcaggttcttcatacttccaggaggcagtaccagcatagaatcatgcaaaccaacgaagagcacaatatactcaccctactcctcgatcccaaaccagagtcttgaggattcacaggaacttctgctaagacccaggaagtgccatcgatctgtaatgattcttgccta

SEQ ID NO: 118181 - DNA, 664 bp, Homo sapiens
agtgcaaaagtaaagagaactgatttgtgagaagagagactggaagtagggaaacctgttgcaagactagcagaggtgcaggtgacagacaaatagccacaatttagactagagttcaagctagtggagaggcattgggaagcagggacggcttgagaaaaagcctttagaaaaaggctttagaaaaaaaatttgctaatgtcatcagcatgctcttctgtagtcctctggaatcctgggggagggggagatggaaagggaaaaggagagagagccctgtttggttcatgtttttattcagctgtgtcaactgtggcataggagcaaggttttgtctctagcccaactcaaatggattatatttttatcaaggcttaaccacatcttctatattattaataatattaaaaggccaggcacggtggctcacacctgtaatcctagcactttgggaggccaaggcgggctgattgcctgagcacaggagttttgagaccagactgggcaacatggtgaaaccctgtctctactaaaatacaaaaaattagctgggtgtggtggtgcatgcctgtaatcccagctgctcaggaggctgaggtaggagaattgcttgaacccaggaggtggaggttgcagtgagctgaggttgcaccactgcactcca

SEQ ID NO: 118182 - DNA, 6268 bp, Homo sapiens
  misc_feature (6243)..(6243): n is a, c, g, or t
agagagggaagccccggcggtgagagtcggcccaaaaagcggcggccgttggaggtggctgcggcagctgatgtggcctcatggatgagctggtacacgacttagcctcagccttggagcagacatctgagcagaataagcttggtgaactgtgggaggagatggcgctgagcccccgacagcagaggcggcagcttcggaaacgccgaggtcggaagcgtcgttctgacttcactcacctggcagagcatacctgctgctacagcgaggcctctgagtcaagtctggatgaggccactaaggactgtcgagaagtggctccggtgaccaattttagtgactctgatgacacaatggtagccaaacgacacccagctctcaatgccattgtcaagagtaagcaacattcttggcatgaatctgactcctttactgaaaatgcaccttgtcgaccactcaggcgcaggcggaaggtgaagcgagtgacatcagaggtggctgctagccttcagcagaagctgaaggtgtcagattggagctatgagagaggctgcaggttcaagtctgctaagaagcagcgtctgtcccgctggaaggagaatactccctggacctcatcaggccacggattgtgtgaatcagcagaaaataggactttcctaagcaaaacaggaaggaaagaaaggatggagtgtgaaacagatgaacaaaaacagggctctgatgagaacatgtcagaatgtgaaaccagcagtgtgtgtagcagcagtgacactgggctctttaccaatgatgaagggcgacaaggtgatgacgaacagagtgattggttctatgaaggagaatgtgtcccaggattcactgtccctaatcttctgcccaagtgggctcctgatcattgttctgaagtagaaagaatggattctggattggataaattttcagattccacattccttttaccttctcggccagctcaaagagggtaccatactcgcttgaatcgtctacctggagctgcagctcgatgcctcagaaaggggcgaagaaggctggttgggaaggtgatacctctcacagttagcttggctcagtggggagataatattccctatgggagttgtgtatcctattaacaatcagaggtgctacagaactccctgaagttaatggagccaactggaatgtgttgggagtttacaagagtgaacattatgtagaatgtgaatggatatacaaataaaagatgaaacgtaattcatatagaagtactgacaaaaaaaaaaacactgtcattacagtgtctattgcctgtaaacctacaagcctgagctgtgtcttctgtaacttttgattaatgttatgttattattgtgtaagttaaaatactcttggcttctttatgactcctcttgaattcatgaatgcatctttgttctttcctaattttggtctttcatcctagaattcattaaaaaaaaaaaaacaaaactgttactgagtttcaagagcccctccttggccatgagggagaactatctgctgtttattcagttctgcctttgccagggatggtactagggactcagctcatttaatccttccagcaacctacaagggcaagcaccttcagcagatgaggaaaacttaggttcgaagaagttaaggaatgtctgatgttacccagataggaatggtagaatagagatttgaacccaggtctacttttatctttttacatttttattgaattttattttttactctactttgagattgaggaataaattaagacagggctcatcctcagtcagagaagatggtggtgggcaaagaataaggaagggagaggcattgagagcattaatttgtttgttcacttggtaagcatttagaatgcctgctaggtggcacaatatgtgccacagtctggcttcccttaaggggatactgttttatagtctgaccagggaacagttttctgaagttttaagcatgcaaaagaaatgagactgtttatttccagacgagcccaagattcttatttctttttatctttaaattcaagttcaaatcttttttttttttttgagatggaatctcgctctgtgacctaggctggaatgcaatggtgcgatctcggctcactgtaacttcctgccttccaggttcaagcaattctcctgcctcagcctcccaagtagctgggattacaggcgccccaccatgcctggctaatttttttgtatttttagtacagatggggttttaccatgttggctaggctggtctcaaacccctgacctcaggtgatccacccgcctcggcctcccaaagttctgggattacaggcatgagccaccgtgcccggcctcaagttcaaatcttgaattagaagacatttgattattggaaaactgatacctttcaaattactcattttacagacaaaacgctgctttttctgttttgggagcttattgttaacagggatagctagcagaatagcagtacatggggtggaagaaggagaggttttacttttattgtttaggcttgacagataatgttccccctgccacctgtgttactttctttcagctcttataaaataagagccatccacttccatggaaacaagtcactttatcttgaaggtttccctttagcttgcctggaagggagtgagggcctgttggatgtgcctttaatgatttcaaatgaataggataatatttacttgtttaattcatcttcatcaccttaaagggatatttatcatttctagaagaggtcaccgctctgccccccttcttccccctcccccatctctcttctgcttttctaaattgtaatcataaataatgagtttcattcacagctccctgccagtgagctgctaattacacaaagtactgcttgtaatttacacagtaataaactgtaaatttaaacattacggcactttaagttaataatttttctgctgtaacaaatagctcatttttcacccatcttttcccttggcccccctaccatgtctgtctgtgaccaggaggcatagctataagaaatgcagaacatgaagaatatagtatatgaaaacttctcatttaactccactaccgcccggactctgacctcagagtaatttttctacagccagttctgctgaaatgtgtagcctgatgtttagcacggtccacacacatagatgaatatagacacaaatgtgtttgaagaacagccttgatgttcttggcattcacgcccgtgacttgtgttctctcaacacaacagttactcagatgtgtgttggtatgctttcccaggtgccatggtaggtaagcattgtgaatgtactcaagttaaatgaagagtgaattgccgttttccaattttttggaaatggttcgtttctgaactctttgtggtgttatgggtaagcttttacactataatcttgagaaccctgaatttaggaatcaattttatacaaatttctatttttatttcatgagatgatgtttgagggacaaagtacagagtaacaatttttgcaagtcacaaaattctcttgatgtatttatatttagtcagcagatatttacattttaccagtgaggatttggtaatgtcccaggatgaaggctgttggaactataatcaaatcacgtagctctctaggaagcttggtgtgttggcctgttaaaaattggctactgttgaattttctaaaaaaggatttttactcctatatacttcagtagttacaggaggtatagtacttattaaaataccatatatggtgaacagtgtctatgatgtatttataaagacttttggatcactagagaataataaatgtagggtaacatgtaatacttttaagatggattccaataaaaagaagtatagttgctgttttattttaagattgacttttaacatgtgccttttgaggttgccttagctggcacagttatgggaaagattgatattgtactttatatgtttgtttctgtggttggatgatactcttgtctgccttttctttttaggagaccagcataaacactttggggactgagaggataagccatatcattagtgaccctcggcagaaagatttctggttaccatcagctgggaaaagagaacgaaatcaggtaagatcatttttctttgtcatctttattttatcatttggtttccttttctttagaaagaataaagcgttggcttctgattttcctcacatttctgcttgtgcacatgaggtaaggtttcctctttcttgttattttgattttcttggagaaccgttttctaagagtatccaacacttactggtaaaaactgcagctaattcctctttgtaggttcaactgtgatcattagtttcttgtagcatatatttcataggaatcctgtttttattttagttttgaactttgcagtaagaaagcagaatgaatctgatttgcatatggtttagttcaacatcagaatcctgcattgagaagtactatgttgaagcctaaacgtatggagcagaaggtagagctgctttgggtgaagtggggtcaaagccttagagcagtggtccccaaccttatgtcaccaggaaccatttttgtagaagacagtttttccatggacccgggttgggggcgtggtgaggggggtggttttgggatgattcaaatgcattacatttattgtgtactttatttctgttgttattacattgtaatatataatgaaataattatacaactggtcataatgtagcttgtgctcctgcaactacacagtcccacctgggggtgatgggaaacaatgacagatcatcaggcattaggctttcataaggtgtgcacaacctaggtccctctcatgctcggttcacagtagggtttgcactcctataagaatctaatgtggctgttgatctgacaggaggtagagctcaggcggtaatgcccacgatggggagcagctgcttgctgacagctcacctcctgctgtgcggccccggggttggggacccctgccttagagcctctccttcttagtcttttccctggctaccccctgaggggccccttggcatatttaggcccatgtggagggctcacaatttaaaaattaactcacagtggttatcgatatgtttctttatgtgtgaagctttgtgatttttttggaggattgcattatcttggtgattagttgtaaaatagatgaacactgacaggtgaaaagttgtaggcttcctgtttgttgtgggtttttttgttttttttttttaacaacttagtagcttactgagttgatatacacgatccacattttagacttggaatcttcattatgaatttgctgtttcaaaatgaactagagtggtagaagacataactggtgtatatgtatgagatgattttagatggcatatagatgcccaatttttaagttatgtattatagtgtacattggaaaagatgtaattatggtatcaagcctgttatttcacggaaatatagtaaggacaaagctgagcaaaaataattgatatgaggaaaaataataagtaaacagtagtacaggttgtaggcagataaggaaagtcatgaaggtggtatgtgagagactgcagtttggggaacactaagctagagcactaatcatgtttgcatcagaggatccaaaggcagaaggggacctgtggcagtcacctgatccagatccgttatttgcaaatgacgaactggagatctgtaagattcaaactatttgcccaaagtgatacagctaatagaaccaagattggaacctctgtggcagatagaacagttgcttagtttgtattctcataaaacaagtttgaagttatcattccgggttcttccagtctttgtatgtcagagggtattaagttctaaactttttagagaggactgttatgttgtgggaaaagtccaaagaaagctagcaaacataaagtgagggatctcctttgatcctcacagccaccttttgaagtcaaatagatgttttgcagatgagaaactgaaattatactctgaaagcaatatttcatttagccctcataataaccctgtaaaataggtagggcaggcctggcacagtggctcatgcttgtaatcccagcactttgggaggctgaggcaggtggatcacctgaggtcaggggttcgagaccagcctggccaacatggngaaaccctgtctctactaaaaatac

SEQ ID NO: 118183 - DNA, 2470 bp, Homo sapiens
agagagggaagccccggcggtgagagtcggcccaaaaagcggcggccgttggaggtggctgcggcagctgatgtggcctcatggatgagctggtacacgacttagcctcagccttggagcagacatctgagcagaataagcttggtgaactgtgggaggagatggcgctgagcccccgacagcagaggcggcagcttcggaaacgccgaggtcggaagcgtcgttctgacttcactcacctggcagagcatacctgctgctacagcgaggcctctgagtcaagtctggatgaggccactaaggactgtcgagaagtggctccggtgaccaattttagtgactctgatgacacaatggtagccaaacgacacccagctctcaatgccattgtcaagagtaagcaacattcttggcatgaatctgactcctttactgaaaatgcaccttgtcgaccactcaggcgcaggcggaaggtgaagcgagtgacatcagaggtggctgctagccttcagcagaagctgaaggtgtcagattggagctatgagagaggctgcaggttcaagtctgctaagaagcagcgtctgtcccgctggaaggagaatactccctggacctcatcaggccacggattgtgtgaatcagcagaaaataggactttcctaagcaaaacaggaaggaaagaaaggatggagtgtgaaacagatgaacaaaaacagggctctgatgagaacatgtcagaatgtgaaaccagcagtgtgtgtagcagcagtgacactgggctctttaccaatgatgaagggcgacaaggtgatgacgaacagagtgattggttctatgaaggagaatgtgtcccaggattcactgtccctaatcttctgcccaagtgggctcctgatcattgttctgaagtagaaagaatggattctggattggataaattttcagattccacattccttttaccttctcggccagctcaaagagggtaccatactcgcttgaatcgtctacctggagctgcagctcgatgcctcagaaaggggcgaagaaggctggttgggaaggagaccagcataaacactttggggactgagaggataagccatatcattagtgaccctcggcagaaagaaaagaataaagcgttggcttctgattttcctcacatttctgcttgtgcacatgagttcaatcccctgtctcccctttactccctggatgttcttgccgatgcttctcaccgaaggtgttcaccagcacactgctctgccagacaggcaaatgtacactggggaccaccatgttcacgtgacatcaagaggaagcggaaaccagtggccacagcatctttgtctagccccagtgcagttcacatggatgcagtggagccaaccacaccagcatcacaagcccccaaatcacccagctctgagtggttggtgaggacctctgcagcagagaaagccacagacgcaactactgctacattttttaaaatgccacaagaaaagagccctggatacagctagagagcaggacttcaccctccaggagctgactgggtgttgctgaagcaaatgttggactttgtgttagatagtcttgcatatcttaatcgacattcccagtcctttcaccaccagaaccaactcctctttcaaacacagcagtggattctttctctcagaaggtcatgttgtgggaatcttttttttaaatagtgaaatattgaggcagcaattttttacaaaaaggtcatcctctgctctatttgttaccttgttattgctgtctcaacatttactacagctccatttacagaactgttgcttttttgcagttgtctttgttcttgaaaaaccagtaactgcttctgcataccttttgtgtagagcttttaatatcatttgaggaagttccaaatttgtagccagttccaaacaaatttaaatattgagttgagacctgtatggaattgtgttcgcaggagataaggcttgcctttgagcctactcttgattcatgcagagtgccaataagataaatcaaccaagttttggggcctcaaaagagacaccagcaactgggccttgagaacttccatttttttgcagattgtctgcagaaactcagacagctcatcagcagcagcagctgtattgtattttacctcatcttcagagtttatgttctactgaaagaggacgtgtgtatacacacacacacacacacacacacacacagagattggtataatggagaagatggtttaggtgtacagcaaatttaaaatagtcagtggattgtgtcttactacttcatgtcccagtgtaagcctttatgtcctaagcaggactttattgttagtattataggctaataacctgcagcagaaattcatactctattataataatggcttcttggggccatgctttggggaagtaaaatgtctttttgacatgccttt

SEQ ID NO: 118184 - DNA, 523 bp, Homo sapiens
cttcccccatgatctccttgcagcctgcccacactggccttagggtgactttctggagaggcaagcatcttcatgtgagacctgccaaagggtgtataccttctcaaaagaccctgcagtttcttctccaatgtggacaacgctgagcatatgatctttcggtgtctatctgcactttctttgacctctggtcattgttggtgaaagctaaggagcaagtaggagttctcaagatgaaatggatgaatcacccgaagggataccatttgagttctgggagagctgcctgccgacttcacaaagacgtattcctctcattaatgactgttagtgtagcatcatgcaatgctcctgagaaactgcagaaatagtaatgaccatgtgatggccaaggctgattggaagatgctcctggggagagatgaagtttggatttacagcatcagcatgaaggagttgcaagcattggtgttgtaaaccgcactggcacctgacactaaatgtgggaaagggatggggttcc

SEQ ID NO: 118185 - DNA, 2455 bp, Homo sapiens
agagagggaagccccggcggtgagagtcggcccaaaaagcggcggccgttggaggtggctgcggcagctgatgtggcctcatggatgagctggtacacgacttagcctcagccttggagcagacatctgagcagaataagcttggtgaactgtgggaggagatggcgctgagcccccgacagcagaggcggcagcttcggaaacgccgaggtcggaagcgtcgttctgacttcactcacctggcagagcatacctgctgctacagcgaggcctctgagtcaagtctggatgaggccactaaggactgtcgagaagtggctccggtgaccaattttagtgactctgatgacacaatggtagccaaacgacacccagctctcaatgccattgtcaagagtaagcaacattcttggcatgaatctgactcctttactgaaaatgcaccttgtcgaccactcaggcgcaggcggaaggtgaagcgagtgacatcagaggtggctgctagccttcagcagaagctgaaggtgtcagattggagctatgagagaggctgcaggttcaagtctgctaagaagcagcgtctgtcccgctggaaggagaatactccctggacctcatcaggccacggattgtgtgaatcagcagaaaataggactttcctaagcaaaacaggaaggaaagaaaggatggagtgtgaaacagatgaacaaaaacagggctctgatgagaacatgtcagaatgtgaaaccagcagtgtgtgtagcagcagtgacactgggctctttaccaatgatgaagggcgacaaggtgatgacgaacagagtgattggttctatgaaggagaatgtgtcccaggattcactgtccctaatcttctgcccaagtgggctcctgatcattgttctgaagtagaaagaatggattctggattggataaattttcagattccacattccttttaccttctcggccagctcaaagagggtaccatactcgcttgaatcgtctacctggagctgcagctcgatgcctcagaaaggggcgaagaaggctggttgggaaggagaccagcataaacactttggggactgagaggataagccatatcattagtgaccctcggcagaaagatttctggttaccatcagctgggaaaagagaacgaaatcagttcaatcccctgtctcccctttactccctggatgttcttgccgatgcttctcaccgaaggtgttcaccagcacactgctctgccagacaggcaaatgtacactggggaccaccatgttcacgtgacatcaagaggaagcggaaaccagtggccacagcatctttgtctagccccagtgcagttcacatggatgcagtggagccaaccacaccagcatcacaagcccccaaatcacccagctctgagtggttggtgaggacctctgcagcagagaaagccacagacgcaactactgctacattttttaaaatgccacaagaaaagagccctggatacagctagagagcaggacttcaccctccaggagctgactgggtgttgctgaagcaaatgttggactttgtgttagatagtcttgcatatcttaatcgacattcccagtcctttcaccaccagaaccaactcctctttcaaacacagcagtggattctttctctcagaaggtcatgttgtgggaatcttttttttaaatagtgaaatattgaggcagcaattttttacaaaaaggtcatcctctgctctatttgttaccttgttattgctgtctcaacatttactacagctccatttacagaactgttgcttttttgcagttgtctttgttcttgaaaaaccagtaactgcttctgcataccttttgtgtagagcttttaatatcatttgaggaagttccaaatttgtagccagttccaaacaaatttaaatattgagttgagacctgtatggaattgtgttcgcaggagataaggcttgcctttgagcctactcttgattcatgcagagtgccaataagataaatcaaccaagttttggggcctcaaaagagacaccagcaactgggccttgagaacttccatttttttgcagattgtctgcagaaactcagacagctcatcagcagcagcagctgtattgtattttacctcatcttcagagtttatgttctactgaaagaggacgtgtgtatacacacacacacacacacacacacacacagagattggtataatggagaagatggtttaggtgtacagcaaatttaaaatagtcagtggattgtgtcttactacttcatgtcccagtgtaagcctttatgtcctaagcaggactttattgttagtattataggctaataacctgcagcagaaattcatactctattataataatggcttcttggggccatgctttggggaagtaaaatgtctttttgacatgccttt

SEQ ID NO: 118186 - DNA, 3093 bp, Homo sapiens
tactgtataaggttctatacctggtagcttccaggtggtagttggtaccagaatgggcgcaaacttagtctcttctccattctgacttcaaacctgggtcactacaatttcttggatcacgaaaactgcattcttccttaaatggtgtcactaagttgtctttctgtttctttctgccatggtcattgtcagcagtgaccccaggccaaagaacagtttttcattcattctcaatacctcgatgagaccatgtgctactctgtgtttccacaactctagtgtgattttgaagttgtatgtttttctgttcctgtctagtgagacagtctctaatcttactggatctcatcattaggtaattcaatgacaagtttaattggggaaaagagagaaggatctagtcccccgaatttgttttgggtcctgtcccagttgtcttctggttagtaggtttttgtgcttaagaatatgttgacttcaggcatttaacaagggacaaaacatctatttttagtgacttaaggaagtggtaggaacagaatctaagtgtagccagatgaaaggtgacttattttgtttagacaggcagaactgtggactaccatgatctgtttcatcaaattattccaaaacaacagatcctttttcaggctttctttttctttttcttttctttctttctttttttcctaaacttccttttggcagatgtggcctcatggatgagctggtacacgacttagcctcagccttggagcagacatctgagcagaataagcttggtgaactgtgggaggagatggcgctgagcccccgacagcagaggcggcagcttcggaaacgccgaggtcggaagcgtcgttctgacttcactcacctggcagagcatacctgctgctacagcgaggcctctgagtcaagtctggatgaggccactaaggactgtcgagaagtggctccggtgaccaattttagtgactctgatgacacaatggtagccaaacgacacccagctctcaatgccattgtcaagagtaagcaacattcttggcatgaatctgactcctttactgaaaatgcaccttgtcgaccactcaggcgcaggcggaaggtgaagcgagtgacatcagaggtggctgctagccttcagcagaagctgaaggtgtcagattggagctatgagagaggctgcaggttcaagtctgctaagaagcagcgtctgtcccgctggaaggagaatactccctggacctcatcaggccacggattgtgtgaatcagcagaaaataggactttcctaagcaaaacaggaaggaaagaaaggatggagtgtgaaacagatgaacaaaaacagggctctgatgagaacatgtcagaatgtgaaaccagcagtgtgtgtagcagcagtgacactgggctctttaccaatgatgaagggcgacaaggtgatgacgaacagagtgattggttctatgaaggagaatgtgtcccaggattcactgtccctaatcttctgcccaagtgggctcctgatcattgttctgaagtagaaagaatggattctggattggataaattttcagattccacattccttttaccttctcggccagctcaaagagggtaccatactcgcttgaatcgtctacctggagctgcagctcgatgcctcagaaaggggcgaagaaggctggttgggaaggagaccagcataaacactttggggactgagaggataagccatatcattagtgaccctcggcagaaagatttctggttaccatcagctgggaaaagagaacgaaatcagttcaatcccctgtctcccctttactccctggatgttcttgccgatgcttctcaccgaaggtgttcaccagcacactgctctgccagacaggcaaatgtacactggggaccaccatgttcacgtgacatcaagaggaagcggaaaccagtggccacagcatctttgtctagccccagtgcagttcacatggatgcagtggagccaaccacaccagcatcacaagcccccaaatcacccagctctgagtggttggtgaggacctctgcagcagagaaagccacagacgcaactactgctacattttttaaaatgccacaagaaaagagccctggatacagctagagagcaggacttcaccctccaggagctgactgggtgttgctgaagcaaatgttggactttgtgttagatagtcttgcatatcttaatcgacattcccagtcctttcaccaccagaaccaactcctctttcaaacacagcagtggattctttctctcagaaggtcatgttgtgggaatcttttttttaaatagtgaaatattgaggcagcaattttttacaaaaaggtcatcctctgctctatttgttaccttgttattgctgtctcaacatttactacagctccatttacagaactgttgcttttttgcagttgtctttgttcttgaaaaaccagtaactgcttctgcataccttttgtgtagagcttttaatatcatttgaggaagttccaaatttgtagccagttccaaacaaatttaaatattgagttgagacctgtatggaattgtgttcgcaggagataaggcttgcctttgagcctactcttgattcatgcagagtgccaataagataaatcaaccaagttttggggcctcaaaagagacaccagcaactgggccttgagaacttccatttttttgcagattgtctgcagaaactcagacagctcatcagcagcagcagctgtattgtattttacctcatcttcagagtttatgttctactgaaagaggacgtgtgtatacacacacacacacacacacacacacacagagattggtataatggagaagatggtttaggtgtacagcaaatttaaaatagtcagtggattgtgtcttactacttcatgtcccagtgtaagcctttatgtcctaagcaggactttattgttagtattataggctaataacctgcagcagaaattcatactctattataataatggcttcttggggccatgctttggggaagtaaaatgtctttttgacatgccttt
